United States Patent Application Publication US 2004/0265849 A1 - sequence listing, part 11

SEQ ID NO: 7058 - DNA, 115434 bp, Homo sapiens
ttgttccatgttcccaccttttccaagtttccattaagcacttcctagccactgtgcaatgtgctttacgtgtgttctcttcattaaccttccatccaccccctttaagctcttttttttgtggggagatggagtagtctcactctgtcgccaggctggagtgcagtggcgtgatctccgctcactacaacctctgacttcctggtttaagtgattctcctgcctcggcctcctgagtagctgggattacaggcacgtgccactatacccggctaatttttgtatttttagtagagacgaggtttctccatgttggtcaggctggtctcgaactcccaatctcaggtgatccacccgccttggcttcccgaagtgctgggattacgggcgtgagccagcacacccggccaagctctttttttttttaatagatgaaaaaactgaggctcagggagattattcgattcctccaaggttaataagcagggattatttaaccaagtccatctgcagtactgaccatagtgctctgatgctgaaatgggttggaggctgaggctcagataagaggatgccagctgggaagccttgcctgggacccttacctcacacctcacagggcttgcatccagtcacccatcatcacatttgatgcacacaatgagacagctcctgaccatcagctccaggagggcagggaccatggcggtcttgctcctgctgaatccccagaatgtagtctggcagagcagagggacctaagtaccatctgaatgaatgaaaggaatgaatgcatgaatggatgccccagtgaaccatgctgatgtgtacatggcaaggatgattttgctaggggcttctctaatcagaacagagctggtgttggagtgagtgtcccagtgtaaccaatacctaatcccctgatttaagatgctcttaacagacttcgtagcaattggattacagcacgacatgcctgataaggtcgcttccactgctctgcctctttccagcccacaaatcagctccctgcaacttatttttgctatcataatagtctgctatttcccccaaagctgtataagagaaattggcatcagttccacctgtcttactataagatgtagtgagagcagactttggagaaacaactcatagcttggacacttagtttcctcatctgtacagtggtggtaataatagtattcttttcacaggattctggggattaagagaaacaatgcctataaagtgcttagccctctgcaatcactcaacacattttcctggaggaaaaggcctgggacaggcaccactggctaccggcagggctatgggcaagacagcaaccttctctggcccctgagcgtcccatatgtaatacaagaatgggagagggaggagtctaaggaaccattcagcaaatacttgctgaggatctactgtgggctcatccttgggctgaacactgggcacagagagataaaggagctgtggcttcgcccttgaggtgctcttgtgtggtaagagctttgagaagtgtgtcaagcattgtaggagcacctggtatgtacaagtcatattgaaaaacactttccatataagagcaaaatcaatatttgcaataacactgatgacagcacaactgtccttgttttagaggtaagggaattcaggtacaaaaaagccctccgtgatttgcccaaggtcacaaaggttgtgaatagcagagatgggatttgaacctggagatcaactctgtgctctaactccctttcttgcacaaacataatacgattctccataatgatgagacagactcaggagattacacttaggccaagataaataccggtatctctcctcttttcccgatatttttgtgctttctctttttctcgcctttcttttatctccctgcacttccatcaatattgtctgcattatctactactcatagaggcgactgcttctcttttcgttgctgatatcattcccactgacattgcaaggaagaggaaggttgtggtcctggagcagaagtgataactccagttgctaacatcctttctccagggatcccagagctggaaaaggttccttatgacacccggcattagacaaccttgagcctcttcttcctcctgctatcaggctaagaaccctgaggcatccccagatcctctccatctctcccagtgacatcttcttgactaaacccctgttcattccttccaccacaaaatgtcagcttatgaaacaggaatcgttcatatgtagcttgtttttaacctttgatattcccagccaaattttctagagaaagagtgaccctcataccattcccatccatgggaaaatgtggtcctcataccagccccagcagagatactgagacagttcagcatttctgagccaaacattggggggatcgcacagcacaggggttcaaagtaggagctctgcggccagactgtttgggttcaaatcccaactcttccattcactacttctgtaaatttgggtatggttacttccctatgtctcaatgtcctgtctgtttcaccaggagcatgatgatgatggtagtgatgatgatggtatctcccttacagagtagtgggaggacacaatgagttaaaatacaagcgtctaaaacagtttgacactcaataaacattagctttatttttctgtatgtcccatggcaaaggcatctcaaattcatctccattgcttttaaaggtacattccagcagataaagggaaaggagagacacttccaatgactatgaaatatttattagcaaaagactttttaagattgacataacaaagagggaaaataactctatgttactccatgagttgcaacatgttttcatttgctgcacagaacatgaaacatacaggttgcagttgtcttctggggaggcaggatgttggggaggcaggacgtttgggagccttattttacaaatgaaaggtgaagccacttgctgtggggtcacacaactagttaaagggaagctctgagactggaataatggttttctgcctggtatccagagtgcagctcaacttcttggttaaaatcaacacataggaactaaaccactggcctgctgtggtgacttacatctgtaattccagcaccctgggaggccaaggtggatggattgcttaaccccaggagttcgagaccagcctgggcaacatggtgaaatcctgtcttcatgaaaaatacaaaaaattagccaggcattgcagtgccagctaaccaggaggctgaggtgggaggatactgtgcctggtagtggaggctgcagtgagccatgatcatgccactgtactgcagcctgggtgacagaatgagaccgtctagaaaaaaaaagaaaaagaaaaacgcccaacacaatttattcttcttccttctgtcttttcaactgctccagtgtgttcaagtttccaggaacattcctaagggaagggaagggcattcactggccagagctggggagcgttaatgaacaattaaaagtggctttggtgaagaaagcaaacggaagcctgctgcatgcatgggagaataatattttccctctgaagagggcagtatgcaaccaagggcaagttgtgtactcaggtttttctcccaggtcttgcagtgcagccctcagaagctgaagcatttatttccaagagcttatttctgaatgacaaacatcttcatacatgaaataggattctggaggtttgagcacagttacacactgcctcttgcctgaggggacacagtgcaaactgatactaaggtggttatgtaagatggatggaagaaactccaacgatttctttttctatcatctgccctcccaaaccgtcctctatgaaattaaacaacagcacagcatttcagacggtctctgatgtttgcagaagaaagtgtttctttttctactaagactgcatgcagcctggtttctgctgcctaaagcaaaacaccttcttgaaaacatcctttgcacagaaataaaatgttgggactggggatcttagctcctgggatgcatttatcaaaccaatcacagtaattataattaaaacaaactaagtgagagctgagcatgaaacacattagcaggaaacctgaactgcatacaattaagccctgcttggtggcattttgaggtatgtcattaatacatttttggggtggagaagattgattttttttccttaaacatcttggtctagttgcatgaaaggcttcaacaacagttacaaaggaggaataaggatagacaccattaactgctaagattagagctttaagacagatggccaaaggtagcctaattggctattttttaaaaaatcttcctcagacacactgttaaatatgtttattgggcattaatttaacctatgtctgttttagggaagtaaagaattgaagatctttagggaaaacacagcttccattcctagcctcaatgcattaagtcagcagtgttgaaaacctttccactcttccccattgtctagaggagaaagtccgttttccttacaggttcttcattcaggtgtcgcctcttcagtaaagtccttaccatattctcctctcctaaacctgggctccctcgccattacaacaggtatcacactggtttttaactctatttatttgatctttctcccctgggtctccagcacccagcacatgacccagcacagagcagatgcttcaaaaacgttgaatgaaaagcgaccaaataaataaataaataaataaataaatgaataaatgaatgatctatccttctgggtccaccacaaaccaaatcctccaggtaatcctccatcttgccctaccctggatagatgtcagctggctctgcaatggaaattctggaagacttttacgaaaaatacatagaagagtagcttaggagaggcagctcaggttggaagggatgtgtgtgaggtagggtgtgtgtgtgtatgtgtgtgtgtgtgtgtgtagcactatgaagctccccattagaataaaagcacaggattttacttaaatcttatttgggggattgggtgggtgacgaccgactccagggcacacctgggtgtatcttcccattttgcctagggatgggagagcatagaagagatttttctccaagccacttcaaatatgtatatttttaatttctattttgagattgtagatccaaatgcagttctaagaaataatacatagacatgccatgtacccttcacccagtttcccccgatgttgacacgatggcaaccaggacattgacattgataaaatccacccaccttactcagatttcaccagttttatatgcgctcatttgtacgtgtgtgcgcgagcgtggggtgtacactttatataatatttctgaaagtggcttttcccttgcaatggagactgggaaggggtccagcctgatccatccctgccacggagttgactccggcagacagcagtctatgcttgtattcgtctctcgcacacagtaggtggccaacgaccgtccacataaaccctggaatttgtcatgtcagggcgcgtgcaggaggggagcgccacattgtaaggaagaaaaccgagactgaagtgcccagtattttggaagcaaaaatcaaacaaacaaaaaacttgacgatttccccccgaattgtgaattagctagccggctaattactccaaagcgatcctggtgtcggcactcgctgcgaccgccgaagagcgctgtttctgagccccgctcccggctctgccggcggggtaggggacgcgggggctcctcccacccctaccgccgcgttcacccctttcttccctggggctggactgtttcaccccgtctccaggcaacggccaggcgcaccgggcgggacgtcatttcctgaggagcccgtggggagggggcgggcaggaggagggacgagggggcggggcccgggccgggctggcaacgagacggcgtcggaactcgctggaagactcggcccgggtggctcaacagttcgcaaagtccgggcttgcggccgggcggcgcagaggcgcggaggctccccgggcggctgcatcccggggctgccccggacatgccccgcaccccttgtcggacgcccgcgccgcttcaccggctgccactccccgragtgctctgggactagagcgccctccgccccaacttctgactttggggtcccccagccctagaggaacgggcgcccggctgggggagccccgggcatggtgtgacggggcagtcaggtmagctttgcggcgcccccaaactccagccacccgtcgtctccgtgccctccagaatgtagctgctgaccccgcgccccccggactccagcagcagtctccgccacctccgggctccagcagccaactcttgtgtctctcaggaacccgccgacgtctccgcgtcccccggattccaggttcgcgacccccgccgtcttcgcgcctccgggactctagcagcggtctccgcgaccccctaggatccagccactgtacccgtgctccccaaacccaggctccagccgtcgtctccgcgctccyggggatccagctgtcgcgccagtacccgcgaggacagcggcaccgcccacaccccgcgcgctcagagcccggccgggcctcggcgtggagatgaacgcgccgctggacggcctgtcggtgagctcgtcctccaccggctcgctgggctcggcggccggggcgggcggcggcgggggcgcggggctgcggttactgtctgccaacgtrcgccagctgcaccaagcgctgaccgcgctgctgagcgaggcggagcgggagcagttcacccactgcctgaacgcttaccacgcgcgccgcaacgtcttcgacctggtgcgcaccctgcgcgtgctgctggacagtccggtcaagcggcgcctgctgcccatgcttcgtctggtcatcccgcgctccgaccagctgctcttcgaccaatacacggccgagggcctctacctgcccgccaccaccccctacaggcagcccgcctggggcggccccgacagcgcggggccaggggaggtgcgcctggtgagtttgcggcgtgccaaggcccacgagggcttgggcttcagcatccgtgggggctcggagcacggcgtgggcatctacgtgtctctggtggaaccaggctctctagctgagaaggaaggactgcgggtcggggaccagattctgcgcgtcaacgacaaatccctggcccgggtgacccacgcggaggccgtcaaggtaaggctgtggtttggagagagtctggggcagagtatggacagagtggcacagctttttcagtaactccatgctgtgtgtccttagatgaatcacttggcctttctgggcttttttttttttttaatactttaaaacaggaatgtatagcttacagagcaaatagctctcaggcactgggaacgtagttctgcacagacatggcccttgcctttgtgaggcttaaaagctagtgcaggtgatagtaacaaatacttgagcaaatgtgtggttacaatgtgtgaatagggctgtggattcttatgagcattaaaagagataaaatctctgcttggcataattaggtggcctttgctactgccattctgtggttttttgttttttgtttttccctgaaacagttttgttagctcttaagtggcctgaggaggccgtttgtgtgatccacagtgcactggcttgacgctgctgtttttggaccaggttgtgtatcctgaagcaagtcacttgccctctcaggacctcttgttctccacttggaaaatggggccactggaccaaataagcggtccctaacctttttggaaatgagactcctgcctgaatgtaaaaaataaattccctagcccctgagagtgtttgtcctttctgccatttgttaattgagaaatataacctcatgacaacaggcttccagggatttaatcatgctttttaaaggagtgtgtgtgcttactgatctacagcccagggctactgaaaaccagttggagtatgatggatagtgttgggtccagggtggattcatggatcctttgcaggcatttttcccccttcccccctcccccgacctcctttgcgtacaagaagtraagagtttgggggaaaagggacacatgctctgcttctgcagagaaatgcttctcagggggttggactgttctgtaaacccccactccccgccagcgcaggtgttttgaactccagctgagggcctgctggctgctgggaaactcctaggcagcagaggcccacgactacttcctcctgagtgccrttcagtggcctgtgtccaggtgagtcttgagccgtctccctggctgtgcacctgatgttggcttccctcatttgcttcccagcccatcaacccctttggaggaagcccttgaggctttcagaaacttctttgtagcttctggaaaaaggccgatcggtttatactgcatcagggtgcagtgggcaaagctcgttgtgagtttccatgcaacaattcctcttccccctctatcaatcttttccctttgtttagcattccatatatttataaagaagtagtccattagccttggccttaaatggtctggagttcccagatgataaatttatgcactaaagatacttgaggcaaatgatcatttgtaaatgtggattcagttttagtggcaatttaaaaagacttgggtaacttaacggtcacaaggtgataaggtgatatgctttggaaaggctgtcagttaccttgggcattcaaaacgcagactgtcccttcaatttgcaccccagactcagctgtgccataaaggtcaagctgcttggctgtgagtttcagtttaccagcagtgctccccgcctgccacccccgccttcccccaccaccatttcattgagcccgctccagatcttctctctgaatctccctcagtaacaccatggtgctgttaaactgtgactcagagcagcaccagcctttagcttgtttgtttactcttgctgcttccagagtaaaacctaaactctccatgtcatagtttttgaagcctgagaataaacccttgctggcaagggagaggttgataggagcagagctgtcctttaagtgtggcagcctgtggtgcaggagcctgtgtgagctgagcagctctgtctcttgactgtcattttcccaacagaggtggctacattggcaaaatgagctcttgccccagggtcaccccacttctagccatggcgggacacataacctgcctgacatggaccctttggacccttcagaagcaacaggcaaaatgatggctgctttgtgttacattaaccccaggaggaaaagaggacagacttttctttggtgggtggaattttaaaatggaggaggcggaacttcttccctgaggccatggcactcctcgtgtagtttcagggacagtttaaaagaacacctggagaactgttgacacatttccacaaaattaagagcgaaaagccccttaactgaaagctgaaagaggccccagcttttctactaggcacagactgcccttaaccaggatttctccacggggagccgttctttgtaaactgcagtgctgcgagtcaccatgtyggggattttatggtaaaagtacattactgttaactggacttcagacttcattcaaatttcaccagtttttctgcctatgtccttattttattctaggataccacattgcatttagtagaagatgtgttttcagtcttaacaatattttttttcctgcgatggaaggtggggtgagggggaggagatcctctgagcttcccaaacagagagattcagtgtgtgtgtgtgtgtgtgtgtgtgtgtgtgkgtgtaataaaaattaaattaaattaaattttaggaatcaagttacctaataatttatgaataaaggaaagttgcagctttttaaagagtgggtcgagcaaagttttttccacttctctttctgataaatcaagcatccattgttacctgaagcagttcagtgaggatttgatcctatatccattggggcttccacccctctcttgaaacccatttgcaaaatcagcagtgacaggtccagataaggtaagccatggactatttgcaattatgttgaaatgtttgatttttgaaaaaatatcttgaacaggagccaaactaataatartaaaaaagtagacctttcaaaggtttttagccaaatgtgcttgataaattggccagagagtccacagaccagggatgctgccttaggccctgctgcatacttcctgtgtgaccttgggcaagtcactgaccctctctgggttccagggtggatgggccaggagctgtccaagatcccttccagcttggacagtctgtgatttgcttggtatgtgctacacaggaggcatttagaatgtctaatctgatgtcttcttgttcttttgaaattgctttcatttaaggcagaataaggaaagttggctaaggattgggagatgaggatcttggcactcttgtgtagcatcctactatatcaggaaattgatgggttatacactgtactgacgagagcttgactgctgtctcttgacccacaaacaccaaccctggtgctgtttcggagcaaatgaggaaacaataggattctggcacaaacagcaccgccctgggagcattcaaaatcaaattcacttgctcacttgccttctgaatctcctggttatgcggtagcagaacacagggtagcggggcactgctgggatatgtgcatatatgtgtgtgtttcatctcaataaaaattaaacggcttcyttatggcctcagcacccccatgggtggattcaaggagcatattagaattgaaatattccagaagttaaaaactgttgccggtaatttcatttaattagagtgattgcaccctccctccctttgcataataacctggaaagaatctgtccatgttaatataagacattatatttagtccagcacgttctaaatgacacaattgtccttttcccattgtgcatggttagctgaagccattgcaaattattacctcttccaactttatgtctgaaatgtagcttctgccccggtcttgttcctgtgtccagtttggaaaccgtggcaccatggcatgcacagaccttcctctggccctgttttcactcttgggtcctgtgagtcctgccagcaatgacatgtagaaaagctcacttattaataagcccattattgagtagatttgtggctgctgcatatccatttctttaatttagtcttgtatatttagtaggctcaagctgacgctcaaggttttagaaaatttaatgcctaggtaggacaaaatcctctttcatctggttatttactctttaaatcaaagaagcattttgtaggatggaagagaatgcccttaaaaaaaatcggtatttttatagaaaattattgcctcctgacttgaagctggacatgaaagagatatagaaccacaccagcgctagtgtcttgttttcctgtcattctcctctgctgacaaacccagctttgtttattacttgccatcaattcatcagttggttggagctgcaaagataagtgtgattctttaaccccccgaccaattggattgtccgtgtgttgctgctttccaactctgcctgccggcagccgcaccagcggtacacagcctgcctrcacctgtcagtgcctgcagcccctcgctcatgtgcctgactgctcaagcttgaatcacatgtacagtctcctcagagtcataatcccccctccatcctgcaaagggctttgcaccgaagyaggcgtccataggggattaggctccaactggtgatttcttgcaaggttcttttatgacctggaagggaagcctttggtttacccttctcagggaccccagactaatcctcagccaggaccagcgaatctgattggaaagaatgacattaaatggctggaggtatctggaggttgaaatacaaatctttcaaaactgacttcttttttaaattcctgaggaagaatctgatattaactctgaactcacgcagacttctaatcatgcccyagggtaggggtgatttttaagattttgtgctgctgacattggccttttactgttaaagcctggcaagcggaaagggtgcagagaataggaatcactttctctccattctttttccgtgcattcctgatgtcagctgcaggaagcagcatcatggggcaagtgcacttgtggttatttattttttcaatagactatttattaaagcagttttcggttcacagcaaaattgaacagaagatacagagatttcccatatagtggacacatgctagccgcccccattatcaacaattgatgaacctacattgacacatcattgtcacctggagtatgtaatttacattgcacttgcactttactttattggaagcctgttgggaacaggggagactgacattaacgattacctactatgtgctgggtgctttgtccctcctgttccctttaaccttccccaggggaggcaggcaggcgaggagggtcatgctcaaggagatggaactggggagcttaaggtccccattgggattaggaaccaagtggcctccttgcttggaccccagcccaaggattttgtagtcagcctcctggaagacaatgccagccagtccgcttactagaaagtgtggcagatgtcacattttgtacttgacatttgagggccttttaagaaccacccagagacttcaccttactaaggtyggggggcggtctgagacctacatatcaagggagagtggtgtatttcagcctgttccatcgtcragtagagacatgcatccatacattctctgagcagtgcttaccacacacaggcctgtggctgatacttggacatcagagatgaataggacatgacctctgtccttgggggatagagacccatccgtggccacaggtcacccagcatttacagtgctgtgacattctcatgcctctgcatccctgccaccctctctgaagtagtacccctacctgcccactcctctatccttttgcctggctttagtgtcctgcagcccatttgtcactgctaaaaggaaatttctgtatgtctttttatggtctgcctcccccattacaagtttgctccaggataaccaagatttgatctgccttgcttattcacgcatccccagctcccggcacacagtaggtgctttaatatataaataaatatttgccgaatgaatggaatgatcttgctcctaatccagcgctagtgaattcagaattccccagctcctgagagtgagatctgatggaagtctgtgtatggcagcgttgtgggtgctagacaaaaacactgaaaaaagccactggctctagtgtgtgctttaccaccaagctggctttgtggccgtgggcagttcacgtgacatctctgaacctcagtctttggagctgtgaaataggcataactacctcccacctgcctccttcccaggtggctgtggggagcaaatgactactaggtgtggcaacatttggaaccctctgctatttgagtgtaaagcctttaaaaaaaatgtggtctgtgcctggatactcaatggcttttctcctcccctgaagcccagagccactctacaagaccctttcagctagttcatttgtcactttgctcttaattttcaaaccacatccccagaagtgggttatttcagcagcctgattgtgtctttgattccaaaatagaattatttatgcattctgaagcaatcaatgaaccaattttgggtgagatatatcttctggcttttgggcttctttcttttttttttccttttcttttttttttttaaaaacaaaaaacaaaaactgttcaggtttctagaaacccagcattttgggtgaaggccaagtttccagtaaccacacatatgcttaaaagctgctttattctctgagcatgcataaatggatttattttttcttcctttacagtcccagcacctttggctccttccccgtttgagaatttgtgttccttttgctaaattggctgtggctttgcttcagttagcagccagtttcgtcatgatttttttyctctccacckgagtttcctaatatcagcatcctctcaactctgtatgcaaagcaaatatatcagccttccataaacaggtccccaaatgtcctctttcctggattctaaagctgtaggctgcagggaagaacagagtaaaatgatgtaaaaaaggatattcccaaatacctgtgtgttagagccttagaagtggtaatttacaatgttagcttgcttaggaattaacaaactccccagccaggccttaaccatgctaaagtttgggaaacactgtcttcctttaggattcctccatccccaacactgtttatccccataaaggcttgaccagagaggtgaacctttcctgtccccatccttaactatcttgcagcaagattccacttgtgtaaggtcaactgacgtactggaaaatctgaggaagggtggtatgtacccaagaggttagagatgggttttggagatggacctgggttcatctgacrgtgtaacttggctgtgaccttgggcaggtccctttgcctttctgttactcagatatcctaccaccaaacctggcccatagtcctcacaaacatgtcattgttgctgttgaacatcagaaatctggaaaatatggcagtggaggtcctgctgcaagcattgtaatgaaaaatggtatggactgccttcgcttgtctttgaaagtcttctgttatgcctgcttagtttttttgtttgtttgtttggttggttggttggatttttttaggtggcattggaagaaaatactggactcagggcccatgtgatccactgtagctgtttgaattgcagagtcatttactgaatgtagtcaatatccccacatagacagagtttctttaaaaacgtaattgctcctatctggcttttggcatcggcatttttgctttatagcagtaataaagcctggtggttgaatagaattctgtgtccccccaccgtcccttctgatgatctgtgaggccttatagcaatgtgggtggcataccagacagttgcatgacccagagtgtgacagcattgtcccctggatcagctgcatccataacttcgtttcccagcaaccttccctgatggcctccccagggaccctgatgaggagggagaggaggtggctgtttttagagcccattaaagcaattaatgcaggtgaaattggtgatttgttaacatgggcttctgcacttaaaaaaaaaaccctgtaatttatttgagctacatctgaaaaggtgtacaaagtctcattaagaggtttctgattaagaaaagaaacgtggtccagctttcagaaattaacctcccatgtggataggaaaactttgaaagtcaggggagggattttccttctgccatgtccatcctcctgtccctggacggaggggtggcatcctttgtagtgtttggacccagtgtacccttttccttttcttcatctctttccttctgcctccctcttctttctctttagagaatcatacatttctcccaaattttccctgactctcttgagcccctctcctcctgcaagtccttccaatcctgagatttttaagtctgcttctcaggtccatatacatgtacagctctccctcaaattcctctttccccaaatgtctgcatctccacccatcttctagccttgttgtctctgcacaggatctgtgcctccttttagtgtatttatctattttttaattgccttctcgttgtgctttctctcgctcttaaattgtggatatttcccctgctcttgttccccactttctcccacttgagtattgcaccagccccagggaggctggactctccaggctttacttctttccagcacttctcagaccacacctccctcttccccgtcaccaccattgccaccagcactgccgaactgtagcatcctcctggccagcctgtctgtctcctgtcttgctcgtctgcccaccggtctgatgtccatcctgttgaccgggtacactctctaaatacatatctcatcaagctgtgccctgtctacaaccctgctcttgagctgggagcctgcagggcagacgccaagctcctcaacctggtgtttgggctgcccatgctctgatctttaccagcagtcctgttccccaagttgtgtccactcttggccaagcaagcaacataccctcctctgaagcaaggctttcactctctccacctgttgacaccacttatcctgttaggtgcaacctcagtacgtcctctccagaggacctgcctgctcacctctgccgctgtccccaccctgaggagcctgctcttccctcctgaaacccgctcccccccgcagtgtcatggcctttctcacttctgtcatgacacagataatgcatttcttggtgttttttttctttgttgctcattgtatgataataacctttgatagagggcttagaatgaaccagacactgttttcagtgtaygtgtataaactcagttaagcctcataatcaccctgtgaagttcaagtaggtatcattttcatcactttgttttccaaaattgccaagagtttgtcacttgccagtcatcccaaaggtggaaagtgacagagccaggatttacacctaggttttgttgacttgaggggttgcgtctytgccccaacagcagagagaagggatgccccacagtgctcgagcctgagctccgaagccctgggtttccaagactggctctgccactttctagctgtggggccttgaaccagcttcctaacgtctctgattctcagattcctcttcagtgaaattgtratgggaataatagtaaagtagcagacaagttacttaccttctctgttcaggtttcctcatctctaaaatggggatactgatgattatgcagacaatgtgttaaagcactgggtgcatctattggtctgaacatttgatgatcatttaccatgttcaaactcctgtgttgggatctgttttcctaccagatgctgctcttcctggcagtgtagaaggtacaaaacagataacacgcacaagatgtttacagtacttagcgcactaaaaaatatcaccaccactgggaatcttctgtgacatcacaagctctgtgtgggtttcatgtaaatcccccactgacacttcaccatacccccccgggagrggactctgagaattggaagaggaggtgacccatcacgggcacacagtcaggggcacacagtcaggggtggtgggactaggatttgaacccaggtattctggcctccaaagtgcatgctcattgccagggctctcggctggctgctaacggagaagcacggcatacagcccagcgtggtgctggcaagagcaggagttcagtaaatgtgcgtttcctccctgagttttttccttgtggaaatggctttgtagctatttgatgagaaaacctaggctgcagcttccctgttctcccctgggcacactgtatgcattttattgactagatttcagggacagaggtggcattgggcactttttcctttttgtttttttcctttttcctctctcttatctctctcaccatgccttgacctttgtcaggtttttattttgtacgttgtctgtggaaattccctgatagataactggtgacttgtgaaattatctcattgaatggtggagtctctgaatttgtctacactgcctgatcagcacacttcaaggatgagaggagggtctctctcctgggcctcatgtgaaaggctggtggtcattaactctgctgtcacagactggacaagttaaaggggcattttgtttggtcataggaaacaaatggaatagaggaatttgtctaggctgttaaataaaacgttttttctccccacccccccacccccactttttttttttttttaaaaaaaagatagggtcttattctgttggccaggctggagtgcagtggcgcgataacagctctctgcagctttgaactcctgggctcaagtgatctgcttgcctcagcctcccaagtagctgggactacaggtgtgcaccaccacacctggctaattgtgtttatttttggtagagatgaggtctcactatgtcgcccaggctggtctcaaacttctgggctcaagcgattctcctacctcggcctctcaaaacactgggattacaggcgtgagccactgtgcctagcctctttattttaattacctaacatatatggacttaattgtttttctttttttgagatagggccttgctcagtcacccgggctggagtgctgtgatgcgatcctggctcactgcagcctcaactttccaagctcaagcaattctcctgcctcagcctcccgagtagctgggactacaggcttgcgccaccatgcccagcatggtgtgtatatatatttgtgtgtgtgtgtgtatttttttttcttttgtagacgtggggtttcaccatgttgcgcaggctggtcgtgagctcttgggctcaagcaatcyaccyacctccacctcccaaactgctgggactacaggtgtgagtcaccacgctgagcctggacttaatttttaaaacttgaaaacttcagaaaaacgccaaaagaccctccccaagtcagtaataattgtacccactcacctgccagaaataatcactattgacaattagagtaccctgtgtgcatctgtgtatgcatttgtattgggaattcttcccaaagctgccattctgagcatcgttatctagcctattcgttacaccaagcgatgtatgatgactgtgttcccaccttgataaatgtttctacastgtgattttttaatgattgcataatatatcgtagtgaagaggtacatgatttatttaactaatttcttcttgttagacagtttgttttttaatattatccatattgctgctttagacatccctgcacattcatctttaagcacatttctaataattccttgggctgtctttctagaggtggcattggctcgggggagaggcgcaattttaaagcttctgattaactgttgccagactgcccctgggacggaatttgttttgtatattccctcccaccagcgtttaacagcagttgatgctcttcatttttctccagccatgccgacactgggtattatatttcttttccatttttatcaatctgttagacaaaaaggtatcctgttttaatttacataacttaaatagtgaagttaagctcttttttttttttcaaattacaaagctacttttaatactttggggtgagcgccacaggaataaaaaacactgggaaggggtaaccttgtcacccygggagtgacccaggaggagagaggccacctgatgggggaaggaagcacaaaagggacccgctgcagactcagggcaaagggaagccatcagggctgggacttgtgggccctgcaggaggagacgtgggcatggtgggactggctccaggcactcaggcaaagggcgggagggttggacacgaagcacaaagctacttgggttcctgctgcttctcgtttgcctttttctccttctgctgcatgatctccaagtccctctgcttgcgggtggcggcaaaaagcctgtcatcttggtgctttcccttaaccgaggcgcgctctgctttttcatactcttctggtggggagctcttgctggttaccacaggtcatggtgatggcagcggctccgacctgcctccgttgcatcccctcattctgtcccatgttgcagtgaagttaaactcttttgcatgtttattgtttgtgtgtgtgttcatgtatttacacgtatatatttcgtgcataactgactgatatcctgtgcccatttatcacaagagttttgcatttcagtgtcatcaaatctatcattatttttcagacatcggccgagtaggtttttaggaaatggctgattaatccaccttgaattcagatttttcatctgagcttgaattaaattggaagcccatcaccttttcaactgagaattgtcaaaaagtgatgaggcacagggatgtcaagagtctgggaggagactaaatcccatcaacgtatctattcatggaatgagaaaaygatatggatataaacagatattcctgatggatctctgtgcttcggacatcgatcccagacaacaaaatgtgccattgcaaacccattggggctcatcttgagtgaatatatttatgactctgagamtcttgttcttccttaaagaaaaaaaaagaataaacagacaaaacttaaaagaacatttataaagcaatttacttaaattataacagactaaaagccaggctttgaggataattgaagaattgcattaaagaggaatcaatatctttctggaatctgttctgtccttatgagttgttttgcaaaggggtggacagcctatctgtcactttgttgcaaatttcttgtagcattattcccaaggtcaggattttatccctctctttgaaggtttatgtttttttcttttcacacagccttaactcacccaaacatttagaagcaatgacagtggagagcagggactttaaaatgtcaggtctttcttccagcctctgagatcccggcattcgcagcatggaagcaaaggtttccttctgcatccttacattgaaccctcagagaaggtcaaactcttaaagaaaagagggtggaaggaatgaacagttggtttttatatcttttttaaaaaaaactttttctttaaatgttcttctttccttaaatactctcctatccagccgttggtttttaaaaacctacttcgtgaggcccaaattaaaggcatatctaaatagcattaaagaaaaccagaaaaggggagaagacacccacgttcccatccttctaactggacatcatacatttctctgccatctcccctggcctttatccttatgtattcacatttcctcaattgtcgaatcacctgcttccttgcatttctttttgacgtatgttgtcattgcgtttaatgatccttatgttgggctgcatttcagggatggggtcttggatgagttcacaccaatgctctgtggtccactcgatttaccctgggatgcagcagcgcaaggaagcgaggtggccgcacagagccggagcagatggaccgtgtcgtggcatggctgtgtcgcgggtcctggctccctgatgagcacacagatgttgaggatgctactgtgaagccacagttctttgagaaacagaattcttaccacaccattgcccagttatgtcatcattccaaaataatataagaataacaatttttggacttttgtttaagagaatgtttacaaatgacgtgttcttagaccaaactcagtagctgcagagcctttctatagagtggagggagagaggtaggaggagaaagcagaatgattgcccaagcatctgtaaaaaggatctccatctccagctgcatagaaaaggtatctaattctagaaatgtgcttagattttagtgtttattcactcagcagtggttttattgagcatctaccatgtgaatggtgtagtttaacccccgctttaaactttacatatctcatttgcttatttactaatacatttataattaagattcttacttaagtcaaaagtaatggagtgagttaacctgaaaagcacttcattaaaaaggtagaggaatcagaagtgatcttggaaagtgtgtgtgtgtgtgtgcacgcgtgtgtgtgcgtgtgtgtgtgtgtacgtgtgtgtgcgtgtgtgtgtgtgtgtatgtgtgtgtggtgcctttgataggaacagtatttatattgaaattgaattctgagccccctagcaaccaaggcaaaaggagaaattaatggattatttccattctactagagaaatcattggtaacttcaggagaggtaaatttccttattggtgttcaattccaagaagaaagcatcctttcatttcttcactgtctctttatgtggaatctcttaccatctcctatgttttctatttattgatacatctctgatcaagccacaacaatttcttgccttcctggtcaactgagaagagtgtagataataaaataatcatttgcataagtaagtatgttgagatatgtactttcagggacagagcatcacgtgcaaaggcctgaagtggaraagagcttggagtacttgatcctataagacagctcaggtggcagggcaggagatgaggctggccaggcatcaggaccaggcgcacaggcccaagatgcactgtggggagttttatagcagaagcaatggggagagtttggggcagggaagggtcagagtccacgtatgttttataaggattctctggttgctctgcagtgactgggctgagagaggaggctgggaagctgttgcagttagtggtccctgtaagaggtaattaacacagatgaaaatggtacagatggaaggagcttggaagacagagtgctaattarggttttactttctcatgacattaaaatatgctactggggcagagtccgcatcaccaatttctgtcctccctcaaagcagggctaaatgggaagggactttccagtccatgtggctggacacagcacctgcttggggttcaagaccctaagggactttcttttgtttacatcctgtgaggcccatgtcctttttaaaaaccctcccctgtctgtcttgggccaaggtgtaggattggcctggtgtttaagggggtgtgaatccccttaaactgctggtgagagggcaatggagagaagcgaggagagaggtataaaagccctgccttttatcttctgtgaccgtgcatagacacttcaccacctagaatcgctttcctcatctgtgcagtgggaagaataaaatgtggcatcatcgctgtaattttgctgttactaatgctacccactatttgccaagcacctcctgtgcgccctgcccagtgcaagatgctttatgcacattttctcattggccctcattcagtttacatgacagctccatgagcataggcgttatggccccttttaataggtgggaacactgaggccagagaagttaagtaacttgtctgaagtctcatagctaggaaggggttgaacaccgtttgagaatggctttctagcaactgtaccttccactggaaaacacttttgagggagttcgcaccctaagacaccaccaggttaccgttttcattttggtgctttgcagtgctttagggcccaagatttagcccccagatgattggaagatagagccaagatctgcctaaactgggagctttttggaaactgtggaagaaagcacgaaggagtgtggatctctccaccagagtgagcactcccttgggagaaggacattgcgaggcctccacccagccctgtccacattgtcaggggaattcaggtcctctgtaggcccagatggcatagtgcttccccctgcaggtagatacaggaactacaaaagggataaggcatgccccaggggacactggcaaggaaatgtgattgbgaataaagactcactgcctatggcttcaggaattccatttttctctagtttagggaattagatgcatgaatgccccaagatggcacatacaaggatgttcatygcaggtgatggtgctagcaaaaaatgagaaacaccctaaatgtccattgataggagaatgaraattcggtagtggtgagtcccttccagggaatgggatggagtattggaagagatgagctttatgtcattgaactggtaagaaaagatcttcaaaatacatttttagtggaaaaaaagatggagcagaaaatgttcagttgtgagttgatttatgtaatcagatgataagcttgtatatgtatatatacgtgtttataaagtacaagagcaagtcaggaagggcagacatcaacacatatcagtcgttaccatgggtggtgggttgagacttccactctgggttctgggtactgagttctctacagtacccagaatttcttgttagacaaaaaaaaaaaaaaaatttttttttggtatctcttacctaggttccaggtgctaaaccttttatatatatattgactaatttaataatcagaactaccctgtgagataatacctctgttatctctttcactctcgctctcttttttttttttggtatctcttacctaggttccaggtgctaaacactatatatattatatatatatatatatatatatatatatatatatatatatatatatatacacacacacacacacacacacacacactctacacacacacacacacacacacactctacacacacacacacacactaatttaatcatcagaactaccctgtgagataatacctatgttatttctctctttttttttttttttttttgcctgggaagctggggcacagattgggtaagtaacttgcccaaggttactgttggcaggtggcagagctaggatggaattcccacagcctacctccagggctgtggctcttaaccacactttcttcacttgtctctccaaattccatgtgtatctaatgtgtctatgctcacattaaagtggagaagtgtggactgcctgactactgatctgaaagagcactgctctgtgtcctaatttgaacagattcctgaggctgtctggcatatagaaaactcattgaatatcttgttcaacgatgaatgaatggatggttggctaaacgagtgaaaaggagcagggagaggttctaaaggaaacagaacatgtaatgtgcctcaaggaacttgtcttgtagtcttaaagacaagatcacgaatgtgactcagagcctgtggtatagacggcagcacaatcacagaagtgtgctggatgctcttggaggacagagtcagccacaatctgggaagcttttctggaggtcgtgggaaaggagctgagtgttgaaggcagcgcagatacgaggaaatgtggattaaagaaggatgtttcttaaaaagaagaaagttgggggacaygtgtttgtgtccatatagattcgaggtttagagaatttctgggacctctgtttgggagaaggaactggcagcctcaggaagggaattagcatgcatttagtacctaccatgtgctaggtactgtatacgcagtttacagtttcttaaatcttttcaacagttgcttttaattttattattattttgagacagaatcttgcgatgttgccccagctggagtgcagtggctcgatcatagctcaccgtagtctcgatcttttgggctcaagcaaacctcccaactcagcctcctgagtagctaggactgcaggtgcacaccattatgcctggataattttaaatttaaaaaaaaaaawtttttttgtggcgtctcaccatgttgtccaggctactcttgaactcctggcctcaagtaatcctcctgcctctgtcccccaaagtgctggggttgcaggcctgagctgctgtgcccaggcaacaattgatatttatatacttatttatttagagacggagtctcgctctgtagctcaggctgtagtgcagtggtgcaatcttggctcatggtaacctccgcctcctggggtcaagcaattcttctgcctcagcctcctgagtagctgggattacagccacccgccaccatgcctggctaattttttgtatttttagtagagacgtggtttcaccatgttggccaggctggccttgaactcctgacttcaggtgatccacccgcctcggcctcccaaagtgctgggattgcaggcctgagccactgcgcctgaccagcaattgctttttaaatatagaaacaggcacagagagtttaggcaattggctcagtgtcacacagcaagtcatctacagagccaacaccattgtccggtgagtctgaacacacaaagccccagctaggcaaggtgcggctgcgaagagcaggcatgcataattttttcctcccttctgggtcactaagatgggtcttagaccagttctccttcctgttgttgagtctctgtttccgaaaagagaaaaccttgccctttgaggtctgcaccctgaaataagctgggtgactcatcattacgtgtccttgcttgagacttttttggaatacctctgttgcacgtgctcctcagcacagtgatctgatagtcttgtgaccttgaggtccaccccatgcttgcctttggtgtatggttttgaacacagaagcatgtgtgcgtctgccatgttaacacatcccattagccccctacactgtgaccctctccagtctatttctcactcctctgctaagcagagaatcatgtcagcctggtctatgattttggggtttcagagttggctccaaagagctgagtgaggcaaatttgcctcctgagagcattaatccaagtagcaagttattaagtttgaagacatacacatataatttacatttccataatcataacgtgctgccagaatagtcatctggtgatggatagtatcttagtcgtgccatctgctgggtcagatcgagatttctctatgatttgagttggtggaatgccccagggtcaagtttcaccagtaaacacgtgataacaggtatgggaacacagcactctaatgaccatccctgcatgcggtgggctctccccagatcttgcaattttccttttcagccgtagctcgttgaattcctcagtgataggcattgtgctaatagggctcctctaagtaaagagaaaggagaatggtgatcttcattttgcaggagagaaaacagaagaacagagaggtttggtaacttgtgtgaggtggcacagctaatatgccattgattcaggaagactggtggatcctgtggagctgtcatggctagagaggggtgtggttgatggagagtcactagcgtgcagatggatgtgttggatgtgacttaccacctgcaggcagcttcctacaaagagcaaggacacagccrtggcctcggaggggcagccctctggccttcaagtcctgtcaaaatctcctgctgctgctgatagtgccgagttggggtgygtatcctgccataactgagatgctccaattgtccttctggtgttttcttaaaccctgtggaacctcagagcccccaggctctggatctggttcagtgacctggtagcaacaccagccagcatagctcaagtgctcactgctgggatgggagaaamtgaggacagttttccaggcccagaagtcaggtgcccataggtgcaaccctcagcctgcctggagttatccctgggtgtccyagagcccctgatctctctgctttaatgacctgtgaccaccatgagagcaaatacagtctttccttctaaatacagccctgaatcagaaagacatagaagtttaacttgggacaggatcttagcaaacaggtccaacctgctcattgccagagggcaaaaccaagacctagcaaggggagaagtaaccctaggacacccaccaagctaatggcacaacagggacctgcygggtctctgtctcacaggctcaagctctgctgcctgaggctactcactctgtaggctgctctggtgagagaagtaaaatgagtggtctggtgcacgtaaccatgggtgaggatctcgcgatcccccaggtggcctgagcctcagggatcaaggtagcaatggtgggtgagtttgaaaggctggcagggtggctacaggggaaaaaacatgaccagctttgtttaggaaataactctcctgttgaatgatgtccgttaaaataagcaagcaatggtttgtagaaatggagacaagaaggcagtaggagcagagaccgtcctcttccccttccctgcatgacccacacacattttagtggcattaaacagcaatggatggagctgttcctgcaggattctgatggccactgcaccaagaccatatcccaagagcctgcgtagatattgaaagtctgtctcaggaatcttgtttatcatcagtttcgccagaaatataaaaaagcagtagaggatgatgattttcttgctctccaacacccagaaaaagcccatatttatccctaaagaatagtcattatcagaggtagatgaatggtctacgcttgagtggctgtctgagtttctaatctcagagtcctgtgatggggaaactgaggtgcagaggggaaggagacccagggctggcctcctgcgtcctgggctgtgcctsttgtactcctgaaccctatgtttcccttcccatcttgsggcttcagggtccccttctgtaaaatactgggggtgggcagcctgtgggagactcagcgacttggcccaggccctctccggcgctggctctctgtggtgttctcatcaagggcattaacctctccgttcgcaaggttgctgctggcctatttatagaactgaccaagaggattctactgttgctggtgataaagaatacaaatgatgctctgcgcattgttctttattctttccttccctttttttttttaaactccttggtcaacgttttgctaccgcatggttttcgatctccatgcagacatgctgagggggaggggagtgggctctgccatttgctgagctcctactgtgtggccaagaaggctctgaactttatgcacattgtctcatttaacccacggtgccctgggaggtgagcattgtccttctccccagttcacacatgctgctttgcaaggggaagcaaccggcccaaggactgtccactggtaagccgactggaatcccaccagtgcgactggaatcccattttctctgtctccacaatccacgtgtgatttttccacttgcactcctctgttcctgacctgagcataaccttccagactagatgtgggtgcaggagaatgcctgtggatgttaacggtttcttttgggggcaatatttactttcttaatcaatcaggcagtcttttttcaggacctactgtgtgccggatgattctttatctctcaccaggctgcaagcatcattgaggacctactgtgcaccagatgatgccttgtctctcaccaggcatgtgtcgtgaagaccttctatggacctggctatgctttgctcttcactatgcacaagtttcacaaatacctactgtgcgcaggacaatgctatatccctcaccaggctcaagtgtcataaggacctactgtgtgccacacgatgccttgtctctcaccaggcgtgtgtcatgaaaacctattgtgtaccaggcaatgccttgtctctcacgaggctcaagtgtcatgaggacctactgtgtgccaggcaatgccttgttcctcaccaggcataagtgtcatgaggacctgatgtgtgctgggtgatgcctccttgtttctcaccaggctgcagcctgtcatgaggatagacccactttgtctcctctaggcttggcacacagtaggcgtttggtcagcccttgttgaatgaatgctgtggtgtagtgttgcagtctgtctaggaaggagcagagaaggaggcaggccgggcggaacagcactggagcagggagctgtgccctcatggaagagggagcaggaggcagagacgagagggagaggaaagagaggtcaggaagacaggggccatggaggatgtggtggcctcagaggcttctgctgrcgtctcctgtgccctgaaccactttccactttgctctgggggaagcccacttggtctcaggctttctccatcctgcctcttcaccttaacagggatttgattttcctgactgttctgccaggggagccctggggaatgctaaaagaatactgtaaatcttaccctgtgcatcttcacaaaaatcttttataaaagcagaattttggagagacgccatcctcgttatccctccactggagactgggatttagctgtagaattgagggcctgggtgcctcctggctcacccttcctctgctgagagaggctcaaatgtcagggacttgcctcttcccgcaggccttgcctagccagggctccctcctgtctttgaaagctcagcccagggtctagtttgtctgttgagagtgttggggagttggtagagctgtatgtgcaaattggggcaagcttgggggacgcagagagctaagtgttcaccccccttcttaggcatattgtttttttttctctgatattgaaagcaatgtgacctcattgtggaacatttagaaaatattgagaaacaggaagagcaaaataataatcacccataatcctagcacccagagagaagcactgctagcatcttggcacattacttctcagttttgtttcattttgtttttccagtatgatttttctcttaacataactgacttcatactataagacatgatttatagccttttaaccccacttaacattaaaatatatcacatttccatggcattacaacctttgtaaataggatttcaatggcagcataaaatttcagtgtgtgtgaattctatcatttattcaaacagccagatggtgctgccataacaaaataccatagactgggtggcattagcaatagacatttaatttctcacagttctggagtccagaagtctgagatcagggtgccattgttctcggattctggtgagggcccactttcagacttgaaaacttccatcttctcattgtgtccccacatgaagagagaccagaactctctcttcctacaaagctactgatcccatcatgaggttcctaccctcatggcctcatctaactccagttaccccctaaaggcctcatctccaaagtaccatcacattgaggatagggcttcggcgtatggatctggagggaaatacattcagtccctaacacaggctatgtttattgttaatcctagtgcttrgtgagtgtctccttgggtcaatgtcttcatctcagctgcaagcgtcttgtggtgaagcaatatggcagacctcagcttccaccccaggctgtagagttttgggcttgcctctcctcacggtggttccatctgaagactgggaaatgtacaataaagatggtgttccacactcagaattagttgctataaaaaaggaacttctttttttttaattaattattactatttttttgagaaggagtctcattctgttgcccaggctggagtgcagtggcacgatctcagctcactgcaacctccacctccagggttcaagtgattctcttgcctcagcctcccaagtagctgggattacaggtgcccaccaccacgcccagttaatttttgtatttttagtagagacaggattttgccatgttggccagggtggttttgaactcctggtctcaggtgctctgcctgcctcagcctcccaaagtgctgggattacaggcgtgagccaccacgcccggctgagaaaggaacttcttactcactgtgtgggcaggcagtttccctccatttcttcatctgacaaatgagatcctccttcccctctgcagtccccctcccccattggatttcattaggatttcatgagataatgcatatcaggtgcagcgcagagtggccgacacatacaagccctttataaatgttaagcgattgctatcattgtttttatctgtcgactctgtgcttggtattttatcagggtccccaagatgacacctgggttcagtgattctctagaaaggctaacaggattcagcatatggttgtacctgtggctagggtttattacatccaaaggatacagagcagaatgatcacggggaaagggtgcattgggcagagtccagaggagaccaggcacaggcttccacgggtcccctccctgtgagttccacagaacacactaattcctccagcatcaaatggtgacaaaggtgtggratrttgtctatcaggggagctcaytagagagcacccacagtttttattgggggctggtagacatagaccctgtctacttgtacccaccttccagactcccaggaggaaagcaggctgagcataaaccattactgtttacagacagtctaagcacatgagccgcatttctcagtcagggaatggtgggacactccccaaatccaagttccgagatgccagccaaaggccggccttgtaaacgagccttcctgaggataacagtgtcaggcctgcaatgcaaactcctccgcagaggtatcctaaaagatcatatttcttgtatttggaccacttcaggatgggggtgggacagatgttcttgttttcacaggacaaaatcgagggctagagaaggaaagggacttcagggctggcctcttcttccatgtggggctcctgagaaaaaccaaggtctgggccaggggagggtgttcctccacacccccggcacctcccttcctctaacctttgtatccctctctccctaggctctgaagggctccaagaagctggtgctgtctgtgtactcagcagggcgcatccctgggggctacgtcaccaaccacatctacacctgggtggacccgcagggccgcagcatctccccaccctcgggcctgccccagccccacggtggtgccctgaggcagcaggagggtgaccggaggagcaccctgcacctcctgcaaggaggggatgagaaaaaggtgagtggggtggggaaaggaggccagcctctcagacaccgtattctccctccgaacccagaacagcagagctgcttggaggccgcaagaagaggctggttctgtccaggctctgtcttccctcaagtctgtactgaagggtggtgttttttctttgcttttctttttgacctgtgtagtgtatgttataatacaggctaagctgccacaataaaagagcttaaatactgtgatttatttattgattggcttatttatctatttggagacagagtctcactctgtcgcccaggctggaatgcggtcacgagatcctggctcgctgcaacctctgcctccagggttcaagcaattcttgtgcctcagcctcctgagtagctgggattacaggcgtgcaccaccatgcctggctgaatactgtgatttaaatgagagtttttttttttctccgtcatgtaacagaatagagggacagtctcatctgggggacagttctgctccaggacttatcctgggacccagattccctccatcttccatcccccagggtcttgccccttctcgtggttgaagctgggccacatcaggtcccctttctacctcccaggaaagggaaagagaggcatctctttaatttcaagatcaccaaacttcccactggcctagacccaggtgcatggccacacatagctgccaggaatgtggccaggattgctgctccacagggaatcttgtgcagtgtgaatcttgggcataagtaacagaaaccagccctggccattttacagagcagggatgtactggaaggayaggggcagtcccagaattgaagccgagaatctcagggtgcagcctgcagtagggggatgtccaccattccgttctcagtgtccttcccctgaagattcccaaagagggagcacctcacgggctggcagggatgtctagggactttrattgacaagaccaccaagactgtagccagtgggagaggggtggttgcccaaagcactgtggggtgttctaacttgcagaagggggcagggacaccaatagatgtcccctatggagccctcctgaccccagacctgtactgtttcttgaaacacaggaaggctgaaatggtccctgatatcttacccttctctctgggtgctgtttgcattgcaccccttggttactcctggaaccaagaacatagctcctgcaggcagctccctggtgtgtaggaccttgacactgactgccaggaggccacatggcttggggctctgggccaagtgccatgcctctggaaactctttctcagctctccttttcctgtcgataagactgtaacatttatttaatrtgttttgtgttctttgctgaaacgtcaatatgcaggacgcggcagagatcacagcagcttctattggaggtgagcggcagcaggtagcttgttggtatgcaccacagcagcccgggccgcgtcaaggttgccagggctgggtgggctcgtaccctctccccaccagggaacttgttctctgacaatcttgagagaatgctgccagtggttattgagtcatgatcaagggcagctgtctagtgttgggcacagaacttgttttatctttttctcagtcccttttctatgcagggcatggggtgagttgagcttatcattgatggagagcccttgtgtgcccagccctgtgctcacagtgtcttcctgagtcctcctcgcagccacactgggaggtaggtgtcatcatccccattttgcagatgaggaacctgaggctcagcgctgtggcaaccacagcccagccagcaagtctcctagtgtttgctgagcacctgggtgcttgacgatgttatgggagtggacaagagcactggggccctgctcttgggaagcatccagagtttggaggtggtgggaagagtgagacaataatcccaaaatgagcaccagtgagcaagataattaagacagtgcaaactgatgggaggaagtgaaatcaggagccgggtagaaagtgccagggaggtacgggctgttttgattgaggtgatcagggaggacttctctgaggagacggcttccgagctgagacctagagagggagaaggagctgccatgtgccattcggggactgaaaatcccaagcagcaaggacagcatgtgcaaargccctgaagtaagactgaggccagtgtctgcaaggattgagcagatgggagggtgggggttaggtaaggtgcctctgggagtctcaataactcatataagaatgtggggctgggcacagtggctcacacctgtaatcccagctctttgggaggctgaggcaggagggttgcttgagcccaggagtttgagatcagcctaggcaacgtagtgagaccctgtctctacaagtatttttaaaaaaattagccrggtatgatgkcatgtgtctgtggtcccagctgcttgggaggctgagatgggaggatcacctgagcccaggagattcaggcttcagtgagctgtgattgccccattgtactctagcctgagcaacagagtgagctcctgtctcaagaataaaataatgcagaggtgaaggctgcatgaatcatactccagggaggacccagataccgaaggaggcaggagacaccctgaaccatcccagagacaggccgtcccagattccacagccccagactggcgcatctaccctcctccctgttcctcctcttcctgacacagtgtggaaaccccatttccctattgggaaggggcatgagctgatgtctctggatccctggctgctggatcctgggtaaggggcctggtggggtctgattctcttctctccagcagcctggtcccatcttctgatagtccaaaaagccacggccagactcttggactcgtaaccataacctccacagaggaagtatacctctcaggaagtgggttctcagggcaatagtagcataaaaatcacacatgtagccaagttacccctgaaaatccttatgccatcccctggagctggttatagttttatagcccttttcaggagtgtccttctctgtgccrtggtatgagacctgtcccgtgaggctgaagacaaagtacagagggaagaacagatgtagtgcttagggagtcagacgtggctgctcttaaatcactgtcaaatcctcagaagtgaacggggcagggtgcagagtgctcactgtatggcttcccatgttgttctaacccgcagcctctatagctctcataaactagaatcaatttgtcatggggggcggctaagtgggatagcatcagtgtggcagggatggtaagaccttgggtcccaggctgcctgggttcaaaccttggttctgcttacttttaatttttttggatacataccccaaagtgggcttgctggagcatatggtggttgtatttttaatttttggaggaaccaccatacagttttccctagtgtctgcaccatgttacattcccaccaacagtgcaccagggttcctcttcctccacatcctggccagcacctgttattctgttgttttgagagtagctgtcctcgtgggtgtgaggtagtatgagttttttcctgatctgtcttcactttgggcctttatgtgatgccttagcaacatgatgacagtgctgaaggtcacagcagggacgtggcggtgtccagggtcaaggtcaattctgcgtcttattaagctcttgatcctaaccattcccctatttcacctccccagtgtgaggaggcaagtttgtggcacaggacttgttctggcacattctatgaggtataaatgtgatacatgtcctctgaaagggacagggagagtgctgtagtgtgcagagaagggaggtcctgcccactagagaaattggggaaggcttcctggaggaggcagcattttaggtttggacatgtggcagtggaagggaagggtgacccagacagagggtacagcatgacagtatccagaggttagagagagcaagacagctcctaagcgattcctttggctgtgaaacaaggttggagaagtagaatggagttagctcctgcaggctgagatgctgrgctgggaatgtgtgtgggtgggggacactttttttctgtagacaacagagacttgctgggcattctcttagctggcgagggaagaaggcaaaatcaattctaggtatgcaaagacctttagcaagaccatgaaaaagaaggtgtgcaaagctcgttttcaagaggggtgaggrtggctaagtaaaaacacaaagaacttctggagccagtaatgatgtttcttgttttagttaaggtgaacttcaaaggtggaaaatgaaccttgggggaaggttccagtactccctcctgtgtgcatattcaggatgagattgttcctgagttgagtggggtgaactcatttctttgaaatggcttgaaatggaggatgggttgagtcagcttacagggccaggggtggcaggagagaaggaaggaagacccaggggaggaggctgcatcaggatgggagggcgagtgtgttgccatggggtctttggggtggagggaataagcatgatgtttccagaccctcctctgaggcaggcgccttcccttctccatgcctcctgcaggctagaggatccagtctgagctgcaggactgatcacctgttcttgagttctgactgtgaaggtgtcatggctcagcctggggcccttgcagagcatccaacagaaactcacagatgggctttcagaaggcggcctgcgtctcctgcttctattgcttccacataccacacttacacttctatcacccatatttattggagatggggttgttaatgtggcaatgaaccagtatccagagtgatagaagcacagcttcccaggggcttatctcttcactgcagttttcagatttcactgtggttttgtagagtcatttgactggcaggcaagtcctataaaatacttacagatagtgtcattattccgattttccagagatgaaaatggaggcctggagagcctgcatgaattatcccaggtcatacagctagagagtggctgggacaggtcaggctcatatctcaggcttatgcctggtcccttcagtgtcccctggctctggctytttgggtccggccctcgcacagccacagtggtggctccatccaggagagacagcagagcctgcctgcacacagcaccagtcatcttggtcagcatctggaatctgctcggaggaatgatgcgggcaggaacagctatttgtagaactcagatgcccctttcacccctccccggtcatttgcccatgagctttattgagaacttcctaagtcttattccactacagtgtccctgtcccacggccccttactctgcagtgagcagttagaccctgctgcagcagaagcagccactccgccaagctcatgtgtctccagcagccacagaaacaagatgggacctgcccttcggctcaggctgctacaagcctggaacacaaggagcaggggctttgggctcagcagcactgggtttgaagcttgtttttgaaacttcgtgactgtgtgaccttgggcaagccacttaaccttggatgagtcacttaagcttccscatccatgattggaggatggtcatgccagccatgtgaggctgtttcgaggattaataatcaaggcttataagcacagagcacagtgcctggacatagtaatgaattccagcaacaaccgtcagttactaaatgctgactaggtactggtattttcccccaaaatatgtaccaagtacctataatgggcctgctgtgtgtactggggatacagcagtgaacagacaaagaacagacaacaccttagccactgtcaagggctgacgctctagtgtgttgtggggggaccgtaacgggcatgaaaagaaataatatacagtctattgtaaaatgagggagaaccaagcaaggaaagggcatgggagggtggtgtgtgcgtggggcagtgttagagaaggggcagggacggcctcactaagaaggtgacaaaagaaaggatctgaagctgacaaggaaatgatcatacacggatccgtcctatctgggcagagtgctccaggtggctggaggcctcaggcaggtgagcagggcctcttgaggagcagcagcaagacctgtgagattacagaggagtgaggcagcaggcatgggcaaccaggccgagtctggggactttcctctgagtgagatggctgccatggcagagctttgagcagaggagggaccaggtgcatatgaggttccagccggactgtccaggctactggatggagggtagatggcaggagcaagggtggaagttgggagcccacgcatcctcatcctcacaacagccctggatggcgctatcagttaggggtgcttttggctgtggatcacagaaagcctgtattttaggagcacacacattcaggtgttcgctgttctcttcagaggtgtagggctgggcagcccgagctctggtttgctagggagtgagtctctccttcctgttrttggctcttgccttgggctcattgcttcacagctgcaagatggcagccactgcwcctgccatcacagcctctcacaaccgtgcccaaagcagagtgggtgaagggagcaggaggcccttctcttcctgtgttcctgtcttttcagagtggggaatcttacccagaatcccctagcagacatcccccaccatgcctcttggccaaaactggcccagaattacctacatgcattccagttcctggtataagggaatggataacctaggctggtgtcatctcctggagctgctccggctgcctcttggacctagtcgaggctccgtggcaaggcaggaagggagatggctgctggcttggccacaggcagtgctggcccccggcaggttgcacaattctttttatagactgggcaactgaagatccgagaagcaacagggcttttcccaagggtgcccaagagtgaggggcagaaccaagacttgaactcaggccggtgagaggcagtgtggtgcattggttaaatgcccaggcactgcaggcaagccaagtggctgggtatgtgaatcttagccccatcatttcatccctcagtgagagttgagcctcagtttcctcatctggaaagtggggataacaacaaaaccatagaggaggagtgaggattcaatgaggtaatgcatataaagggctgagtacggtgcctgggacataggaaacagtacatttggtgaccaattgcctgagttattattctattaatattattagcagtagtggtgttattttcactgggcccggctgcttctcacagtgtcatttgctttcccatagatgaattccgattcatgccaaatggtggttgaattttcagcaagtgatagaggcagattaccctgtgcttgatagaactgttattacagttctgtgataaagactcattttattctgatgtaaagaatttatggggaggtggcggggaggtggggaggtttgttttcatccttagtattcagagtgggctgctgcagacatgggctgccatctgcgtgttcctgggcttgactgcaaagatgcccaagcttctcttggctctctccctgctgggatcttcatgtcctggagctggaagggccccggggtggggtggggcgggggactgactgcaggtcacccaaggagctgggctagatcctgggtgtgtagaccccaggccgggcctggcttgttccaaggccttaaggtgcagcatggagtgggggctctgccaggcgtggcaggaatggggatcaaggcaggagctgcctactgtgtcctcagccagcctctctgttctgtccctgatctgaaccccaccttcctcctacatcaccaccatcgtaagaccaccacttctcatgggggatctctacaaagtcacccctctcctgcttcccgtttccaggagtcttcctgcagtccactttggagcctgtcactgtcctgctcatagcccagcctcttagcctggctcatggcaccctcaccagggaggtgaatctcagccatttcccccactctcctgccacgctctggccatacaggacccgtgtggtgactcttcggggctgcacgctgtcctgtgtgtgggcttagcacatgctgttgctcctggaatggcatcttccctcttctgtccctggctgcctccccaccccgccccagccttcaagtctcattggtcgtatttctggggagctctgcctttggctgggctcctgggaatagactctgagacaaagatttgcctgaaaaaggattataagtgtatcctcaagtctgaaggtatccacctcctcctccctggaacctgtgagtggaacccttatatagcaaaagggatgttgcagatgtgagtaygtgatggtcttgacgtgggggattgtctgggtgggccccgtgtcatcacgggggtccttgcaagatgtaatcaggaggtcagagaaagggagacgtgatgcaaaaagcagagagcaactgattggaagatgccgtgctgccagccttgaagatggaggatggggccatgaaccaaggaatgcaggtggcccctagaagctggaagaggcaaggaagcgggttctcctcyggagcctctaggagaagtgtggtccttttggcacactttatacttccaacctcccaaactgtcagataacaaatctgtgttgctcttaggctctgactgtggtgatttgttacagcggcggcagtgccctggggtcaacactggcaaaggagtgagagacacagggcagggctgccgtgccttctcagcacggatctcggcaggtcccacagggagctctggagctgggatggcccgcagaggtgtccagaattgaggctggggctggcttttacccaccgccatcagccactagccacagagctgcctccagggagggttgtgaccctggtgaggtgctcccttggcctagggcagttcttgaggagagactcgctgccctgaggaggagcgccttgctcctggagggggagcagtgtcccgtcctgggtggccttgttctttcctctcagcattctcttaccacccggtgactcctgagcttctggagtgacccagcacaaggcctagcacagactccaggctcgaaagcgtgtagatggaactccagcctggctcacgtccacatggtggtcccagcctgcacagcagcccacagtcatcatctcccctgaggaaggccacacctgctttccaggtcgcacctgctggcttggctgagatgccactgtgasgataacgacagccactgtttcctagtgcttccctgtgccagccacgaccctacgcactctacacaaatggacccattcatccctcacagcagcccaaggaagtgagcgtgactggtttccccattttctagatgargaaactgaggcacagasaggtgaagcaacttggccggggccacatacctagcaagttggcagtctggctccggagcctgaacatgcattaaccaccatgtggtttcctcccaaatatgcaragctgcctgtgacaagggaccagggtgggccttgaacccaggtgccctcagatctgctcaagccttggagctggcacagcactggggcaggatgggtcagatcatgggggctgggttactgttcccaagtgtccgcagagcctgctgtttccagaacatctgtctaaccagtggctgcatgtgggtctcctgcttgcttcctgcagagccctgtgggcctcaccagggccctccttactaatgtggtcattctgtctgaggagaaaactggggctggtcctggactaaggcagctgggcccatcccacagagcagtgccctcctggcaccatcccacatgggatagaccaccctgacaaaccgcagagtctgccatcttggaacgaaaccctggagagtcactgtctattggactctttcctgacatcatttggcaaccagtaggagcaaagccaccgctttttgttcccaagcagtggtcccagatagggtcccagagagaagcagcaaattaaagagttcagagttccagaggtgggcagaacccaggtctgacttggccaygagttggctgcgactgtgtgacattgtcaggtttcccaacaagacttgtcatgtgtgcaacagaaccaacagtagctcatacttactgagcatctgctaggggccagagagtggccacatgctctcacttgtctcttaatttgatcttcttcatggtaaccttataagacaggcagatattattgtcctcattttcaggtgaggaggctgaggcacagagaggttaagtaacttgctcaaggtcacacagctgtgccctcccctgggaagctgggacttgagtctctcttgttcaccacctctgcccaaggtggttgaagaattcaatgagataacacatttaaagggcacagaacacttgataactcttggacgaataacttccgaaayagaaatctggttggatggctttccctaatgaaatgtgtctttcctggtgcctgaaggttctcccaccgctccctgtcccgtgggcagtcacactgtgctctctttggatcccttacctgtcactgggtcttgtggccaggtgtttctcgtctctttgggctaggtttcagctattctggtcccctgctttcttttccatgaatccctctttcataccggrgacacacttaacctgcatgttcctgcagcttccctcatggattaggaaccgttctagaatctgcccgcagccaccccttgcgtgtccttgtgagccccaccctgtcccccagcacctgctgtggccactgcgactcacctcctcccgggcgggacttgctctcctgagcactgacttgagccgtcccatattctggaatgttccattttcccttcccccccgccggctgactctcgctcaccctcccgtctcatcagagatgccactttctccaggaagcacccccccacgccagtcaggaccattgccccttctctgtacccatgtggccctcgagccactttgtcacgcgctgctcacactgtaccgtgaaggcctgttgactgtctgtaccactagactgcgggcccctcaggagcaggactgtgtctgtctcatctccaagccccagcaccgggactgcatttagtgggtgcaccctatgtatgtagagccagggaccatcatggtccctcaggatggatggcagagcagaagacccctggggagacagcagacgtcaggagaaatagacccccccaggtgataggagacccctggggaggcaggagaccccmggagaaataggagactcctgaagtgacaggagacccttaggtgacaggagacccctgaggtgataagagatccctggggtgacaggatacccctgaggtgacaggagacccctggggtgacaggagaactctggggaggcaggagacccttggggagacaggagaccctgaggtgacaggagacccctgagatgataggagacccctggggaggcagacccctgaggtgacgggagacccctgaggtgacaggagacccctggggaagcagggtggtggctgccgtgacctggcctgagccttgatcctaaggagggcagatggagcctaaytgagaccccggggcgcgaacagtcaccccccgactgaagcctcaggtgaacgtggccactgtggcgtgaagagcatgagcaaagtgtctgagtagtcccgggtgttggccctgaggggatcccggaggccatctccctcagcaccttccccccactacacttgcagctgtgaccaagagggggtgaggggcttcctcaaggtcacccatcaagtcagaggcagagctggggcaggaactggaatgttctagggtatcttccaggccttggcctgggcctccttgccagtcggataagatgcgctcttcaaagtacgagagggggctttgcagcctgctgtccccggaagggatggctcctccagtccctctaatgttatcctctccctctgacaggtgaacctggtgctgggggacggccggtccctgggcctcacgatccgtgggggagctgagtacggccttggcatttacatcactggcgtggacccaggctctgaagcagaaggcagcgggctcaaggtgagggagggcctgagggagggaaaactctgtgcatggagctctttgctgctgattttaaatagacctccagcagagcaatcagcactccaccttgaggactggtcccagctggggagccctccctggctgctgtacctctaaattcacagctcacagcagcagcggggtggccgcctacgcagtgtgggcagcaggccagcccraacttgtcgtgctgctgttttgcaaacactgctgatggcctgtggtggccctgacctcagggtttgttacgatgcgtggagaggatagaggagagaaagtgataagctgggttgggggtgccctgggcagcttcaggcctggcattcaatccagacaaccagcagttattgaaatattactggctcccattttaaagagggctaactgtgtgcccagcgtctgtgrtctacttttcacatgtcatctagttgactcctcacgtgaccctgaggggtagggtattactacccacattttccagttggggaaactgagacataggttaaactgacttgtcccaggccacacaactggtgggttgcagagcagactttgaacttaggcagtctgaatttcaaarccctcacttagcacgctgcagggtagcccgggaacttgctcagagagacaagactgctcacgrggaygctggacccaggacacccatcaccaaattaaagagcaccatgtgtttgggctaaatcctgatgccagggatgccacagcagcagtgatgtggagtggtgaccatggcacaggtggcctttgagccaggccatggggagtgtgagagagagggatgggtaaaggggaaggatgggagtggctggccaaaggaccatgcgtgtctgactgttggtgactgactagatggatgcctagtctgtgtgcaaagccaggggaatgaagcacatgatgaggttgtatctttgtaacaaagggccttccttgcatgccctaatatcaggagatttcattttccatgcagacaagaagaaaaggtcacatgtggccaccaagccacatcatggcagacagsctggagtacagagacgatacgtctgtcaggttctcttaggaaacaggcattgtgggaagagctctgggtttgcagtagggaagactaggttcaagtcccagttttgctgcttttgctttcatagctgtgtgatcttggagagtccctccacctgtctgggcttccctttcctgtataataacactacgtaagccctcaccaaacactgaacctgctggcatcttgatctttgatttcccagcctctaaaactgtgagacataaatttctgttgtttataagctacctagtctatggtactttgttatagcagcccaaagggacagacagacgacatcatcatcatcatcatcatcatcatcatcatcatcatcatcatcatcattatggacataatcattaacatctaccatatctcccctttcccagttactcttccaagtgttttacatcattaacttgtttaaccttgcttccctttactatataataataataggtaacattcctttctcagggttattgcaaagatcaaatggggaattmttattattatagtaaacattgccacagattgtgttcctccaaaattcatgcattgaaatccttacccacaagctgatagtattaggaggtggggcctttgggagatgattaggtcatgagggtggagccccacgaatgggattagtgcccttataaaagaggctccaagaactgcctcgccccttccaccatgtgaggacacagtaagaaggcacagtctatgaaccaggaagtgggccctcaccagacactgaacctgctggcgtcttgatcttggacttccaacctccaaaactgtgagatgtaaatttctgttgcttataagccacccagtctatggtactttgttatagcagcccagattgactcagacaaacatcattatcatcattgttatagacatggtaatttacatggatcgtgtgtcttctttcccagatgctcttccaagtgctttatgtcattaacttgtttgacctcatgatactcccgtgaaagtaggttctgttgttagcaccattttatgtctttatttttaatttttgtgggtgcatagtaggtgtgtacatttgtgggatacatgtggtgtttagatacaggcatgcagtgtgtaataatcacattgtggagaatggggtatccatcccctcaagcaattaccctttggtgagcaccattttacaggctcagtaggtgaggctcggagagttgcacagccaatgagagggaaagccaggattcccatccaggaatgaggagtctggttctagaactgtgcccataaccaggccagccagatgggtaggagatgttccacggtgtcggccaggtctagttgattctgaaatgtgttggatctaggtgcttgctttgcttttagcaggtaggagtgatgctttgtttggactccagggggaaataatctgataatattctgtatggaatttttatttaataaatgtatgttggaataattttagacttagtgaaaagttgccgagagttcctgtttatccttcacccagcttcctctagtgttgacatcatgtataaccgtggtatatttgtcaagaccgagaaactaacatcagtacaatattgttaaacaaactacaggccttattcacagtttctccactcatgtcttttttctgttccaggatccagtgaatccagcataccacattgcatttagtctgtatgaagtttaaatgccatttattttccccagaaacgtaaagattagagacagtttctaaacacagagtaaagattttraataggtggaggagactggggagaaggaaaatgggggcagaggaaaagagatgaagcaggatgagtgatttcccagaacacctgctgcatgggggttcagacccagctacagrcaggacacagacttggctctgagcttcctggcagccaacacagagagtgaagcaagtcagtgatgtctgtaagaggaaaacagaccagctgtgtttgaaaagcctagttattcctccttcggaggcctcagaacagttttcctctggtccctccttgagaggtgttgtgtggtgccatagtgtccttggtgacataaatgcatgaacagcttacgtaacgttgttggtggtgagtaccctctgattaaatccacattaagagaaagggagagagggagcattccagagagacaacacattaggtcttggcctgagagcactgagcatctcgccctctctctctgattactgatgagtagtgtcttttattatcctcttacccttttattgagcagttactatgtcacatactgagctaaatacttcttattcattattacacaatttttgcaatgatacattttaaaaaagaatgttcttctcgccaatttatagacgatagatttaggagcaatgttaagcaacttgtccaaggccacccagctaagtgctagaactgagattttaactcactccagcaaactctgagtccacgttcttaactactatggtatrgcgcctgtcagtcctcrgtttacagctgaagaaaccaagacttacagacttaaactgagttgcccaagatcaaattctttctgttatcagagctgttatttaaaccgaggcctgacagagcctggggtttccttgagcagggaaggacwggagccctggggcctccactgacyggctgtgtgaaggtgggcatgtccttcctytccctgggcctcagtctccctgcttggacacttgggctagatgatctccgaggacttctcctagatctgtacagtttcctggcctgaaaagttgcagagagttctctttacatagagcaaaaattttgaatgagtggaggaaattggggcgaaggaaaatgggggacaggaaaagagatgaagcctggatgagtgatattccagaacaccctgctctgtgggactgtagacccagctacaggcaggacacagacttggctctgagcttcctggcagccagcacaaagagggtgcccagacaccaggaatgttcttcactctgtttcacctatagttttcatatttacaaagagatgccaaaaccagtaaccagctgatagatccctcttttgtgtggaaggatgtggacattccatgtaagcacgtgtttgtggctctcccttgcttttcctctttccatttagtctgtgagtatatatactcatgactcctataagctaacactgtactttgcagcttctgagcaagacagacacagtctctgacctcctcagcttatattctagtaagaaaaacaaaaacaaattacacaactgtgtatttagttacaattgtaataataccaagatggcaaagcacatggaaccaattgagtgtatgccaggggagaccaamcctggtcttggatatctgggaagacttcctggaggaggaagcatttcggttgaaatttaaaagagaacaaaactaattatgtgaaagaggaagtgagaattccaggcagaaagaacagcaaatgccaagtccctgaagtggaaagaagtgttccagtgtgcagaggaaggcccatgtggctgaacgtggaaagccaggtggggagaagatgccttagcaatgctgctgaggaaacagcctgatygcacgggagatgtaatgcacccaagactgtgcagctgtgaaaagacgatgatcaagatctgcagttattaatgtggaaagatgtcygtgggctgttattaagtgggaaacgtgggctgcaaaaccacatagctaacaggatttcatctgtattctatatgaatgcaaaaatatgcatagagaaacatctatgccggacacacaccacagtgtcaacactggttatctcaggtggtaagatgagggatgattttcactttgtttatgtccttaggcggcgtctgaatggagcaaatattccttttataatcttaaaaacagcaacaataaagtgatttccrttcggaaacaaggcagagaaaaaatattccrtagaagtktccactcactttagtttgcctctcagttgcaggcaatcaaaggctttatttgctcataaaatgcccrccttcagtaaagtcctttctatcttcaatcccctccgcagtaaagcattttatattcctgctgtttattgtactttcccttccagggccccttggatatgctaacacctgcctacactcacttgggcatccaggactgattaattctgtttattgccaatgcactttcagtggaattaggcatattgaaatggaataaaggggcttggctatgtgggcagtggagccaagaaaaggttttatttgtaaatagggctccttgctgctgtgcagagcttccctggagagaaaatgtgccttttgctttgcttccagctgctcagcccacttagctcctgaagggcctggtttgagtctggggcgggggatgtcaggacggcactgccctaagtggagaagcacttggggggtcaggcaggttctcagcatttgccctgggaaggccccatggaacttggcaccttcccactcccccagtgggggctaacagccctttgagagtttatcttcggatctcttatttctttgcacctgccccccagcttcaaaccccaccaaagaatggaccacaaaacctcctttgttcctttaaggacaactgagattgactagcatttgaaattaatcataatgatagcagttgccatttattaaccagttattatgaatcaggcactgtactcaacayattagatacacttttatttcatcctaccggtagccctgtggcggacattaataacatcatttaatacatgaacaactgaggctcagagaggtgmagtagcttcccrgggattacacagggatctagtacctggccttttaaggccctccaaaggtcatacgctttgctctgccaccttcctagcacccctaacttgattaaatatcaaaaggctgcagagagaggaaataaaggacattgagtcttcttagaaatcaccaagtttcccaagcccagtgtggttcctggatcttgcctggcccacggcctccacacctgagtttccccaggggtgggagcacatttcatttctgctcctggggaccaactgccatcctggctgaggcttcttggaacaggatctctgttctcatgaatgtcccaatcttggggtcactactatgcytgtggctatggtagcctcccagccccacctccaacactggggatcacatttcaacatgagattcggaggggacaaacatccaaactacatcagttactatataatatttgtttaataaggatcctttaaatgtatttcgttttgtgattatggctgattttatggcagtcctaatgaaggcccatcgagtgtctggtgcagaaacaatgtttcagtgactgtgtggatgacctgctgctctacaggtctatcacgggtgctggactttgccaggagcctgaccatatcgacttcattggtgaagccagccaagctggggctgctccctccacktactggcttctgccagggtctgttctccccacytgccttctctggactgagtctctggacagcacccctgtgctaagtatgtaccaagcagcaggtgatctatatgtgccatctctgtctacccagctctaggaggtaggaactctgtttttttttagatgaactctcgctctattgcccaggctggagtgtagtggcatgatctcagctcactgcaatctccacccccaggttcaagcaattctcctgcttcagcctcctgagtagctgggattacaggtgcctgctaccacacctggctaatttttttttttttgtatttttagtagaaacaggatttaaccatgttggccaggctggtctcaaactcctgacctcaagtgatccgcccgccttggcctcccaaagtgctgggattacagatgtgagccaccatgcctggctgaaactcttaacccatctataaattgggagcacttgtttaatgaatgtctcttctcccagatcatggctacatgaggtaaagaatgaatgttctttwcacatcatatcccctgcccaagggaggttctggagccagatccccatcccagctccaccacctccttgttgtgtgaccttgggcaagtgatgccctctctgagcttcagtttactcatctttcagtgaaggatggtatggcacctaccacggagactgttcagggatttgttatggtggaacataaaaagtgcttagcagggtgcccagcctagaataatcactcagtggatattggctgccaccatttctcttaccagcacaacacctggggcaccaggattctttgctgccttctgtctcccactcccaccctccccattcaacataatttccatgcagagcatgatgcagacacagatctaggtgctgatgctcgctctgtccatgggttgccagcacctggtgcccaccaaagtgcctgcagtgctccaacaacaggaaagactcactgggccctggggcacccagggagggacagggccaccccctctgccgccatcaaacagctctctccaagccccgctgctcaaggaaaatgaaaacacaagcatgctcaggagacattttgtagtttctccttcccrcatttttttctctgacagcagaagggacaacattatagattttgaatcacaataggaaaaaatgataatatgaagcccgcaaaaatacacatttgctacatttttgtgcttctacttttgagaaggcccatctcaatactctaaaatggcaacaacttagtcaaaatcttataaattagagatgtcaggttttgaagaagggaagcaactatctaagaactcgatggttgaatcataaaaggaacagaacaaacaagaaggatcccaagccactgtgtacagtaggtcagaccaaaagagatctggaaggacatgacacctgctggcagctgtcacatcccggtaaattatttctcttttctacaactagcaagtattatttttgcaattggaaaacacagtaaagattttaaaaaatatgtattacgctctgctaagggtgacggccagaatccgccactgtaaacttactattttccctttataattatgaagtacactgatagagatattttgaaaccacacacagaaaatcctttttctgcttaaactcrtgcccacttttttttttttttttgaacagagtctggctctgttgcccaggctggagtgcagcggcaccatctcggctcactgcaacctctgcctcctgggttcaagcgatcctcctgcctcagcctcccgagtagctgggattactggtgcctgccaccatgcctggctaatttctgtatttttagtagagatggggtttcaccacattggccaggckggtttcaaactcctaacctcaagtgatccacccgcctcggcctcccaaactgttgggattacaggcgtgagcccccgcgcctggccaactgatgcctactttttagcatctrcttgtgattcttgcccacagaaatgattaccaaaatgtaatgttctaagggtgattttctattcccatgttccttctatgtttattaatgggaaaggaaaattcccattcttccttaaggaagaattgtcccttctcactcatttatctatttattcagttaattacrtaatgacactattatggcctcatggatgcttattttattctcctttgcctataggaagtgcttttaggttggcttctgtgcacatttgatatgcttatttatttgtttgtttactttacagcatgtctttactttctggcacaagaaatcccaggttcaccttgtttgttttccctgccctagacctggaatccaccacccctacaaagagcactggttccttttatttgaagaacagtatttagaaaccaagatccaggtgctaggtgtacccatttttattggggtgtcccagcctacagttccttctcaatggatagaggaacagtaaatatgtataatgactcatgcatgcacacatacccgtatctgtatgtattcatctctgtgtatatacatacacagtatttttttcttttggtaaatgagtccacactaataaggctgattctaatcccagaatcaaagggtttattctatctttcccctttccttacttatagctttttcccagagtaagaatcacctaaaacatagttacatactttctccaccctaggagaaacaaagtcatttcagaattcctaatccatatacttttttttttttttgagatagtcttgctctgtcacccaggctggagtgcagtgacacgatctcggctcgctgcaacctccacctcccgggttcragcrattctcctgcctcagcctccaaggagctgacactacagacatgcatcaccacacctagctaatttttttctatttttagtaaagactgggtctcctcatgtggaccaggctggtcttaaackccccacctcaagtgattcacccacctcagcctcccaaagtgctgggattacagacgtgagccaccacacctggcccctaacccatatactttkgaggagggagaaaaattcccarctgaagtacagtgtttatatacgactcttcttggtttctgtcttataagatcggttgaaccaatgtttcccagctacttaagtcggttcctttcttctctatccccttgcagtgtggttatggaaatcatttgtaagagttctgctgtcttcattcatctcagtctgcattctatcttcctccccgtgcccgacacgtgccccctcccatacacatcctggttgagttttacaaatttatataaagtcactctgtgatgtacagttctacgaatttgacaaatgcagagttatgcatccaccactgcaattccaacacaaaagtttcctggatcttttgcccatttggagatggtttttttttttttttagagtttttttttacacattctcaatacagacagtctctgacttatcatgggtcaacttacgatttttcaacttcatgcattcaataaaaaccatacttcaagtacccatacaaccattctttcacttttaatatagtattcaataaattatatgagatattcaatacttcactatgaaacaggctttgtgttagatgattttgcccaactgtagactaatgtaagtgttctgatttaaggcaggctaggctcagctgtgatgtctggtagattaggtgtattaaatgcatttttgatttacaatattttcaacttactataggtttattgagatataacaccatcataagttgaggagcatcttttcaagttctctgttagaaatgtgattggaaaatattttctttttttttttttttttgagacagggtcttgctctgttgccccagctggaatgcagtggcatgatcatagctcactggagccttgacttcctgggctcaagtgatcctctcacctccgccttcctagtagccgggactacaggcatgcaccaccatatgtggctaattttttttgtattttttgtacagaaagagttttgtcatgttgcccaggctggtcttgaactcctgggctcaagcaatctgcctcccaaagtgctgggattacaggcatgagccactatgcctggctggcaaatatcttcattctgtggcttgtctttgtcttctcttaaaagtatcttttcatcttttcaggcatggtggtgcatgcctatagtcccggctacttgggaggctgaagtggatcacctgagctttggaagtagaggctgcagtgagccgagatctagctgctgcactccagcctgggcaacgggagtgagaccctgtctcaaaacaaacaaacaaacaaacaaaagtatcttttgcagagcaagaatttttcattttaataaagtattttgtcaatcttttattagccatattttgtctaacccaaggtcacatagattttgtattatatattcctctaacagtattatagttttgcattttacattttagtctatgatttattttgagttytcatataaagtgtgagattgaggttcatttgtttgcatatagacagcyaattgttctagcaccatctgctgaaaggactaccctwtctccagtgaattgcctttgctcttttgccaaaaatcacttggktatatttgtgtgggtttatttctggactctattctgttccactgatctatgcacccagcctttcattaacactgccctatcttgtttactgtagctttacagtaagtctggaagttgggtacagagtcctccaatttgttcttatttcagaattgttttggctcctctggtttctctgtatttccataaaaaaaattagaatcagcttgtaaatacctaaaaaaaaaawatagcttcctgggattggaattggaattgtgttgaatctagatcaaattagaagakttaacatcttcatactattsagtcttgcaatcaatgaayacagatctctccatttatttaggtttttttttgttctgtaattgtcagcctgmagaaactacacatattttgttagctatgtatacctaagtattttcagcactattataaatggtactgtttttattaactttggattccagttgttcattgttagaaatagaattgatttttatatgttggcttttgtatcttttgactttgctaaactcatttattagttctgggaggtttattgcagagtctttgaaattttctaggcagatggtcagagttttattttttctytttggatctgtatgccttttatttctttttcttaacttattgcactgactacaatgtctagtatgatactgagtagaacagttgagagaaaaattttgccttatttctatcttaaaggaaagcattaatttttcaccatgaagtatgttagctgtgggattttctgtggatactcttcatcagatttgattcctastttgtttagagagtatcmtgaatgtatgttgaatttttaaagtatttttctgatcatatggcttttctcttttaatctgttaattacattgattttcaaatgttgaaacagccttgcattccttgtataaacactcttggttgtgataaattatcccttatagagattgctggatttgatttgccaatgttttgtggaggatatttccatttgtgttcatgaaggatagtggtctgggttttcttttcttataatgtatctagtcttagtattatataatgctggcttcacaaaatgagttgggaagtcattcatgaaagtgtctgggcttgagtttttttgggggagatgatttaactataaactccattttttggacatgtartatataggatatctataggttatctatttttctttcttgagtgttagtagtttgcgtctctcaagaaattggtccattcatccaagttgtggaatttaaaggcagagaattgcttgtaaggtgcccttattatgtgagttttttttaactgtcaggaattatataaatattaagacattatttttgtcaccttcattaggactaccataaaatcagccataatcacagaatgaaatacacttaaaggatccttattaaacaaatattatatagtaactgatgtagtttggatatttgtcctctccgaatctcatgttgaaatgtgatccccagtgttggagggggcctactgggaggtgtttgggtcacaggggtggacccttcatgaagggcttggtgccctcccagaggtaatgagtgagttcttgctctattagttcatgtgagagctggttgtttaaaagagcctgggacctctcttactccttctctcaccttgtgacacacctgctcccttttcaccatctgccatgagtaaaagcttcctgaggcctcaccagaagcagatgccagcaccacgctgtttgtacagcctgcaggaccatgagccaagataaacctcttttctttataaattacccagcctcaggtattcctttatagcaatgcaaaacaaacacagtaaccacaccccttcctccatgaagaaacaggaagcaggtgtggagagtctgtcaggcttgctctcgcctcccagcagaagcatcaggatggaatcagcagacaaagccaaactgcctgatggcaacggggctctatgctgggggcccagagctctgggcccttctctcagccagtcctttccttccttctggccctcagcatccccatgtgtgaaatggagggttggcagctgagatctgtgagtgtagactgattcccgccatctgccctccatcagggaggagctgaagatggcacctaatgtccagagagcacctgtgatgagcaaacctcactgtgggccaggctgctacccagcctcttttagcccaaaggcaagcatctctgagagacagggtctgattgctcaatkcacaacctaggtgagtgggaaaaccactcacacttctcaaacaaaaatgcctgctctgtgctgtgttcaggccaggatgcaaaggagatagtgctcaagataggagctttggagtcaaagacacctggctcagggcctgccttctccacagtcacttcttcaagacaagaacaatttcccggatacttactgtgtgccaggtgctgtccttgttagccctataaccctgaatttgcgtgatggaaactcaggctgacgccccttggcagccggccagccagctctccccacttctgcccggttctctgccgtcagcmtgttggtgacacctgcccgatgtttctgcacactctgctttttagatttggaacccggaggattcttctggccattcaggatgtgtttaagtaaaagcatggtgaaaatggcagaagatacagcagcatgagggtagtggtgataacaggaaacagtaatgatacattttttaattttwatttttattctttacctttcctatgttgctgaggaaatagtagtaacagaaataagtcattagggtgagcagtcttctagttatttctaacatgcaggaataacaacagcaattgccagcattttgggagtccgccctctgtcccaccatggtgcttagtgagtactgtgcctacagtgaatcatttaatgctcccagcatccctgcaaggaggctctggtattatccctattttacagatgggcagctgaagcccagagaggttaagtaacttgcccaaggtcacacagttaataggaagaagagctgggattcaaacccaggtgggtctagcacttagtcacagaagtcccattctcatctcttccctctcctcataccttctctggtgaaccccagaggttcttacagaacttagatgggtcctctctttgtgaagtggttctcaggcagactgggggagggacacagggcagggccttcccctgtaggcagcttgaatttactgctttgtgaaaattagggaggagcgaatggtcttcacttggggttttcctgtgtgtgtggtgtgtgcgttcatgcgcacacacccccacagtgatatttctgatgtctccataataacaatgccataaaagcaactatttattgatgatttgctgcaggcccagccctgtccaggtgattccttgaaatcatcttgctccgtcctcttggcagccccaggaggatctcctgagtttcatcatgcctatttcactgataaagaacccgagactcaatgagattaagcagcttgccccaaaacatatttttagttggcagagaagctgtgattcaaaggcagggctccccaaggccacatgccttacctctgtgctgatgccaacagggacagctgagcacaaagtcacagtgcctcagactggcaaaggactttctattttaccttggatgggctttgcccacgtttttctgaccccaaatccagtgctttttccattcccaagggcagcaagtcaccgatctcttgcatgccaatgccatttcattagtgcgcctgtacacatgtttgtacctgtgtggttgcagccgggctctgcaagaagggatagttagctaatgctaagagtcacttagcgctgtgtctgccatggggcagaaaagggggacccgtggcccagatgattcaatgtctgtcattcccacatgagagcatgggcctagctcaacttttaaaattatttaattgagaatgtatgactaaagctgtatctcagcagaaagtatttttttgcgggggggggaawctaataataataacaatagcagctacttctgacacctactgtgtgccggggcggtgatgacattccctggtggtgttgcatggtgtgtaaaacctgtcttgtcactttatcaccctgagactcggtttcctcatttgkaaagctggggtaataatacctcttgggacatggtgaagatgtagccagagaatctctagcaagcacttgatgcagataaaagtatttttttaattagctttaaaaattattcctgattttcagtataaccttgtaaggtaaccgcatgagtcttgcttgaggctcagaaggtggaagtgatttgcccatggccacttaccaggaaggggctggccaaggttgcaggcttggctctgtcctctaacacccrgccagggcagtttcacagtggggccttcctcccaggctaggggacagtcttgtattgtccctctgggatggaataaactcgaggctaatcctgcctgtccctctttggcactccagccctggccccacactgcccctgctttcgaggacttgtggcagagcagcaacctctccagcacctggttgctttggggcttcaaaaatccccaggctttttcagcagaaggtaggatgacaatttccttgtccttgctgaggtccagctcagataactgggctttgcctccccaccagccccttttgctggagtgggttttttctaatgagccatgccctcgggagtgcctatccctgrggtgcagtagccacctctcactcctgggcgggtccacaagtcctaagcctcagagttggctcttgcttccttcgtagagactatagaggagcagtgcttcccaagctcctgtagattccagtttttgataataatgataataatagtaccacctrtatcctaggtactatattgtcaagacaacatgagctaatgcatataaaatccctagcccagtgcctggcacatgataagcaaccaaaaagaaatggtagctgtaattgtctaagcgattkgcttgtggcaagactgatctgcagttacatctgcgatgctcagatagctgatgaattgacattgatgatgaacctctttcccaaggagccggaaggtgatttatttcccaagaagctgccacaggctgagtgattgctgtagcctctgctccccacccgcccccagctgtgccaccttctcagtccttccttatgatactctcttagttggatttttgaaatggcctctctgaatgagtgtttaatcaattgcagaaattcgagatgcttagtcctctggcctggtctttacagcggcccttggtagggtggtaattgygccaaggcaggctgctgccaaaaagacttaatttctctgggcacgcccattagagcagagctcacttgcagcttggccacaggaaaaggtgagatcatttgttcgtgtgctcagggtccctgtgaaccattctgtccaccagagagaggctactagctggggatgtctgtgggctttccttctcatctcattcccaagtggctgaacaaaggtcctggaatagggtaggggcatgaagagctgactggccccggaaatgtcattggttgcccttctggctttacatgtggtcatgccaaattaaatgcctgcttgtgggtacatatggtttactgaatctgaggtcagcacggtcccctctttcataagggaaatgattaccagtgagcatttcttcagcctctgctgtgggatagaaacatgaagggctttgggagaggtaggtaactatatggggcagtgctttgggcacttgaccatgcatacagattcccaagggaccttttccagtgccagttatgattcagcaaatgtggttcttgtggccgcataaccaccacaggacttagggatgtatagtaaccacaagttatgctcccaggtactgtgggtgaggaagtgacaaggcacagcaggggtgatgtgtctctgctccatgatgtctgcagccgcagctggaacactcaacatctgggtgctggaatcatctggaagcctgtttcctcctgtgcctggaagttgatgttggctatgggctggaggccctagtgcttcctgcatggacctctccctgtcatctttccacagtgctagtttgggctgcctctaagaatggtggcttaggggggctttccaggggataggtgctgggagagaggtgagtggaggctgtattcttttgatggcccagtttcagaaggcacagagtatccctcagctgggctttcttgtttaaagctgtcacaagtccaggcagtttcaagggggagaggggactaggcccttctttctatgtgagtgtcctagggctgctataccaaatgaccacayactgggtggcttaaaacaacagaaatgtattcagttatgggggccagaagtccaaaatcaaggtgacagcaggatcacactcatccctccaaccgctcttccagtttttgctggttcctggtggtcttcggctcgtggcagtgtcactctagtctctgcccctgtcttcgtgtgttcttccctgcatgtttctttgtggctcaaatctccctgtccgttctcttatacgggcagaagtcactgaatttagaatcctccctaaatccaagatgatctctttttgagatccttaacttaatgacacctgcaaagaccccatttccaaattaggtcacattcacaggtactgggggctagaacttggacatatttttgggggaacacaatttgacctactctrtgatggcatgacagggccctagggggcacatgaaactcgaaatattgctgtggccatttttggaaaagtacactctgcctcagtagatttgggatggagcctgagagtttgcgtttctcacaggctcctaggttttgctgatagtactcatctttgtcattttagcagctataagagagtgcctgagattgggcagtttaaaatgcatataaatttattagctcacagttctgaaggctgggggagagagagagacagagagaaagagagagagagaaagtgtgtgagagagaaagtgagtgacagagagagacaaagttggaaaggtggagtccttgtggcctaatcaccttttaagggtcccatctcttaatactgcatgagttttagtggaggacacacattcaaaccacagcacagttggtccatggacaacacatggggtcttgctttcaaattgctgacagtctagtgaggaagagggaggaggaaatagcaaactgtaataaagtcagacctgttaagaagtaccatgctcttaataggagtactacctgataactggataacaattaacatctctgatgtacaggcagtattctgggcactttgtatatatcagtccttttaccctcacagcaaccctgtggtaagggtgctcatcccttgtttaccgatgtgaggctcagagagtttaaatgatttacccaaggtgacacagccagggcgtgtggagccaggcaggctgcttccaagtccctgtggccactgcacggcccttcctgtgctgggacctcaggtgggagcagtcagtccaggtgaggggggctggttgtggctgcagagaggaagtggatcttgagctggacttctcttggttagcaggttcttgctgagcctctctatgtgcctgacatgtaaacatgagccagaaaacacatgatttttgcccctgtgaagagtgcggtctggttggggcattgaatgtggaagattatgccaggcagagaagtgaaggaagagctcttccaggaagaattgggaggagcacagacatagaagcatgggggtcagggacgggcaggcgggctgagagggactgaggggctgacagagagragagttggggagggagggggaaggggtagggaaggagacatgctccaacagcttttccaagagctcctggctggctagacgcacctagggatgcacgtggcactaggagtgagtgagggtattacttccaaagtcaaggagctatgagttaaggcagatggaaggaggcaagagctttcagagtttgggatgtccagggaactgagtggtgctttgcactagagcttttggcccaaaaacctcaaagggtttgagccagaccctttgtttgttttgagttttatttttccagctactaaagtaataagttcaatacataatacacacacaaacacatgcagaaagtagaaggacccagacatcctaccttctaaaaccagcctttattaccatcgtttgttttttgagatacaattcatatgctataaaattcacccttttaaagtgtgcaaatcagtggtttttaggatattcacagggttgtgcaactatcactgctatataatttcagaacatttttatcacccctgaaaaactctctgtacccacgaagtcatcactccccattcctccctcccttcactccctgaaaactgctactaatctgctttctgtctctctagatacgcctattttgggcatttcatatcaatgaatcatagaatatgtggcctttgtgtctgccttcttttacttagcataatattgtagcatctaccaggaaattccttcttatgacaatagtattctgttgtatggtgatatcgcattttgtttatccattcattagttgatggacgtttgggttgtttccatctgttggcatcttgatgtagtttctgtcattctcttctctgtattctttgacatgatttctatcatatagcttgctttgcatttcacattcttatctgcattttcccatgtaaataaaaacttatgggtacaacttgtaatagttgcataatcatattccatcttggggctaaattataatttacctaaccattcccttgaagtcaggcatttagctgtttctaattgaaatcaggatttaaaaggagcaacaaatgagagaaacctcagaggacctttccagaggagattaaacgcctccaagcctatctatgccagcaggcttcagagcccagtgtggggcagaaatgatttatcccaaattactaagaggcatggaacggactgggtgagataaagaagattcttctccagcgtggcacggcatatctaccgagggcctagacccactctaccccagacccccaaacatagagggaggtgttagagaaggtgggagagatgatggtggcctgtgctatggcttgtctccccacaattttttcatttagttgtggaatttttttctttatacacttgacagtctggtctttgtatacaatttgaagaggtgcagaacatgaataaagaacttgaaattaaaattgcctggaattgatcacttggaggcaactcctatgaacagtttggcctatttcttcccagtcccttcaacacagttgaagaccacattagataggcaatattaagataatattagagcccaggtgtggtggcttacgcctgtaatcccagaactttgggtggccaaggcgggcagatcccctgaggtcaggagtttgagactagcctgggcaacatggtgaaactccatctctactaaaaatacaaaaattagctgagcatggtggtgcacgcctgtaatcccagctacttggaaggctgaggcacaagaatcgcttgaacccaagaagtggaggttgcagtgagccgagatcacaccactgcactccagcctgggtgacagagtgagactctgtctaataataataataataataataacattaaaaaacctgagttcaaaagtaaagtatgttcactgtagaaaacagagaaaaccctacacttagggaaaactagtgccacaattttgttgtataacctttcagtgtgtaatgtctacatggaatataatatggataaaatatttcagcaaaactgggatcagactgttttctttcccccaccttccataacattttagcatttatcctgccagtagaggtgtgcatatatatatatattatatatatagcattcagatccttcatgtgagaaagacctttgcaaaatattaagtgaaaaaaagcaagttacagagtatggttatgtaattccatttttgcttttttaaaaagaggaatatatttatttgtacatacttgtatatgtgaagagaatccctgagaaaatgaccaagaaactgatcctggggctttagatttcaggaatggagatgcgtttttaagagaagggggtttcggaggggagatttttacagtttgtatatacccccctttttactgtttgactatttgtactatgtcattatattggttttgtaattttttttaagtttaattggaaaaaataattatatgtgattaaatattatatatcatttttaatggcagtataataattactgtatggatataccatgcagtatttgactaacattaattcatagactttttggagggggttcaaattctttttgtaaatttaaattctgtataaccatggttatttggttggggttaattcctagcagtaaaattgcaaaagtttttgcaccattttgtcaaatgcttcttagcaagtttcaaccaagttatgctccagctggtgaagtgccagatgccccactaacccttcctcatctagatggggtacgggagttaatatggattggctgtgtccccactcacatatcgtcttgaattgtactcccataattcctgtgtcctgtgggagggacccagtgggagataattgaaccgggtggtggggggaaaccccatactgctctcgtggtagtaagtctcatgagtgctcatgattttataaggggtttccccttttgcttggctctcatttctctcttgcctgctgccatgtaagacgtgcctttcaccttcctccatgatttgaggcctacccagccacgtggaactgtgagtccattaaacctgtctttccttataaattatgcagtcttgggtatgtccttatcagcagtgtgaaaatggactagtacagggaccttctggtattctgttctgtttggctattcatgaatgcccaccatgtttttgttaccacaaatatgggaggcacactaatggaccctccaaaatgtctacatccgaatcctcagaacctgtgactatgttaggttatatggcagagggaataaaagctcctattcagctggccttgaggtagggagatgatcctggattatcctggtgggtcgcgtgtcatcacaagggttgttgaagtagaggtgggaatcagaaggagggaaccagagaggtggctgtataagaaggccttgttggtgcgaggttgctggctttgaagatggaggaaggggctaccaaagtaggaaagtaggaggcctctggtagcttggaaagggcaaggaattggattgtcccccggactctccagaaaggaactctgtcctgctgacatcttgattttagcccagtgagatctatgttagatttctgaccccagaactgtaagataataaattcgtgttgttttaaaccactgagtttgtggtgattggtccagcagtgtagaatactcatatgatgtgtacaatattgccaacacctattatagctcttccccttgggaggcacttggctcttgtctaatattcttccattgtttggtgctggccgcaacagtactgctttcttcttggtaggagttggaggattcccatgtatttggaagagcaggtcaatttcyttctttatggctatgaagcacagaagtggaaacacactctagattctgatgtctgatactcctcacaaaggactggacctagaagtttttttttgttttgttttgtttaaatctttttattttgaaataatttcaagaatactgcaaagaactcccatatacccttgtatttgtgcgttttgcgttgctctaaaggaatatccgagcctgggtaatttataaagaagagagttttgtctggctcactgttctgcaggccgtgccagcaactgctttaggtgaggacctcaggaagcttccacttatggcagaaggcaaaggagagcaggcttgtcacatggtaagagagggagcaagagagagagcagggaggtcccagactctttttgacaactagatctcctggtaactcattaccgtgaggagggcaccaagccgtttatgagggatccacccccatgacccagacacctcccactaggcccacctgcaacactggggatcacatgagatttgtaggggacgaatatccaaaccatatcagcccttcacccagattcactagtttttcatgtttcgccacatttgctttatctatttttctcttctcccgtctaaagcattggagttgtctatctcatgcctctttattcctaaatacttcagtattttttttctctaagaacaaggacattcacttaacataatcacagaacaatggtcacaatcaggacatttagcatcagtacaatgctattatccaatctgcatagccccagcatttgccatttgtcccaataatgtcctcttgtagcaattctttctgctcccagtccaggagccaacccaggatcacgtgttgcattttgtttttatgattgtttagtttcatttaatttggaacagttcctcagcctttatcttcctatgacattgatatttttgaaacattctggctcattattttgyagaatgtttctctatttgggatatctgatggttgctatgattggattagtttatgcattttggcaggatcatgctagctttgatgtcaggtccttggtgggtcccgtgatgttagtttgtcccgttattagtgagggtaacactgatcacttgggtaagtaatgtctgccaggtttctgtactgtttttccttttataataacgtatttgcaggtgatattttgagactgtaaatattctgttctgtgtcaaaatttacctactagttttccctgattcagttgttttgcaaaattttaaaaaactcacttgctattttactgtagagaggagctttatcctgtgatttatttatttagtacaaatatggattcatgccttcttactttgttatttatgatyggcattatttactttgatactcagagtgtcccagatttggatatggcagagccttcagcctggcttctgtgtccatttgacatgcatctgtcatttttagagaatttccttactttctgactcaagaagatggttcaggctcatcttgtacttttcctgcccagccttggaaccagccattctccactaggccatgatatttctcaatggggaatggcatttagatatcaagatctgggggctagatgggcttattgctactgaggtgtcattactaacagggcttttagtggacaaagctaggaaatatacatgcctgcatttgtacrtacagtcaccccttaaacaatgcagggcttagaggtgccaaccttcccacacagttgaaattcacatataacttttgattctccaaaaacttaactattgatagcctactattgacctgaagccttaccaatagccaattaacacatatattgtatgttatatatctatataccatattcttacaataaagctagaaaaagaaaatgttatgaagacaatcataaggaagagaaaatacatttatagtgccttactgaatttattgattccgtaagtttacatcatctgtttaccagatgaatcgtctgtctgaaatggtgcccgagtgtagctgcagacctcaatctgtggcacatattaagccatgcaactttttcttataatgtcatgactttctctgcttcttgggagaacttccagcatcactagtggcacttcatagggatcctatggtgttattcaagctttatggtagtgcacaaaatatgttgaaaaatatatgagagccacgagagaccactttttactatgatatgcaatttactgtagagacagactgctcatgcagagatgatgagcggcacacggcgttttaagctgatactttcaaaacttgagcacactgaactagcaacagaaagtggctttgaaattattacagtactaccatgtgtacttctgtaaattttatgcagttatgatttaatactgcattttaatgtttgtttatatttctcttgactgtgaatggtgccatgtattatctgcaagggtttgtgtatgtaagttttgataaatcttaattttttagrtcgggcaggatggtttacacctgtaatctcagcactttttgggaggccgaagtgggcggatcacctgaggtcaggagtttgagaccagcctagctaacatggtgaaaccccatctccactaaaaatacaaaaaaattagctgggtgtggtggtgcacacctgtagtcccagctactcgagacgctaaggcagaagaatcacttgaaaccaggaggcagaggttgcagcaagccaagattgcatcgctgcactgagcctgggcaacactgtgagactccatctcaaaaaaaaaatttcttcttaacttttaaaaataatagatttgtgkctgggtgcagtggctcacggctgtaatcccagcactttgggagaccaaggtgggcggatcacttgaggtcaggaattcaagaccagcctggccaayatggtaaaaccctgtctctactaaaaatacaaaaattagctaggcatgttggcgcatgcctgtaatcccagctggctgggaggctgaggcaggagaatcgcttgaacccgggagacggaggttgcaatgagctgagatcacaccactgcactggagcctgggcgacagagagactccgtctcaataaataaataaatataatagatttgtgtatgttttatgatagtaaattataaagtagactatctacacatattttatgcattcatgacatacctttttcttaattttctcaatatttctaggctacatggctcatctgtttttccaaattgtcacaaatctccaaaaaaattccagtatatttaagaatctgcatataagtgtacctacacagtttaaacccatattgttcaagggtcaactgtatacatataatacacactcatattcatacatgtgtgtacacacatatatctatgtgtgtgtacatacagatatacatgaaatataaatatttcaatatttgtctaaaacgtaagttcactcatactgatacctcctcttctaggccaacattacatggttcttcctagcttctcccatttcttcaacagtgagaaatcaagaacctaccttaagtgtttacccatttgcccaattttacaagacacaaaagtagtttcagaattgccatgtgaagtagagcttctgatttgtttgcagtttattttgtccttaaactgagggtttatggtcaaagcagtctgttacttgggttagttattttgtttcccacttcagctgaattatgttattcatatgaacaaggttcatttgtttttgctggcattgaatagggtttcccccatctttattgatttaattttactttctaagtactaaaacatcaaaactatacaaaaaggtacactccragtacgactccccatgtcccttctacccattctcacctgctccttaaaggcaaccaartaagtttttggtttattcctctttgtttctttttgtaaaaataagcagatttatatctatatgctttctttcttctataaaagatagcatgctatagatactcttttgcacttaattttcttcaccgtatcctggaaatcctgttatgtcagtgcacagaggtctttgtcattcttttcgacagccgtgtgtactctgctgtgtggctgtaccatacgttatccaaccgttctcctctgtatggacatttaggttattttcagtgttttacagtcacaaacagtgcttcagtgagtaactgtgtgcatatgtattttatcactttgggaaatatatcttcagggtaaatttttgaaagtgggattccgttagccaggcgcggtggctcatrcctgtaatcccagcactttgggaggccaaggcgggcggatcatgaggtcaggagatagcgaccatcctggctaacaggtgaaaccccatctctactaaaaatacaaaaaattagctgggcgtggtggcgggcacctgtagtcccagctactcgggaggctgaggcaggagaatggtgtgaacacgggaggcagagcttgcagtgagccaagattgcgccactgcactccagcctgggtgacagagtgagactctgtctcaaaaaaaaaaaaaaaagaaaaaaaagaaagtgggattccgttaagtgttggaccatcctgaattcccaccagctgtgtaaaagtgtgcctgtttctccatagctgacggtcactgtaaagttttaaatttttttctcaatctgatagatgagaaatggtaccttgatgtagctttattttgcaatttttcccctcttttttgagacaggatctcaatcygtctcactcacccagcacccaatctgtctcactcactcacccaggctggagtgctgtggcacagtctcgactcactgcaaccttcgcctcccaggctaaagtgatcctcccatttcagcctcccaggtaactgggactacaggcatgcagcatcacacctggctaattttttgtattttttgtagagatggggtttcaccatattccccaggctgggcaattttcttattatgggtgaagttgaacatcttctcatatatttaatggccatttataatgtcttctttgtaacttgttcatgtcttttattatccttttgctctcaggattttggatcttttttcctctaaaacttaagaattccttaaatattagagctaactggccctttrtctgtggtatatattgcaagtgttctctccatgtgtcttagtcagcttaggctgactaaartaccaaagacaaggtggcttaaacaataggactctgttttctcacatttctgtaggctgggaaggccagggtcaacgtgttggccagttcagttcctgataggggctatcttcatggcttgccttcttatcgtgttgtcacatggccaagagaggactcaggtgtctcttgttcttcttataaagggcaccaacccttttggattaggaccccaccattggattagaaggtaactgtatttacctcctcacaggccctatcttcaaatacaatcagattcagggttagggtaggaatttggggggggacacaaacattcagcccataacatgctggttgtcattttcttttgactttgcttatagagtttttttaatrcaaaagttttatacattttaaatctaatttaattattaatcctttcttttattgaatttgagtcaggttacatgtttccttatgcccagggtatagatgaacttatctattttttctcttaatgcctataaatacatttttcctttagacctctgatctgtttggcatttagtcttatagagggcatgatttatctttttctaaatagctactcatttatcctactactgcatattaaaaagtctgtctttgtcacagtgatttgtagtgccacctttatcatacactaaaatgttgtgtgtccttgggcctatttctagtctgtttcaccgcctgtctgtctactcatgagtcagtgctacactggtgtaattacggaggatttagagcaggctttagtgtctggtagcttctctagtagcttttctgtatcagggtttctcatagccattcgtgcattttatacttttagattttaaaaattgtttttatttttaaatagcaaaaagttttttatttttcattatatttaaataataaaattattttatgttttaaaattgatttatttattttatttatttggttttttgagatggagtcttgctctgtcacccaggctggagtgcagtggcgcaatctcggctcactacagcctctgcctcccaggttcaagccattctcctgcctcagcctcccaagtagctgggattacaggtgcctaccaccatgcccggctaatttttgtatttttggtagagacggggtttcaccatgttggccaggctggtctcgaacacctgatctcaggtgatccacccacctcggccscacaaggtgctgggattacaggcatgagccactgcgccggaccaatagatttatttttttagagcagctttaggtttacagaaaaattgagtgggaactacagagttcccattatacctcctctgccccaacccgtccccaacacattttcccctattattaacatttcgtattagtgtacaaggggtacatttgttacagttgatgagcaaatatggataatatttttattagyccatactttatataagggttcacagttcattggattttgatcaatacataatgtcatgtatcaaacattatagtgtaatacagaagagtatcacccctctaaaaatcctctgtgctctacttctcatccttccctgagcctcaggcaaccactgatctttacagtgtctctatcagtttgcctgtttcagaatatcacatagttggaaccatgcagtgtgtagccttttcagactggcttcctccccttagcagtatgcatttaaggcttttccctgtgcatttttatttttccccatgaatttttgctgacttttctaacaaaagcttgttgatgtttttgttgggataatgttaaatacrtaagtgagctgagagagagccgatgtctggataatgctgaaccctttccaagaaaaggggatattttatttgttgagtaattttgagtgttttagaagtgtgtgaagttttcttcatataggtgttgttaacatttcttgttaagtttattccttggtagttttttctcttctgttgctactataaatgaggtttccccttccttccatcttatcttccagctggtcwctgtttgtgtctgtgaaggctgtggacttgagcttgagaacttgattcttgcaggtctacagagcagcytgaagcaggtggtagactggattctggtccagctttgccccaactgcccaggaagccttggaccagtgacacccctcctctacctctcaccctagttttctttctttcagaatgaggggctggattaaatgtacaccatttcccagagtgtgattcctgyaaaaacaaaactgatttgtgtttttacctctttgtcttccctttgattgtaaaaatcaaatgctcctkccctgctgcagcctgtagagctgggctgcatgtacccagcctccctacatgccctggccttgtcaaatgcaacctttacataaatgggaaatgtctccggcctgtctgcaggaaccagaatggggaggggactagcttgtttgtatgcctgctcatccatttatttaattgtttattcattcattcatggattccgtcaggcatttgtcaggtgtttcccatgtgccattcaagggggtgcagcgcactgactttgaactctctgtctgtagtctagtacgatctcaaactgtggggagtgagtgctgcacggtgccctgggcgagggggattagtgatatctgccttggagctggagaaggcttcttggaggaggtgtcattggagccaagacctggacgttcagtaggtgttatccaggtgaggaatgaagggaaatacgttttgggcagaggaacaatggtctggtctccaaggtctggagtggggaaagggctccatctgttgagtgaactgagagatggcaagtatggttggatcggaaaaaaagcagtaggggaggaaggtgcgagattggttcggatgctaaggcccctctcaggctaggcagaggagcttggaagctactggggcattttaaaggagggtgtgacgagatcaggtttgcagtttaaatgaatctgtcttctacataaggaaagtrtcgggcaaggtggtgaaagtagaagcagggaggccccttaggaggctgtggtaatggtccaggtgagrgacaaggacagctgggatccgagtggagttagtgaagatggagggtccttttggaagggaaagtaaaatgcattgggcttgatgatagatccagtgggtttggaattttaggattgagcaatgagatgaggagccccggagaaggaccaggcttggaggaaagaatcggagaaggtcaggggtttgatctggggctgtgtttaggcttgttcaggatggtggccattagtcacatgtggctagtgaaatggaacttgtgtgactgggggagtgaatttttaattttattgtaatttaaatgtaaataatagttgttggacagcctagttatagaacatttccattattgcaggtctgggtctcagaatagcaattggtttggcttcaaatcccactctgctacttgcttgctgggtgtccttgggcaagtagcttcacctctctgagcctcactgctgtcatctatgaaacacggacccttccatgtctcaggcggtgcctattaagtttagagctaaactgtacaaggtagctggcctaagcaaggcacttgggggttggtaattgttattctttctgtgtttgacctctgtaatttctctgtttactttggaagccagattttcctttgggaagaactcaggtttgaccttgactcagagtatgaccttgggcaagttctttcccctttctggcctcagttttgattgatggctgggttagagcaggccttcattgaggcttcctgtgtggtgaatagagtaagcaggtactaacaacggatctgccaatgtcagaagagagaaccggaaggaagcatggaccatattgggagtcagtgtgcattagccttgccgggtccatccacagcatttctggttaggttctgccttgtgagagctctaaaccagagagggttgggtgaagagctcacccagacccagcccataccctgagcttgctccaggaactgtcttagcaattacctgcatctttttattttctttttcaaaatatggacaagctttactgacttttgaactgttgggaaaaactaatgtctcattaaaactgtattgcttacttgtaatgaaagaaaaaaaaacagcccattaaagttttacacctgacatggaaaactattaaagattcataattgcaataaaactctttaatagaatttgaattttccttgtgataatgctgtagccaacagggtcctcccttgaagccgcaagatccattttaacacaggcttgggagggtgctgaaggcaactctgaaatcggcttctttcgggcccttcccagcgtggctggtacaggtgcacgcgcggcctgagaggatggattcccgtctcccagctcagcctcaggatcaggttgttggcagccttctctcctaacaacttctggcgagggagctcgaagctactgccattccgccacaggttcttcctgccagttcccttcatcgggcacgaatacagcacctactgagtgcatggcctaaagcccagggctgggaggggtaagaagtagaggaagggcaggctggcttttcttaaaggagagtgtggtattggttcgtgcaggggccttgctggctggtagaatgaaggccagatcccagctcttaatgactctacttcccgtcctcggcttcctcatctgtaaaatggggttaaaatatgagtttcatgggtgtggtcaatgtgtgtaggtcagtggaagccagaggcagggccctggggaaggtaggtggaaaggtagagggtggygctgagagacaccctggaggtagaattgctagatttggttggtgagtgatcaacaggtgaattcagggataagcatggctttcaaaaatgcatttattgcatttatggccccatggagacccatgcagttactgtatgttagctacttgtttatgtgctttatacttgttcattcagtaaatatttattgagcacctactatgtgccagaccctgttttaagtgttggtgatacactggggaatgtattaactcatwtgtcaaccaggtactgatatgatctctatttyccagaggaggtaacaggcacagagaagtgaagtcaattacccaaggtcatacagcaagtaagtgacagagtgtagaattagtcagagactcctgggtctgtgctcagaaacacacaccagatggccactggtgtactttgcacaacacactagctgttagtggtcttgttcccattttgggaaggaaggcttagaacaatgaaattattttcctcaggtctcttggagagtaagagggctccgttaacccagcaaggtccactgagtgtttccgctgttacgagggtcccctctcctcctggggctcctgcgcctgccccagacctaagggaattgaattctctgcttactggtggttggccaatttcagggaaatcggtatcctgcccttattgaagccccgccgtgctcttctcaaagtgtctgaacatgagccagtcactcagtgggctgtggatgatggaggagtctttcctctgccttaaaatgaagggcattccatggtccaccctccactcctccatcagtggtgacaaataggattcccatggtgacaaataaaataaagctgcctttattcgtttatctttccttgtcctccccatcagtgccctgcaagcaagctgagcaatattagacactcgatcacacttggcacctgtctctcctatctccagcacgtcctgtcccagtgagctctggtggagggatatgagtgtttccacggttagctgtgggtctgggctttgctgttgccttgctctgtggccctagacatgttcctgtcctttctgagccttggattctgcatctataagagacgccttggaaggccccgatggatacagcatctttgcctctattttctgctttattttcctgtgccgtctaactctgagttggtttcagtgggtaggaaaaagccacattgcaatgaacaaacaaacagagctcttagttttctttgggaaagagtgagagtaagatctttaaacatgctgcctccaaattcactcacaccaactgacgggaaaggggaaacaaacagaagtgagaacaagagaggaggaaggccgggtccccccatccattcactatttcctaagcatctcccgcatgccagtgctgtgctggggtgaaggtggcataggctggtaggaagaagatgagaagattaggctcaaaggctggttcatttgtttacttccagtacgaccagtgaccttgagcaagtccctcaacatctctgaacctgtctcctgtatctggaagagaagcacatgagaagccatggaaagcctgatgtgtctcaggctctgtgcagggtggttccatttgattctcacagctacctgggaactagtggtagtatcatgcccatcttatagatgacaaaactgagactcaggttgtacttgagagctgtgcggggccactcagctactatgtcacggttgcctggctttaaaactagaggctgcaatgtagggatgggactccacactccactggccacacggggtgacactaggacactagcagcagagaagacaccagacttggttgaaagtggtttgtggactctacatcacagtgatcgtgtagacagctcttctgacagggctcctagacctggggaagctttccaacaagtagaggaaaagggagagagctggacacagaaaaatgggagccactcaaaaccaactcacatgctgcggagggccctgtggagaccctgaagccagtcctacctagcactttggtttgaacacaggctctggaggaagaagagacaggagaggattgaaaagagattgggaagatgggcttacacgtccccagtaagtcagggtttcccaagtgtgactcccatttcacagccgttccccaggcagattgcacaggaatctatgctgcctcttcaaatctggtagggatatatttacttaacaggcatgaggacaatgtgactcgcacagccaacctgggatttcacgcatattaatgcctaggatgaggctgaagtaagtgggatgctgggtaattcctgcgactcaggttgcataagtgccaggtgccaggctcagggtgagggaagtgacctaggtttggaagccacaacactaaatcagcccccataagagccactggtcccagaggtgactgatacctccaccccagggtggctagattttcagtaataaaaacacaggatgctcatttaaatttgagtgcagataaacaatgaatatgttttttagtatgtatatgccctatgcaatatttgggacatatgtatatttttaaagcatttgtttttctgaaattcaagtttaactgggcatcctatattttatccggcaaccttcccccagcctcatagaaggccacgtcgatgctcatagaattgagttgttccctcccctcactgccctcctggcctggacccatagaaagaggcttgcatacagaaggatgcccttccgtagctggtctcttggatgcccgttcctttaactaaactgcagggatgatataaagtgtgttaaagggaagattaaaattgatgcccttagcgcaacgaaagcgaaagctattgaggggcatacttaaggaaacaaagcccttgcgcgatgaagagtgcagccagctccagctcagagcagcaggtggaaayggagaagattcctgcccagcagagatgagagatggagctgccacgtggggaggtggtttagcaagttgggtgccagtgagcccagcaggaatgagtttctcctccactctcagtaaggcctgagtacctgggagagctgcacagctctgcctcttagcatcagcgaaagccagctgggagagagaggggaggagggagctgcagaggcgagatagggaagggcagtatccacacctgcatgcataagcactgattgagtgcttgctgagtaccaagccccgagccaggtgttgggtcttgtctcacgctctttacagggagaccagccagggctgccgaagttctcaggggccctggcttctcaaccggggagctcagagacataaaaagrgagaaagagaattgcagatattgctgggggcatggtgaaagcatgtggcattgagatgctgctgactttagrtatttggagaaggacaatcctgggctaggactccctttttactcccaacgaaagtgaggcacaaaagctattgtgggttttgtggggccatgtggcacggaagtgatagagttagcatttgaacccagatctgattgtctttgaaaccattagccatagtgctttgcttcctcctagattatgaggggtcatgggaggtgtttaagcagggagagatgtcatcaaagcaaaaagttgatgaaattaatctgacactggcggggcgcggtggctcacgcctgtaatcccagcactttgggaggccaagccgcgtggatcgcctgagctcaggagtttgagaccagtctaggcaacatggcaaaaccccacctctactaaaatacaaaaagttagctgggcgtggtggtgtgcacctgtagtcccagctactcaggaagctgaggcatgagaattgcttgaacccaggaggtggaggttgcagtgagccgagattgcgccactacactctagcctgggcaacagagggagactcagtctccaagaaaaaaaaaaaagaaattaatctggtactatgtctggccagtttagatgtaaatgcacagtgatgaggatgctagctcgctcacgtgggagggagcaggtaggaaccgaggtcagggggctgatgggggtggaggacgggatttgctgaaggatctgctcaggggggtaaaggcagagttgatgatgagatgaagttttcagatctggctgctgcaggcagggtcagggaaaggatggcagcacagtagctttggacacgctggatttgaagcgatatcacgtggtccccaaacagcgctccgggcagcagcccagcagtagaaagcagaggggccttggtgctggcctgacctggatgtgcaaatcagcactccttttcactagcactgtgaccacaaactatgtgcttaacctttctgagcctcagtttcctctctagtgaaatggagagctatgatacttactttataggaygttggtgatattaaggagaaaacatataaagggacaaagaaggctggtgtaatgtgcatctctgagctgcagcagagatggtcctggagttggaatagatggaaatgcgtgtctttttattaatctgattttattttttaatacagagtcttgctctgtcacccagccaggctggagtgcagtggcacgatgtcggctcactgcaatctctgcctccagggttcaagcaatcctcctgcctcagcctcccgagtagctgggactacaggcgcaccacctcgccgggctaatttttgtacttttagtagagacagcattttgccatgttggccaggctggtcttgaactcctgaccccaagtgatctgcccacctcagcctcccaaagtgctgggattacaggcatgagccacgatgccyggcctcatctgatgatttttttaattcctactgtgtgctgggccctggggatacagtgtggagaggctgatggggaaactcagtcatcacgcaaagctgagctcacccttgatcgtgagctaaatggaacaggagcagattatcctgctcagcacaacatcccagcacacagtaggcattgcagtaaatggtggtgaatgcttgaaatgcagcacagaccccactctgttagagtcatggaggcagaggcagcaagcctcccctgagtgkcaaagccggtgcagaggagagaggtaaagtctgtctttgtaaccactttctatactggaaactcccaactggggtgaggcattcaagaaaagccggggaactggggagcagggttttggttctcagcctggtaatcccatcttcttttctcccaagctcccatttgtcttaccttttccaaatctttgaaaaatgctggataaacctacaggagttgatcatgtgctctcagcaggctgggaaactggggaaaaggaaaaacagccaagaataaccagcattgtgaggctgcccttcaaggcctcagtggcacatgaccctgggcagccctttcccgtccttggacctcagttgacccatttgtgaaaggaaccccgagtttaaaggtgcggtcccatcataccctgcagcatcttccctttcaaccccttctatttctgtcacatatttgtttttattggaaggctagttttattttttgcctctgtttttacattccttcattaaaagtatttttgtaaaaagagaggatcttgctcagttgtccaggctggagtatggtggtgcaatcacagttcacagcagcctcgaactcttgggctcaagcaatcctcctgcctcggactcccaagtagctaaggactataggcacacacgactgtgcccggctattattatttttagaaatggaatctcactattgcccaggctggtctgcaactactgggcttaagtagtcctcccaccttattcctccaaagctctgggattacaggcatgagccactgtacctgccagaaatatttttttaattacaaaataaagctgcctccttgtaagaatctaagccatatgtactgctttaayggaaaactaattttctcatttattgctgtttcttttagtagattaaagttttgtttacattttaaggtaatataagaatgcatggttgaggtaaaaacctcaacaaagtacaagtgtaggaggaaaattacggatgtccaccttcatggcttkcctcatcctaccccagcttcacgcccaccttggccctgagatgactgttgtttctagataaggggacccttggaatgtcatcgtagacccacccctcaaagccattgctgagtcatggggacatgcccccttttgatgacaagagcatggactctgggtcaggatcagaaggccagcactgctattgacttgctgtgtgaccctcaggcatcctcacatcctctctgatcctggatgacctccttgacaggctggcccagaggagaattgggatctgggctgtgaagtccctagtgtgaatcctgcaaacagcccaggtgactgtrttgtgtggtgatcttggcaggttggggaccagattctagaagtgaatgggcggagctttctcaacatcctacacgacgaggctgtcaggctgcttaagtcatctcggcacctcatcctgacagtgaaggacgtcgggaggctgccccatgcccgcaccactgtggacgagaccaagtggatcgccagttcccggatcagggagaccatggcgaactcggcagggtctggccactctgctcgctccaatctccagaccccagggccwtttctgaaagccagtgatagctgcctcccatccctccaccgccctggctctcctctcagcctgcagtccccacaccagggccctccattggcaggacatgacctgggcacatccctctcctctcttggcctcagtttccccatggaaagctgaaatacaccatccaactgtctcattctttatttgtccccaaattacttaactcattctatagaccttagttgcttcatccaaaaagtggggaccataaccctgccctcatcccagatctgtgcagatgaaagagagggagggagagggaaagagagagatgctttggggtgtatttggccagaggccaccaggctggatcccatgaagaaatctgggtgagagggtcttaaagtcataaactgagatccagttgccaggtggctgcatagttgccaacagtgtaatgtgtcaccttttgatcttcatcagaaatctcaggctggtggccacctggccaaatacactgcagagcatgtctgtctgtctgtctgtctgtgtctctctgtgtgtgtgtgtgtgtgtgtgtgtgtgtgtgtgtgtgtgtgtgtgtgtgtgtgtcccccttcccttcctttcacctgcatagtattaaacattttcaaagttacttgccaacatctagaaagataccaggttttctataaaaaaaaaaactggatttctggatgcttcttaaaaatcaggaagtctggcagcctgagcccacatcggctggagctgagccgcacctgcgagttgcatctgggatctccagttcaccggcccctaagctcctgagggttggcctgaccctgaggttgcctgtcaatcaccatttcttccctccactccttgtgttacctgcctggtcctgmrgggttggcaacaactcaggagcccacctcgggtggttttggaggtgccgtgcacactgctgattgggaggctggacgctgccagtctgtccggagtttcctttacccctgagtagcccccagactgaactggcagcgagtggaggccacgatgcatggttctcttgaagctttgctcttcctgccccaagtcaccctgtcccttgcccacgcccatttgatctgctcaaatgcacaactggagatgtgtgtctttccccacaggtttcttggcgatctcacaacagaaggaataaacaaggtaggacatcctctaaggggtattctctgcttcctcacagctccctgagtgaggaggtctggccagccagagggtgccgagtgacttacactacctcattccaactgggcagccccttatctgcccaccccccagcccacttatctgtgactgactgctaggttctgggcactacctctggcaccagggttgatggcaatgaacagagcagaccaggtccctgccctcatgcgggttttactcagtgaaggagatgtaaagacaaaacaaattctaattaagaaagatagtactatcaaggcaaggtgctgggggttatgagggagaataacagatgaaacaccacacttagacaggatggaagggcagagggggagtggcatggccactcagctctagagcagctaagaattcctgggcttctatctttctgtcttgcagccaggattttacaagggcccagccggctcccaggtgaccctgagcagcctggggaaccagacacsagtgctgctggaggagcaggctcggcacctgctgaacgagcaggaacacrccaccatggcctactacctggatgagtaccgtggyggcagcgtctctgtggaggccctcgtcatggccctgttcaagctgctcaacacccacgccaaggtgacccgtgccctgcctcccwactggcttcagcatttccagggctctgcatcctgccctgcccccgctcctttgctgagaacctacaaggggtcaggcctgaactgaacactgggcagagacctgggactgaggcagcctcctgcccccrggatgctcacagactcctgggggaaacagacatttaaagcgccctgtgattgggtccctgtcgcagtggcttccaacgctgagtgcacagaatcacctggattgctcttaaaagcagtgctcgggccccattccaggctggttaacgcctcatatctggggatgggagccagctgtcagtcatcttcacaagccctccaggtgactgtgctgtgccaccagctttgagaactctgctccaaactgtttgaggtccagaaactgtacaaaggaagaggtggtgaaatccactgggaggggttatgtttcggaagacttaacagaggaaataggatttggagatgagtattggaaagggtattctgggtggaaggttcagacagccagaggctttgtggcatgaaatgttgcagtgtgtccagggagtcacagctacrtgtgcttgctgaggagatgacagggaagcaggagtgagatgatgctgggcctggtgtccaggtgacggtgtttggcctttctcttgagagcactggggagccagacagttaaggaggggaggcagggtcaagtttgcatgccagtcctttgggggtagcagggcccctgttccaccttctagtagcgctccctgctgagtgccccttttgtccccgcctccagttctcactcctctctgaggtgagaggcaccatttccccgcaagacctagaacgcttcgaccacctggtgctgaggcgtgagattgagtccatgaaggcrcggcagcccccaggccccggggctggggacacctactccatggtctcctacagtgacacgggttcatccacaggcagccacggcacctccaccaccgtcagctcggccagggtgagcttcttctgccttgtccctggcttagtagccagggcagagttaagatgctggctttggagtgagaccagcctgagttcgaatcccagcaccaccacttaccagctgtgtgccttgcctctctgagcctcagtttcttcctctgtaaaaacctaatagttgttgaatgtctactgcatgctaggcatgggctctyggggacaacaggtgaacaggagagatgtggccctgcctcctggggcttgcagtctgggaagctgggggagaaaggttaaaaaaaaaaagtaggtaaattaggcaaatagaaaaagatcattagaatccttgggaatgcctctggcatggtgcccactcccgctgggcactcagtagatggtagtgggcatggtaacttggactgtgatttttattttccccaagaggccacccttttgtctctggagcccaagcccagtttgactttctttttgtttttcgagatggcttcttgctctgtcacccaagctggagtgcaggggtgcaatcttggctcactgcaacctccacctccccagttcaagcagttctcctgcttcagcctcttgagtagctgggattacaggtgcctaccaccataaccagctaatttttgtattttttggtagagacggggttttgccatgttagccaggctggtctcgaactcctgacatcaggagatccacccacctcagcctcccaaagtgctgggattacaggtgtgaatcaccatgcgtggccccagcgtgactctcttgcagactcaccagccccccagcaaagcatctggccatctcaagatatggttctgccccctggatgcttggaggcaaatgaatcccaggagacgtttgcaaggaaggagcaggagcatatgcattgttacctgtcttgggaaacaactggttattaaggtccatgcagtggaaaagtcagggctggaggtcaggagagctggcttggccccatgctctcctctatgcccttgtttctcaccgttaggtcattcatcaccactcttctatggaaaggcagtggggagagtaatgtttcttaagcaggcggttgctcccagatgctgaactgagagctctttctggaggaatctcagactggaggtagatacggtattagctgtcttgttaagtgggagagcaggagctcagaggtgtgcagtgatggccatggttataaacacagatggttaatgagtgaggatgagcttgcagccaccagaaaatggcccaggagcatgcacccttctcttttgcaagctccaactcctagtgtggcttttctttagccctgggattctgggtttctgggggtgattcctttatactcttttacccctatccctcccatcctgagttgccatcatttccaagggtgctcatccccttcctgggatgtccccacaagtcgccctgcattcctctagggctggacatggctgcagcagaggcagttccatgttctgggacaagcagatcacttctggggcagggaagaggctgtccttcaccccaggctctgagcacatactttgatatggcatttaggtgaggatctggtttaagggtgcaggtccttggcctgatgactgtttctctctaagataggctccactgagattggccttgataatgttcaggcctcagcagccatgagccactgctctaaaacctgggaaactgcagactgtgcttctacagtggtccctttagaatcagagatgaaatatccagtgaatggggtgggatgtgttttggtctgggaggcaggaggtctaggtttgagccccagcctttctggtcttcagtttctggataaaatggcctggggtccttgctggctctgacttcagcagcccgaagccctgagggcaaatcaggctggagtgccaggagtcaggtgactatcttgcctggcaagggctctggggcaggggtcaggagcccccagctcggcactggcccacagcaaccttgtcccagctcagggggctctcccctacctgagaagcaccatctggggccagtccagatcccagctgtggaagttggccctgctctgccagaggggctctcactgcaaattggggcaccctggggaaggcaagcctcagaaaggccatagggtggttttatacagggagttttttgggacagatgaaaagagtggtcctaaaggttttccccaagtttctgaggtgggaaggactcagaatttgtgactgtgaaagtccatggcccaccaggtggcacatgcatgtcaggattaggactctcctagaccagggtgagcccctggaagtgattctaagagaaaattgtgcaagcaggaaaggcagcgtggaaggggcacttgagctcgcggtgccttgatttcctcttttgcagagggrcagtgatactacttccyccagcttgttgggaggattaaatgagaggatgcctgtgggcccagggtgagtaacctgctagtaccagcatcccagaaatgctggccacaccctgagggcaggtgaagcctcggttcttttggacccagcccacctggctggggaaaactacctggagattgtacccagggccttggggactcgtggagggtctggaaagtgctaggctgaaggactgccaccgcccccctgaccttcatcccacccaggtaccctccacatgcacagtccagagctcccttccacagattcagcttctctgacatcacagggcttgggcctccctgaagtccaggccttctccaaccgaggcttccaaacagggccctccttgaagctctgcatttcattagcaggtgtgacctcagacaattcacttcccttctctgagcttgtttctctctctgggaatacggatcccagcctcgccccaaagtaaatgactgtctcctgaaggccctttagcagggacaaatgtcttttctttagagcagtggggactcgcctgtttccttcaaggaggcaggcagaatgaagggatgctggtcatggcagtggggtctttccctcccctctctccattattcctgcccaaagcattcaaggtaaatagaaaaggggtttggagaatgtgtggattttgcatgtgtgtgtgcgcgtgtgcatttggggaaggggttgttgctgcacccacccattccctaaatatttatttgatgtatcttttctttttgccttttgctcatccttcctccccaggagcggctgctgtggcttatagacctgatggaggtaccgtccttcctgccggtggggactgtgggagtcccttaaccaggggccggggtagggggctgtggccttttctgccacccccgtatgtctgcacccagtcctggtggggaccaggggttcttattggtgctgactgtctttccaggtcatcaggtttcctgagctctgcagtgagaatcccrtccattcaaatcccagctctgccactttcttgctgtgagacckcaggaagtggtttcacctctctgagctcagttttaggatctgtaaaatgaggatggtaatttctgtcccgtgatgttgagagaccccttggcctttgcatatgccatgtgctttctgtctggaatgttcttctccccacttcatatgacctgactttctcctatgtgtgcttcagccctcagctcagaagctgcctcttccaagaagacttccctgatcctcccaaggggagtgactttcaggccacggctcctcttgcccccgggcttcctttggtcacagctcttgcctcattatgtcctattataaaagcctgtacaggtttcccagttacccaatgtgactgctgactgcttgagggcagcgatcgcaygtgcggttaccattgagtccctatccctagtgctcagcacagaccctagcccataatttgggcctttattaataacaatagtggctgagatttgttgaatgttctctatgrcactgtggtagtgctttccattcgtatcttctttgaccatcccaggagctaggagttgtgagtactgctgtgatccccattttacaaagaagaaaaccaaagctcagagaggagaagcaacttgcccaaggttgcatggctagtgagtgatggagccaggattcaaacccaggcytgcttgactctgagctctgttgttacccctgccatctggctgtgattcttccctgaaggatctcaccagctccctgttaagcatcatttcgtcatctatctgcctctytcctcccttccttcttcttgtccttcctttctgttaacaaatattgagcatttactgtgtgctatgtacattttgaggttctggrgatacagtggtgaacaccaaagaaatcctttccacgatggagttgarcagacagcaggaatgccaggcaataacacaggatatagataactgaaatacacagtaagctaaatgatgacaagtgctagggagaaaaataaagcaggcaagggagactggagaggggtggggtggttagggagtgacccttgagtcaagacctgcaggtggtgagggagagagccatgccaacatctgggagaagagcatttccaacagaagcagctgcatgtgcaaaggccctgaggtaagagaatgtcagagaattccaggcggccaataaggccagagcagagggagtacgggggcagacatgctgaggactttgactctgagtgagatgggagtccttggcaggtaagagcagggaactgatgtggtctgacttcgatttaacagggtccccctgattattgagaataggtaagagtgggtttgtaccaaggtgaactggttaattcctaggaaccagccacacccagaggtctgtgggccacgaagggcctgggaaggtcatgcagcctgagttgctaaagatgtgatgatgggttctgcaggcaccagctcctcctgtggctgggtcagcccctgccctgttgtctcctgggaacccctcttctccccacccccacacacagcaggtctcagattggaggcccttttgctcacccttcctcaggagcgactgccttttgctcacccttcytcaggagcgactgctgtggtttatagacctgatggaggtaccacccttcctgccggtggggactgtgggagtcccttagccatgcacacccatgttggctgcatgtgtggccacaggacaaacctcctccacgtggaagccctcctgcagagtacgcagggcactgggacccatcctaggagtctggacccccacaccggtactccactctgtctctcccaggcagtgtgctctcaagaaagcccctcactcactcttggcctcagtctccccatctgtacaaccacggaagacccccatggctcctccagttctgagagtcttctctgcatcaggaggtgctggaaaatatttgggggaggcacagcaaggaatgacaactctatattcccacctcttctgtgtatatttgaacaaggactgcagcattcctccagagagagaaagagcttgaaataatcacctttattcaccactaagtgccrctrtgtggtctacaacaccacatattagtaagcttttgctgcagtaatgctgagtaataaccctaaaatgtggacaacaacccaaaacataacatggccaaaatcccttcctgcatggagctcacacactcctcatacctctgctaaatcacttgtcacattgctttaacctcttcgtgggtttcccttccccaataaacagcgagagctggtgcaaaatggaggcccrgaaagtgtggaacagaaactggaaggaaagcacacactccccggccacttgcaggattatcttctactatgcggccttctaaacattcgcctcccacatggtaggaaaatgttctttgttctagtgttcagttgggcaagatgacatcaggtggctggctatcgatgaccgagatgccccagacactggccccaaatggagccagtttccatttagcctgaattcctcggatcatgctgtgtggttattgatcccaggttaaatgtggctcattctgcagccatttcccctcaaagcagacacagtcaatcaaaggaaatcagatccagctttcccccattcacaaactgtgttgattttccatttgtctaacagagagccagccctgagcattttatgctgccttcacacaatatcatttcccccataaagatgttggccgagagagcagagtgaaagaagaaaggcctgcctgttatttcttgaattcttcatctagtgccagcatgcctgtggcagaggggcttaattgcacagattctgggatcctaccagctgggttctgctttccagagtagtagctttgtcaccttgggcagatgacttgtgtcttctgggcctccatttctgcatctgtacggtgggctgataagaccagctgtctgggttgttctgaagattcagtgagatcaggagtggatatgcaggtgtggagtgtggaggagcccattctgtttctactccaaaggttggaaaagggccctgtattaatccgttctcacactactgtaagaaactgcctgagactgggaaatttatgaagaaaagaggtttaattgacccacagttctgtaggccgtacaggaagcatggctggggaggcctcgggaaacttaaaattatggtggaagtttgaaggggaagcaggcacatcttacatggctggaggaggaggaagagaagggggaagtcctgtacacttttaagcaaccagatcacatgagaacttactcactatcacgagaacagcaaaagggaaatctgctcgcatgatccratcacctcccaccagattcctcccccaacactggggattacaattcaacatgagatttgggtgaggatacatagccaaagcatttcaggcactgcagagcattgtagagaaaaggggattggagaggtcaaggccagccttgtactcaaggagcaaatgcccttgaggtcaggtggcagcagctgggatttgccctggacttgacctcaggctttttccacctggatttgagagagtttgtgctccagccctgtcatatgcctggaaggaggctcccagcccctgcccaaggatgctggggacaggatccctgcccctgaaggccttactgtccttcttccctcctcttgtcccccaaaaagaaggtgaatagggggcagtagatgtggctgtcagtgcttctctgcattggcctccttctgtggcctctgtgcctccctccttgtctgcagcacagtgaactgggagaagctcaggcttgtctcaggcccctccagctgcagggacccctcactgtcaaaccagcttttttttttcagaaacaagtagaaaactgtcaaagggccttatttttcctcctgcatcctgactttggtccaacctggatggtttagagaatcgttctccatccatgagcggggtaagagaggaactccatgtattccttcagtcatgcgttcagccactccttcttctatgcagcagcctttgtggagcatctcctgcctgccaggggctgagcctgtgctcttgaagctgatcaagtccagtggaggaggctacctcaactcaaatcatctccataactcacactctgataaagcgggctgaagggtggtgtgagaacatacatgggccccgaccagtctggggtacttggggagagaggttgaagctaagatctgaagttgttggctacagccaggcaatagatgaggtgagacagctgaggagctggtggggcatgtctgagggccctgagcaggttggcacatggccactcagaagaatggaaggagaccagtagggctggagtgtcaggagtgaggggtagaggggcgagggtcaggagcgggaggcgtttgtgtttaaccctaaaaccatgggatactctggagaatcttgagtaaggatgtgatgtgatcctgtttgtgttttttttttttttaagagatagggtctctgttggggtagctcactacagccttgaactcctgggcttaagtggtcctcccacctcagcctcctgagtaactggggccacaggcgcacatgctcccatgcacagctaatttttacatttttttgtagtgatgggggtctcactatgttgcccaagctggtctcaaacttctggcctcaagggatcctcccgccttggcctctcaaagtgctaggattacaggtgtgagccacagcacccagccctctgtttacattttttaagctgcctcttctgtgtggagagagcccagaggtgcaaggtggatgcgggtgaccaggagaggctgttgttcctgtccagatgacctcctgtcccccaccccaggaagctgctgagtgcccagagagggcatatcgaggatgataggtgtcttctccttgagtagaagagcccactccatcccagggaggcctcagcatgtgccccctgcaccttccagaatcatcagtttgcccagaggcattaaagcctctcaggccggccacagctttacctggagcctgaataggaccattcctctcagccagtgctttgctgtctctgtagcrgtttatggaacacctgccttcccctgtgacaacttgggattgctggaagctctttccaccaaacagagccaagcccatggaggtcagagcctgtttgaacatgggctggccccagctgccctctgagtgaggacttcccaagctatcaaaggggaacttggacaaagcactgacttaggactgggggtcttcctcatttctgtgccatagacccctctggcaggctggtgaagtgctgggaccccttcttagaataaagctttaaatgtttaaaataaaacacaatacataggatgacaaattacatcaggaaatacctgatataattttcagaatatgaaaacacaacgtaaaacatgctactttaggacagcaataacagggttgagcagtgagtcagtaactgctgtaactgtgaagccaagaagtgcataaatgggattttgtgacatctgtagcagctggaatgtgacgtgaaagatcagtgctctctgtgggtgaccatgaccagttcctctgaggctttgttgcttctgttagcaatgaaaggaaacgtggcctttcagttagaggttaatggaaatgaagatgtaacagttcccccagccaagttctcgggtgcctgcattccctcccaggagcrctggtttccagccttatcctgagggctctgcttgccttaaccttctagagattctgggtcactctctctttccactgacgtccttttcttaagaccacagggagggaggcgtggagcaggtttcagcttagcaggaggaagcctggtctgttcagcagggcacaggcctggttacaaggaggcagtgacttctgccccatctcaggaaggcttcatgcagaagcttcccagagagctccctaatgttgtgatttggtggtcaaatatgatagccagaatagacaggctggtagaaaagcacagtgctggcccagtgttgaggttgttcttgtgatctcagccacaccagccagtgcggggcccagttagctgctttcaggattatttctctcccattctgcacctctgacctttccctttggcccacagacttacacccctaccctgtgcttggagagattgcaggtccaatgattccccgtcgccacctgcatgactgacacttccagggtcttgtcccacaaatctctggctccctggcccctgacccttcactctggggagccccactgccccccaggaatgccaggacttcctggctctccctggctcacatccctgtccctccatctccctacccccgtagcctttcctgggatcacaagctcctcttcccagcccagctctggccgtgccaccggacttgccctgctcttttctttgcttcttcagtttctctacattgctctccgcctgtgccttttctgctgaatcttctgttttctctcttttctgttattctccctctaatctctttctccctctgcctttatctcccttcctgtcagcagccccttcaggcaaaatctaggcccccactggcgaatatccagaggcctttgtgactcagtgcctcagtttccccacatacagaatgaagaaagaaccactcagccttaggcctctggtgcattttgggatgggagttgggggaccctgttggcttgacagaagtacagaagcccaacgaacaaagagctggaaatagcacctttrtgtaacagccctcccattgtaatgaggggaaggaggcctagaaacccggaattgggctgaggggaggagaagggctaggagggagaagctgcattttgctgaggtggccccgcagtgcccaggcagcctcaggctttgacatcatgcaggggagccttacctgcccctgagtccaccccgcaaaggttgcccctcttcatttcatccccttacagttccccaagaccacacttctgtgatacctgggccctgattgggccaactcaggaaataaggggttcttttctctgaaaaaaagggaatttgctgaactgccacaggtttgaggaaggaggtggaagaacaatgacagcaggtcatcttggctcttatgggaagcaggtttttgtcggggatatggagtcgggccttgaatagagttcagctttctgccctgtccttgctgtgtgaccttggacagatgaccttyccgctctgatcttcagtcacctcagctgtagagtgggtgaagggtcccatctggcaggattaatggagccgccaggtctatgccctcactgaggctctggcctcagtgggtacagggggagggggcccaggtggctgtgattgtgtgtgggtggtggtgaaagtgaacaggcccagctcctgcatgagctctgaccttgagcctcctctggaagcctgttccgcaggcatttctgctgatgcatcccccgggttcttagccggctgtctgcagctatttcagatgcataaggaacatggctcggggacttgggactcctgagcgtctggattcagcagatggagtctggcagggctgggctcagagggctgggctccgacccgtctgccatttgctccacttcaggcctcccygacagggctggatattcatccctcgtctacccctcaccctcccaaccctccacctccacctgccatgtccccaggatgcagttagtagcagggaatgaggctgaggacagggccagctatggctgccttctctctcatttccaagagggttgctcatgggggcctcaggttcctatgacatcaaggccctgttcrtttctggggttgggacagtgtagtatgggcgttggggtgacccagaccygggttagaaaccttaccttctgtagaacggtcagatgaccttggrcaagtctcttccctctctgaacttcaggtgtaatcgatgtgacaagggacagtcctagtgcctgcctcacagggtcattgggaggatcaaatgagataatataagtaaaacacccagcacggggcctggcgcacagtaggtcctttgtagttctctaataccctttctgggaaaaagtcacaccctccctgagcttccctggaaagtcatggctgcctgataagagcttcctgcacagctgaatgtgcaaagcccctgatgcgccagagcagggcaggatcccacggcattggtcctaccatgtactgtcatctgagtccaaccccagcttcccccaggatcagctgcaggttgaattcctggggcagggggcagtggctccacctgaatgtggcagaggctccccttgtctttgctgtagatacctctgaggctctgacccctctctgtgcctcctgctgacaccaggactatgaatgttgagcctgaggaagtgaatgcatgtcaatcactgcctcactgttcaccttaacgcgcctggctggactacttccagggagcattggactcattatggtcttggaggagggaggtggtgtgagagggctgccattcctttccatcctagttgtcatatgggccaggacacgtctcgcggttcattctcttgctggggcagattgcaaggcctcccagtctcccaatgcacgtaacagtcaccttcctcgtacattgtgccaggccctattctgagtgctttgtaagtgttaacatgtccactgcctaaggcaggtattgctgttaacctattttacagaggaaggatttacctaccatcactcagctgcaagcggcagaactgggtgtgagctcaaagaagcctcagagttggcagagccagaaccagtgtcactaatcagtgagtgagagagcagcccaatcaccctcgcccttttgaaagaatccccccaaccaccacataccgcgcttgcatcacaggggctgtcagcagcagattcctgtgaggcagtgtgcagttaacaggtcaggaccaaggtttgcatgtaaacctcaactttgtggggaaatgggggcagttgcccctgcctgactatgcccctgaagcatcatgggaccagatgaggagctctgggtttgcagggctctgacccggaaggcccgagccagcatcttgtgggtcgagatggggatatgtgtggcatgactggcctctctctgtcttaggggtatggcgtcaggagtgccttctgtccccacctgctgccttcacactcagacattcattactgctcactgcagtgacctgcagcaccacccccctcaactccctgcctgctctggcctcctccaatgatggctagagtgattgattcattcattcatccatcctgccattcattcatggattcatcagtttgcttcataaacatttatccagcagccactgttctgaaaagtgaggagagagtgaggaccgagtagttgcatgtcctgccttctcagagtttatatcctattgagagagacagacagtatgcaaagagtataaagtcagatggtgataggtgttacacagaaaaccaaagcaggaacgggatagacagggatgggggtggggcagtactgttttagacagggcttctctgggagggcctcgctgaggtctgaactaaacaaagtgaaggaatgaaccacagtgtggtgcagagtgagagcggcaggtgcaaaggccctggggcagtaatgagctygtgatgttggagtagcaggaaagggcccggtcatgtaggcacaatgagtagggtttggaacttcctccaactgagatgaagaggcccttgggggtcctgagctgcagagagacctgacatgtgtttctggcatgactccctagctgctgggtggagatggtgatcaatgagaaggagaaaaataaagcaaggtggagtggggtgaggggaaggttacgattttagctgaggtggtgagggtacaccttgtcgagcaggtgacaggtgggttaggttttggaggtgagcgacagcatgccttgtggatggatagccaagcagaagagtcgcagacagagacaacagccagtgtgaaggctgacacatccrtggtgttccagcctggctggagaggatgtgagcaaaggggatcttcgtagaaggcaaacttgaccacatctccatggcaacccactgccctcaggcttaagtgcaagagctccatgcttgacttctgtggagctgctcgggggttctcaaacatcctatctccattcctgctttacaccctttcctctgtctgaaacacctatcgttcccttctttgctctgctcactcataagacctagctttgagttgtgccccgtcctccaggaagccttccgtggtaacccctcccccgattgcattatatgcctgtgtttgcccattggatgctctctctgcagtctccctgttgcttgtttgcttgtcgactgaccccattgtctctgagctaccaatggcagggttggtgtcccacctytgtgtccccagccccttatcagcctggagcttcagagactgctcagtactgatgagcactgcagttgagacctcagccaagtgttgatgtagccagcagggttctccagagaaagagaagcaatcagttatactatattgtgtgggattggcccacgcaatgatggaggttgagaagtcccctgatctgccatctgcaagtcggaggcccagggaagctggtggttttgttttagtccaagtccaaaggcccaataaccatgagctccggtgtctgagggaggaggagatggatgtctcagctctagaagagygygcaaatttgcccttcctctgcctttctgttctgttcaggcccttagtggattggatgaggcccacccacattggggagggtgagttttgcccagtccacccattcatatgctgatctctcctggaaacaccctcacagacacacccagaaataatgttttaccagctatctcagcatcccttagcccagtcaagttgacacgcgaagctaatcatcacagtggtggaagctcttttccattctgggctctagggccgagagaactggctcccttagccctcaagagagcccagctcagagaggagctccgatgggcccyccatagacggcccacaaatggccttttggcagcccagtgtcacttaaggaggcattgggtttcttcttgtgaattgggaagggaagaaagaaatagacgttttttgcaaaataaggtccatttaaaccttaaaccaccaccttgggattaaaaccattagaattttaaaaagggagagactttccccatccacttctctcttgccattttcacaccttcctgggattcatcagcaagtggtggagagaggccttggcttttggaggcatgactgtggagcacagcgctcgtggccaaacccaggaattcccagcccaggctagagatgccccagcatctctggcagttcaggggatgcctgaaaatgatcagaaagtcccaaagaaaacttaacttcaaagtgaccagcaggcaaattgaccttcattttaatgggtaaagtgaatttcgatgaagtgaggtatgtcagggctcacatgaaccacatggaggtgtcctaagacttcctcaattttggtgtgctggagaacaaaccagtgttcccttctcagcttctgtttgctcactttgctttctcrtccatttctagaacactctggacctggaggaaactggcgaggctgtccagggcaatatcaacgccctcscagatgtgtccgtggtaaggccctggctggccctttggttctgctctccctggtgtgctcaggtcctggtggctctctcctctccatgacagccacggagaaagggcacagggtggcaaaggagacagaggcctctgccatgagctctcacacccagctacaggtctgtgcacaagctcaccattctagtatctctagcaggcaccaggatcacttgcctctggtgacttcaggcggggccttcaggctggctggccacagtatgaccaagtttcttagcctctctgtgcctcagtttccccgtcggtaaagtggggatgatgatcatagcatacctaccccataagttcgtggcatggagtaaattaattaagtaaagcctttaggatggtgactggaaggttgttggagctgtgcaggtgtccggtgttgacctaggcagaggggagtggtagtcacagtgtccatagctgcccctcactgtgcacctgctgtggcgcaggcactgtgctaacagtattcacgtggcttttgacatcaccacaccacctctgctgggtagatgtgcttttccccattgcccagaggtgcactcagagaggtgttgtgccttgcctggggccacatagcaccccagcccatgtatccatctcctcctgtccattctctctccagtcctttcatacctcttgcctctagtactcaagatcaccccctaaaaagaaaagccaaataaatgcattttttgtatttccatcctcttcatcgtgtctctaatgaagtcttgttccctgtgacaagctctggctgatgccaagaacttcagttcccaaaggtaatgatgctgtccccagagacacccgccaagatcccaacgcttatcagctgccgagatgcaggggagaagttttccactcaggtgttgcattattcagagcagygtggccaagagcagttagagtggggacagaattccagctgggcctggcaccactcagctgctcggcctcccctcttccaggcgtgatggggtctgactccttctccgcctgttgggtcttttggcaggatgatgtcagatccacctcccaggggctgtcaagcttcaagccactgcctcgcccaccacctctggcccaaggcaacgacctcccactaggccagccaaggaagctggggagagaggacctccagccaccttcctccaygccttcctgctcgggcactgtcttctcggctccacagaaccgcagcccgccagcgggcaccgcacccaccccagggacctcctctgcacaggacttgccctcttcccccatctatgcctccgtctcccctgccaaccccagctccaagaggccgctggacgcccatctggccctggtcaaccaacaccccatcggccccttcccacgsgtccagtcacccccgcacctgaaaagcccctctgcagaggccacagtggctgggggctgccttctgcccccatcaccctctggccacccagaccagacaggcacaaaccagcactttgtcatggtggaggtccaccgccccgacagcgagccagacgtcaatgaagtgagggcgctgccccagacgcgcagtgagtacagcaaggccaggctctgtggtccttgggggtccctgtcctcttcaggtcagtctacctgatgacacagtgaagggkgggaccagctacttgttgagggggctcagggccagagtggcgaagggagttggagaccccagtttgaatcccggctctgccactgactggctgtgtgactgtggacaagctgccgtctacaccttgctttccccatcataaaatggagataacagtgacagtcctgccaggttgctgcgagcgtcggggtgccttctccagctccccctaccctggccaccctgtgttcaccaggaggactgaactcgtggagggcaggggtggcttcccttcctgtccsccatggcctggcctggagtagatgctggaaactgaagtggcagtctctggacccctggcaggtctagggtcagggtgcaggaagaatcttggggaggccagctgacgctgtgccccggtttgctagaggacatgggctgtggggtagagggaagggcagagcctgcctccccaccctgaaagctgtggagctcccgcctgtgagtgagttgggagcattttgttggattctgctgccatcttgcggctacagtgatacataggccccgtaggacattccctgagcgcctgcacagaccaagatgcaaaatgcagggctctggcgctsgcagcctagtgaggggaggcagctgagggagagcaggcagacgtggtgagaagacccagggctgtcacagatggatcactgctgtctctagagctggcactgagctggacatgcagggataataagagctaacagccgtactaacaataagcactttgtgccagtgttcaaagggccttgcctatagtattaactcatttaatcctcccagtagccctatgaggttggtactattattatctccattttacaaatgaacaaactgagacatacaaagtagtaatttctggctaggtgcagtggctcatgcctgtaatccaagcactttgggaggcggagacgggcaggtcatttgaggtcaggatttcgacctcaggagcctgggcaacttgctgaaagccccatttctactaaagatacgataattagccaggtgtggtgggcacctgtagtcccagctactcagaaggctgaggtgggaggaccacttgaacccagaaggcagaggttgcagtgagccaagattgcaccactgcactccagcctagatgacagagtgagaatctgtctcaaaaaaaaaaaaaaaaaaagagagagagagagagaaagtagtaatttctagcttaccaagagaaaaagagaaattccaccacacctggtctgaacctctgcatggcccctgcctgagctgagtggtgggcacatgccctccagcccaccagtcaacccacgctgcttcactatgtgtataacagccgggcccctgagtttgaaaccctaggttaagaacccacaccctggagccaggcagtctagcacaagtctattccctggactgmtccattctatacatcagatctgtgagtttttacaatcaccccagtggttaggcaccatcatttctgtattagaaggagaacataggaggcttagagaggctctgttacttgcccaggcttgcacagctggtcagtgggaattcaaacctgacctgccagactccagagtgtgtgttcttaagttagggtctcaaactcaggggccaggctgttacacacatagtgaagttgactggtggctggagggcatgtgcccaccactcggctcaggcaggggccatgcaggggttcaggctaggtgtggtggaatttctcttttattcttgggaaactagaaattacttatatgaaatcttctaatttgaatgtgttggttcatcattaaaaattggtagcattatgtgagttttaaaacaaagaaaacacccacatctgtgggctaggtttgcctcctgacctctgttttatcattatgccagtggctgggaactgggagatccaggcagatgtcctggaagtcacagccttcaagaccaggtctggttgaaaggacaggycttgagtakgtggagagggtggcagggagtggacctgccctctggccccacgatctcttcattccttcccccatctttgcctggggaattcccccagccttccagcctccatctccgtcactgcctccaggcagccctccctgaccccagctatataagctgcttctctcttccttttcccctctccagcagcctctacgctctcccagctctcggacagcgggcagactctaagygaggacagtggtgtggatgctggcgaggcagaggccagcgccccaggccgaggaaggcagtcggygtccaccaagagcaggagtagcaaggagctgcctcggaamgagaggcccacagatggggccaacaaaccggtgagccaggaggaggaggatgcagagggctgagaggaacacgggccccaggcacagaatgggaggtcccgggaccagggctcagcttggcaagtgaccacaaagggaggtagtgagctccctataactggagggatttggrcgtcctggaggagcactggattaggaatctggaggcccagtttcagctctgcctttgcactgacactaggggctgaggctgagattggtcttgggaatctttaagctcctctcagttttgacatggccaggtggctgagacagtcttcggagtcaggcttcgattcaagtcctgatgccaccaccagacagccttaggcaagctccttaacctcctgagcctcggggattttggtgaggattaaagagccaagaacacaagtgcttggcttagtgcgttgcacacctgaggctcccgacacagggctggagcctgagctctgctgacccagggtggtgtcacggcccggcccagccccctggccaggcctgccaactgcgaaggcctcagtggtgtccttcctaatacccacagcctggacttctggagcccacrtccactctggtccgtgtgaagaaaagtgcggccaccctgggcatcgccatcgagggtggcgccaacacccgccagcccctgcctaggattgtcactattcaggtatgtccccaggggccccacttgccatctctccctacccctgaaaggccctttctcagcatctccagggttttgcgactcccatgggtaacacggcactcaagggcagacctaggcttatgtcacctttgctcttccgggcctcagctttcctaatccgagaagtggacactcagattgtagctgcctgcttggcagtgttgggactgacccagttggtggtcaaagccaggcctgtctaacccttgggcaccccatgccctgtgtctcctccctgcagagaggcggctcagctcacaactgtgggcagctcaaggtgggccacgtgattctggaagtgaatgggctgacgcttcggggcaaggagcaccgggaggccgcccgcattatcgccgaggccttcaagactaaggaccgtgactacattgactttctggtcactgagttcaatgtgatgctctagaggccaaggcctgagggcctcccaccactgcccagcccctggtcccagtccctttccaccgttggcttcatcaagctccttgcggggttggggctgcatggccagggtggcaggaagacatcccccctccatcccagcccactggaccagaactgggagaggaagagagcaggacaaggcagacagaaggtcaggtcaggaactggtgctgtactgggtacacagtaggcgcccaggacaagtgggttgcaagacaggaagaaaggaaaaggaagggcagagtgctggtttctccaggttgggttgggggcactgctgtcccccctccagctaggacccagcccatccccagatgcctgagcctttgtccaaagtgaggtcactcgagaattcatggacacggcccccagtcagggggcatcttgcaagacctttagtgccacaaataagcatcgagcacctccccattcacacccccattcctcctggctccttatcccccatggtgtttattatttatttccctccccatgcccctggggaccccaaggccccagcttccctctgcacccccagcctatcccagaggccttgcaggtgaccagcagtgtcattgtatttatatacagagcttatgactttaatttttcaataaagaaatctgaacaaggttagacgtcagcgtgctgtgtggtttacctgggtggctggggtttccatgtggggaggggtgggcaggacaggtgggggcagtcagagcaccacagaccaccaccccgactgcccgcatggctccaattgggatacacggtggggcgtgcaggggtgcttgagccacactcacatcttggagcctcttaattgaaggcttgaaggcaaaacttgactatttacagataatatttttagattaaaacccacaagtatattatgaggcagaatgcacaatgtgcatgaatgttttaaatctcagatgcagcccattcctttccagaagctgccttggagataaggatttgtacccaatcaatcgtcaagaagtgccctcagggcagaccagcaaggaagtggggaagcaggacagggaaggggaggaagccaagcgaaggtgagatttcaggcaaagtctgcagaaggcagcttcagcctgatcccaggaggatcccagggcgtacactaggcctagagttgtctccactcaaggccagagggctggactttgatgcctgtcagtctttagacaaagcctacagagagaggccataaattcccaatcacttcctgctctctacctatgtgggtcaagctgttccagtagcctaggacagcgggtgtcagagcaaaacatatgggatgggctcggaggaaaaggttgcaaacatggtctactgtacggcctcagtcccggccccagtgcttattccttctgtcctcaatatttgtctggaagatggaagagtttgagaaatcctgctttgtccagttctgtgtccagagttctgccagaggtgggttagggacagttggttccatgctcttgtcccagatcctgttcttggctgtccttgttctctttccagcctgggcagaccacctgagacctgagccatggattcccctgaggcagctggtgtttcagaaggcacccctgccatcccctgacagggtgctgttgaccctctgcagggaatgaccctcccacctagcagcaggagggcttcgttaggcctcagatctcctggcattcaactccaaagcttgtgtggtcatgggcaagtaattttacctctctgagcctctagttccccatctataaaatgggtttggtaggctaaataatggctcccaaagatacccagattcaaatccctggaactttggaatgttactttatatggcaaatgggattttgcggacatgattaaagtcttgacatggggtggacccagtataatcaccaggctcttataaatgggaagcagagaaagatgttaacagaagaagacaaggtgtgtgatgatggaaacaggttgctgcagtgatgtgctgtgacgatgaaggaagggaccacgagctgaggaatgtagacagccactagaagcagagaaaggcaaggcagtgggttctcccctcaagagcctccagaagaaagctgccctactgtcacctggacctgaagcccagagactcatttcagacttctgccctctgtaagagaaggtatttgtgccgttttaatttgttacagtagccataggaaactaacaatggagctgccacccccagcagctgttagtcacagccccatgtctgtacttggaaggagtaggacaggaatgagtttctggacttgttgcttctggaattcctgggcctgactctgaggctgtagcccattgagtgtatgggttcccctcccagtagaacttttaacctaaaaacattcctttgcaagtggtcttagaaaggtccagttagttgtccaaagtcacacagctaaggaggacaagtttggacccacagctgccttaagcctgggtctgctctttcctgcacctgtcctggtgtcttttgaagggcccagtgtggtaggctaaggcagcttcaagtactgggagagtggggggagggttgtcagaggtccatcctggccacatgtacctgtgaccctgacatttttactcatgatgccaaagtgggggttggggggaatggagtctcagggtctgcttctcccttgctggagaatgctgggcaggttacacaatgcaccaagcctcggtttccccattctgttcaagagtcaggaccgccatgctgctcaaacccagaaaaacacttcacttccatgacctgtgtggaaaaacaccttgggcccttcctacactgacattccagggccagagcccagaaggattagctaaaatgtttgcccctttcacagagcaggcccttagtgggtagaagctgctgctaaacttactactaaatatgtgtctagggagtagcaggcaacctggggaactggcaagtgctttctacctggaggaaaaattccaaagcattcaactttggatgcagctggatgagggaccttgggcaagtctcttcttgcatcaggacttattaaccctcttgtgttaatagggtcggtcaaggtgctctttaaattagtaccactgatttatttctgacgggcctgccattatgtttatttatttactctcaacaaccgcataagatgtgggtatgaatcccatttgcctgaggctcactggcagcaagtggcagagctggggcaaagagcccaggtgagttggacaccgtgcatccttcaaggtgtgtgtgtggtggacaaggtatgatgtctgtgctgcactcacagcgggaccttggaaaagttcttgtccgtcttcgggctgggtttccatgcttgcctgatggggagttggacaagaatatacttgggggcggtggtgataatacctacctacctcataggagacgactgaacagcagaagagcttccaacaggtctgacccataatttgtgatcaagaaaagtttattattactgttactaagcaggccgtttcagccatggaagtttgtgatttcctcctcactgtggctctgtgcgatcttttttttttcttttttcttttttctttctttttttttttgatggagccttgctctgtcgcccaggctggagtgcagtgacgcaatcttggctcaccgcaacctccgcctcccaagttcaagcgattctcgtgcctcagcctcccaagtagctgggattacagatatgcgccaccacgcccagctaatttttgtagttttagtagagactggtgggggtggggggacggtcaccatgttggccaggctagtctcgaactcctgacctcaggtgatctgcccggcctcccaaagtgctgggattacaggcgtgagccactctgtgcgatcttgcgtaaatgccttaccctccgcagaccgggcctcgatctccgggtctgcggtggggctgattgcagtaggcacacacagcctcccaggtctgagattttcatcctgcagcagggtttgcgctccctatgtccgagttcctgggggcgggccgtggcggcggcctttcggtgattggtgcgctcccagaggccccgccccccccgggccgccccctgctgtcgcgggcgggcctcagggattatgcaaaggagccaccgccccgccccgcgcccggattggaggcctttgtttgccgctcaactccaggaaaccacccgcgctcggcggccgccagcaggtgagactcggggaggggctcgcggggcgtccggggtggtccctgtccctcgttgggactcagtttctccgtcgggagaatggggagggagagtggacagcgccagtgggctccgttccactgggacggcgctgctttcggtcttttccacgtggaaaccccacgcgcacggggaaggagacgcatcaccgctccgggaatgggagggagccctggacgggcggtatgggccccagtccaaaccgtgccggccgcggggttcctcagtctccaccctccggcctcagtctccacctctgcacaatgggggcgttggctttttctctttccagctggggctggtggcagggaggggaggggtcccgggggagctcgggggtgggccttggcggggcctcgggctgtgtttgggctggaggcgtggcccgggttgctgtggttactggggaggtgaggctttctgtctgggatttgtgtgagattcgttcacccagcaacaatccgcgcagcctggcggccctcggagccgcgcgcgcttcccggacgcctaacgcaagtttcttttcctctttttgtcgcgggggggaaggtagaacaagggccagtgtcgggtaggcagccctgacaatggtaggaactgaacgggctgcaaaaataagtccagttccctcttggtacacctgcggaggagaatgaggtccagagagggggcgcgactggcccaagggtgcacagcagggaggcgcagagctgggctctccccagtgtgatggggctggcacaggcagaaccagagtctgcttgctgcgtgaccttagacgacacttccaaagctcctttcccgggcttttgttgaaagaaatgacggattggagtccatcattacctatgtttaaagacctgcttctgagatagtcggaagggaaaattgctgataacaaacctgggctatgttggagcagagagaagctgagacaggctgcagtgaaaagagacattgttcctgtcctctagaacagaaggagaagaaatgggctggaactgaagcatgaaagactaaagttagatacatacagggacttcccaaacgacttttccaggcgccttctctggaattggtgggttttatttgggggctgttttgttaataaaacaatggctgcccatctgttagagagggcctaagtctggtttacttactaacaaacaggggagcggaacctatggtgttttgggactctgggtttattcctggggcagtcgtctcacagttcttctgcaggagggaggcgatgtccacgtggggcctttgcctcctaaagtccagccggtttgcatttaaaacatgtgattggggctgtttgttgcaaggggatttcatcagctcccaccgtcctgcagactctgccagaggcgctaggataggggtttccagagagactgggaatggtcccagctacagggccgtcatactgagagggtgttttggaaattggtgcacaacatggacacttcagtttccccccgtgggggcgtggagaaggaaaagtatttttaaagcattcacatccccagtcgaattcctggtcctttttatgtttcctcagtcctggaaggtgggaatgatctggagaccaggagtaagaagacctgagtttagatccccagcctggattcagttctgagtgcctcagttttcccttccacaaaatgaggttggtaatgcccactttaccaccattttttttttctttttttttttgagatggagtctagctctgtctccaggctggagtgcagtggcgcgatctcggctcacgggaacatctgccgcccaggttcaagcgattctcctgcctcagcctcctgagtagctgggatcacaggcgtgtgccactacacctggctaatttttgtatttttagtagagatggggtttcaccatgttggccgggatggtctcgatttcctgacctcatgatcctcccacctcggcctcctgaagtgctgggattacaggcgtgagccaccgcgcccatctactttaccaccattttaaggcttgagtgaggtggcatcataagaaacttttgctcagtccacattctaaataaatgaggaaactgaggctcaaagaaaggaaggaataatgacaacaataataccattggtattattagctaatatcataggtaatatttattgagtgcgacattctagccgctgtgccagggcttttactgcaagaagtgaggtttgggagggcaggagctcttatctgttttgtcaccattgttattccctagtgtctacctagtacagagccctacacagagtaggtgctcaaaacattgttgttgatca

SEQ ID NO: 7059 - DNA, 13633 bp, Homo sapiens
attttcaggatcttgcaatgtgatgctactgacctgaaagaatgaatgcgcctttaaagaagggggagattatttgcttcccatcagcaggctcaagctcagtattttcatagcgtgtttaataaagctttggaaagaacacagttaaagtgatgaccattagctggagtaggaaaagattcaactcaaacatatttcagttatcttaaacaaattcttccctgaggtgtacacacatgcaattagttgcctttcccagtgaatgttgtacagccatatgccccagaagaatttggctccattcagttacaattcacaaaaggcatttttcaaacatcttgagtgacataaatagctggcaagagtgttaattgcagaagtactctgatttatcaagcgaataactatgtgaatgtgctttgtaaactacaagatactctgaaaatatctgttgtcattctgttttttttttttctgagacagagtcttgttctgtcgcccaggcagcagtgcagtgggtcaatctcggctcactgcaacctctgcctcttgggttcaagtgattctcacgctcggcttcttgaatagctgggcctataggcatgtgccaatatacccacctaatttttgtggtttttggtagaaacggggttttgccatgttggccaggctggtctcgaactcccaacttcgagtgacccacctgccttggcctcccaaagcgctgggattacaggcatgagccaccgcgcccaactgtcattctgttttttaactcgtgtacataatacatacagattaataggttacaccttcttcacaatgactttgcaatttgttggactgaaaaatgaaataattttggtaacactctcccaagatcagtgagtttttctgttgttttctttcttcttaccattagactataggcacaatgtctcaacggtatttataattccttgaaagaattatttctaattatctatgtaatatacacctattttagaaaagtttaaaaatggagaaaagcatgaaaagtaaataataagtaattattccatcacccagaggtagtagtcattaatatttagtccattttcttctcatcctttttctacacatataagtatatatggaaatatgaaaatgacatgtatttttgatgtgattgtataagaggcaatatagaatacaattgaatattggagagatgtgccatgatttacttaaccagctccattactgagtattgtttacaaattattactattacaaatattattataatgaatatcttaatgcataaagttttatctgcatttcagattatttggttaaattagattcctacaaagagattctgttgaccagcctctaacaatatggtccccttttctgttattactgctgttgtgtaagtaccaccacctgagcccacccctattcccacttcccactgaacggagcttttttgtaataccagtatgatattgcaaaaatgatgaagtgtgatttctgcggccagccattgtggctttctccttgatctctctgtgctggttcacttgttctggcagaagacttcagcattcctctggagaggtccatgtggtgaggacctgaggcctccgccaactactatgtgaatgagctgacttgggagtagatcttccagccctggctaagccttcagaccgccgaagccctggccaccaggtggaatgaaacctcatgaaaaaccctgagccagaactgtctaggccaagatgctcccagattcctgtctagtagaaactatgtgagataataaatgttatggttctttaaaatatttaaattgctaaatattagggttctttattatgtagcaatatattagtaatacatagataaactgggttaaaaggtagagtatttaaacatgcttgatagtgttaaaaggctttccagaaatgttatactaattaactcttatagaagtatgtctattatagtcatgcctgtaatcccagcactttgcgaagccaagggaagaggattgctagagcccaggagttcaagaccagcctgggcaacatagtgaggccacatctatacaaaaaataaaaaaattagccaggcgtagtggcacacatctacagtcctagctacttgggaggctgaggtgggaggtcaaggctgcagttagctgtgattgtgcctgggtgacacagcaagaccctgtctcaaaaaaagaaagaaagaaagaaaaaaaagtagtatgtgagaatgtttatagtattgtaccttcattaccattgagtatttatatttgtaacctttataatttcatagaaaaagtagggcattttgccatttaaaagttttgcttttatttgtttcctattgaggttaatttttttttcatgtttctttttatatttcctcttctgggaaacctctttacatataatttgctcaactttctattggggtcttagtgtttttcttagtgatttgcataagctgtttatatataaaaggcattaatcatttgtcatgtttgttataaatattgttttccaattggttgttgctttttggtgtcatgattatatgtaggtgttttaaatttttatgcagttcagtggattatggtatcttcttttgtgtttaagcttggaacgtgctttcatttgaagagaagataaatgctcatgatatagtttttggttttattttatatttggatctctaattcatctgggatttatttatttatctttagagacagagtcttactatattgtctaggctggactgcagcgactattcacaggtgtgatcatggtgcactacagccttgaattcctaggctcaagcgatcctcctgcctcagctaccgagtagctgggaatacaagcgtgcaccaccgtacttgacttattatttattttatcaccaaatagcaagccaatttctacaatgctatttatgcaataaatagaacaatttccttctttcctgttgattggtaattattatatgttgagttgttttaaaatcttgtgactttctgtgctctctattctatttcactgaaagctattcttgtcaatatgactccattttaattattgcagatttataatttgtaataactggaaggactagttagtagaatgactttaagaaatatgatctttcagcctgggcaacattgcaaaaccccatctctaaaaaaaatacaaaaaaaattagcagggtgtggtgcatgcctgtagtcccagctactcaggaggctgaggagggaggattgtttcagcccaggaggttgagactgcagtgagctgtgattgggccactgcactccagcctgggcaataggatgagactctgtcaggaaagaaaaagaaagaaagaaagaaagaaagagagagagagagagagaaagaaagaaagaaagaaagaaagaaagaaagaagcaaggaaggaaggaaggaaagaaagaaagaaggaaagaaagagaagaaagaaaggagagagagagaaagaaagaaggaaggaaggaaagaagggagggagggaagaaggaaaggagggagggaggaagtaaggaaggagatctcatggtctctcagagccacagagctttccagaatgcaatcaaatgtttaagagttgggtggcctgtcactaaaaaatatgagagaaggcaaaatttcatcaaaatcagagttttgtggagctggccagaaaaaaacattttaatattctaagaggcaaagaaatgaaaaatccaatcaagtgttctatcagaggcaggttagaggcagacttctaagaataaatggaagaaagagggaattatgtgatgtagatgagttctgctgcataaacaatatttggcccataaattagtcttcatatttttgtgtatttttgtctagctatggaaagtttaaaataattaaacagtaaaactatctgagcctgggaaatgtctaacaaatatttctttgataacttaaatattttcttctttcaccataagttttaggttttcaacttgttgagtcaattttggccattatatctttatgttaatcatctagtttactgagatttctgttttatctgcatatacgaataattgttattttatcattaaaaatttccagactgttgtatggttttttttttcgtgtgtgtgtgtgtgtgtgtgtgtgtgtgtgtgtgtattgtagaatgaatttgacagaaagatgcttatttcatttgtattcccccccaaaacatctgctattgggtttatcatttttactgtttttattttctttaaatttattttccttttctcttttcttagattcgttttagctattctaattttttgagttgaagagttagattttttctaagaagaaaaacatttaaggttatgagttacgctgtagcttgtacaacccctaaactaagttttctatgcattgttctcattttcattattattgtgatgtttttgagacatggctggactgcagtggcatactcattgctcactgcagcctcaacttcccaggctcaagtggtctttccacctcagcctctttagtagctgggactacaggtgtgtaccaccatgtcccatgaattttttgtattttttgtagagatgaggtcctactatgttgcctaggccggtcttgaactcttgtctcaggtgattcacctgcctcagcctcccaaagtaagccactgcccccagccaattttcattattttgcaaatagtttgatgttatatttgttttcctctttgacttaatattattttatttttttaaaaagaagctctgaccaagcaaattactagtctgtctctttattttttttagtagaacttttttttggttcttttttgtcctaaaatagtttctgaaaattaggccatagaagaattttagattcttctatgcaacaacagaatgcaacaacagaagtcattgcatttgaatcatttacttcacttatttgatcctagtcttatgtgtctcagattaaatcaactggctttgaaaatccgagttttatgccatttaactctgaatgaagagtgcaaagtgaaagacttgggaaaagggacgaacttacccctagaagcccggggctccttgcctggcagatggtcagaaagaactgcactaccttccattttcaagtccctaacagagaggctcagtggcagaatgggaattcttccatgaggactcgacagtcaaccaaagttgaacaattacatgtagaagagagtgagcaaatagagggcttgctgaatgaaaaatgattctgaattctacaaaaatgtaaggtctttaatctggaccctactctctgaattgtgcaggctgcactgaaacgccctggtgatctgacgtttaggaagaaagttaaagagttggtcagatggatagttcataatgggtgattccagtccaagagcccattgcccagctttggttttggttgtatcataatctccaaccattaatcccattgacagagtggaatatttcagttaacaagacaatataattaatagagctatcattgaacccaaaaagggattaccaattttaacataattattacaaaacgtatgctaacccccaaataatactatgcatgatgtgacctctctttgatttggaagagcctgtagaacctcagagggtgtcaaggcatcactttgagtatcagttaggattatttggaagtatagatgtatcagatgatagaaatgacaagcagtactgcccagaagggagtttcaaagaggatgacccccaaacggaacttcctgcagctgcatttaaagaattgtgttcatgtgtggtacatgcattttaaattcccaacattattgacatctggtcacctcatctttgcatattgtccattttattccaaaagcccttggcattttatctgggatagcatgggtaaactgaaacatttgacctcgactttccccttttgtctttcatctgtttctggttcattggctgggagttgcacctgcgggaggacgtctcatgcagacttgcacatatacagggagtgttgcattgaaggtctttgctggaccttctgttcagaaggtgattttcaaaagcgagcaatgctgccaatgcagcttgcttctcttgacagattgagaagtccagcttcaaaagttacctgccatttaagcaaggagtttgtcaagagatcatggttcattttattgaaaagactttaaggagttgtaggatttattcatagattgctgagaacaatggcaatatttttatttttacagagtttgcacttctgatttcaggttaaacgctaacttgtttttagtctgcttaggggattgtgacttgaaaatttttatattctgatgagcttttttgtagtgtccacaatgtataaaatatttcctaggtgagatctatgttctccatttattgatgcattgcagaccaatttgagtgatgtgtttaaggaaaattcttcctagtttaataagtaagctaaaaggttttttttttatatttaatgtttaatctctgtctcgtgttatttaaaattagcctgcagatactttccctcacttctgtaggctcctggaagataaacattcaaacagcggaacaaacaataaattaaataaaaaataagaattatattttcttaatttctgcctcagaatttgcgttttgtctttctgcctttttttttttggatgtcaaaatagatgagatcgtatactctatggagtataaattgttactgaagtctttatttttggtaatgaatgagtaagaataagactatctctgtgattattaaaatacatggaattatccaggaaattttccttacaaggaattaaaatattcctgtattaaagagaagaaaagcctttcccaagcggctggcgaagacggcagaggtgcaggtcctggtgcttgatggtcgaggccatctcctgggccgcctggcggccatcgtggtaaacaggtactgctgggccggaaggtggtggtcgtacgctgygaaggcatcaacatttctggcaatttctacagaaacaagttgaagtacctcgctttcctccgcaagcggatgaacaccaactcttaccgaggctcctaccacttccgggcccccagccgcatcttctggcggaccgtgcgaggtatgctgmcccacaagaccaagcgaggccaggccgctctggaccgcctcaaggtgtttgayggcatcccaccgccctacgacaagaaaaagcggatggtggttcctgytgccctcaaggttgtgcgtctgaagcctacaagaaagtttgcctatctggggcgcctggctcacgagtttggctggaagtaccaggcagggacagccaccctggaggagaagaggaaagagaaagccaagatccactacgggaagaagaaacagctcatgaggctacggaaacaggccgagaagaacgtggagaagaaaattgacaaatacacagaggtcctcaagacccacggcctcctgatctgagcccaataaagactgttaattcctcaaaaaataaaaaataaataaaaataaaaaattaaaaataaagaagaaaaatattaaaaaagtatttatttgtaactagctccatctagtgagaattgcttaaaattacatgattcatttatgaatctcctttgaactagtaacattttttgagagcacttttccattttaaagaactataaatcctgtaattttatgttttatagaacccccaattatagactagaagagttttggtaattatagagcctattttagaaattaatttatggtgaaaaataaagatatacctaatgaattagtcacttctcaacatcatcactgcaactttttggagaagcagtaaagtggacagtaaagctaaatcctggtagaaaagtaaaatactgacttcttgagacgagaagtgggtgtggggcataatagaaagatggtgatgagattgctccagactttaggatgagaagaataaccttgttaacagttcacaaattgcttgcatttgtttttgcatttgcttttttggacatctttgaggtagctatttcagtcgactcttgaacaacatgagtttgaactgtgtgggtctacttttacacggagtttttctcttttctttttttgagacaggatctccctttgtcaccttcgctggtgtgcagtggcgtgatcatggcttactgaagccttgaccttccgggttgaagtgatcctcctgcctcaacctctccagtagctgggactacaggtgcacaccaccacacccagctaatttttctatcgtttatagagaggttttgcattgttgcctaggctgtgcggattttttccaacaaatgttaccccgagtgtgcctgcctcgcctgcctccccttccacctcctccacctcttccacctctactacctcgagacagcaagaccaactcctcgtcttcctcttcctcctcctcagcctactcaatgtgaagatgatgaagatgaagacctttatgatgatctacttccatgtaatgaatagtaaatatatattttctatttttttcttttttcttttttttttttttttgagacagagtctctgttgcccaggctggagtgcagtgccgtgatctcaactcattgcaacttctgcttcccgggttcaagcgattctcctgcctcagcctcacgagtagctgggattacaggcgcttaccacacctggctaatttttgcacgtttagtagagatggggtttcaccatgttggccaggctggtctcgaactcctgacctcaggcgatccacccgccttggcctcccaaagtgctgggattacagacgtgagccaccgtgcccagcgtaaatgtatattttcttctttataatttccttttctctagcttactttattgtaaagatacaggatataatacccaccacatacaaaatatgtgttaatcgactgtttctgtgggaaggcttctggtcaacaataggttcttaggttttttgggagtgccccctagccgccacactgctcaagaaccaactgtgttcccttattttgcaggtcaagaaacagtctcagaaaggtgagggctgctcccagtgctgcagggcattgtggatgctgtgggtgctgcccggattcccctccaggactgaggcactgctcattctccagccgctgggggagccgctgcctggcacctctcacctgtgctgctttcccagtgttgcttttagccaaagaaagacactgcccaagattaagctccctccctagggaccgtgcacatccaatgactggttcctgtgaggtaccaagacttgtccaccatgcctcagtttgcaatatctcagaagggccatcccagatccagagctctccatggacccactgaggctcagctcgacttttctatctgccaaattctttgtctttcaacacttacaggtgctatttctgcgattactctccaataacttctgtatagaaatctcggtgtctcagagtgtgtttcccagtgaactccacctgtgacagctggtactggatgtggtcctaggaactgactctaaaataggatgttgttgctgcacctggctggctgtaataaggcccccatcactggtagagcgctagcccccatcataggtgaagcgctagttgccccaggcatccatgccagtgccagtgttcacatgtttacaggtggcaaactgggacacgaaactggtagaaggggataggctggcaagtgacacatataggaggttgagagtttcaggggaaattaagtaaatacaagaattttggaattagatgactgttgttggaggctatgcatgcattggagaaagacaatgactgcctcggttggttacttaaccatgtgaggggaagtatgaagccagaacttggctgtatataaatagaatctcatctccggttgcctaagggccgtacagctaaggacttatatgaatagcaaagttccagaaattgttgaattcttaattctcaactccagccagttctgctatatgtaggtcagggtgctgatttggaagcagtaagattctgagactttggatggggacacttggtccaagcactaaaaaatcttgaatcatcaggtcccgctggacctgtgggcctgcagaagtgacccactcctctctggtaaaggctagagcctctggcttatttgaaggtcatatggaggatcctgtcttgcaagaaaaccctagtttgtttgggatggactgtagaattgcgtaggcgaataaagagtaccactctggtttgatgtggggtggagtgctgagggggtttgctggggtgtagttgtgagggtctcctaggaggtcagcagaattgataagagcaagagaagtagaattaatatctttaattgtgtaataagaataatatatttaattgtgtaataaagaatatctttaattgtgtaataaattgtgtaatatatttaattgtgtaataaagaatatctttaattgtgtaataagggtgaaaagggattttgtcagaatctgatgaaattcctgaggggttaatagatcccttttcatgtaggaataacaggtgaatggctactagggctgtaataatgaaaggcaagattaaatgaaaagtgaagaattatgtgaaagtggctttatccaatgagaatccacctcagattcactgtacaaggtcagttccaatatatgggatggctaacagtagatttgtaattactgttgcatctcagaatgatatttggcttcatgaaagtacggagcctattaatactgttgctataactgcaaatagaagaatactgccaatattccaagtttctaggaaagtaaatgacccgtagtataagcctcggcctacatgtaaaaacaggcagatgcagactatcgaagcctcattagcatgtagcataattataattcagcaataatttacatctcagcagaagtgagtgactgaagagaaggcggtcagagtatctgacatgtagtgtatagctaagaaaaccctgtgatgatttgaaggaccaggcagatacctagaagcaagctgagattttaccatgccgagatgtttgattgtgcaggtggctcaataaacagtggttaataatagagaatgtgtttttcggatgttagtcattagagttcttagagttgaagcacaacaatgatttttgatgtcattagttatggttatatcccatgtaagaattatgacatacactgtattcttattaagtattattcttattataggctttatgggattttcttcaaagccttctcctatttatggaggcttgggattaattactagtggaggtgtgggttgcagtactatgttaaattgtggtggggcttttgtaggtttaatagtttttttgttttgttttgtttgtgatggagtcttgctctgttgcccaggctggagtgcagtggcacgatctcagctcactgcaacctccaccctctgggttcaagcaattttcctgcctcagtctcccgagtaactgggattacaggcacgtgccatcatgcctggctaatttttgtatttttagtagagacagggtttcaccatgttggtcaggctggtctcgaactcctgacctcatgatccgcccgcctcagcctccctaagtgctgggattacaggcatgggccacgtgcctggcctggtttaatagttttaaaattttatttagggggaatgatggtggtttttggttatacaatggcaatggctactgaggagtatcctgagacctgagggtcagtgttgttatttgggatgcctcactattagggttgctgttagagttggtgataattatgtggttaattgattatgatgaggtgggaattgtaactgattttaaaaatatggaaaactgggtgacttttgaggttggggaaatagaattactttgtgaggattctatggatgtagctgccttgtgcagttatgggtgttggtgggtggtggttgctggttgatctctgttagtatctttattgtgattgagattatgtgagggaatagggttaaataattaagaatagagttaggagagatgggataaggaaggagaaaaagtagagcataattagatctttctggttagatacaatggtggaggctatcatttgaacctgggcagtattttttggtgttgatttttctaatcaaatcagttctagtagaagagaggttaggttttgtcttgcatggaaatttgagtgtggtgttgtgtggtgtattgtgattgggtaaaatcctaatatattggagaaattaaatatttgtgatgggtgcttgagtttgaggttgttagttacaaggttaagttctattgctagtgagaagcctaaaatagttacgctgagggttgtgagttttaggtgaaggagcatagtcatttggggaactgatattggaataatattgttggagattaaaaatccagcaaaaatactaccaattgttaggcatttgattgaattgattaggaaggggttgtttttgttgatgacaattacagccgtgaagtgaggttgtcctaacagtgcaaagaaaataattcgggtgctgtagacagctgtcagggaggaggcaatgacagtaattaaaagggctcagacgttggtatgcgacatatttgcggtttcgataataagatctttggaatggaagcctgtgaagaaaggcattcctgtgagtgcaaggctgccggtaataagtggggaagagggcctgcagaagtgatccactcctctctgttagaggctagagcctccggcttatttgaagatcatgtggaggatcgtgtcttgcaagaaaactcgtgctctgctcaggattcagctctgcctcctctcttggccatcagacccgaagctaagggcaagttagaacataacccagccacagaagtgctgggcccgctaagaaaacaaacctgctaagaaaaaaaagtagttgtaggcctggtcaatgtgaaccatcaggaactgggggaatatgtacgggactggatcttgagggtgctgaaccaaaggaaacaaaatacaaattggaaaagggagaactttcttttacggtacggaatttacaccctgacgaggaccccgggagatggcgccaacatactactacatcacaacctctaagaggttgcctcttagaggcctggaaaagtattgacccacgttaagtgaggtagaattggaagaactgccacagcaaatggtgaaggaaggaatcaggatgtccagagcagtgggcatgccaaactggttagactatagaggccagaaaatccaccccccacagtgttccctaggagggcccagagcatactccgtttaccggcgtgctaagtcatggcctggtgaggagggcaccagcatcacagagaagccctggagttgccgcccagcattccaaagggcaggctgatggcaggagatgctgttacagcgctgggcttgctgccag

SEQ ID NO: 7060 - DNA, 15493 bp, Homo sapiens
ctgggagggtcttttttcctctgagaatgctaagtaaactgtgtgctgtcagcctttgttttgacttcaactcatcacatgaggtcatgtgtggaatttttctcttgtggcatcatgttaatactcaaaaaagttttggattctggaacatttacgattttgaattttcagattaaggatgttcaacctatataaccatttattttgcatgcagttttgtgagtatgaaatttgggaagggctctgctagacagtttgtctgcctggctttctgtcgggtaatgagatctggaacatgcacttcccaggtggtgtctttcctcacagtctctcaaatgctctggagcttttcttgttctatacctagcactggagcccctagggccccttcatgtggcttggacttctcatagcatgggggctctcagaatagttgcacttcgccgaagtgggaagtagatgttaccaggccaaacaagggctgcacctgaaaaagcgcaatgtcactattaccatattctattggtcaaagcagtcacagggcccaggttcaaaggagagtgacaagatcacattgcagaagagcactaggatcaggaggatattgtggctgcttttggaacatacaatctgccacaagctataatttatttatttttttgagacagggtctcgctctgttgcccaggctggagtgcagtggtgcgatctcagctcactgcaacctctgcctcccaggttcaagcaattctcctgccttagcttcccaagtagttgggactacaggcatgcgccaccacccccagctaatttttgtatttttagtagagacaaggttttgctatgttggccaggctggtctcgaactcctgacctcaggtgatccacccgcctcggcctcccaaagtgctgaaattacaggtgtgagccaccgtgcctggccacaacctataatcatatccttataaatgtattacgtagaaataatccaaggaatatataagaacagaaaagttcgtctcaactttagtagggaaaaaatttggaaaaaacctacatgtctcctgatagataaatagctaagtaaattatcacataccaactaacaggaatatgaagctgtagtaattaagatgattatgaaacaatttgaatgaaagttggtataaatggagaaaaagtaaaattaagaagcacatacactgtgatgataattatgtaaaagcctgtatgcatctggacaaagtctggaaggaaatcagtggaaatggagataattgcattgaggtggtaagattatgtaagccttagattttcttctttattgttatagcatcacaaaaaataaaaatgagaagaaaagaagagaattacaattttaatggtcagtgctcaatacttggtaggtacatgtactaagtgcagggaaggcaaaggggacactcattacactctaattcactcagattcagagaaacttccaggccagaggagccacagatatttataattaataacctgttttgaccccttatctttggaatgctgattaacatgaagcaataattactattaatatattagtctttcaatattgctgagactattcataagactgaaaaccctttaaaaagctcccacgacggccgggcgcggtggctcacgcctgtaatcccagcactttgggaggccgaggcgggcggatcacgaggtcaggagatcgagaccacggtgaaaccccgtctctactaaaaatacaaaaaattagccgggcgcagtggcgggcgcctgtagtcccagctactcgggaggctgaggcaggagaacggcgtgaacccggaaggcggagcttgcagtgagcggagatcgcgccacagcactcccgcctgggcgacagaacgagactccgtcccaaaaaaaaaaaaaaaaaaaaaaagctcccacgacacataaacataaggtgatattttaatctttatcataatgaatttatccaatccagggtttctaaaattgtcagtggtaatttggcctgggaatttatcctagaatactctgacgagaactagattaattctggtctcccacttcacagtgttctgtttgccttgggactcattgtaggtaaaaaggatgtggagtctggaatagtctatgcttatgaaaccgcaagcaaaattcctagagtggccctgaattcaacccatcttcctgggactatgacactcatggctatgggtgaaaccaacctttgaacagtcattgcattccagtactcccataacttgctagtcattgcatttttttcaaggcctcttttgaagagttattaaggaaggtaaaagtgcataaaggtcaaagtcttaagaaagtctgattaaataattgcaaaaacaattttttttttttgaggcaaagtcttgctttgttgcccaggctggagtgaagtggcatgatctcggctcactacaacctccgcctcccaggttcaagcgattctcctgcctcagactcctgagtagctgggattacaggcatctgccaccatgcctggctacagaaatgtttttttaaaaaaagaacatatcatgagttggcatagccactaattatgttaacatagttaataactggggaaaacctgaatgagggaagtgtttagattacatcttggtaaattattttgatttggttcaattgccttttgggaagttaaaaaaagggaaggggctatctactggttgccaaaaaaattactgatattcttagacttgtcaaaagacaaagttacaacaagtttagtttaaatatctcagttgggctgggtgcggtggctcatgcctgtaatcccagcactttgggaggctgaggcgggtaaatcacttgaggttaggagttcaataccagcctggccaacatggtgaaatcctgtctctactaaaaatacaaaaattagccgggcatggtggtgtgcacctgtagttctagctacttggcaggctgaggtggaagaatcccttgaacccaggagttggaggttgcagtgagctgagatctcaccactacactatagcctgggcaacagagtgtgactctgccaaaaaaaaaaaaaaaaaaaaatctcaattggctttatttgcaattctagaaacaggtaacactttgttccacaaaacagaatcatgagctgagcagaaggcattggcttcacagagcaagaaggaatgaagaaagaagcaggctgggtgcagtggctcacacctgtaatcccagcactttaggaggcccagaagggtggatcacttgaggtcacgagttcaagatcagcctgggcaacatgctgaaactccatctctactaaaaaatacaaaaattagccgggtgtggtggcccatgcctgtaatcccagctacccgggaagctgaggtgggaggatcatggtggaccagcccatgaggtggaggttgcagtgaactgagatggcaccactgtactcctgcctggacgacagagcgagactctgtctcaggaaaaaaaaaaaaaaaagaagaagcaaagattatgtccattgtttcaaagtgacttttcttgtaagatgagacaaggagatagaacaacagaaaaataactgattagttaacatcaggcttcttggggctactttttctgtgtgtgaaaggattaaagcagagggaaactcattatcgtgactcttgaagattaagtgacctgtttgggaatttggctatctctctctcctgctttctcttgagacaggaataatacagggtggttgcaagagaacagaaaattccaggcagcagtttcacatgcctagcaaaatgaaactgttgaaatagctccataaactggggactgataagaccatgaaaaacaggatgtgggccaagctggctaaaaccaactggacccaacagagagcaggatttgacctaggtttctcctaggacctcattattcacccattaataaacaaatcgcacacccacctacactgtgacaagaacactgtatttggtgttaaaatgggcagcatcacagttctgagaaatcttcacctttttccaggaatcttcatgaatagtccaccccttgggtaaagaaacccatataagaaaccccaagcccctttgtgcagctctctcatgagtatgcccatgctcccctttcttgagtgtgtatttttactttgcaataaatctccgtactttcacgattttctgactcatccttgaattccttctcatcatggtatcaagaacctgcacactggcctgggtcagggtttcatcagtgtttgggaacttcccccagcccactggtctcactctgaagatcagataacaacttattgaagtttggtgacagaactttagcatgggtgactccattttgatttttggttttgtctgttggagcatagtacagaaacttaatccaaaaaaacaacctcctatactttttattcaacagaatcaacatttcaggtttcttttttaacctgaaattggtgtttcatttaataaatgcttacctagtagttactcggtggcattatcctgtactttacagacattaactaatttagttatcaataacccattgagtagaaaaaacagtttttcctctgctctcacaccagtctcacagaagacttctgtgaccaaatgtgtgggagtttctctccaccagcaagaaataaaaaaaattagggggaagggcaagggggtgcacctatggtcccagctagggatgctgaggtgggattacctcttgagcctgagaggttgataggctgcagtaagccttgatcatgccactgcactccagcctgggtgacagagcaagaccctgtctaagaaaaattctgcaatggacactagctgggtggtggtggtggcagcagggggtggggggggcaggtcctctaattcaatccgattctcatactatctacttgggtagtgtcagatgccataggttgaggactcagtcccacttccaatgcaattgcaagccccaggttgttttgtctgtgcttctgacctaccaactataaatcacggttccatgacccccttcttgggggatttatttgctagagctgctcacagagctcagggaaatacatatctacatttatcagttcattataaagaatattattggcaggtgcctgtgatcccagttactcaggaggctgagacaggagaaacgcttgaacagggaggcagaggttgcagtgagccaagattgtgccattgcactccagcctggatgacagagtgaggctctgtataaaataaaataaagtaaagtaaaaaggctgggcacggtggctcacgtctgtaaacccagaactttgagaggccaaggtgggcggatcatgaggtcaagagatcaagaccatcctggccaacatggtgaaaccccatctctacaaaaaatacaaaaattagctgggcatggtggcacgtgcctgtagtcccagttactcaggaggctgaggcaggagaaccgtttgaaccagggagctggaggttgcagtgagccaagatcgcgccactgcgctccagcttggtgatagagcaagactccgtctcaaaaatatatatatattgtaaaggatacttgaaaggatgcatagggcaaggtatgggaaggggcatagagcttccatgccctatgtggggtgagaggcaccctccaggaacctccatgtgttcagctatccagaagctcccccagccagacctttggggtttttatggaggcttcattatgtaggcatgattgattaaatcactggccgtcaggattaacttaaccttcagccccttccccttcccagaagttggatagggctgaaaatcataactctctgattttgtcttggtctttcacgtgcccaacctccatcctgaagccacctaggggctgccagccatcagtcaactcattaggttacaaaaagacacttatcacttgggagattccaaagattttatgccaggagatggtaggaagaccaaataaatatttcacaatatcacatccctaatgtaggtcctattatcaccattctcattttgcaggtgaggagactgaagcatgagattaagaaatcaagaccgccttccccctgtagggscggccggcgagtcccagtgagagcggagggtgccagaggtagggggccgagaaacaaagttccyggggctccctccggggccgcggtcggggctgcgcgtttgaccgcccccctcctcgcgaaggcaatggcttccaaactcctgcgcgcggtcatcctcgggccgcccggctcgggcaagggcaccgtgtgccagaggatcgcccagaactttggtctccagcatctctccagcggccacttcttgcgggagaacatcaaggccagcaccgaagttggtgagrtggcaaagcagtatatagagaaaagtcttttggttccagaccatgtgatcacacgcctaatgatgtcygagttggagaataggcgtggmcagcactggctccttgatggttttcctaggacattaggacaagccgargccctggacaaaatctgtgaagtggatctagtgatcagtttgaatattccatttgaaacacttaaagatcgtctcagccgccgttggattcaccctcctagcggaagggtatataacctggacttcaatccacctcatgtacatggtattgatgaygtcactggtgaaccrttagtccagcaggaggatgataaacccgaagcagttgctgccaggctaagacagtacaaagacgcggcaaagccagtcattgaattatacaagagccraggagtgctccaccaattttccggaacrgagacgaacaaaatctggccctacgtttacacacttttctcaaacaagatcacacctattcagtccaaagaagcatattgaccctgcccaawggaagaaccaggaagatgtggtcattcattcaatagtgtgtgtagtattggtgctgtgtccaaattagaagctagctgaggtagcttgcagcatcttttctagttgaaatggtgaactgataggaaaacaaatgagtagaaagagttcatgaagaggccctcctctgcctttcaaaagggtggtcacctacacatgtttaaggtgtctctgcacatgtctcaagcccatcacaagaaagcaagtacagtgtggatttcaaatggtgtgtaacttcagctccagctggtttttgacagctgttgctgtggtaatattttttacatgtgatggtgatagtctctggttctccccatccccacaaaggctgttgaaccacagcaccaggaagcctgagaatgaatcctgagggctctagcccaggctttgtcccaggctttctggtgtgtgccctcctggtaacagtgaaattgaagctacttactcatagtggttgtttctctggtcttgagtgactgtgtccacagttcatttttttccggtaggaataactccttttctacatccacactccatagagtctctccttttcagayatcctgggatgaaagaatttggcttttttttttttttttttttgacatctgttttcactcttaggcttttaaacaatagttattgctcttatccctctcagattctaataactgagagtgatggggctatattgaatctctgtatgcactgagaactgagctatgaagaggatcttattaaactgctggtctgactttatggattgacactgttcmtttcttttattgtgaaaaaaaaaaaaaaccctgaaagtcttgggaaccccctaaagtcttttgggaatcctcaaaaagcatgggaagttaagtatttagctacataaatgttgtaagatcatatcttatgtatagaagtaataagaccatttggaattactggactaattgaatagttaaggtttctattcgggacaataaaatgtattttgaaagtgctgctaactattgatgctgacagtgtttcactcctatgagtgacccaaacatattataaatatgtggtaaagggaatggagcctgtggggttgagcagaatgttgtactagctgtgcctggactgagtataacagctttatgattatgagaaaacaaattctttatttttttttctgttccaaagattcatcctatggggtggccataaagtctagaattagatactaatattttgtcattcattataacatatcaataaaccatttgttaaaagatttgcctggtttccagacttggtggccaccttgaataattcttgctgtcttctgggaaggatgatgaaatttattcctgctgccttaaaaatatgtatcccttcttcacccatcatgactgtccccagtgagtgtcctttactattcttgggagtgactcctgtctaacttttcatactggcgagaagaaaagargcctattttaacactttagtggtgttgaaacacattacttactttctgaagatgtcccagtgaatcctctgtcaattcactgccatatgtaatctatatgataaggaatgcatcttccaagtactgcccaaacycttgccagctcctctcccattgtcccttcatgtgaatatttcttggctaccttagtggaaatatagatcagtcttctccccatccatcctctcaaacataatgagattgtttactttttagatttatgcagtgaaaatgcccagtcaggtctgaatcgtcartgcattatattgacyctgagcactttagaatttagagttgcaattgaatgccagctgtggagatggggtgcatatcagatatataaataaagctcaggtttgctagggaaccaggtatagagaaaaataagtctgatatgaggaaaattgcacaatttagagtagttatgccrtagagaaaatttccacaaactaggaaatgtagagagttattctatagaatactcaaaagaggaaagtatgtgatttttggaaacaggaaaatcttcaaacttctttcttcacttccctttgtgtttagctgaccctccaatgtgatcattgcctttggagtttgggagaggtaygggaagtggcctgatgcctgcttccatacttcactcctccatccatccttccctccctyttcccctccagctaaatggacaattctagccaacattgagtcactcaataagtctcaacagtgggtgtgtttgctgagattgtccagcagttgagcagtttggtctcacctccctcgctagttgagaccaaaaagagacaaataactttttcatggtctttgaaacataatgcttatttcgtggtcaatggctttaaaaaaatctgtttcttgttttcttcaacaaactcactagttttcccttaaatgatattgtaaaaattaaagtaatcttgaaaatgttttgacaaaagtaaaattaaagggacaaaaaaaaaaaagaaatcaagaccactagtgagtaagcagcccaggtaggactcaaacccagacaggcagcctccagagtcctgtacttaactgctatactatgctgtctggttaagagaatagatctttctttctttctttctctttctttcttttcttttctttctttctttctctttctttcttctttccctctttctctccttccttccgtctttccttcttttcttttcttttctttctctctttctttcctttctttctttttctttctttccctctttcttttctttcctttctctctctctctcttttctttctttcttttgacagtgtctaacgctgtcaccctagctggagtgcatggtgttcatagttcactgtagctttgaattcctgggctccagcaatcttactgcctcagcctccaaagtagctgggagtacaggcatacgctaccacacccgactaatttgaaaaaatttttttgtagagaagtagtctcttttttttcttttttgtagagatggggtcttttttttttcttttcttttctttatttttttgagacggagtgtcgctctgtcacccaggctggagtgcagtggtgcaatctcggctcactgcaagctctgcctcctgggttcacaccattctcctgcctcagcctcctgagtatctgggactataggtgcctaccaccatgcccggctaattttttgtatttttagtagagatggggtttcaccgtgttagccaggatggcctcgatctcctcatctcgtgatctgcccacctcagcctcccaaagtgctgggatcacaggcgtgagccaccacgcccggccagagatggggtcttgccatgttgcccaggttggtcttaaacttctggactcaagcaatctggccaccttggcctcccaaagtgctgggattacaggtgtgagccaccttacccagcttggaaatttcattataacacatatatctacaaagagtttgtataacaaaatatttccatatctaggtgtatgctttttgatcaagttgctgcaaagactcctatactcaaaatagttcataagccctctctactctagtttgtacaactctgcattaggaaagatgctatagtttgcaatacagctgagccatttagagtatttcttttttctcagctgccagatagtcatacaataggtaaaatatactgaaccttggcatggtgtgcttgccagtttcattgattacctccacctcccttgaccccatgaaacactcctggtatgcaggccccagtatagttccttgaatctaggctggccttgtgactctattaaccaataaaatatggcagaagtgatgctgtgctaagtccaggcttaagtattggaaagactggtatcttccacattttgctcttgggaaccctgacctgcacttaagaagtccaactaccttgctgtacagaccacatgcagatgccatgtgaagagggatgtggagcggggagcccaggcctgctcttcccaggggcagagaagtcagggtttgaggaatgggggaagagaatctggtaggttcgggttgggagtacagggtagtagctggttaccaaccttttcagaagaattttaatattttaacattgagtgcaacaatagcagtacaaaccagttgaaaagtagccatggctttagcaagtaggctatcaagatattactccttttctgaattcagagaggttattttcaaaagcagagaagttggatttcagttttgctgtttcttgtcctgtaatcaacttgctatattcctagaccttggataaaattaaccaacctatctgttaaacatgggaatgtggtttatatgttcagtttagggtaattttaatacaacaaacaattcaagtattacatggaaataatctcaaaaatttagattcctatatagttcaatttgaaaacattttatattactactaaatattatctaagctatgtgactataagtaagacctatttttttatttttattaaaaaaattttttttgtagggatagggtcacccaagctggtcttgaactcctgggctcaagtgaacctcccacctaggcctcctaaagtgctgggattacatgcatgacccaccgtgcctgaccagtaagacttttaatattaccgactgtatgttatgtgatattaaggggttcattttttgtagatgtgacactggaattctgattgtgccttgaaaagacaaaaagagttttatctcctagatatacgtattacagtattttctcatggaatgacctgatgtgatatctgacagttgatttttttttttttttttttgagacagagtcttgctctgttccccaggctggagttcagtggcaccatcctggctcactgcaacctctacctcccaggttcaagtgattctcctgcctcagccttccgagtagctgggattacagttgcctgccaccatgcccagctaatttttgtatttttagtagaaacagggtttcaccatattggccaggctggtcttgaactcctgacctcaagtgatctgcccaccttgggctcccaaagcgctgggagtacaagcatgagccatcatgcctggcctgacagttgattttttaatttatttttctaatttaatttttaaaattttaatttattatttatttatttatttttgagacggagtcttgctctgtcgcccaggctggagggcagtggcacaatctcagctcactgcaagctccgcctcctgggttcacaccattctcctgcctcagcctcctgagtagctgggaccacaggttccagccaccacgcccggctaattttttgcatttttagtagagatggggtttcactgtgttagccaggatggtctcgatctcctgacctcatgatctgcccgccttggcctcccaaagtgctgggattacaggcatgagccactgtgcccagcctatttttaatttttttattattttttatttttttgaaacggagtctcgttctatagtccaggttggaatgtagtggcacaatcttggcccactgcaacctctgcctcttgggttcaagcaattctcctgcctcagcctcctgagaagctgggattagaggtgcacaccaccatgcctggtgaatttttgtattttagtagagacagggtttcaccatgttggccaggctggtctccaactcttgaccttaagtgatccccctgccttgacctcccaaagtcctgggattacaggcatgagccaccatgccctgaccaacagttgattttaaataatctagtgtgcagggggtgagagcagaggggttgtaaatgaaatagattggccatatgttgataaatgttgccatatgttgataaatgttgaatctgggtaatagatacatgggtgctcattattctattctttctattttgtgtgtgtttggaaatttctataacaaaaagtttaagaaaaaagctcaatagttattcgagatttgttcaaaacagacatgagattgcaattgttttctacctttcacttgctttagggttgcttttcttgaaaggattttgtgaaattgtatgttttaatacgaatataaaaagtagtgtgtatttaaccataacctcttttatagtagcttctgggtgcctcctatacacttccaatcttagcaacaagaataaataattccctctaatttggcctcaacactcaactgctgtcacattaattgctacgtttgtgtagctaatgcctgcctgtagccagtgataacattttaaaatacattacaagatggacaatattttagtgcctaaattcagatattaaccttataagctttccattttttggtaactttttaaaagttaaacattttaaattctgttattgtcttatttctttattataatctggccgtatgttatcttagaggcatctccagaactcactttttacccaacaatgttgacaaggtggctccaccatattttaaaatttctagctataccttatatagtatatatccctaagtaagatattcttcactcactcttttcactggtatttataatggattcagtttatagataactataatagatttgtagaaagggaatttataaaaaggcttaagtgggtattgtaagcttgaattttatgttctttttttaattttatgttcttaataacttaaaatttcaaaactgatgtctgagggttacctattattttctctattcatttctatttttcatttttatgtattttcatttttttttttttgagacaaagtctaactgtgacacccaggctggagtgcagtggaacaatcatggctcactgcagctttgatcttccaggctcaagcaaccctcctgttagaagtaaaatgttgtgtttttttttatttttttattttattattattatactttaagttttagggtacatgtgcacaatgtgcaggttagttacatatgtatacatgtgccatgctggtgtgctgcacccattaactcgtcatttagcattaggtatatctcctaatgctatccctccccccgccaaaaatgtttatttagaaatagaatgcttgttccttggtaccacaaggaaaaatcagcatttagacaaaaagttttctcagcaaggcaattttaccttctgcagaaagggtgctcctcacagatggaacaatggtgagaccacacccgaacaaaggagggaagcaattttattccttacacagcttgtccctgctaatgtgtcctgtctccattggctggagctggacctcacaatctaaattaaacctgactggctaataacttaaaactttcctaaataggtaaaagcaaaggagaacaaagaaaaagaggaagttgcttatgaaaggaaacaaatatcttggttaaagtacaaagacatagaatgtactcattcccttatatctagcagctacataggatagggcttaaccaagagttattagcataaagcaaggaggcttgagggaagttactctttaaaagaaactattacttctaacacttatgatttattctttaacaagaagggaaattttgaagagaaaactttttactttctacacatcccatctcagcctcccaagcagctgggactacaggcacatggcaccaaatctggctggattttgtattttttgttgagacaggttctcactatgttgcccaggctggtctcaaactcctagcctcaagtgatcctctcacatcagcctcccaaagtgctgggattataggcatgagcccctgcacccaatctctactaatttttaaaggctaaaatatgctattatttttgtgattttttagtagtcatttaaaaatttttcttattgaattaattaaataatttttagaaatggagtttgctatgttgccaggctgctctgaaactcctggccccaagtgatgctctggcctcagcctcctgagttgctgggattacatgcatgagccaccatgcccaactcagaagtctatttcatatcacacgtatgataataatttaatcacaaaggaccgtacatttaataatgtttataagagctaaggagatcaagcaaagatgtgtgaaatgagtcaaaccttcaatcctctcagtctggtatttactagtgtaagaaaaaaattaaaatgtataacttgaattacagttgactcttgaacataggcgttaggggcaccgacacttcctcaagtagaaaatttgcatttaacttttgactcccccagaatttaactactaataacctactgtacagcacaagccttatggataatataaacagttgattaacacatattttgtatgttatatgtgttatgtattgtattcttaaagtaagctaagtaaaagaaaatgtgaagaaaatcataaggaagagaaagtatgtttactgttt

SEQ ID NO: 7061 - DNA, 42100 bp, Homo sapiens
gtggctgctagaattccttgacttgtctacatcactccaatctctgcctattgtagtcacattaccttcttgtctgtctgtgtgaaatctcctgtctcttaaatggattcatgtgattgcccacttgcataatcatttcatctcaaaatctttaacttaatcacaactttgcctgtataagttaatattcatgtttccagggacttagccttcatatatttggaagtcatgtttcagcctaccacaattgctatagttatccttcaattaccatttgttgttgattgaggatgcttccagtggaaaaatctgtggcacttcagacctgccctagaggggtccagaaaaagtccttaagtgaaaatttgcaagtgctcagaggactttttcagcatgtatggaacacgaagtactgaggatatgtagacgagacaccaacaacatttgtgtagggcccccaggagacctcccgcacagccccttgcggctttctttctgtgtcctgaataaaaaattagagtgccttgactgctctgtgacctagccatctgcaggttcatcccagcaggcttcaacacaaactggggctttgaacagtcccaggcactggtaaaagtatctaagttgttgcccaaaacactgaaagtactggctcaggccctgagtcacataccttaaaccctcatataaactccgtaccctgaccccctcactgtggacatacctaggtccacaccccttttctctcactgtccatcatgaggattgccacagcactctgtaggtaagttctcctaacaattgttttgggttgatcaccccggcatttaatgcttctttcggccaggcacagtggcttacgcctgtaatcccagcactttgggaggccgaggcgggcggatcacctgaggttgggagttcgagaccagcctgaccaacatggagaaaccttgtctctactaaaaatacaaaattagccgggcatgttggcacatgcctgtaatcccagctactcaggaggctgaggcaggagaagcacttgaacccgggaggcggaggttgaggtgagctgagatcgtgccattgcgctccagcctgggccacaagagtgaactctgtctcaaaaaaaaaaaaaaaaaaaaaaaatgcttctttctatggcatcccaactgggggccttttctcaagacagtttgggacacaccgttgtgggaacttccctgtcgctgcttttgtttgtttttgagatggagtcttgctctgttgcccaggctggagtgcagtggtgagatcataactcactgaagccactaattcctggcctaccactgcttttggggtgattcaagctgtgggttcagcaggacaaaaaatctgctacatcattattctaatgtttgctattattttggtttttggttaatacttttaatttaataattaattataattattagctatcttaacctaattttctgatgcaccacaatataaattatttgtactacctgagtgaccttgcttagaacaaattataccatctatttaaactttgtcctttctcctgttctcatttaggtatacattgctctatgacttcctctaaagcagcttgtctttattttttagcacctatgtgatcttttctattattctctatttggtaattcataattatcattctcaactacacacaaacacacacacacacacacacacacaatttctcaacaatattttaacattttcaaaggtagagaccatgatatacgtattttcaaatcctttctttttttttttttttgcgatagcctcactctgtcgcccaggctggagtgcagtggcaccctcatagctcactgtagccttgaacacgtggcctcaaataatcctcctgcctcagcctcccaaagtgctgggattacaggcaggagccacaatgcctggacagtaatatctaaatattacttaaatattacagttatgtttttttagctctctgatagtgagttgtttttttttccccttggctgtagcactatctcaaaggtctgaacagagattctagactccttccctcccctggattttattttactttagtttagttttgtttttgtttcccctgaattttaggaagggaaacagaaagaggcctaggcagagccaagcacttcgacataagggaggactgtatattgtacaattccaggggcgtcattcacagtttatttgtaaagatagcaaactttttttttttgatctatgacagtgaagtgtcttaaggacatggaagctttttctaatttccacaggtcccctttgggtgagctgtagggcaacctgcctgcctcttttatgtctaagatgattgacagtgataacatccaattacgatgtttattttctaatttgtgatactgaagtgtgggctttttctatcgccaaacacttactacaaagtgacaaacattcatatagtcccttattataacttatgtaaattatcttgtggtactggaaaaaaagaagccttgtttattattccatgtccacttagtgacagttttcaaaactgtttgtttatagaaaatggattaattataatacggtaaatggccaagaaagcccttgcttgttgacaaagatctctggagtatttgggattctagctgtgggtaaaagaaagaaatagggaatgttacaagaggtacaagtgaaaaaaaatagttcttttgaacatggtaatgtgaagtcccatggttaggaggtagagctgtccaggaggcagatggctataagaatgaagcttggggaagaagtataggctggacaaaatctctttgtaataggtagatggatgaaatcacgctggaaaagcaagtagagcaagaagagtggtagacaagtgggccaagagtagaaccctgagagtcacctacattgaagaagcctaaggaggaagaaatggaggtaggaggagaacctggggaacaggctattaggaaagccaagggaatcaacattctaatgtgtgaagggagatacgcgtagcatcaaaggcagcagagagatctagtgaggttaaatgagaaagaagtaatgtaattccgtacacaattagaaaaaactcacaacactttggaggttcttggtgaccttaattagatcagtttcagcggaatgttatgggcaaagccacgtaagttcttaacagacttcctgaaagtgctaacaggaatctccaggtacaatccctgtgatactagtttgggaaagcccagtgacccttatcagctcaagtgtccaggaaagctctaagggatctaagaggatctggagtccaaatggggcttggcagtggattgagtgaagaagagatgacacaaaggtggacacacagaattaagaaaccagcaagattaaatggaattaaaaggaatcatataaacttccatttttgagtattttcgaacaacaggctgctcgaattcaagatgggagagatttagcttggcaacaattgctttaaaatgatccagagattttagttgattataaacttaaaatgggccaagagtatgacacagttcttaaaaaagctagcacatgctgggcatggtggctcatgcctgtaatcccagcactttgggaggttgaggtgggaggactgcttgagcccaggagtttgagaccagcctaggcagtatagcaagaccaaatctctgcaaataatataaattagccgggcatggtggtgcgtgcctgtagtttcagctacccaggaagctgaggtggaggatcccttgagcctgggaggttgaggctgcagtgagctgagagctgccactgcactccagcctgggcaacagagaaaaaaaataaaaaaaggcaatctttatattaaaaaagaaaatactagcacaggattgggctatgacaatagagaagagaaagtggagacgctaaaagaatacttttttctggaagtagggacaagtaggaaaagaggcacataaaagagcaattaaagggagataagtttattagaacaaatcttaaaaatggaagagatttgaatatgtttataagctgaggggaaggatctattagagagggaaagaacacaggaaagaagggataattaatgatacaagaatctgatgaagctgggaggagttggttttgaactggaatggggatgcctcatccttggagagactggaaggaaggctaaaaggatgggagtgactgtagatatgttgatatgcttgggagggaattcaggcacttgggaagagcacaggctgatgttttccacttgtttgatgaagtaatactccagcgggacaggctctgctgtttctgacactgtgtggaaggagacagagcaaggaagaagttggaagggaggttgaaagaagagtgccagatggacctcttggtctttgtggtgggatcaggaaattggtacttttttccctcagtctctctaagagcaacactattcaaggggctcagaaccctttgagccgcactactgggttttcccacctgctcaggactgcgaggccagactctgtgtcagggccatgctcaaaaatcatagactcaaaaaaacccacaaaaaacttgaagtggaatgcttaaatttattgagaaaaaaaagtctttgagagacaagcactttgatactcttattcttgcaatccataaaacttcctgtaaaaatgaacgactttaggcggggcgcggtggctcatgcctgttatcccagcactttgggaggccaaggtgggcgaatcacgaggtcaggagatcgagaccatcctggctaacacggtgaaaccccgtctctactaaaaatacaaaaaaaattagctgggcgtggtggcgggcgcctgtagttccagttactcgggaggctgaggcaggagaatggcgtgaacccagaaggcagagcttgcaatgagcccagattgcgccactgcactccagcctgggcgccagagcaagactccgtctcaaaaaacaaaaacaaaaaacgactttggtgaaattactaagcagacagaatttacccaaagttgtaagatactgaaatgcagatacagttttttatttttatttttattttttagacagtcttgctctgtcacccaggctggagtgcagtggtgtgatctcgactcactgcaacctctgcctcctgggttcaagcgattctcctgcctcagcctcccgagtagctaggattacaggcgcacgccaccatgtctggctgatttttgtatttttagtagagacagggtttcaccatgttggccaggctggtctcgaactcctggaactcaggtgatccacccgcctctgcctccctaagtgctgggattacaagcgtgaaccaccgcacccagccatggatacagttctttatcagctaatggttaaaaattaaagcaaaaaaaaaatgcaaaataaaacactaagaatcacagacttttaagtgaccaaggctgatgagaaatcattcgccatgctacaaacacggccagaatgtccgtcgaggggcaggcattacacacaaaaaataagcttctttctgccctcaggactgtatggaggaaaaagactacgaaaatcagtatctataacagcatgagataagcaacgtgaggagaggcacaaaatgcaatgaggtgaccgaaaaaaccaagtcctctcattctgagaggaggagcccgatttccccaaggttttaaaagaaataaatagggcgagagtcaaagaatcatactcagataaccttgcaaaatgcgcccctcccgcccggcttcccgcctttggcaccgacgccctcggggcttccctcgtgccagtccgcgcgcgcacgccggggggcaaccggtccagggccgcgagacagtcaccgcgagagggcgcgagcccgaacctgtctacggaagtcccgccctcacttccggcggcggaggattgggagggactgaaggccgtttccggctctggtagtgtagggacttcggcacgtgtgtcattccccgggatttctgtagtaaccctgcttctggtgaacttgtctggccggcattcatttaaggcctaaggatgaaggcggtaagtgtcctcaaaagcccggtcgccgcggcctagggcccctycgggtgatagagtcactgcctgagttagcttttaggcaggttttcacccgtgtctagggggcggtggtttagactgggggctttccattccttacaccgagctcatccttggttacccactgtgtgcgcgcaccacttcagagtatcacgaagagacaggcacggagttttgcatgcgtgggatttcatactttgaaggaatttttcaagaccgtctttcgaactcgtttttcacaaatgagaagcagggtcctaccctcagcgagtttataatgtgagtcacggtacccatgaagggtaaagagatagaaaagcaagtgatttgtcctggttctcccagaaaataagaggtagtcctggggttcaggactaactttgggatttctgaatgagtcaccagcaagagaagtggaatccaaagatccgaattcagttttgccctccttagtttatgggtcttttggcagcttcatcagtaatgtgaggataacagcagtcagtactcaactaggctgttagaggtgatttgttggagcactttgtaagtaataaaatcgtagataaatgtaagttttattaaagacagccagcattttgctttgaatgtgttaaactacaggtgtgttaaactagccttgaatagccacttaccactactagatcagtggttcttaacctgtttggggatcgtagaaccctttgaattgctgtgrattgggattgaataactgatgctgtagcgctcttctgtaggattaaagccatcgtttggttttagcttttatatgcaagtctgtggctgtgggacattgaaattgtggaattggtctaatgaaatttgtaatcagttctctttaacctgatttaaaaaataagtttctgggtatgcagtattctttctgttattttctagagaagaaataaaaaacagatcccaagctttcgcaagttaataaaaactagtaaagtcaaacttgaaaacaagctaaaaaataagcagtttaaacaacaaagcactctcaagaagtaccgaaaagaacagaggaaactaaggcaagctgtgaaagatgctgtgtctaagaaacccattccattggagaacccaaaggaaaagcgaccaggtaattgtgaaaacatcatgtgctctggtttccattgatttattctgaagtgttcttcatggaaataactttgctttctagtaatcgcttttcttgttctcagatcttcctagagtgggtaaggatagtagtcctataggactgctataaagcatatatgctttatcacagtcagtatgagaaaacatttcaatacagtattcattcaagcttctgcttttagtttgtctggaaggcagatctgaagatgcactacttgggaaaacaaactgaaagtactccgttacataaatattgggcagtgtgccagtgctgccactttgccattcgccagcagttaggtaaggtaagaacattgcttgtctctggttcattcttcacagtattgccaaggtacacttctaaacttctgactttcttttcatgtggaaacttggggtgaaattgagttgtaattgtcatggttattttgtaaaactatctaaaaattattaagtactcaaaacttgtaaggaatatgactattttgagtcaggctagttctacaactttgctggtacttttagggtattcttatttgactatatcagattattagacaactattcagtcttctcaggtccattttttaaraattattattattattttaaatagacagggtcttgttctgtcacccaggctggagtgcagtgtgcaaaaatagcccactacagccttgacctcctgggctcaggcagtcctcctgcttcagcctccaaaagtgctggaattgcaagggtgagccacagcacccagctaaagttttttttttttctaattttgtgggtacatagtaggtgtatatatttatgggatacatgaggtactttgatacaggcatacaatgcataataatcacatcagagtaaatgtggtatccatcacctcaagcatttatctttgtgttacgaacaatccagttatacttttttagttattttaaaacataaaataaattattgttgactatagtcatcctatctrtcaaatactagatctttttctaagtgtatttttgtacccattaaccatccctactcctatctcctccaactgcctttcccagccagtggtaaccatcattctactctcttcatgagttcagttgttttaatttttagctaccacaaataagtgagaacatgtgaaatttgtctttctgtgcctagcttgtttaacttagcataatggcctttagtttcatccatgttgttgcacacaggatctcattcttttttgtggctgaataatactacattgtgtacatgtaccatattttcttttattattattattattattttttttgagatggagtctctctctgttgccaggctggagtgcagtggcacgatcccggctcactgcaacccccgactccccagttcaagtgattctcctgccttagcctcccgagtagctaggattacaggygcacaccaccacatctggctgatttttgtgtttttagtagagccggggtttcaccatgttggcygggatggtcttgatctcctgatctcgtgatctgcccgccttggcctcccaaagtgctgggattacaggcgtgagccaccgcgcctggccccgtattttctttatccattcatctgtttatgaacacttaggttgtttccaaatcttggctcttgtggatagtgctgaatgaacatgggagtgcagatatctgttcggtatactgatttcttttttttggattcatgcctggcagtgggtgggattgatggattatatagtagttccatttttagttttagttttttgaggaacttccaaacttttctccatagtggttgtgctaatttacattcccaccaagagtgtatgagagttcccttttctctacatccttgccagcattgttactgcctgtcttttggataaaagcctttttaactaggatgagatgatatctcattgtaattttgatttacatttccctgatgatcaatgatgttgagcaccttttcatatacctgtttgccatttgtatgtcttcttttgagaaatgtctattcatatcttttgcccattttttaatgggattattaaatttagaaggctcatttaaagtagataggagtgccattctgtgcagtgtgtacatttatatagcaagatttactagggtctttttttgtttttttttttgagacggagtttcacacttgttgcccaggctggagttcagtggcgatttctgctctgctcattgcaatctctgctctgctcattgcaatctctgcctacgggattcaagtgattctcctgcctcagcttcccaagtagctaggattacaggcatgtgccaccacgcctcactaattttttgtatttttcgtagagatggggtttcaccatgttggccaggctggttttgaactccttgcctcaagcaatccacccgtctcggcctcccaaagtgctaagattacaggtgtgagccaccgcgctcagccaagatttacgagttttaatgggtcaggaagaattgtaagttctactaggaaagatgctaagattgttttattcatagttgaatcctcagcacttcaaatagtgcctggcacttagttgactttttttttttttaaataaaaagaggagatggagaaagagagcaagacgcagacagtgagcagaaagagaagttagaatgatctgttgttgggattttgttagatgtgagtgcctgaagtgttgaaagaaaaatagttgaggatattggcaagagtgtggttgaagtgataatcttgcagtctaagtgagggagtgaagacagaacacacaggtagatagaaagtggagtggtcagtggattgaaaggttacataattggttaaggaagaagtgctgtggaagtaactgaatgggagctggaaggataaaagcttgtggtcagagagaggggtgagcactagggtttggaatgtggccattagagaggctggctgaaatggaatacgaagtgaaagtaattggagatgagaaggagctgaggggctaagtcattggtttccaaacgtcctgaaaggcatttcagagtatgtggagacatttagtttttggttgttacaataacctgggaatgctattggcatttagattgcaggagtcagagatgctagcatttttccagactcagaacatcccagtacgacaaagaattgtttgcctagcatatcagtagttcttccatttagaagcactgggctcagctgtgagccatggcccactccctgtaatcccagcattttgggaggctggagtgggaggattgcttcagaaagcgtaagcttttcctgtttaaacccaaaatgcagagagttctacatctctgatacttgtttctaatttttctttgtgtgtgtgtgtgtgtggtacaggtaaaaggattgagagggaagaagaggaagaagaagaagcccttcctttagatatgatggatgaagatgacttacagttaatgaaggatttaggacaaagagtatcttttctaacaagagatctttcttctaggtaatacttcatttgggttataatcattcatatccatttagtgttaaaaacttggttctgaatttcacttaggtggttcaaggtgttcacctttgagcacaatgtttacaaagaataaagtattatttagcttatttcctaaataaaggaggttcatgtataagataagctgatttcatttaatgtacatctttcttttgagtctgaatagtcaagtagagtgaatgggggaagaatgctgttctcactttgaggtagtggcagaacagttctgagttcytacggctatgatttcacttaatcctcattaccctgctggtaggtcttattcccatttccagagaggaaactgatggttccctgcagtcacaagtatctggaatttaaagttggaccttttaaactccaaagtctatgctatactctaaagattttgggaaagtaagagtcacacttggttttatgaactgttcttcataaagaatctgctgtaactttcacctttattttgcatctagagggaaaactggatgtagccaaagtttgagtttgtatggtaggttgtttacccatttcttttattcatttgctgtttgagtgcctgctatgtgccagacactagcctaagtgctactatccatatacctattgaaagttggctggtggtttttctgtacttttgaaatgataggtctctagataactttttagatctattaagactgaaaattgatctttttttcccctgcagtgagcctgttcatgcgaagaaacggaagcatgaacgcattatagataaatatgaraaaataccaagaactctgcaaactgcaccagagaaggaactgattcatttacttcctatcaaagataaaagtggtataatcccacagactagggagaagccaggtgagtctaataaactggtaatattagttgaacttttacccccttactgatatcatgtttttttttcactcaaaatttaattttactttgattttacccatatctagaaaatattcaattagtcttatagcaagcttgatgatttgggccagaattatagattatctcaggtaccaatttgtactgtgaggacaactgaagctacaaggttcaggtgattttcttttcactaaattttgttgtttctaaaattagagcatattaactgttcttgattagctttcttttttaatgtatcttcttttgtatgtgaaataaaacagaaaagttcagatatcaaagatgtgaagttacatggtttataacaaagcgcatacctataaaactactattcagacaaggaaaaaaaactactgctagcttccagaatcctcccttgtgctcacctcaatcactaattgtgctcttcccataaaagtaactgctatcctgagttttatcgtaatcacctcctagcatttctttacagtttttaccacttaagtatatatcacagttttaatacatatgttttccatatagttactgatagtaacaaagatgaagaggatcaagaagaagagagggaacttgaggaaggtaatatgtctttacagttactaaattgttaattgagaatttttttgcataatagtaaatgtgagttaattttagatgaaatctggaaggtacattttggagtactgctcatttcaaggtcactttgaacatttttccacatttgaaagcttcatcttgtggaattattaatagattctttatttttttgattatggaaaaatttacacaatcatatttgtaatatctaggcatacaagaagtgtgtcttgttaattattactgttctgaattccttttaattgtaagagaaagactacttacaaataactgttaactttttagctttaaattacaaaagcgattctgtagtatgaagtcattttggtttgtttctagcacaattatacttgcatatgtttcatataattgaatgtcagtttctattacctaggaccatttaatcaaagttgaactgaaataatgcattttattgtttgaaattatattagtttggaatttgtgacagaacaatctagttaaattttactttcgcttagcagacctcattaatagcaaaaatgaattacaggtcaactgtttaactgttttcagtcacccatcataaaaccattacagattatgctagtgttgattaaatctagttccctatgaatttcctaaggtggacatgtttttctgtagcccaaaactatgaagtattagtttgtataaagtaatatatagtgttaaaaacaaaggagaatattctgtacttaaaaaaaaactaaataggattatcctatttgttaattaatatgaattattttgggcttattatcatagaagctaagaatatgagctctaggctggttgcactggctcatgcctgtaatcccagcactttgggatgctgaggtgggaggatcacttgagcccaggagtttgagaccagtctgggccacatggtgaaaccccgtctctacaaaaaacacaaaaattagctgggtattgtggctcacctatggtctcagctactggggaggctgaggtgggaggatcaattgaacctgggaggtggaggctgtagtaagctgtgatagtgccactgtactccagcctaggtgaccaagtgagaccctgtctcaaaaaaaaaaaaaaaaagttctagaatcagactgcctgagtttgaatcctattttcctttggtttatgagcttgaatcctattttcctttggtttatgagcttagccaagttattttctcttcctttgcttcagttttcttatctataaaatgggtccaatgatagtacctgtattgttgaggagatgatgtgtagtagtaaatacaaaattcttagctgttgtcattattattattactgtaaaaatattttattaagattcttggatacttgtaagcagaggaatatgtaagggaacatctaatctgttttagagatcattgaagatcytattcaagagctgaccatagaagaacatttgattgagagaaagaagaaattacaggagaagaagatgcatattgcagccttggcatctgccatattatcagatccagaaaataatgtaggtagtattaatttctttaggctctttgtattaggtatggtgtaaatgcctaattgttaagattcccttgttacctataagcatacactaaaaggaaaagcattaactaaacatagtagctgggttagagtaagagagtagacagaatcttagcttaatgctatgtctgaacttaatttcttttgtaatcctagaaaagttacttaaactctctgaatcttattctcctcatcttcatatatgaaaatactggacatcttataactctaaaaatgtttaaatttataaaattgtattagggaggaggaacctgtttgcaaatttgcttgacatacccgtggagtttttaaaaagcgcgctacaggggaagtgtatggaattagttcaggaatatttgtaagttgaaaatattttaagtgaactagagccaaagttaaagtaaagtgttattgtgccatgtgtatagtcgttgagttagtgatggttataacacatgaactagagaaatctgaggtttaatcttggccctgataagtactatctgtgagactttgggtaagttatttatccaagactctttcatctctaaaaaaggacagtgtctttttcaaaactttgtggtgaggattatatgatgaaatatacgtgaagtcatataaaatgatactattattattgttatgctggtgtccccagcatactattataacaagtatttgtttatgaaatgatagaatagcttatttacatttatagaagcaaatttcatgtgggaatgctttggagtagtacttgtccttttctaatgaagtgaggggaagatctagagcagaattagggaagagagatttggaatatttcttatgtgtattctctcaatcattacaaaaccataggcataagagattgatctaattttacagctggaaaattgagccttaaaaaacccaagtgatttgttccagattttaacagccactggattggaacccagatcttctactcaggaacctgtgctcacagacaatagtagttcatcaaagcagtcgaaaccatcatagaaattatctttgaagctcaagttaatgtggctatattacatgtaattcctgattaattcatgtgtatgactgatatatttggttaatgtatataacattttagtatattttgaaaagcgtttttagaagaataggacacacgtactttaggaaaatccagcaaaaaagaatttcccaaaatagctaaataataaatgtaaactaattttttaaggtctgtatgtttctaactatatgacaaaaatatgattactgatatagtttggaggtgtgtcccctccaaatcttatgttgaaatgtgacctctgatgttggaagtgggcctggtgggaggtgtttagattataggggtggatccctcatgaatggcttggtgccatccttgtggtaacaagtgacttctcactctggtagttcatgtgagagctggttgtttaaaagagcttagaacctcccctatctttcctgtgacaccctggctccccctttgccttctgccttgatcgtaagtttcctgaggcctcaccaggagtagacgcaggcaccgagcttcctctacagcctgcagaactataagccaaaataaacctcttttctttataaattatccagcctcaggcatttctttctagcaatacaagaacggactaatacaattactttatgactttagtgacttatctcttggtaaagtgagcagggtctggagtttggtgtggcatgactagacttggagtcattgtgtgaattccgcttgttttgccggatgtggggctgttgtcttttgttcataattgtttcgtcatgatttctccagctttataagctatttctttaacagattaaaaaattgaaagaattacgttctatgttgatggaacaagatcctgatgtggctgttactgttcgaaagctggtaattgtttctctgatggagttatttaaagatattactccttcatataaaatccggcccctcacagaagcagaaaaatctactaaggtaatgctagattgctagatataattactatctaaaataactaaacattttggagagatagactttttttttttgaggcagagttttactctgtcgcccagactagagtgcagtggcgtgatcttggctcactgcaacctctgccttccgggttcaagtgattctcctgcctcagccccctcagtagctgggatcacaggcatgcgccaccaggcccagctaatttttgtgcttttagtagagacggggtttccccacgttggccaggctggtctcaaacacctgacctcaggtgatctacccgcctctgcctcacaaagtgctgagattacaggcatgagccaccacgcctggcctaaacgactgccgcgttttttgttttttgkttttttaaatagtactgggtgtatactagacacacatattttatactaattttgggcttttaatgttctgattttaaaaaatgattgacctttttggtcttttcagacccgaaaagaaacccagaagttaagagaatttgaagaaggcctggttagccaatacaagttttatttggaaaatctggaacaaatggttaaaggtatattaaacatatcttcaaagtttgtaacatacttagccttgatcatgaaggtgaattctgtacagtgttctgtgttgtgtagtgagaggcaggtatggtcaggaacagaatctagagtcagacttccaggggtcaaatcctggctccaccacttactacctatgtgatgggaaaattacatagtctttctgtgtctcagttttcctgtctaaaaaatggaaataattatagtacttaccttccaggattattgtaagaagtaactgagtttgtagatatgaggtgctttaaacagtgcctagcatgtactatacactatattttatcaattattagtattattgctgcagtttttagtaagtagttgtatttttgttgactacaatgcatttaacaaaatacattgttatgaacagttgggatttattctgctgttttttatttggaggcatggtagtcagggaagaaggataactagaggccaggcgtggtgggtcacacctgtaaccccagtgcttttggaggccgaggcaagaggattgctcgaagctaggagtttgagaccagcctggggaatgtagtgagactcctgtctctaaaaaaaaaaaaaaaaaattaggcatgatggcccatgcctatagagccccagctactggagatctgagctgagaggatcacttgagtccagaagtttgagcctgcggtgagctatgattatgccactgcactgtagtctgggcgatagagtgagaccctgtctcaaaagaaatgaataaataaatagaaggataactagaaatggatatttgcatgtcttgaaaatggatttatgagtcaattatttgggatgataaactcttaaactcttcagaaaaggaaggacatagaaaaaataggggtaggaatagggaagacagttgttgcctaggccaggtgttttcatttggcctaattggctcatttacccagcttatttactaagatcacccattgctgtcagctggaacaggaccactgaatcctgttggcctaataagggcataaaggtagtggagtatagtggggtgggggtgggtagtatggatattgcttctatgttctggtgttccagctggcaccctattagtgtttgttcttccagtgagagggcctgggagtttttcttttgtttttgaatttctgaactgtttggaaagctcctgggatctttgtgcaaccatctctgtctgatagaactataacatgagccacrtatgtcatttaaaaaaaatgcagacacactaaaaagcaatgaaattaattttaatagtatattatatatattcagattatcatttcaacatgtaataaattttaaaaattaatgtcttacattctcagttttttttagtactaagttcaaatctggtttgtattttatacttagagtgtattttatacttagagtatatcttaatttgtattagctgcatttcaaatgctcaattgactcctatatgtggcagttagtagcctccatattggacctttcctgagcagatcgaaccattatgaagtctttttttcttcttcttttttttttttttttttgagacgatgtcttgctctgtcgccaggctggaatgcagtggtgcagtcacagctcactgcaacctctgcctcccaggttcaagtgattcccctgcctcagcctcctgaatagctgggactacaggcgtgtgccacccaccatgcctggctaatttttttttttttatgttagtagagatggggtttcaccatgttggtcaagatggtctcaatctcctgagctcgtgatctgcccaccttggcctcccaaagtgctgggattacaggtgtgagccactgtgcccagcatatgaagtctttttttaaggggtgtgggaatgtgtgtgtgtgtgtttatgtgtgttaaaatgtacattgattgtaaaagaaagccaattagtttaacttttgaccaatgagtaaagtaactacagttatcttttgattagattggaagcagaggaagctgaagaaaagtaatgtagtttccttaaaggcatacaaaggactggcagaagtcgctgtgaagagcttgtgtgagctgttggtggcactacctcattttaactttcacaacaacatcatcgtattgattgtccctctcatgaatgacatgtcaaaattggtgagttgctgtaaatggttattgctgtcctccttagaaaattatacaccatgtgggccaggcacggtggctcacacctgtaatcccagcactttgggaggccgaggcaggcagatcacgaggtcaggagatcgagaccaccccagctaacatggtgaaaccccatctctactaaaaatacaaaaaattagcagggcgtggtggcaggcgcctgtagtcccagctacttgggaggctgaggcaggagaatggcgtgaactcaggaggcagagcttgcagtgagctgagattgcgccattgcactccagcctgggcaatagagcgagactctgtctcaaaaaaaataaataaatgaataaaaaaagaaaattatacaccatgtgattttttttccccctacaaaattcttctgaagttatttattggtaaaataatgtcaatttattaaacactgtctatctgaagaaaattatctgaacataagtttggtgtagtggttcacaacaggaagcaaatttgtcccccagggaacattaggcaatgtcggcatacatttttgattgtgatgactgtggtggcgatagagtcttaactactggcatctagtggagaaagtccatggaggcttttaaacatcctaggacagtccccctacaacaaagaattctgttacccaaaacgtcagtagtgctaaggttgagaaacactggttaagtatgacattttatttttcagatatctgaaatgtgttgtgaagctgtgaagaaactctttaagcaagataaattaggccaagcttctcttggtgtaattaaagtgatttctggttttgtgaagggcagaaattacgaagttaggccagaggtgagcctttttttttttactttgcattttgtttttaaattacaaagttgattttcagttgttatgaggaatttattccttataagtgtatgaagtaaaaagtattcaagctccttaagtgtttaacatgtcaactcctgaaatgtttgatactattaacagttyggtatttatccttctagatgtttttctttgcagatatagtcrtatatacttgcttatattttaaaatraaaaatgggcttatactttgaaaactgttctggaacagttttcattttctatattgtgaacttacatatagggttatcccattctttctaatgcctaccagagtattccattgtgtgccctaattgttgaacagctgagttttttctagatttttgctgccacagtcagtgttgagaacattttggccatattattttttcatattgtgtgaatattctgtgaattaaatttataaaatgtagatgctggatccaacagtaatcacatttacaaactcaaattgttgttcaaaaacatttaatcactgtgttcctgctaggaatatgagtgtcagttccctcctacctgctcagaatgttactatttaatctttgttagtcaggtaggtgaaaagtttatatatatatamactttttttacctgcttattatttgtcagtttttctcttaaagtaattgtcttaatgacttgtgatgagtttttagtacatattcattttaataaataactgctatgtgccaggcactttttttaggtcctgggaataaaatagtaacaaaagaaacgaaactatctgtttgtggagcttgcattacataaagaatattaactctttgttacataggttgcagattgttctcttttttactttgccttttaattctgtgttcagccttatatatgaagctatattttttgttatgcacatagtctcctcaatcccaatttacggagtctctccgagatttttaattttaatttttatatttaaatatttaaaccatttgacatctttgtatgtgtggtatgagtacagatttaatatctgtgtttaatatatgtaatgaatatatattttatatagtttaatatatattgaatatttatattatgtatatatttgawataatctgacagccagttatttcatcaccattttttttctgctgatataaaatgctgcttaattattgtgttatatctatagtatatttgggtatgtggtacaataataatcagaaagggtataattgataaaagacatgactattcttttttctccacaatattcttatttatttcagtatattactccaggcartttagaatccatttttcacttccttccctcaaaatagtccacacagagaatctgattagaatcgattcaatgtattgattagtttggatgaattaaaatatttacagaattgatttttttctattcaagaatatcatatcttgccatttatttaagacttcttttatgttcttaagtaaaattttatagttttcttcactgaggtcttagatattttaatttgtctttagtaatacagttttgggtgttaagctgttctaccattttatttctggatttcacagttttcctttggcatcagattcctttttattttcttaaatctgatttcagttgaattgctaaaattataaacattaaatgaaagtaacagagcatatttagcatctttacttagaattgtagagcaatcagataaggcttgaacatgaaactcagccataggaaaaccctttaactttcgtgatgctagagtaaaaactacatcatttgatttggagttatttttcgttggtaggtgatattttgagcacatacagtacctacaaaatattcagagttggtctttctgatacctagaatgacttcaggttcactctttatgcctttagttattccttgtttcattctgtgcttttagccgtgtaatcccaaatactcagctttcttccaaatgtgcatattggaacatcaaaataatacaaacctgtagttctcaaggttttttccaggaatgctgctgtgcctgcgggaggtcggtagggtgatttcatccagagaaagtgtagcattttaaaccccttttgttcttagtgtttgagtatgcgaagtttgctgtatcacacaaaacaccagtttccaaattagtttctgaatttttgaatggcataaagcaataatttttatttttgtccccagaccagcatcagctgggaattagaatgcaaattctggggctcaactcagacctactaaatcagaaactctggggatagggcccagcaatttgtgtatcttctcccatactggtccaaaccttttcctggcctgttttctctttgtcatcctgttggcatgtgttctctcttccttatactcattaaactgcaaagaaagttttgtatatttagttagtatttgctagcgtccgttttgtatgtttgctcccgtccttccatagacacaagttattaatatagcatacagataaaagaagttggtgtaaaatgttataaaagatgtttgaaggttttttcatgaayragggaaataacactgttaaatgcttttctatgtaaagtttttgagggcaatataaatattaagctgtatatttgtgttttttttccaatattagatgttaaaaacatttttatgcctaagaatcaaggaagtagaagtgaaaaaagatacagaagacattaataaaccaaaaaaatttatgactttcaaagaaaagagaaaatctctatcaagaatgcagagaaaggtttgacttatttccccttttgtttcatttaaattttctgtttatttgatcttagattaaacttataggcacatgtaaaaatcatagttaaatcataaacataaaagttttgaaatacatcatttagagaattttatcttttcctgttactgcaaagaaatgttttcttaaatcagttttaactgataatgattggcaaggagagcaatagatgaaaagatatttttgccatgctggcttttatcctttggctttttagatcaatttagagttatgatacacagattccttccttaacagaaaagatgcattcacgtgaagttggcagcaaagtgagtttctgttaattgaatcttgtttctttgttggtttgtattttaaacttgggttgaaatttcagccgcttgtttatttactgaaactttggaaactttatttatttatttatttattttttgataaacggggctaataatagtacctaccttgcagggtaatcgtgcaggttaaatgagatgatgcatataaaacacttggcaggctttataaaccttagttttagtaccaccaccatcatcactattattgttatcatcacatctcagaacatttctaaacagtttattagagtgatcaagttgcttgtaaaaacaaaagtaatctctggggatattcatctttgaatgggtctaattttgaaaacatgatggaagtatcaaaatagacttaataattgtgaacaaaagaagatacatattttaactatttatattatactatcctaatgcaggttggatagctctgttaggaagagcatgtgtatagatgaggtgaggaaacaaagaccaataagaacatggcagctctttaacaacttctcatgagagaaggaaacaatttttcagttccctgtgcctcaggcagcttagaaattatcatttactgctcttacagcattaggtagtagaaaaaaaaggatattttattgaatttctttatagggcccagttttatgcattgtatgtaaatgtgttggggaagtattgttggtgactggcttccaagttatagatgatttaatcctagccattatttttgggctcaacatgttctttccttttttttttcttttttgaaaaactttaataatagaaaatgatagcatatcccagatatctgctattcagaatgagcaaatattaatagatttactttagtttttttcctggaaaagaaagaaaccataggtgagagagtaggaatttcttttctctctccaatctcattcttctaccttcttcccaggagacaccatctttaatttggtttgtatatacttcccgtccatgtttctctactttgtttatatttgcattcrtagacaacatgtggtattactgtatgtgttttatgacatttacgtattctgcctctgcttttttcactctgtggtatatgctcttagatttttgtttttcaatctattttcagtggaagaaagcagaagagaaactagmgcgagagcttcgagaggcagaagcttcagagagtactgagaaaaaacttaaactggtaggcagtttcatattctgttatgcttttaaaatgcgttragttgtttaaactagaaatttattgtttcagcttgtagctgtgtaattttggtttctttcatgaggcttagatgtgtgacttttgtgatgtgcgggaaactgtgatgtgatcagtgctagttttatgcagtcacagggtgtatatcttcattctgttttgttaaaaatttcaaagattgcattgtggggagggatgggtagggaaaaaagttaacctgttgaagtgatacttatgctcactcaggagaaagcataccaggttatcctaaagtcattttgtctgtctcctctgccagcacacagagactctgaatattgtgtttgtaacctacttcagaatattgaagaaggcccagaggtcacctctcctgccagcagttctagaaggtcttgccaagtaagggctgtgtaggttgaaatcttttagattccttctaaataggaaagaccaaagaattttcgagagttccctaatgatggccyattatcctcagttctcattccttttctgattgtcaccagcctttacttgaagctattcataacagtgggcttttttgattttctcatctcaaaccttttatttttaaaatctcctttaccaactccttctttctgcctactaaattctaggtgttcctaaggttaaatctctcagttcttgactctttctgcactgtgtagtcaattgcccatcgtcatagtttgagtggatcatgcagatgactcttaagtctattttaacccggctgtacatcatttctctagttctgtgtaatgtgtttctgctaagatagatcttttggtgtattcactcaacactaatggccttgtcaggatgtgagctagagtaagggttgtggttgtcatgatagcgttccacaattttttgaggtggtatcctatagaacattgctattcggtaaaaatataatgtgaacttacatatataatttaaaattttctattagccacattaaaaagataaaaagaaacaggtgaaattaatttttatatattttactggatttgatttatctgaagtattttaacacaatattaaacattaatgagttgtttggtgttttttcataacatattttcgaacacttatattttacgcttgtgtcttaatttggactagctacattttaagtgcctaacagccacatgtggctagtggctaccattgttgggcagtacaactttaggaatagagttggaaataggactgatggctagaagatatagaaaaggcaagttctgtttatcataagaaattactttctaataactggagctatttggcaatggtatgcatttccttatatggtgatacggtccttgtggttaaaaatcttcagagaggctggtcagagaagggattattcctacattgtgtaggacttgctgtttttatttttgtttttaaatagagacaagctctcaccatattgcccaggctgatcttgaactcctgagtgagtcatcctccagccttggcctcacaaagtgctaggattacaggcgtgagccaccatgctcgacccagctatttgttttttaataactaattcctttatttaaaaaagtttaaaaaataatatatggtcatttaaaaaatttaaataatgcaaaagaatatacaatttaaaattgcaagctccccctcctatatatgtatgtagtctgtctgcgtgccatctgccacctttttttttttttttggagacactgtcttgctctgttgctcaggctgggttgcagtgacgtaatctgagctgactacaacctccacatcccaggttcaagcagtcacctgcctcagcctctcgagtagctgagactacaggcatgtgccatcacacctggctaatttctgtatttttagtaaagatggggtttcctcatgttggccaggctggtctcgaactcctgaccttaggtgatccatccgcctcggcctcccaaagtgctgggattacaggcatgagccatcgcaccgggcctgcctgccatctttcatgcaaatggaatcatgctatgtttagtgtcctgtaacttgcttttttttttttttttggttttgtaaacagttacttttggtacctctcccttatcacatatatatcacttaatttttaaaaaatttatagtgctccatttyatagatatattgtactttatttggtcagtcgcctatttgcactgggaatacttgcgcacgtgtgtgtgtgtgtgtgtgtgtgtgtgtatcttcatgcatgtgtgtgcatgtagtgccagatcaaagggtatgctcattttaaattttgataaataattgtcagattgcttctccaaaaagttgtaccgatatgcatggaatatgtcactcataaggtcttttattcttctaagatttacatagatcaaagacttcttgctaatattgaagagatgtcctgactttaacctacttcagtgtctactatagtatatggagtaactctcaaatttagcagctcatatgattcttctttaaccctattgggtggtctcagttatttctacaaatagaggcccaggacagtgaagtgagttacctaggatcacgcaggtaattaagagcagagcctgaactagatactggggtccagtattctttccattttatccttaaagctgtcataaggtccatattcttgtaagtagcagaatctttccttgtctctcttcccaccacctgttttcttagaagccgatcctgccggatacctcctaaactttcctcaggaagttgtttgcttctagtaatttctttctcagtgcagaaggatttttgaaatatttttggtttgttcagtgccttatatatttctactgagtttagtgttcaatggtgtatgaattgttgaagaggccaatctgaattaatgaaaagtatcaataattgccatgtctttcatagctaacatttcgaaataaagaatattaaaaatacagttttaaagtcaagcttaatttctaccagctttatttctgcttttagttcactgattaactgttttgtttgattccaggtttgctcaccttataaatgtggaattttttgatgatctgttagtagttcttcatactctcattgagtctggtgtaagtaataataaattattttttaaaagatataaatggtaattactattttaaaaatttttcaggtttattgagatatattttgtatacagtaaaaccccttttagatgtacagtttatgaattttgacaaaggcctatgatcatatgattaccaccacagtcaagatgtagaacgttttcaaccattggagagttttaagcaggagggttgtctgacctgttttcttttttttttttttaaattgatgcataatagatgtacatggtttcagggtatatgtgataattaaatatattcatataatatagtttgtaaatattttacttgggatatcagtcaccttaaatatgtgtctttatgtgacaaccattcaaattcttccctcctagctattttgaaatagataatagattattgtaaactatagtcaccctgtaaatctgcctcatactaggttatcttaaagataacctttataggtcttttttttcttttttgagatagggtctcactcagttgcccaggccggagtgcagtggtgcaatcacagctcactgcagccttgaccttccagggctcaggtgatcctcccactttagccttttgagtagctgggactacagatgtggggcaccatacctggctaatttttctatttttttgtagaaatkttttttttttttttttttgagagggagtcttgctctgtcacccaggctggagtgcagtggcgtgatctcggctcactgcaagctccgcctcccgggttcacaccattctcctgcctcagcctcccgagyagctgggactacaggcgcccaccaccatgcccggttaattttttgtatttttagtagagacagggtttcaccgtgttagccaggatggtcttgatctcctgacctcgtgatctgcccgcctcggcctcctgaagtgctgggattgcaggcgtgagccaccgcgcccggccctgagagatgggtttttgccatgttgcccaagctggtcttgaactcctgggctcaaatgatctgcctgcctcagcctcccaaattgctgggattacaggcttgagtctttgctcctggccttaaagttcttttttaaagctataaatggcaattaccattcttaatattccatccccctcaccccccccttttttttttaaaggacctaagctatcaagaaagtcttcactgtgtccagactgcttttcatattctttctggacaaggtatgatattttcttaatcaagttttgtttgccttacctttgaatgctataacatacctaattggtgtttrttgtcatttcaaaggtgatgttctgaatattgatccattgaaattctacacacatctctacaaaacactgttcaaattacatgcaggtatgtatgtttagataatgtttcttttatatgtatttatgttttaagaatatgttatgacccatcattgtagacaaatgagaaataggaacaggtacataaaatggtgactttccagtgccatgcatctgtatttaatcttatgtaagacttggagaaagagcttctggaattgactggagatgcagtaagtatagcccgctgtatctccttagcagtatagcactacctcattgattagagaaatggtttgggacaggtacaaaagtttatcttgggtttatctgaagttcagtccagttgcgtaatgaaaaagtaatgagaacagctctgaagaatatgtctgctgttttaggtgctaccaatgaaggtgttgagattgtactccagtgccttgatgtcatgctaactaagcgcagaaagcaagtttctcagcagcgagctcttgccttcatcaaacgcctttgtacccttgctcttcatgttcttccaaattcaagtattggcattttagcaactaccagaatattaatgcatgtaagtagtgatacaaatgaacagagctaagttcttataatgcaatgattttttttgtttgaggcatgtcttttccccccttttatattatttcaattacagaagtaattcacacttgtaacaaaatcaggtgacaaaagaggtatataaaattgaaaaaaagcattttatacctattgacacttctcagtgtcattaggtgggtatccatttaccatttggtgggtatttttccagcagccttttaaagttcatatataaacacatacacatagaaacaactcaactttgtattttaatggaaagaggattatgctatatattctaccacttttttaaccttagcatttaatcatggtaaacacattataatgtcactaytctctttatgtaaggtttatttaattctttgcttaacaaacaccatagttctgactatgtgccttccagttataaatgccttacaaaaatttaattttcataactctgaggtagctactattcttgttcctattgtacatgtgggaaaactgaggtccagagaggttaagtgtcttggcttgagtagcagtgccagtcagtggtagaagtgatattcaaatgtaggcagtctggtttttctgcttctttctatttctcttgatataggttatttctttttttgctattacaaatgatgctatagtgaatatctttatgtatttatctgatgtaattatttctatcagatttctaaaagtgtgattgcaagatgagaagcatatttttttcttttgcaagataaaattaattttcaaagcaagcaaagataaaatttttttttgcaactcttgttcttactatataaacttaaattgttttttattaaatctaggtgtaaagactttatgcaaagctcttatacaaccataaatttaaatgcaaatacaactacaaaccagtaacacctcttatattaacaatgttaatttaaccaattctttttatgtgacatttttgcagactttccccaaaacagatctactgcttgacagtgaatctcagggaagtggagttttccttcctgaactggatgagcctgagtactgcaatgctcagaacactgctctgtgggaactgcatrctctgcgggtaagagtggccctggtttttttctttttggggatgtttgtgaataattgttttccagtttttcttcaaatagttgttattgccagagtacttaattatattttgttctggggctgccttttttagaattcctgtgttagtatgctacattttactttgctgttactattctttaagctgttgaggtacattttctaaggaagcagaaaacagtgtcagttctgtagggtgcagttgtggaagatttactgaaacctttccctttattgaaatctttccctaacactcttcagaggatttgttatcaggtacatttctgttgagtcttatccaaggagactttagtaagccctgtttcaagatggtttcacctatgcagtgatcctacagtatggacagcattagagtgagacttgtagaaaatagaagtggcaggtaacctgttgtaaattaacttttttcactctgaaagaggaattgctttttgatttttctatttatattgtaaaagcaagactaaactacttcactggtaacttgatttgtgttttaatcctattagcaaagataatattctttctgtgggtatgtgcttctaatgaattacatatactgtacataggtgatgaaaaaaaatttggtgtaattttatttaagaaaatctttgctgtggctagtgttttttgtaaaggactgacctgtgcagaatgtgattgtcccgttttcccttcagaggcattatcatcccatagtgcagagatttgcagcccacctgatcgctggagcaccttctgaaggctctggagcactcaaaccagagttgagtcgaaggtaatatttagcattgccttattctaaaactacagaattgagctgatagccacttactatgagaagactgtttcataaagtaacatactacaaaatgtaaagtgccagttgggtatctggattggtcttgcttcatattcctgaattgttctgaaagaaaacatgctatgattttgttgatcacttaaaacattttttttcttcttctgtcattcaacttgaaaaacatttttttaatcgtgaaaagtttcgcacatacaggatagtagaatggcatagtgaatgtccatatgccccccatcactcaggttcaacaatgaataatctatggctataggtgcttcatgtgaagataaaacacaagtcaaccaaattaagcttccttgctttctcgctcgctcggtcttttttttttttttgaatggccctgttagggcaggatgaggagaaaaaaaaaatgaggagagggaagaaaagaggtgctttggaacactgccatccagaagggcagctttttctttttttggcccttgcagagtaccttctgacctataagcagcttggatgggtacttccagcatctacctcacacccagatggggaaaaggtcctcctaaaagagtcttcttttccctgaactgtttacttacaaaattttcacaagtacagaaaggtgaaaaatagtaattactttttttttttttttttgagatggagtctcactctgttgtccaggctggagtgcaatggcgcaatttcggctcactgcaacctccgcctcccgggttcaagcgattctcctgcctcagcttcccgagtagctgggattacaggcacccgccaccatgcccagctaatttttgtaatttttgtagagatggggtttcaccatgctggccaggctggtctcgaactcctgacctcaggtaatccacctaccttggcctcctaaagtgttgggattacaggcgtgagccactgtgcccagccagtaattacctttttttaaatacagacaggaaatacttaagttatacagagaaagagagaaaatggtataaaaaatccctcagtccatttatggtgccataaaaaatgcctaagactgggtaacttataaacaacagagggccaggctcagtggctcacgcctgtaatcccagcactttgggaggccgatgcgggtggatcacctgaggtcaggagttcaggactagcctggccaacatggtgaaaccccatctctactaaaaatacaaaaattagccaggcgtggtggtgggttcctgtagtcccagctacttgggaagctgaggcaggagaattgcttgaacccgggaggcggagattgcagtgagtcgagatctcgccattgcactccagcctgggtgacaagagcgaatccgtctgaaaaaaaaaaaacagaaatttattttctcagaattctggaggctgggaagttgaagatcaaggtgctggtaggtttggttgactgatgagggcgcctctctgcttctgagatggcatcttgttkctgcatcttctggaggggaggaaccccatgccctcacatggcagacaggacagaatgggagcagtgccacagcttcacttcatgaagcctcttctataaagactttaacccatttatgccagaggttgcaaattttttttgtgtgtgaaaaatcagaccttggcgatgaccttgagcagtaggatataaataactcctacaagcttagtgttctgataatggaacactagtaggcataaatgggttaatcccattcatggcttaatcaccttttaaagcttttgcctcttaataccatcacattgactgttaagtttccgtatctgaattttggaggggacacattgaaactatagcaccttacaatgtactcattacccagaattaatattttgctgtaggttttttccgtttgcaagcccattggtttctgtaattcagagatcatagtttggtgacctgtgggccaggccgatttttctggcctcaagagtttgaaaaaaattgaattagttgctgtcttttaaatattgaaagaattcatcygaaattcacatttcccgcttttcttgaaatactgggaggtttggtgacattggcttgtattttacatgacagtagtcagtcagttgctgcctcctctacatgaggcaagagctctgcagttttccatgagccctttccttctgagtaggatggagataacttttggccttattaaataaaatggccatttactttttcttccctcacacttctcacctgtccccagtcttcaccccaccagcctttttttttaaaaggaaaaaaggagaaaacaattctttgtcactcttcataatgattattttatggcatgttttccttagcagttttgctaaggaaagatgtttcctttgtggagaaggatgaggaatgagcttatcccaaaggcttaagaaaggagactcatagtgggcttctggagagtgggtattgggatgtgagcctaattgctaccttcgtaggcccttgcctatgtgttttggcgagtgtgaactaattccaaatcattaaggattcatttacacgccatgggtatagacatgtattctgtcctgaatggcctttccttgtttttcatccaggccagtagctgaagagttgagctgtgttctaagtctgtggagaatgactccatgcttcagtcctctggctcccatgactaagatatacttagttgcattatcagtgggttgggatttgatcacactgaactggagttcttcagcttagctttctctctggagtctatgcctgtattgctaaatgtataccaaacctctctgaggtggatttagttggataatgttgacattacaatgggaatttagaatttgttaagtgactggattggttggttagtttcaaatcttataccttaatatatgggttaagaatgaatcattctctgagtataatctaattatttttgagttacacagatgtggtggtatctttacattttttgtgtttgtgatttagatctgctactgaactttttgaggcatatagcatggcagaaatgacattcaatcctcctgttgaatcttcaaaccccaaaataaaggtatgggatatttttcatttttttaaaggaagaaatagaaaccaatgtatctcaataactctaactccagtttgcttaattattttataggtagttttttttttaatgtttaggatttcatcataggatggatttctgaggttgaaattctatagagatgatcatgaaactgttcgttcaatataggatatgtccaagaccttaccaagcatctgtcattgtgttgcatgtgttggtgtcagctgttgccattttcaacttggttcacaggttggckttagcttatagcataagtaacttctaactcatactttaaatattttcctagggtaaatttttacaaggggattcatttttgaatgaagatttaaatcagctaatcaaaagatactccagtgaagttgctactgaatcgcctctggatttcacgaaatatttgaaaacatcactacactagtagaggaatgaagtcagtggactttcttgtatatttgtgtgtgcagatgtacataaagatgagttgttaacttaggatcttttctttttatacaaggaaagcttcctaagaatgtctaggaagaagaggaagaatgaccctttgcatggcacagggttctgcccctattctgaatatgtcattccatcaaggagatcaaaagcctttttttctccccagtatttggaaattactttcttgatgatgctgccttttaaaagcttcacgtacattatagttttttaaaaaaatctttggactgsatcttactgaagtgcagttgctatattaaaattagggcatagagcacagaaaaatcaagaccatgagaagacattttaccatttagctactttttataactaaatactctttaaatatttttatttcaatactgtggatggaaatgagaagcattctaaatttgagttaatatatttttatgaagatatttgagaaaagaaaaaaatagcttgtattcaggttcattggcttttgctggatgatccacctaaagaarttacctaatttggccttttaaaaaaggtgttagtgtttattatagctactttcaaggaaagtttgaatatgattctagtctctaaagttcttcacgtwttctgacattccctggagggtgactggggaagaattgctccagggtagaagaaccaggcccaagactttaccattctgatctagagacaaaggatactcaatgaggagcttttttcccctcttggaacaggtaaaatgctttttcttattaatataattataaaacagtattttatgtaacagctattcccatattctaggagtggcctaagaaatgcgtgtttcagtgactagattataaatattctctattgtgaatagttgaataaaacagctgtttttttctgcttcctattcttgtgatatgataattttttgaaaaaagcacagcagtccaactaaagagatctcttactgtttgaaagtcatagcagccagttattttactctggagcttagagttcttttttcacatgaagtaaacgaaagtagaaaattcctttaccattccagcagagtgagaggatatgagcttaacagtgtatgtcagtcttttagcatattatatatgatttttaaaagtggttctgaggtcacattttttaaggcttgattatttaatgagaaaggtatgattcagcatatgaatatttgcttttagtccaccttttaggtataaaacaaagtccaggaawgtgataaatatttgtgtggataaccaaagggtctaatccccatcagagcacaagtgaccaatacatgtcacaaattatttattttccacacatatacaaatacatttatactttactttggcagcagaaactatacttctggtgaaaaatcagcttaaaatagaaactcatcagctatttcacagctgtattatgcctttaattttcttgttatacatatggagaatcacagtgggactacaaaattatacatctatatttgagtatcctatgtgaatttgaggaaatatatttgtgcattaacttacatacgcttatatgtaagcttatgtttaaacacacacacacacacacacacacacacacacacacacacaggcacacacatatcctgaggctatattaagctacagccttaatttgttttttaactagacaaataatgagcacctactgtgtgtttagcactatgctggcacttaagagtggggtgggaaataatgggtgtaagacaacctcagtcttccatgctgagtcaaatcatccacataacgcttttgaaaaatgcgacagtacccaattcagtgttagaattacttgtgtcaaaagtttagagacctatgtcatctgcaatagggaaggtttcagagatctgtttggtgacaggcttgtgcatagtatgttttgaatctaagagatgtataagagtaggtaggccaggtgtggtggctcacgcctgtaatcccagcactttgggaggctgaggcgggtggatcacgaggtcaggagttcgagaccagccttaccaacatagtgaaacccccgtctctactgaaaataaaaaaaattagacggacatggcgcacacctgtagtcccagctacttgggaggctgaggcaggagaatcacttgaacctgggaggtggaggttgtggtgagtcgagatcgtaccactgcactccaggctgggcaacagagtgagactttgcctcaaaaaaaaaaaaaaaaaaaagaataacttggtaatcatagagactcagtatgtgtttcaaagggactcatttcaggtattcctatgtcagaatccatagccatcagccaaggattgcttttaggaagctgctacataaggatggcagagaacacataaattattaacaatggatcatggggaatattgacccaagtctagactctgtataagagacaatctcccttttctctctaacttttttggggtcccaggtatatcttttctggcctcactgctgatatataagcaactgaaaaggggtcagagactttcaccatgagagcactttccctgcaggctgccaatgtaagatcaaagacaccagccaggaaaatcctactcttctttactagcatgggagcatagatgtggagttttgtgttttagagttaattcaattttattgggccagtaagcaagccctgataactttccagaattaagcaaggcctgtgggtctctgggcagaggacagaagtctatagagatattggaagaggagagaagaaaggaaggggacgatgtagttagcaaaaggtaaattgatacatatcatagagggcccactttcattaatgagcttccagtgtctccagaggtattgagatgggaggcataaaagcctcccataaaagaaagcaagtttgattaaaaacaagtcacttgtaactcaacttttgttgagtctagacttcatattgactcccaactggagaatttgtaaataacttttacttgctaatgatgacatgaaaagaagctttacccctcaaagggcactttctacccagataggatcattcctacagatttggcatcactgaatagagtgacagaattcatgctcctttctcttcactttcagtgatgcttcttaaaattttgtaatgaccccaacttgcatatttagattcttgtccacatcaactttaatgagaagagtttgctacccagatttctggtggcctaaaaagtgtgaaatggtaatgggtatagtcatagtggctatttaggataatttctttcacttggcataatatagctgtttaattcagaaagctttaaataaaacttaaatattttcagccaacatcagattgtgctggccatttgtgtataatagtagactagactctttactttttttttttttttttgagatggagtctcactcttgtacccaggctggagtgcagtggcacagtctccactcactgcaacctctgcgtcttgagttcaggcaattctctcctgcctcagcctccccaatagctgggatttacaggtgcccaccaccactaatttttgtatttttagtacccagctaatttttgtatttttagtagagacgggtttcaccatgttggcctcgaactccagacctcaggtgatccacccacctcagcctcccagagtgttgggattacaggcatgagccactgtgcccagccaactctttacattttgaaacaatgtgttctttctgtaatcccaaagactcaaatacaatgaagtatgtactttcacctcaaaatgtgataaacaactaaattgggatgcaacctaggcagtaggctggattctctcacttgctaaacaacctggtctcaacttcagtctcagatttatgttgtaaaacatacacctgtgttaaaggtcatggaggaggagtggggcagcgcttagcatcagaatcaaatgtgataaacctaaagagacgagtcttttcatcttgttactctgcacagttttcatttggcctctagccacttagaccagcaactcagttttcaacacgtggtagggcaaactgtttggcatgttcacttatagaggcttgataaagtgtttccggaatatttttaaaatggagcagcattgtgcatttgttagaatgaatatttgacttaaaactgtactactgtatagattacatcaaactggaatagcctgaattctgttgacaagaaaatggtagttctagccttaaggctttgacccagtaagaactttcaatgacatgaaagctgtatggtgtttttttttttttttttttttttttttttttttttgagacggagtctcgctctgtcaccaggctggagcgtggtggtgcgatcttggctcactgcagcctccacctcccaggttcaagtgattctcctgcctcagcctcccgagtagctgggattacaggcacgtgccaccacgcccagctaatttttgtacttttagtagagattgggtttcaccatgttggccaggatggcctcattctctgtcctgatccgcccatcttggcctcccaaagtgctggagttacaggcgtgagccactctgcccagcctgtgtggtgtatttttaacacttctgtttttagaatatgcaagaaacacatggggatggttttatttttataattggttaaaaaagtttctcaaagtgaagtttaggagtgagttttagtgttttgtaatttgaagaaaagtgtcttaaaattcaaagataccaatggaaagataaaagtttgggttttagaggaatacatatttcatttttaaaattcataatttgcttcatactaagaatatgaagaatcctttacacttaatggttttgtacagcaaagtttaaaaataatttacattaaatggcaagtatgacttggatcaatagctcttcagttaatgagaaatgaagcaattttacttgaaagtctagcccatttcagatgttcagagcatatattttctttttagaagtttgtcttcaagtactgagaactaatgcttctaatccatggcaatatcaagagagcgatgtataataaatatataagtatagtgtcagtacaaaccttgcaaaataaatttaaacgccaactcaatctacttttgctttaaaaaattgttaggtttcttgttaagacattgcaattcagtagatattaaattatacgtcattctaaattcattttgaaaaccaaaaatgagtaatctaatctatgattaagcaataaccttttttaaagcaaccctattaactgaataggcaataaccttaaaaaaaacccaatattatttctatatgtaaaaaaatcctaaagaggagtgcactgtggtacacaatacaggaactaaattgaattttaatgactcttatgttataggacatatttacacttgaaatgccccaaagcttctaattctaagcttctaattctcggccataaaatgtatggctaaacttcctttcctgttttcagatctttgtgctccttgttcccagttctcttctcttagttgtgttggcaaattaaggtccttgggccaaatctagcctgccacctgtttttgtatggcccctgaattaagaatagtttttaagtttttaaatggttgaaaaaaagtcaaaacaagagtatttgtgacatgtgaaaaatatatgaaattccaatttcagtgtccataaataaagttttattggaatacagccacgttcgttcatgtatgtgttgtctatggctgcttttgcactacaatggcagaattgggtggttgcaacatattttatggcccccagccctaaaatatttactgtttggccctttacagacaagcttgctgacccttgctctaagtcaattcgtgacgatttttccaactgctgacatttataaaatggcagtcccctgggcttcattcatcagtaaattggttggtggcaactagccctgtgccattttgcttctcctcagcatggatctcacatgtgtgaaggcttcagttcagaaatcatcaatttccagtttaagtctgatgaaaataattatattttttccaccatgttcactctttaacttcttgcttaaagatcttcacctgtaatgttgtatacagaggcttattagtatactgaaaatgaagaaacagaaacacttgcggtataccaagggttcagagttttccagccacagctctagtggctaggtttggggaagagactgtttcctctgtactcacaatgttagaacatgatgtttctaggaagtagaacattaggttatttctgccttggaaataaatatttcacattctttagaaagtttgtttttttaaaaaagatcacatcaaataaactgttcaactttaagaaaaggtggaattccttcagctaactactacttcagatagatgaatatgttctttaaaaatctgtagattattgaaactttaaaagggatcattttagaacaaatatgaaatatgttacctaaaaagtggaaacaatactaaactaactttctttttgctctctctccctcttgtctggctggactgctgcctccaaagttcaagcaattctcctgcctcagcctcctgagtagctgggactacaggaatttttatattttttggtagagatggggtttcaccatgttggccaggctggtctcgaactcctgacctcaagtgatccacacacctcggcctcccacagtgctgggattacaggcatgagccactgtgcctggtcctaaactctaaacttcttttcttatgagctcttcttttcttttacaagtgctctttcttgaaaagaccattgtaaaggaggtcataacatgggatgtcaattcacatagatgcaccaatgactataagagaagcctccctagcttttgttttgagacggagtctcgctctgtcgctaggctggagtgcagtggcgcaatctcggctcactgcaacctccgtctcccgggttcaagcgattctcctgcctcagcctcccgagtagctgggactacctgcgcacaccaccacgcccagctaactgttgttgtatttttagtagagacggggtttcaccatgttggccaggatggtctcaatctcttgacctcgtgatctgcccgccttggcctcccaaagtgctgggattacaggcgtgagccactgtgcctggccaggcctccccagctttaag

SEQ ID NO: 7062 - DNA, 21498 bp, Homo sapiens
ctgggctatgcagcgagactccgtctcaaaaaaaaaaaaaaaaaaaggtaccagtgtgtagtaacattgtgggtgagaatctttgctctttatacataactgtttaagtttcagttttgtttttgcttttactgttttagctgaagcacacttggccgatgttaagctaaattatcagtagatggcaccacagtcttagttagctgaagatttctgggttttgcagggagtgaggattctagtgtcagttgtcggatgtttaggtgtgactcagtgacctatgcttaaaagtttgcccggttactaactgagggagcaacaagtacaaactgcagatagggaattgaaaaaaggaaacacacaaatttacacagacacggtgcccatagatttgttgcaagggcagtttggtagagagaagctagaaggaagctgaagctccagaaaacccaaaactacaaacttccttcaaaagtctagggagaggccgggtgcggtggctcaggcctgtaatcccagcactttgggaggccgaagtgggtggatcacttgaggccagaagtttgagaccagcctggccaacatggcgaaacctgtctctactgaaaatacaaaaaattagctgggtgtggtggcgggtgcctgtaatcccagctattggggaggctgaggtgggagaatcacttgaacctgggaggcagaggttgcagtgagctgagatagcgctactgcactccatcctgggtgacagagtgaaactctgtctcaaaaaaaataaagaagacaaataatagcaagtgttggctaggatgtggagcaattggagatctcatacaatgatggtggaaatgtaaaatgacacaactattttgttttattttatttctgagacagagcctcaccctgtcgtccaggctggagtgtggttgcacgatctcagctcactgcaacctccacctcccgggttcaagtgattcttctgtctcagcctcctgagtaactgggattacaggcacacgccaccatgtccgactaatttttgtatttttagtagagacacggtttcaccatgttggccaggctgttcttgaactcctgacctcaggtgatcctcccaccttggcctcccaaagtgctgggattacaggcatgagccatggtgcccagcaggcacaaccattttagaaaaagtttgcagttaatcatacacctactatatgatctagccactgcactcctaggtatttatgcaaaggaaagaaagcctaagtctgtacaaagacttgtacacaaatgttcaaaacagctttatttgtaatagtaaaagaaagaaagaactcaaatgttcatcaacatgtaaatggataaacatgggagcttatctatatgtacaatgaaacactacttagcaatataaaggaatgaattattgatgcaggaaacatggatgaataaaaataattactaatgaaagaaataagacaaaaaccgtataaactctatacaattgcatgcatatgaaaatctagaaaaagcaaagtaatctgtagcgacagaaagccaagaatggttgtggtagaagggagaaggactggacgggtgccgtggctcatgcctgtaaacccagcacttcgggaggctgaggtgggcagatcacttgaggtcaggaattagagaccagcctggctaacatggtgaaacgctgtctctactaaaaatataaaaattagccaggtgtggtggttcacgcctgtaatcccaggtactcgggaggctgaggcatgagaattgcttgaacccgggaggagaaggttgcagtgagccaagatcgcgccactgcactccagcctgggcgacagagtgagactctgtctcatgaaacaaacaaacaaacaaaaaaacagaacaaaaagataaaaaaaaaaaagtaggggaagaactggagggaggaattacacaggagcactgaatatattcactatcttgattttggtgatggtttcatgagtatatactgtaaaggaacataaaaactctcaaaacccccaaactcattatgccaaagggaaaattaagcctgcttacttcacaaccttgtgtcaaagcgctatacattagccagatccctacaaaaggaaaaggtctcaggcatttccagataactgccctcacaaatcgcgcctaagaaaattctttcctggctcctaaacctttcaaggtgtataataaatcttcccataaacaaggacatgtcaactgtcactttaagtctgtgacttaagtctaactccttgtccaggaacctaaagtctggtaaatttcacaccgactgtgtcaattataagccttatcttcccaagtgcaaaaacaaagatgacatccattattcttctacctatcctgagaagtctgaataatgaattcttcctttactccctattttcgaatgtttgccttatctcatgtatagcatagatgtactgggcactaattaaaatctcacaagaatgtcatcatttgcttcacgcctatctcccttttcctgcatgtcttttctcttaaagaaatgtgtaaataccgagtctcctgaagcctttcccaaggagcacgggccacagactcatgtttctgtgactcagggttttcctgggcacacctttaagctctggctcaataaacctggattgattgagattcttgcctcagtctctcatttgggttgacaatacatatgtcaggacattagactgtactctgtaaacatgcaaagttgccaatgtgaagtcaaatatacctcaataaagctgttaaaagtaaattttttaaatgagatactgatatgtaatgtttgttattttactcatgtatttatttgccttttctttcatttaacagagtttattgagtgtctgtgccagaggctaaaagaggtatgacatggtctgctttcaagtctaggcagtgacggttctgcttgatatgcttgttgtacatgcccataggaagctaagaaaataggaagattagcgtgtaggctggcatgttggggaaggcttttcagaggaccttaacgttgaactgagttctgaaggacgagtaggtggtttggacagtgaggagcggttagcagtggcagctttctgtcttcaacaaggcctagggatgagagaacaaggcgctgtgggaggaaaacaaattgcagcagagaggggagaagaggagtgttttgaaaagaggcaggataggttaagtcgggactgatcagcatgggccaggaaagctgtggtcaggaatccggctgtaccattgaaggtctggggagctagagcaggttttaagcaagggagaacacagatagcctgctgatgaacagcacaggccaatcgagtggagcaagagaaaccatcttgcccttagattggctagcattacggttaaacgagtgtatttaattagtctccaagtcctgctaatagctcatccttaatcattttcaaatgttccaattctttccatccctatcgcagttaccttagttctgtctccattattgtttgcttggattaccataatatcctccaatggcggtttccttgtcttcagtcttgccccgcctttaactctttgctacctgcagcataaaacatttttctaaaattcaagtttgatcctctcacctttaactgaaaacctgatctgctgctcatcaacactatctctgtgtttctaataatgatcatcactgtaatagcatacttagcaagcatttactacatgccaggaactgggctaaacaagatgtgcttttatcttattaaatcttcctaaaacattattactatcatcactattttacagatgaagaaactgattattaagaaggtttagcaatgtgtccaagatcatacagttaataagtgtaattgaataacttgttgaaaaaccaaaaaacccttaaagacaaagttgtgtagggaatagaattttttacttgcacctgcaagagggaccgattattagagaactggctttgtaaacaaaaatgtagggcaggtatttaaagtaaaaaaatcacaaggatagacaacagctcaaattgttatcagttcacaagtctgcttggatgtatgtgggtcaattttgttaaaatctagacggtcctttctattaagacattacaatgcatcaacaccaaacaacagaaaagaaaatccatatatccctgtttttcatgctttgtctgggactaaaggaagggcaggccttttctagactatggaatctaagtttcagaaaaaaatcatttaagctgcaatataaagaataatcttggccggtcgcagtggctcacacctgtaatcccaacactttgggaggccgaggtgggcggatcacgaggtcaaaagttgggcaccagcctgaccaacatggtgaaaccccgtctctactaaaaacacaaaaattagctgggtgtggtggtgtgcgcctataatcccagctactggggaagctgaggcaggagaatggcttgaacccaggaggcagaggttacaatgagccgagatcatgccactgcactccagcctgggcgacagagcaagacttcatctcaaaaaaaaaaaaaaaaaaaaaagaatagttttaaggaaggcagaattagagatagacaagttataggaacccaggcaagccattataatgccaaactaaggcaatggcaggagggatagaaagaactggaccagttttaaatccattatgggacaggaaaggcatgttgcagtcccttcagccaagttgcaagttttgaatgagttatccaaacattattaaatgcatcttcagtgatgactaccaagcttttttccaggaaccaaccctcttttgtaaaaatgttaggttagcctgttcgttctggtttcttgggcagtgactgggatgttcaaactattaattgggatagaacaccgaagctggttaaaaacaatatttcttatagaaattgatcttgaacatggatcaaggttcactgctagcaggagaatcggagagtgtgtggtaatgaaaagttatagttgagaaaacaagcgtttacatcagcaactaattaagaaaaaagcagctcataagtggatgaatgcagttcataaacacattatatcagttattacacaggaaatctaaggcagaatactgtgaaatgcaaggtgtatagcttatcaacaagaatgtagcaaatacaccattcaactaagaaagaaatgataaggctgcatctggggctgttgactggaagcacaaagtttcctttccttgtagtagttcctaaagattccagtttacatggaaagacagaaagctgtcacacccatggcaggagcgcagaacccaagcgacaaattctaattttgaacaggcaggtgccagtgcatttctcaaactgcaaactaaaatgcagaaacacgattttcctgtttcttagttttggaccgttttcccccctctagcacgccagagcaggttttaattgttgtcaggtcagatggtgagttaactttgagtgttgagttgaggggccagtgggatgtgggtccagttgaaaggtggatatatgtagatccagactcgagtgatataggctgcaaataaattgctagtgaatttatgaattattagaaaagaaaggacattcattatgatttaatcgcagttgaatgtaggcagcacagagggcttatactgtgtcttttttttttttttttttaaatatacggtgtctattttgctcaccactctatgcccggtgcctggaagtgcgactggcacatagtaggtgttgcatagtttcagaatgaactttttaggaatcaaaattctacaaacattgcacacagatttaacgttcccttattttccaggtgaggtcagggcgccctttggtttcgcgcttctgtccctttaagaaagtggaggagaaagaaagcgctgctgggaaaaagggcggggccgcgaggggccgccgtccgtcccgccccctgccgggccgcggcgctctgctagagcgtggctcagttttggtagcgggaccccggaaatgtaaagcatgagcgggaacagtcgccagggcgagtgacaggcgagccctatgctttacttccgagggcggtgtcagcaaagctaggtaaggagacagggaggacggtgcctgcccctttaagatcgactccaccccgcctctggaggaaaatgacgccgccgtctacccgttgtggaacgtaactcttttcatcccatcagctctccttctcattaagagaaataccaagtggtcaccacagtcacatacttcataacccatgcctcatcggtgctgggacgggagagggaagcgccgatctaaatgacatggggtccaaatcccaaataatctctatttgctctgcgttacctttaaacttaggctgcgttgtgtgattcaagtgacagcctagtactgcttaacaattagtctagtgggataccaggccctgagagacccctacgatcccaggacactgatgtggggtaactaacacccactggaagtctacgctgagttcacaggctatgtatgacctgacatgcattttgacctgccctgtgttttgatatttgaatgagttgctgatgtttacaagccgaagctggccgggcgtggtggctcgcgcctgtaatcccagcactttgggaggtcgaggcaggaggatcgcttcaggtcaggagttccagaccagtctggccaacatggcgaaacctcgtctctactaaaaaaaaaaaaaaaaaaaatacaaaaattagccgggcgtggtggcacgcccctgtaatcccaggactcgggaggctgaggtaggagaatcgcttgaacctgggagtcggaggttgcagtgagccgagatcacgccactgcactccagcctgggcaacagagactctgtctcaaaaaaaaaaaaaaaaaaaaaaaaaaaggtggaagctaatgtgtcaatatctagatttttttgatgattttgagaaatcggaggatctggcagcatgtcctgcctagcctttttgaactgtttgaaaacagtctccagcttgccacagcccctctgttattttacagccagcctgcatcactcatttatgatgtccagccccttgtggggatttggatttttgacccctaaatactttagtggatttaagaccatttaaaacatttatgcagaagagatccgaggtccccaaacaactgggtgtataagttgtgtttaagttgttcctcattctcatttattctaatccgggtgtttttctatatatatatatttttaaacaaatcttagtgatcaattgcacaggtgtttttctgttggagcaaatcttttcagtttaggcttggtaaaatcgaaccatcagatacttttacagaaagagatttaggagttgatgttcttttattacaattaaatgcatacagtatttttaaaggaaaaaacctgaatcttgattgcattgttttatgatacaacaatctttaatgaaatagagtagtcaatataatttgtattaatatatctctgcccacagacaattataaattcattaacccccagaactcttggctagacttcataaaggcaaaaactgtgtttgccctgttaactgctttatcccaccactagaatataagcttcctgaagacagaagacttctgttattttgttcacagttaccaagcatgcctactttgttaaatttatgaaagaactttaaaggtacagttggcccacaatataacaatatagcaatataaaattacaacaataaaaataacacaaaaatagtgtaacaactacttatatagcatttacgttgtattaagtattatgagtcatccagagatgatttaaagtaaagtataccacagcatatgcctagtttatatacaaatatgatgccattttatataagggacttgagtatcctctgattgtggtatcctggaagcaggggataccggaaccaatcacttgaggatactgaaggatgactgtatggctgatttcctgtaagaggcattttcttgaggattctttcaaaatcaaatgcttgtatatttgttgtgttaaattactaaaaggattctcttgtgaaaagtatcatttaaaaagattggattttcccaattgatgcaccaaagctttcatctgaaatgaacttgcacatgtgaatcatcagatacagtaatatacactgtaatattttatttcttttttttttttatgagacggagttttgctcttgttgcccaggctggaatgcaatggtgcgatctcggcacactgcaacctccgcctcccgggttcaagcaattctcaagtagtgagattacaggtacccgccaccacgcctggctaattttttgtatttttagtagagacagggtttcaccatgatggccacactggtcttgaacacctgacctcgtgatccacccgccttggcctcccaaagtgcagggattacaggcgtgagccaccgcgcccggccaatattttcttattatgtaataggatctagaaatgttgctcttcctcacaattctcagtattacttttcttttttttttcagagtcagaggttccggttgagatcaagttgggagacacacccttgttcattctccttgagaagcagctatwatcaacagaacattgacagaacctgtgtttggggaaaggactgatggctttgagtctaggttggaaagcacacaggaaccactgtggtctcctcttgcaggctctgcgaagcagtggtcttctcttgtttccctgtggccagtgtccctggagaggagctggaagctttttggaccctgagataaaggctttcctggaggagaacactgaagtcaccagcagtggtagcctcacccctgaaatccagttgmggcttttgacccccagatgcaaattctggtgggagagagctgacctgtggccccacagtgatccttactggkcaatctactggccaggaggccaagccctgtctaggtactaccctaatgaaacctttaaggcgctayagatctttgctgttttcagttccctccaacctctacaaaaaaccagagcaatgctaggcgtggtggctcatgcctgtagtctcagtactttgggaggctgaggctgtaagctgtgatcctgccactgcactctcgcctggcctgtctcaaaaacaaaacagaaacyggcaaaactcagtcttgttgttttcttttttctttctttctttyttttttttttttttggtagagacaggatcttgctatgttgtccaggctggtcttaaacatctggcctcctcaacctccccaagtgctggtattacagacatgagcctctgagcctagcctcaggttagccatattttttgttgccttgttgcgtaatttcccattctaacccaagcttatcaagctattttcccaagtaactgtctccccaagagaaatcctagagtcagctgtcaagaccctggatagctataagtgatccagaaatctcacctgttaggaggttcatagttcatagcgcatgaccattgcagagttcctagatggaagctaaacacccagtcctttcgctctcctttaattcagtgaatgtcgctccataaacctcacattccttccagagttgcttattttcccataaaacaggagctgtgagtgagtgggctgttcaaagtttccctcttctgttgggtgcagtgcctgtaatcccagtgctttaggaagccagtgcaggaggacagcttgaagtcaagagtttgagaccagcgtaggcaacatagtgatacccctatctctacaaaaaaaaaatttttttttttttgagacagagtctcactctgtcacccaggctggagtgcagtggtgtgatctcggctcactgcaagccccgcctcccgggttcacgccattctcctgcctcaccctcctgagtagctgggactacaggctcatgccaccatgcccggctaatttttgtatttttagtagagatggggtttcaccatgttgatcaggctggtctcgaacttctgacctcgtgatccgccctcctcggcctcccaaagtgctgggattacaggcgtgagccaccgcgcctggcttaattttgtatttttagtagagacagggtttcaccatgttgaccaggctggtctcgaacccctgacctcaagtgatccgccagcctcggcctcccaaagtgctgggattacaggcatgagccatcgtgcctggcagtagcagctatttagacagggcatgtatgcctctactttgccatagtgttaactggttgatgtcaagtcccaggttcttagtgccatcaacaaagaattggacatgacacatacaagtagcaaggcagcaaacagtttgttaagcagaatgcaatcagcaacgratcaggctgacctgcgagtggtatcagccccagtttgttatagttcatggccttttatatgttttttcctcacttgcttaaccttactttgtttttcgtaagtgaattgctcatcctggcctttccctcattgtgcctaaaccrcactttatttctcataagctaattgtgcatccttgcttaaccttattttatcttttctgacaaaattgctcatctttacttttagttcttgtaaccaaattgctactgcaacccctttccacttattttccttatcttgcatgttctaactcattgcttactcccgtatctcttactgcttactgtcttatttcatatgtcctgtttctgctatcttgtatgctttgcttttggtattgcttcagctagcctatgtccaacgggtccccttcacccctgacttcctctgccattctcctgcctcagtagtacccactgttccttattactccaatccgaagatcaagagtcagctgaaatttgttatttcagcgtttctccatccctcttcgcttktttggtaactatttagctccagtccaaattccttggttgaattggactttgagttttaccagagaggtcattatactacatttcaagcagcaggaaaatcactctatgatggagtcaagaggagacagtgactcttggattgagtttactaattttagtctttgttttagcagtattttgtcagtcttaattcgtggtgctcggtagtttctggaacatactaagtattcaatactttgtcagccgaaatgagagactgaggcatgagtctcaaccagtcaaggtttgttaagcccaagaaaaatgcaagtcacagaaaagtttgtggcctgtgctcttctaagaggtttttaggaggcacagtatttatacatttctttttctttctttttttttttttttttgagatggagttttgctcttgttgcccaggctggagtgcaatggcacaatcttggcagactgcagccttcccctcccgggttcaaacaattctctgcctcagcctcccgagtagctgggattacaggcatgtaccaccacgcctggctaattttgtatttttagtagagacggggtttcaccctgttggccaggctggtctcgaactcctgacctcaggtgatccacccaccttgcctcctaaagtgctgggattacaggcgtgagccaccacacctggccatttatacatttcttttctttctttctttttttttttttttgagacagagtcttactctgtcacccaggctggagtgcaatggcttgatctctactcactgcagcctctgcctcctgggttcaagcaattctcctgcctcagcctcccgagtagctgggattgcaggtgcccgccaccacacctggctaatttttgtatttttagtagagatgggatttcaccatgttggccagactggtctcgaactcctgacctcaggtgatccacctgctcagcctcccaaagtgctgggattacaggcaggagccactgtgcccagcctacaacttttttttgaaaaaaattgacttgaatagcataatcagtcagttgtgtggtactgtgcttcacacctgctgaagagaaagaccaaatgactaggtcctttcttctgccacctctgcccagctctggagatggactttttgtgtcactctagtcagaccaaacttgccaaggttggaccaagttctgctacttttcactatttcttttgtccagtcaacctaaagacatctcttttctttcttttccttttcttttcttttttctttttttgcatacctcttatttgctgagaccagctcggctggggagaccctaacccagtgacactagaggaattaaagatacacacacagaaatgtagaggtgtgaagtgggaaatcaggcgtctcacagccttcagacctgagagccccgaacagagatttacccacatgtttattaacagcaagccagtcattagcattgtttctatagatattagattaactaaaagtatcccttatgggaaatgaagggatgggctgaaataaagggatgggttgggttagttatctgcagcaggagcatgtccttaaggcacagatcgcccatgctattgtttgtggtttaagaacgcctttaagcagttctctgccctgggcaggccaggtgttccttgccctcattccggtaaacccacagccttccagcgtgggtgttatggccatcatgaacatgtcacagtgctgcagagattttgtttatagccagttttggggccagtttatggccagattttggggggcctgttcccaacatttatttttcctcatctctctgagacatgtttctcctttttaatttaggtatcttttggataatcctgatgttgtcagaggaaaatctgtattagatcttgggagtggatgtggagctacagctattgctgctaagatgagtggggcatcaaggatcttggccaatgacatagaccctagtaaggattcatattttaaaatatttaaggctcatcttttttttttctctgggataaatatgtacacatgctcagtgtggtagcttatcgttatatgtattttgtgattggacattgtgaatctctgtgcactgggacattatctgtaggaatcccctgaggtctgagtagatggtgcatttttcccaagaggatttgtgtctgccagacatccagagtaagcacttatgttaatttatgggctaggaatttcctgaaatatgtaaatagtgtttatttgaccccaaacccaagtgagtattgacctgtctttgagggttatttttattccattagaacccaggctgagacaggtaagtttttatttgatctgattttcttctggtctaccctttcactgagaatatagtccttgaaaacctttattttattttatttatttatttattttgagacagagtctccctctgtcacccaggctggagtgcagtagcacaatctcagctcactgcaagctccgcctcccgggttcacaccattctcctgcctcagcctcctgagtagctgggactataggtgcctgccaccatgcctggctaatttttttttttttgcatttttagtagagatggggtttcaccgtgttaktcaggatggtctcaatctcctgacctcgtgatctgcccgtcttggcctcccaaagtgctaggattacaggcatgagccaccgcgcctggctgaaaacctttattttataaaggagtctcagttctttttttttctttttttttttttgatacagagtctcactctattgcccaggctggagtgcagtggcacggtcttggctcactgcaacctccacctcgtgggttcaagtgattctcctgcctcagcctcccgagtagctgggattacaggcatgcaccaccatgcccagctaatttttgtatttttattagagacagggtttgaccatgttggccaggctggtcttgaactcctgacctcaggtgatccacccgcctcggcctcccaaagtactgggattataggcgtgagccactgcgcccagccaaggggtctcagttctaatttattgccatgctcaatcaagcccaagtctcgtttccctgtccacagtaaaaaaacaaaatcttttggttaatgaaatcagcaaatattcctaaaagtcccagcatttctaggtgttttgaattgtttgttttcaggatatccagtcatgtatttggaaattgtggtatagcttatattgggataacctttatacttctctactttaaaaaacaactttcatcaaaaaggaagaaaaatatattgttagcagatcttctaaattatttaatcaacatggaattataacagcctagcatataccaattcattttgtgctttttttttttttaagttgcaggaatggctattacactaaattgtgaattgaacagactgaatccttttcctattttaatccaaaacattttgaatttggaacaagataagtgggaccttgttgttcttggcgatatgttttatgatgaagaccttgcagatagtcttcatcagtggctgaagaagtgcttctggacctatagaactcgagtactgattggtgaccctgggcggccccagttcagtggacacagcattcagcatcacctgcacaaagtggtagaatattcacttttggagtctactaggcaggaaaacagtggactgacaacaagcacagtgtggggttttcagccttgagttgtcaaagtgcttccaagtatgaatatagtaatgtttggatctgactctaaaagttttctctataggagatactctccagtttaatgaaygtaattcttgttaaatggaaaatcttgtttttaaaatatgaaggtttagagttttgtttacttttgtcatgtaactggttctgtatttctatgcrtgccaattatacacatctctatctgcatttttttttctattttaaccgctgaaggaatatgattatacaatgccatactcaatggtggcagcatttaatttaagtaatggagaagaattaaacattgtagctggatctgtttctgtagtygaggacaactgtgatgtaactttgaattaaacaaacaaaacaaaacagaagaagactatatatatattttttctttttttagagacagtctcactttgctcccaggmtggaatgcagtggctattcagaggcttaatcattgggcactgcagccttgaactctgggcttttttttttttttgagatggagtctcagctctgtcgtccaggctggagtgcagtgactcatgtctcggctcactgtagcctccacctcccccaatcaagcgattgtcctgtctcagcctccagagtagctgggattttaggtgtgcaccaccatgcctggctaatttttgtatttttagtagagacggggttttgccatgttggccaggccggtctcaaactcctgacctcaggtgatccacccgccttggcctcccaaagtgctaggattacaggtgtgagccaccacgccagcctgacgatgttttttacttctatcacttccttttgattttttcttatagcttctatctctgcttacgtcacccatcattcttgcgtgttgtatgcttttcgcattagagccctttgcatgttaatcagttattttaaatttatgatctggtaattctaaaatgtctgccataactgagtctggttctgatgcttgttttcttttcagactgtttttttgtcttttagcatgccttgtaattttttgttgatagctagacatgatgtattgcataaataaacaagtaaactaaggtagcatgaggttttaaaatctgggtagggctactgtttgctgtagagtagatattacaggctaaattttcctctagtgtcctggctattgtctcctctgttatctttgagtttccctagagattccttcttatatagagtctgaagcttgcagtttttttcacctgtaattccctgttattatacagtagcctaactgatgtgataaggtatgggagaaggtatgttctatagtcctgtgattaagtctcagtcagttaagtcagcctgtgcccctgctgtgaccttcacaagtgctttcagcttttcttttgtcactttggtgagacaggaaggctagaggcagctggagttgggtgcttcctttcccccaggtcaacgaggctctggtaaaatagtttcccttgagaactggcttttgttaaggagaactgaacacttgggcatatttcaaaatggttactttccctatcctcataccagaagaggggatttttctctgatcctcaccctgagaacctggtaggtatcctggaggtaaaactatgaaagtgtggtgtctcccctaggagtgggccccctggagtttgtttgttttaatttaacaaagtttaattgagcaaagaacaatctgtgaattgggcagctcccaaaagcagaataggttcagagtgactgcagggttgccacacctggttagataacgtttatggacagattcctagagcttttgattcttttttttttttttttgaggcagagtttcactcttattgcccaggctggagtgcaatggcgtgatcttggctcactgcaacctccacctcctgggttaaagtgattctcctgcctcagcctcctgagtagctgggattacaggtatacaccaccaaacccagctgggattacaggcatgcaccaccatgcccagctaatttttgtatttttagtaaagacagggcttcgccatgttggccaggctggtctcgaactcctgacctcaggtgatccacctgcctcagcctccccaagtgctgggattacacgtgtgagccactgtgccaggctggagcttttgattcttaagtccatccacatggagcctccagcaactcaggaattacagcataaatgttcctattggtactggctccagcaacaggcttctgctccctgtaagctatggttctttgtatttgcgtttctaatttgtgaggcattctctctttaaccttaattctctaatggatctaagtgttgttgacttttcagtttattgagcttttttcttattgtgaggatgggaatgatgacttccaatctctttatattagaaaatataaatcagactagagactggaaatttttgttgttgttgttgggtgttttgttttgtttgtttttagacaggtcttgctctctcatccaggctggagttcagcaatgcgaccgtgctcactgcagcctcgactttctaggctcaggtaatcctcccacttcagcctccttagtagctaggactgtaggcatgcaccaccatgatgcctggctagtttttttattttgtattttttgtagacatggagtcttgctacattggccaggctgggtattactgggtatttctttctttcctcctttatttctttccatatttacttattcaatgaatatttgagtgcttattatataccaggcactgttctaggcactggggatatggggatacagcaatgaaaaaaaaagataaatactttgtccttatgaaatttgtattctagagtagggagacataatgaacaaatgaaaacaggcatcagatggtgataggtagtaaggagaaaaagaagtaagggtaatagggaatactgggtactggatggggtacagatattttaaacagagtggtgagaaatagttaatacagctagcaacataaaaaaggagaaatatcaaactgcaaactgttttaggaagataaatccttcatagacccaaagaagctcacaatttagatgtcgaaactagtttctgcaaaaaggggaaaatgtgattgacttggttaaatattcagtattaaattttattgaatttgtctttagaaaaatttcatagttagaacaggccttacccattttgcacatatatacatatgcaccacctttgcagtggcaacatatatatccacactataaacataccacatttataaatcttgtaaggacaagaaatggagttgaataagtaccccccaacatatacaagaaagttagcatacttaccccgtttttcactacatcagaggcaaaataagaaatcttttaagaaaatctcaagactggctcatggcaaaatgaatatgctaaatttgggggttggtttaagcgtggtatgtgtcaggtaattttgtgattaccaaaaagttttcacttgaaaactaagacctttgctgtttatttcacaatgtgaaatcaataaacctgaggatacaagtctctgtagtgatattctgtatttactcatttttacacatttttgaatgcaattttgctaaggaaggaaagcttacagatgcataaaatgtaactgggaagagtagccataaaaatcaatgaatggatgtggctgggcaagagcctctgtaatactaatacgctgaatggctaataagtcacttcatttcggtgaaacaaatacctaaattctttgaagaattaacaggcttgatgttcaggtctgcttttggcaaatgggcatttaaatactccaagaaggtaagagccagaaaataggaaggtaactatgcttttagaaatatgtttacttagattctcccaaggtttatacttacaggtaaacttagaacaatagctcaaatacctacataggagaaggaaatctcaagggaaaacagttaattttaaagttatttaagaaacagaatccaacaccatagatcagagttcatgctaggattatcatttcaaaaataatgactcatccaacagatatagaataatagcactttaaagatgtttaagagtaaagcacaaaccatgtatataccaagacttagctaattctctgagagttataacttaagacaataaaataattaaaaatagtgttaacattaagtagaatgcaaatctctatagatggtttcctgggaaagtagttttgataagctttcctagcattgatcatcttcaaaaaagcatcaataaacagtccatgtcacttgctttagtttgtttgggcctactaattgctccaacacttctcgggaatgatctataaaagaaaacaatgacaatatattaattgacaataaaaaatgtttaatgtttcctcatgtctaactggaggtgatgttaattattatacagttatttaaaggattaaaggaggtgatctataaagcacaatatacaactaactcactaataattaattaatggtagccctcactattattaggtgtagtgcacctatcatggtattacttgtttaaaaaaaaaaaacaggcatttgttgttttctctgtaatttcatcataattccaccaaccagagtaatggtctaatttcaccattaacctgtgttaatggttaataacttttttcaggatcttagccggaaatagatgattcactaaagtggggtgactgaacagcatttaatgaagggaatatttaccaaaaaagtaggattaaagaaagccaataggtacggtaaaccaccttgggaagctgcaacacacccaaagggttagaggaggtagtagtcaccgaacgtgacaagttgacctgtagctgaacatttttccatgtctgtataatactactataaagcatgattttaaatagataaccattatataaatacactgtaatttaaccaatctatattattggacatttagatgttttcagtttttcacaatgtacagtcgtgattttgatatggtttccatcctagttttaggatgtcttttaaaaatctgaattaaagcaaaaatactgataaaattttgttagtttaaatattactcataagtttaataaacttgtttccatagatacaacctatgttttatgtacaacatatctctaacctagtcttggaaatcctgtaatttggtggttcctagacagatttcacagaccagtagaaaaaaaaaaaaagatgggcccaacatatacagtgacaaaattttattttaagtttaacaaaattaagcaaaaataccaaggtttattgccagcaagagaaccagagagtgtatagaaatgaaaagttattatcattgggaaaacaaaggtttacaattttttaaaaaagcagctagtaagataaatgcagttttattcatggtcataaaaatattattggttattgtagaggaaatctcaatcaaagatgggttcaaattatgttgaaagtaaaagaatggacaaagacataccatttaaatggcaaccatgacaaagctgggtggctatagaagaagggggaaacactttccaactctttctgtgaggccagtgttaccctgataccaaagccagacaaagacatcacatgaaaaagaaaactgcagacaaggatcttttattaatgtagactaaaaaatgctcaacaaaacaccagcacaccaaatccagccactagaagaaaggattacataccatgaccaactgagatttatcataggaatgcaaggttactttaacatctgaaaatcaattagtataatatactgtgttaatgtcctattgctgctgtaacaaattaccacaaatttagtggcttaaagcaacaaatttgttattgtacagttttgaaggtcagaattccaaaatgggtctcactgggctaaaatcaggtgtgggcaggtctgcgttactttttagaggaaagtcttatctttttttttttttggaggctctacaggggaatctacttcctttacttttctagcttctagaaactaccacattccttgcattccttcctgcttatttaaagtgaacaacattgggctgggtgcggtggctcacgcctgcaatcccagcactttgggaggctgaggcgggcagatcatgaggtcaggagtttgagaccagcctggccaacatagtgaaacccccatctctactaaaaatacaaaaattagccgagcactgtggcatgcacctgtagtcccagctacctgggaggctgaggtgggagaattgcttgaaccagggaggcggagattgcagtaagccaagaccatgccatcgtactcttgcctgggtgacagagtgagactccatctcaaaaaaaaaaaaaagtgggcatcattgagcacagtccttctcaagctgccatctctatggtcctctctccttctacttttaaggacccttatgattattttgggcctacatagataatacagaatgatctccctacttaaaaatcaactgattagcaactttaattccattggcaaccttatgtaacataacatactcacattttgggcattagaacgtggatatcattgggtgggtgagagcattattcagcttaccacctacaccattctaat

SEQ ID NO: 7063 - DNA, 70210 bp, Homo sapiens
  misc_feature (1)...(70210): n = A,T,C or G, or insertion/deletion polymorphism (see Tables 1-2)
cagaaataccaggcatttgattccattgcaataaccagtaattgtgagttaggaattacataactttctaaaaataaaaataacaagtgaagctaatcaaaaaaagatggtggtttaagctgtcattgcgctggctcccagcatcttagtgaaagaccacaattgtcatccctctcactgttatgaaactataataggctgggcacagtggctcgcgcctgtaatcccagcactttgggaggctgaggcgggaggatcacctgaggtcaggagttgaagaccagcctggccaacatggtgaaaccccatctctaccaaaaatacaaaaaaaattagctgggcttggtggtgggctcctataatcccagctacttgggaggctgaggcaggagaatcacatgaacccaggaggcggagattgcagtgagccaagatcacaccactgcactctagcctgggcgagagtgtgagactgtctcaaaaaaaaaagaaaaaaaggaaactataataattattattttggctcagatgaagctattcttattaattttcaaaatgtttttgatatttaatccctttaccaaaaaaatcagtaatctgttgatgagttacttattttctaatttctctccttctctactctaggctctgagaagctgacttttattgatcgcataaacggggatgctttgagctctaacttctggttggctgaagcaatgacagccgacagcaggacatcaaaaaggggatgaagaatggagcttgaagggtattcctgtagccccttcctggctggatcacaacaggctggctaggttgccttatcaaactgaaaccgcctttgcaaaattatcactgagacggtgaaagagttttaacttaaccgactccatcttgcttctaacctccttgttcgttcagcataggctgaactaactttgagagaaacttatagtttaaaacaaagatgataacagccctttcccaaagcacacctccttcttgcctggggactagattccctttgtaggactaacattagctacaagattagaaattatggtttaagagtcatgcaactggaggcttcaagattttcttcaaatatctcagtgcttgagatattttccagaccctgcaattgccggatcagctggcaccacccagatggataaactggctaatctgatcttgtggctcccacccaggaagtgactcagcacaagaagacagcttcaactccctatgatttcatttccgtcctgaccaatcagcactcccgggtcactggcttcccccaacccaccaatttatccttaaagattctgctcctggctgggcgtggtgactcgcacctgtaatcccagcacttttggaggttgaggtgggtggatcacccgaggtcaggagttcgagaccagcctgaccaacatagtgaaaccccgtctctattaaaaatacaaaattagccgggcgtggtggcacatgcctgtaatctcagctacttggtaggctgaggcaggagaatcacttgaacccaggaggcagaggttgcagtgagccaagacagcgccactgcactccagcctgggtgacagagcaagactctgaaaaaaaaacacaaacaaaaaaaaactctgctccccaaatgcttggggagactgatttgagtaataataaaactgtctcccgcacagctggctctgtgtgaattactctttctctattgtaattcccccgtcttgatgaatcagttctttctaggcagggggcaaggtgaaccccttaggcggttacaaattcaaaggccacagttcctttcaggtggcttcacctgtggtcactctggcaaggttttggttttgccctccaggaccagaagaggtaaggtcttcctgctattgtagcgctatggtattgaactacctttacccttgctctgccctaactctgtccacacctttgggaacagctcctttattaacatctccttgcttctcctgtttgaacttgcccaactcttaacctgcttggatcctgagtcatccattgtatgactcagactcctgagaatttgaaagtcacagatctctaacctagaaacaaagcaagtgtttctagccaatgggaaatttcaacaatgtataacaatccatgagcatgggcactgttatttccaatttggagtgtgatattataaaacaagctatgaaaagaaactaaataaaaagacgtgttattttctcaaaggacacttggagagttaagagcaatcctatttgaaaataacctacacatggtaggataataaagtaggggctcacttggcttagctccgttctgttcttgcgaaagcacacattcatataaataagatatacttgttttatatatatttattgtattttaaaacatgggtccacatacagctcatatattacattatgaattaacagcatgatttaagaaaagtaattttgttaattatttttataaaacaaacccagaggccgggtacggtggctcacgcctgtaatcccagcactttgggaggtcgaggtaggtggatcacaaggtcaggagttcgacaccagcctagccaatatggtgaaacctcgtctctactaaaaatacaaaaaaaaaaaaattagcctggcatggtggcacatgcctgtaatcccagctacttgggaggctgaggcgggagaattgcttgaatccgagaggcagaggttgcagtgagccgagattgcgccactgcactccagcctggagtaaagtaaaacaaacccacagcaacaatctatgataacgtttactttgtatggtagctatggtaggaagtggaggagattctgagctagaggaaactatattaaagtgggcacagcaaacagagaggagaaaaggaaaatatcttgcccttagcctaaccctgcctacaaatcacttaccatacactagaaaagactttcattcccaataactttgcattcaaagataaaccatgaatagcgggaacctcctaaaagccttgactaacgggaaatcctaaaagctttgcctccagagataagccacaaaaacaagaacatcctgttttccttaccacaaaacaggaacatcttgttcttatccaattggaatgaactgccatatctgagctataaatatctgccatttcatctgagctataaattcctctattctatttagcgagccactctctgaaagtctgattttcttgaactgcaagtaaaaatgtctctctgtgctcatatttgtctttgatttttattttgacatagggttcctgaactgatttttggggggggaaatcctgaagttggacgcacccagggctggcttcatgggtgggcaaaatgtgcagtcacacgggccccactctgggtttagtgctctgctatcaccatcttaaaattcgtaatttctttgttttttttgaggtagagtctcactcttgttgcccaggctggagtacagtggtgtgatctcggctcagtgcaacctccgcctcctgggttcaagcaattctcctgcctcagcctcctgagtagctgggattacaggcacctgccaccacgcccagctaatttttttgtacttttagtagagtttctccatattgcccaggctggtctcgaactcctaacctcagctgatccgcccaccttggcctcccaaagtgctgggattacaggcgtgaggcatgtgcattttagctttctagatcaggtgagggcacatggacaaatggctcaagggtcaaatccagtccactgtctgtttttgtatagcttgcaacttaaggatggcttttacatttttcagtggctgaaaaagatcaaaagatgagtatttcatgacagttgaaaattacataaaattcaaacttcagtgtttaggataaggttttattggaacagagacccacccattcatactgtctatggctaattttaagatacaagttgaatagctgtgaccaagccagcatgacccacaaaacctaaaatatttcttgtttggctctgggaagctaaaagacaacaaagaaagaattctccaaagatactgagtttctttgggagtgaacaaaaagaattataatccaagatgtacagctatggcaagccacgggtctggagaagggaagaatagggggaagattttactggtaaaggagggaagttcacataaactcttggaaacaaagttgattggttcccaaggctcaaatcaagaattggagtccgttcattggtggaggtcctgctgctgggccaaacgtcctttcgacagtatcttatctgaactgctgcagttttaaagaatatttagcaataaatcttgtcatagaaatgtgcgcatatttgcaaaacaagcaagttgtgcaaaacattaaatgcatgaaagatgtgaagaaattgtgggttttttggtttattttttaaagtccttgaggcagttctttctttctttttttttttttttgagacggagtcttgctctgtcgcccaggctggagtgcagtggcacgatctcggctcactataacctcctccgagttcaagcgattctcctgcctcagcctcctcagtagctgggattacaggcgcccgccaccacacccagtttttttttctttttttttttgtatttttagtagagacgggaatttcaccacgttggccaggctggtctcaaactcctgacctcgtgatccgcccgcctcggcctcccaaagtactaggattacaggtgtgagccaccgcgtctggccttgagacagttcttatctcagacatacaagcatgagtttccttcctttctggtctctaggctccaatttgtctgggtctgacaatagttacttctcctggaatctgcaactttcagagcactttatggaaaaagtcggccaacccctgccctacactcactcttgatcactctccagtgtagccatcccaaactatttgcagaccacccttttctctctgatctgtatcccacccccccaaccatgggtgcttccatagaactaaccccatctaagcatttaacagttattctaattgcccttttacttgtctgacccaagtgttcgccactcaatcctcagcacccagcacgatccctagccctcgttcagcgcttaataaatccatgttgattcaatgtgtagcatcctgaacaggcaacagcagtgggttccaactttcaaggagcttaaaaaaggaactcagcatacaaacaacagactaatctacaaggaagaatgaggggggtggagggagcactaaaaagcagcaagtactctgcagcagaaccaaagataaaattccacctaaaggtgccctttcttcaggatccttcctaatttgaatacaggttcccttctcctccatgacgaaattcttagtgaggttacttgttggtacgcagtgtcctcatctgtaaaataaggctaaataattacgatttcaccggattataatgaatatggttaagtattgaactaaggcctagaaagcacgtagctcagtgcacgcttcctagaaagtgctcagtaaactcggatcctctaacacgctccgtttgatgttaatggagtccgtatccgagcgggtctccagtgtgcatcgccaagggtatggcccagcatccaacgcatccttttagtaagagtagcgacttctcagcgctcccttcgccccaggagagttctcggctcgcggcgtcgcggcggggctgcgcgctgggctgaactcccaagaaacctcctgcagctgaaccggagcagacgcccgccaggtgaaagaactacaattcccgtcacgttgcatccgagtttagggcctctttatagtttatcacacccagcctcttccgcgcagccctcagtggctccgccccaaagggggctctcttctttccttgtggagtccgaagcgtggccacgccccggtcaccggaaaaatccgtgtgacgtcacaaaaacctacgcgtcgcgcggtgggcgggagttggcggacggtccctggctgggttctggaggccctgggaccgcggaagaggcttcagacgctgcagcgatgcctcgcccacggcgggtcagtcagctcctggatctgtgagtctaccctgtcccgcctcccttcgcgccgccccagcacctcctccaaacggccaggccctgcgctgctcttcctccccgcccctttcccaccccccccgccgacctctgaagaggccccgcgtgtgtttctgtccctgggttcctgatctgtcgtttcctggctgaggacagttgtgcaaagtgggtctcttggcgggcttgcccctccaacactccgctgcgcgatgagcgtccattcctccgtcagccttgacagctcggcgccccggctgttactggcagtggcctctctcttagcagctaaaagccttggtagaaaaaaacacaacgctagatgaggttctcaaaagcttctagcagaattccacccctgtaactggaataaacattgacagaccctgggataaaggtaacaaagtggttaagaccacggatccctggctgagattgctgggttcagcccccggctctgccattcaccagccacgtgaccatggaccggtaacgtaacctctccctgtgcctaggttctttatctataaaatttttgtgataatagcacccatcacatggagttgtcctgagggataaatttaaaacatgtaaaacccttataaggatgcccagcaaataataaacaccactaagtgttattgttattattatttcctaccagaaattgtacggaaatggaagttacaagggcaattgcgtctctccaggagctttcagtccgttaatattgccatgtaaaaaacagacatcttaaggataaggagaacaatctccttaatctactgaaggctttctgaaacaatggcatctgatattttacattaaacttgggaggccgaggtgggagaactgcttgagctgaggagttcgagaccagcctgggcaacgtggcgaaaccccgcctctactaaagatacaaaaattatctgggcacggtggttcacgcctgtaatcccagcactttgggaggccgaggcacttgagatcaggagagttggagaccagcctagccagcacggcaaaaccgcggcatgtactaaaaatacaaaaattagccaggagtagtagtggcgccggtagtcccagctactctggaggctgaggcaggagaatcgcctcaacccaggaggcagaggttgcagtgagctgagatcgcgccactgcacgcctaggctgctaggcgacagagcgagactgtctcaaaaaaataaaataaataactataatatatgtagaataatatcacaagcgggagagtaacaaacttttgaaatttctaataaggaaaagaataggagaaagctttgtcaagggggttatttttgaacattggtagtatctgacggttgcaaatgggaggaaatgtatcgtagagagtgaaataaaaagagtaaaggtttgacaggcaggaaaggtagaaatatgagagaagaccagaaagtagcgctccaatgtgaatggaagatacaatatgaatagcacagtagtgagacataaagccaggtcattgggaatagaatcttagggaccaggatgaagtaagagcatttcctctttcagtcatggggagctatcaaaggttttagaactgtactgtgagcagagagagatttgaattaggcagaagttggaaatagggagacacttagaagactgttacaaaatcttaagaggtgaagagcccaaaccaggagacacatgaagatgttctttgcagaattatttctggtggcatggagctggaatgggagagttaccatggaatattatgcagctgttagaaaagcaaagggtaggccaggcatggtggctcacacctgtaatcccaacattttgggaccctgaggagggtggattgcttgaggccaggagttggagaccagtctaggcaacatggcaaaaccatgtctctaccaaaaataaaaagttagccaatctcataacctggtctcaaaataaataaataaatgaaagaaaagcaaagagtagattcatttggatagaattttaaaacacagtgcttagtgaaaaaaagaggaaacagactaacaatgttaagaaaaattcttcagaacttggggctaagacagggatgactacatgatcttcattgtcatgctagagtgtggtccctaggtaaaggtccatatttgcccttagaacctaattttgtacccttctgggacaaggtacagtctgagactggcagttggtcagcaagctatttctggtttgtaacaaagtaagaagcttgagccaractagtaattaagtgtgtcactaagcacattatttagtccagctgatgaggctttctccatgaaggaaacagggcttggtttatgttcttgcataaactccttatctcctcactgaccagcactttaacactgctttagagaatcctttggatctgggacatgaatagttttgaatagagggaccgaggaaagagaagaattagaaattactcttttagttgggggccgtggctcaygcctgtaaccccagcactttggaaggctgaggcaggtggatcacctgaggtggggagttcgagactagtctgaccaacatggagaaaccctgtctctactaaaaatacaaaattagcyggccgtggtggtgcatgcctgtaatcccagctccttgggaggctgaggtgggagaatcgcttgaacctgggaggcagaggttgcggtgagccgagcttgcaccattgcactccagtttgggcaacaagagcgaaactccgtccccccaaaaaaaaaaaaaaagaaattactcttttagttttagcttcgttgacaggtagaatggtgattagactattatggaggaagaagtgtcttacggggaaaatgaatcagaatatccagtagaaatatcaagcaggcagttagaatataattttgaatctgaaagaaagatcaaggattaggctgggtgcagtggctcatgcctgtaatcccaacactttgggaggccgaggcaggtgaatcacttgaggtcaggagttcgagaccagcctagccaacatggtgaaaccctgtctctaccaaaaatacaaaaaaaattaactgggcatggtggtgcacatgtgtattcccagctacttgggaggctgagacaggagaattgcttgaacccaggaggcggagcttggagtgagccaagatggtgctactgcactccagcctgggcaacagagtgagactccatctctaaataaataaatacataaatacacaaataaaatgaagagagatcaaggattgaaactaagattgggggtataactttgtagatgataggaagccatggttaagtttaaaagagggctatagagagaaaaaaagaaagtcaaggacaaaattttatgtaacacttacattagaagcagtccatgttgccaaaactcttttatttgttagatcaattcaccatatgatgatttggccaaatagtaataggttgtttcttttaagtataaaacgtagagcaactawtattggttgggatatccacccgtctccccaattgttttacagcttttaaagattataagttttagctgacttcttttcattttgtcttragaaatgagactgcctgtgccaactgtggggcctgagaatcaacaccacttatgtcaacctaactttttgctctaggaaatttttgcaaatcagtttatctaaataaacagctatcaggacaaacattttgatttttaggacaaacattatgtttatctggacagattgctcatcaagcctggctttttgtgtccatccgttttaaactaagtcacaaactttgcctaatccttacccattcgccactgtggggggagaagcacccacttaaactggtggcgtttatatcccagaaacttatgtatactcttgcctaacattcctctattgaaatgctaccaaaaccctgtcaagatgatctcccttgctgtagtaaatgtaatacatgatttgacaaatttaatcaatttgtttgaccagcagggtttctggatgggctttgtggccattcaatagtcctcccagaattttaagaactatttgatttgtttctgtcccaactccctgctattgcagctggagggaactggagcagaaagaggaaaccatttactttgggaaacacatggtacagcctctgcactgctgagctcagagaagagcatactaaagggctaagatgaaagagactgagagaaaaaggtggcggtggggggcagagagccatgttgtaggaaaaaggtaacatattgaaatatacctgaaatcttgcataaagcaaaatacagtagtctctccttatgtgctgttttgtttcggcagtttcaggtacctgcagtcaaccatggtaaaaaaatatatatatatgttaaatggaaaattctaggaagaaacaattcataaattttaaattatgcaccattttgagtagcatgatgaaatctcatgccaccctgccctgtctgcccaggatgtgaattctgccttcgttcagcatatccatgctgtccatttagtagccttcttggttatcagagctattgtygcagggctactgcattcacataaccctgatattacttaacaattgcaccagagcacaagagtactgatgctggcatattgttacatgtattttttatttttccacccaatccttgtagatgttgttataactgttctattttattgttgttgttgttcatctcttactgtgcctaatttatatattaaactttaccacaggtatgtctgcatagtaaatgcagggtgtatatataggatttaggattcagtactatccatgatttcaggtgtccacagggagtcttagaatgtttttcccatggataaaggggatctgctatataacaggagtgattgtcagtcacttcaaatgctttacttttctctaatcccctactcacagaggtcatgtgcaagaggaacaagagcatttttataaagtttacacagacttaccttgtttccttgcttgactggtgtgggtcactgtaggggtacttggtgagcagtatcctcaaccaagtggtagttatctttgttatctagggcaggagttggtaacctttctgtgaagggccagagagtaatattttcagctttgtaggctacacaccctctgacacagttactcagctctgccattgtagaacacaagcagccacagacaacacataaagaaatggcagcagcctgaggatgataaggggtgtgaaacatctgttgaataccttgactatcggctcattgttgagcaacctttgcagtaaaagacctatcattgtcagagtgaaagtggtctgctttgggaggccgaggcgggtggatcacgaggtcaggagatcgagaccatcctggctaacatggtgaaaccctgtctctactaaaaatacaaaaaattagccgggcatagtggcgggcgcctgtagtctcagctactcaggaggctgaggcaggagaatggtgtgaacccaggaggcggagcttgcagtgagccgagatcgcagtggtctggaaaaccaaaaacataacacactttgatcagtgtggctggagttggttgatcagactgaaaccatgaaaccataacctgaaaaaatgtcaacaactgtaacacattaacaatagccccaggggtggtgtgtgtgtgcgtgtgtgtttgtgtgtgtgtcagtcaaaggcagtgttccaataaaatttgatttctttcttgttttttgagacgaggtctcactctgttgcccaggctggagtgcagtggcccgatctcagctcactgcaacctctgcctcccaggttcaagtgattctcctgcctcagcctcccaagtagctgggattacaggcatgcactaccacacctggctaattttttgtatttttagtagagacagggtctcaccagcttggccagcctggtcttgagctcctgacttcaggtgatctgcttgcctcagcctcccaaagttctgggattacaggtgtgagccaccgtgccaggcgtaaaacttgatttctgaaaactagcagctggctacatttgtcccacaggtcatagtttgctgacccctgatccaggtttcagtacaacaagagaatccaggtggctgaaccagaattaagtttgaatttcctaagttcccttttgccagactgccacccagagagtgtaccaaccaggctgacttggagtcattgtttggagaaagaaagctgcatatcatgcccaggaattgtcagagtggaatcccagaatatcagactaagtctagcaaaccctccccttttcatcctgatcattatataggaggtggctaggagactatgaaccctttcagggtgccttttttgtgaccaaactaccttactaagatgcatggaccaggagagtgtgaaggaggtagagtcagaaatttcttttagtggattttttaaaagtccgttttacttcttgttggagccaacaccctaaggatgataaggggtgtgaaatatccgttgaataccttgacttattggctcattgttgagcaacctctgcgcagtaaaagacatatcattgtcagagtgaaagtggtctggaaaaccaaaaacataacacattttgatcagtgtgactggcgttggttgaacagactggaacaatgaaaccataacccgaaaaaatgtcaacaactgtaacacattaacaatagccccaggtgtgtgtgtgtgtgtgtgtgtgtgtgtgtgtgtgtgtcaaaggcctgatatagtcaacttgtcagaagtaagagggaccacacaccataaaatacggtctatttcactgagacaaaacaggctgacttttgaaaggaagcacaagaccagcatgcaatggtagcgtcagatacatgtaatctttactctgttcctaggccatgatggcagataatgttgctatgtgcagtgtgttgttacagtgtgcagactgctgatcctggcagcagtggcagcagtctggatggtgtatacttgattagcagcatcattgcagtctattccattagagaatgarccattaccatggacatctgtctgattctctgctgtgatttgttttcacagttcacagtcctaaagaggagtgtctgtaatccgctagtttgttttcttccaagtggcagaccaggtaacattgtcaacagcccaagagtcagtaaaaatataatatgccttgaccaaggacgtgttgtttgttgactaaggcagatattggcaaactttgtaggctccacctgcagtgtcactttagcctctcttccccactgaagactttacccagacctcatcagttgcatttggttgcctttttcccctaagggatcagagaccaaggagcttaatgtgtgcccaagttatgaattatagcaacagccaacaggagactgctgttcaccagctggaagtgtggggaatgcagagtggcagggaggttggctcacagggaatgctgagggtgttgaggatgatatttccctcttgctgtccactcctgtattgatgccaccccagtattgatacctgagcatcagatacccagcttcctcccctgggtacctcccattgagcatccaaacccggaagtccttctttttcttccccagtggaaaccgctacattttactccacggtccttgataatttcggccacccatatgcccagcaccccatcatcctcaccaatcaaatcagactgtcgcaggagccagatatataagcagctggctttgcactgttaggcaaggctctgcattcacttttgttttgagagactgctcacctgtggctcaaccaaataaatgaggctggtctcaaactcctggactcaagagatattcccacrttggcttccaaagtgctgggattatagatatgagccactacacttggcctacaattctgctacaatttgacttctaagtctatacccarttgaattgaaactgggtacycaaatacttgtacatgaatgttcatagcagcattattcacattagccaaaggtagaaaaacccagacagatgtccatcaattgatgaatcaataaacaaaatgtggtatatttgtatagttgaatgttattcagctgtaaaaaggaatgaaatactgatacatactacaatgtggataaaccttgaaaacatgatgctaattgaaggcagccagacacagaggccacatattgtataaatccagataaatcaatagtgacaggaagcaaattggtagttctgaggtattacaacccataattggtatttgtgagaaaaaggaggaatggggattgacttttttttttttttttgagacagagtttcactcatgttgtccaggctggagtgcagtggcacgatctcagctcactgaaacctcttcctccatggttcaagcgattttcctgcctcagcctcccaagtagctgggattacaggcacctgccaccacacccggctaattttgtatttttggtagagatggggttataccatgttggtcaggctggtctcgaactcctgacctcagatgatccacatgcctcagcttcccaaagtactgggattacaggtgggagccaccacacccggcagggactgacttcttaatagagataagttttcttttgggctggtgaaaatgttttagaactagatacaggtggtagttgcacaacattgtaaatgtacaaaatgccactgaagtgcacactgtaaaatgattaatttcatattatctttcatctcaactttttaaaagaaaaaagtaaagcaatgtatgttgacaatgtcaaatgacaacggaatggaaaaattaaatgtagtatattcacacaatgaaatatatatatacacacatacatgtatcatctatatattataacatatattgagaacgaaatgaactgtggccgcatgcaaccacttgaataaattgcacaaacaaaaggttccattgtataactatattgtaattcattctatttactgtggatggtaatttgagttgtttttagttctctctgttacaaacaatgctgctgtgagttttgttgtctacatcttctgactcaaaagtgcaaggttttccagggttgatacctccaactggaattgctagatcttaggatctatacatctttagctttactagataaggccaaacagttttctcagatgcttgtaccaaattacatgcctactctcaatgtttgagagttcctgttgactaccatcttgaccaacatttgatgttctccatacctttctgaagtctttgaagtctctaaagagatagggaggcttgataaaatgctacataagttcttacaatcactagatctacagtgagcaatacaaataacatattgtatattccagaacaaatataattttatatgtgtataattgtatatatttttacttccctaacaaaatgtctaaccttttctctacatttttgaaatttctgaaaaatttgcttttctgatcctagtgatgcttaggaaagattttatatcattaaaaagaaattgggaggtcacttccaagatggctaaatgggaacagctccagtctgcagctcccagcaagattgacgcagaagatgggcgatttctgcatttccaactgaggtacctggttcatctcactgggactggttgaacagtgactgcagcccacggagggcgagctgaagcagggcagggcgtcgcctcacctgggtgcaaggggtcgggggatttccctttcctagtcaagggaagctctgagtgactgtacactcctgcccaaatactgcgcttttcccacggtcttcccaatcagcagaccaggagactgcctcctgtgcctggcttggcaggtcccatacccacggagccttgctcgctgctagcgcagcagtctgagatcgacctgggatgtgggagcttggcggggggaggggcgtctgccattgctgaggcttgagtaggcggttctatgctcacagtgtaaacaaagtggcaaggaagctcacactgggcggagcccactacagctcagcaaggcctactgcctctctagattccacctctggggcagggcatatctgaacaaaaggcagcagacaggtctatagacccaggcaaacagggtctggagtggacctccagtaaactccaacagacctgcagctgaggggcctgtctgttagaaggaaaactaacaaacagaaaggaatagcatcaacattaacaaaaaggacatccacaccaaaaccccatccataggtcaccaacatcaaagaccaaaggtagataaaaccacaaagatggggagaaactagagcagaaagcctgaaaattccaaaaaccagaatgcctattctccagaggaacacaactccttgccagcaagggaacaaaactggacagagaatgagtttgacgagttgacagaagtaggcttcagaaggttggtaataacaaactctccaagctaaagaagcatgttctaacccaacacaaggaagctaagaaccttgataaaaggttacaggaactgctaactagaataaccagtttagagaagaacataaatgacctgatggagctgaaaaacacagcatgagaacttcatgaagcatatacaatatcaatagccaaattgatcaagcagaagaaagaatagcagagattgaagatcaacttactgaaataagaggcaaagacaagattagagaaaaaggaatgaaaacgaacaaagcctccaagaaatatgggactatgtgaaaagaccaaacctacgattgattggtgtacctgaaagtgattgagagaatggaaccacgttggaaaacacacttcaggatattatgcaggagaacttccccaacctagcaagacaggccaacattcaaattcaggttgaacaatgagaacacatggacacagggaggggaacatcacacactggggcctgtcggggggttggggacaaggggagggagagcattaggacaaatacctagtgcatgcagggcttaaaacctagatgacaggttgataggggcagcaaaccaccatggcacatgtatacctatgtaacaaacctgaatgttctgcacatgtatctcagaacttaaagtaaaattaaaaaaaaaaagttaactataaatcttagttaccaagaaatcccagtttctgatactgcctcttgtgaattaaataagactgaattaaattagactgtctgtagacagattagaaggcaccacggaagagtcttgaattaaaacaagtttaaagtagcttgacactagagaagaatttatttaatctttcttcataacgaatgtgtttatccaggaataccatttgacccagcaatcccattactgggtatatacccaaaggaatataaatgattctattacaatgaatgtttgcttattgcacacatatgtttattgcagcactattcacaatagcaaagacatggaaccaactcaaatgctcatcagtgatagactggataaagaaagtgtggtacatataaaccatggaatactatgcagccataaaaagaaatgaaatcacgtcctttgcagggacatggataaagctggaagacatcatcctcagcaaactaacacaggaacagaaaaccaaacaccgcatgtcataagtggagctgaatgatgagaacacatggacacagggaggggaacaacacacaccggggcctgtggttggggggagcaagggaaaggatagcatcaggacaaatagacaatgcatgtggggcttaatacctaggtgtatatcccggaacttaaataaaaatgtaaaaaaaaaaatcagttcctggtggtttgtaagtcaaaaaggaaaggtgaaacaataaacttagtgaattcttgtagaagaaaacataggagaatatcttcatgaacttaggacagggaaagtttatgaacaggacaaaaaatcacctgctgtaatggaaaacactgataaattggactgtattagaatgtacttctcttcagcaaaagacatgattaagaaagtggaaaggcaatccacggaatgggggaatatatttgcaacgtatataacaaacagaaggttcatatccagcatataacaggaattcctatatatcagtaagaaacataattaacccaaaatgaaagagggcaaaatacttgagtagatactccacaaaagaggatatccaaccagacaataaaaagatgaatgtgtacccatattaatcagagattgcaatttaatgccacattgcattgctattatatacccactaaaatgactaaaatttaaaagattaacaatgccaagtgttggcaaggatatggaccacaagaatgctcattcaccaatggtaggattgtgattgggtacaaccactttgaaaaactggcattaagctaaacatatgcctaccctatgagccagcagttccactactagatatatacactcagttgaaacacagatacgtgtgtaccaaaagacatgtctaagaatattcatattgatattcataataataaagagttacaaatgacccaactgtatattcactgtagaataaattggtcaaacaacagaatattatacgttagtgaaaatggacatgaacaacgtgaaaatggaaatgaataatctatagctacatgtaacgatacagataaatttcacaaacataatgttgagcaaaagaaaccatggaaaaatgatggagcaatactgaaatcaaacagaatagtctctaaagtgaaaaacatgaatacggataaagagagacattacttaatgataaaaggaatattccacaagaaaatatcatgaatttgcaactgacaccagtcttacaaaaaggaaacctgtcatgtagtttagtcaaatttagtcacgttaggaaacttaataaactactcttacattttataaatacagaaaacagctcagagtgtggtcaggtggctcagatctagcagagttttccttatcccagtggattttgtagaatacactgccagtctcttgtctttcattcatcatggctacttctgatatccaggtgaaagcactggagaagtgtgcctcaggctaggcttttgaactgattctcagataccatcaaaagaatccatcccagagttccttatttcccctccaaagaagaaagatctttccctggaggaaattcagaataaatcagaagcttcagaagaaagacacaagccctgcgaagctgaggtcttgaagcagcttgctgaaaaatgagagcaggagaaagaagtgcttcagaaatcaataaaagaacagcttcagtgaaatagcagaagagaaactgacccacaaaatggaagctaacaaagagaacaggaaggcgcaaatgactaccacactggagtgtttgcagagaaagataagcacgttgaagaaatgcggaagagcaaagaatccagagatcctggtgatgaggctgaagctgactaatttgttctaagaactgactttctccccgctcttcttcctagatattcagactatactggccagtgtcattttattttttgctcctgacaaatattctagaagctgatgtaggactagataggtaaatccagcctgtacaatgttgttttaggagctaaagggaagaaactgaaagagttttactctttttctaaaatgttggtctttctaacatagctatttttcttgttgcatctttgctacttcagtacacttgggttaatggctagtactgtactggctttgtgaaacatatttgtgaaaagagtatgtagtggcttcttttgaactgtttgatacggaatatttgttcattttttaatcccaattctgtcctaattttaccagatgctactggacttgaatggttaataaaattgcacaatgttgttggtggcagtgacttctttctgttcaggtaataagttaaaaagatcctcctagtttatatttgtttcaggtagagcttttaggtcaatggaaataaccagcatacacattactgcaaagtctctgcttttgagtttcttgctccagagttgtttgtattgtcttctacaatcattgctttgtttcaatgcctggaccctgatcagctgttgctatattctttcaaatgtttatttgcaaacaatcttttttgttctgtgttcctgtttaaaaagcagattaaggccgagcacaaggctcatgcctgtaatcccagcagtttgggaggccaaggtgrgaggctcacttcagcccaggagttcaagaccggcctgggcaacatatagagaccccatctctacaagaaatacagaaaattagctgattgtggtggtgcatgtctgtagtcccaactacttgggaggctgaggtaagaggatcacttgagccttggaggttgaggctgcagtgagctgtgattgtgccactgtactccagcctgggcaacagagtgagaccttgtctcaagataaataaataaaaattttaaaggcagattaaaggcacaaatggtgtttctagagaacaatttagagggaatcttaagatcctagttggagatatctggtggtttgcttgctttatgttacaggtggaggtgtattctaatgctttcctgccgtaaaagctataatttgagaattggaaaatttttkgggcttttttctttacccccgactcatagtacagctttgagaatataataatattaaaaaagctttccatgctgctgtagcaactcctgtgaaatgatttaagggaactttatttatattttaaaaatcaataatttatttatagatatatgtattagtattaaaagtataattaaataatggacaggaactatttttaaaactttatggtagtaattgtctctacaaacagagatacatagagtaaaccagtcgcgtatataaaagtggctttaattttatcagaaaattttttttttctttttttgagacaaggtctagctctctcacccaggctggagtgcagtggtacaatcacagcttactgcagcctcacctcctggactcaaacaatcctcccacctcagcacccccgcaccccaggtagctgggactacaagtgaatgccactacacccagctaatttttgtattatttgtagagacagggttttgccatgtttcccaggctggtcttgaactcctgggctcaagtgagcctcctgtctcagtctcccaaagtgctgggattatagacataagccaccatgctcagccttaatcagaaatgttttatgtcttgagatgtctgacacaaatatgataaaagagtaacaaaattctaggtttgaggtacatagatrtatatcaccctgttttatatttctgtatttttgaaattttttattataaracaacaagcaaaaacttgcagaaatgaaaagaagacttgattttaaattacaaatatcataaactagaaattccacatttagtagaaaaataagaatatagtagaattagataatactgtaaataaacatatatacattaaacatatttatgtgcaaacacatatacatacatggagagagatacttatacatacatatatatataacacacagagagaacattacatctctcacgtagataatatacattctctgaatatatagagcatgtatttggccacaacaaagagctcttacaaatttgtcaacaaataacaaaatggtcctcaaaaaactaaaaatggaactaccctatgattcagcaatttcaccactgggtaaatatccaaaagaaaataaataaatatataaaagagatatctgcactcccatgtttattgcagcactatttgtaataaccaaaatatgggccgagcatggtggctcacacctgtaatcccaacactttgggaggccgaggcgtgtggatcacgaggtcaggagtttgagaccatcctggctaacatggtgaaaccccgtctctactaaaaaagaaaaaattagctgagtgtggtggcatgcacctgtagtcccagctacttgggaggctgaggcaggggaattgcttgaacccggaaggcagaggttgcagtgagctgagattgtgccactgcactccagcctggcaacagagcaagactctgtctcaaaaaaataaaaataaccaaaatatggaatcaacctaagtgcccatcaatggatgaatgaataaagaaaatgtgrtataatacatatatatgatggaatattattcagccattaaaaaataatgaaatctgctgggtacggtggctcatgcctgtattcccaacactttgggaggccaaggcaggcagatcacgaggtcaagagttcaagaccagtctggccaacatggtgaaaccctgtctctactaagaatacaaaaattagccgggcatggtggcatgtgcctgtaatcccagctatttgggaggccaaggaaggagaattgcttgaacctgggtggcagaggttgcagtgagccgacattgcaccactgcactctagcctgggcgacagagcaagactccatcttgaaaaaaaataataataaaataaaataataatgaaatcttagtcaagtgtggtaagcatgcctctagaagctgaggcaggaggatctcttgagcctaggaggttaaggctgcagtgagctgtgattgcaccattgcaccccaacctaggcaacagagcaagaccccatctcgggagagagggaggtagggaaggagggagggagggaggaagggagggaggggggaatgaatgaattctgtcatatgcagcaacatggatggaactggaggtcattttgttaagtaagccagacacagaaagacaaatgtcacatgttctcattcatatgtgggaactaaaaaaaagtggatatcatgaagatagagagtagatgggtggctaacagaggctgggaagggcaggggatggcggcatagagagaggttgattaatgggtataaatacacaaataaaaaatagtgttcaatagatgggtagggtgactatagttaataataatctattatacacttcaaaatggttagaagagaataatttgaatgttcctagcataaacaaaagataaatatttaaggtgatggataacccagttaccctgatttgatctttacacattatatgaatgtatcaaattatcacatgtaccctgaaaatatgtacatctattatgtatcagtttttaaaaataacaaaacaggcaaaggatatgtatagattgtttatggaaaagcatatccagatagccagcaagctcatgcaaggatgttgtttattggtaattagagaaatacaagttaaagtaatagtgagacatcattttcacctgttaggccttccaacatttaagagtaggtgatcttgaaaacagtgctgagtgaaaaactaaacaaatctatgacaagtcccatgtttataaattagaaatgcatgcatacaataaacatgttaaaaggmaatatacaatgaaaggatacacattaaacatgagaatggtttcctagaggggtggggaatgggagtgggaaatggagataacaaagaaatggaaagaataaataaaattaaaattaaatataaaataaataaatagggctgggtgcggtggctcatgcctgtaatcccaagtgaggagtttggaccatcctggccaatatggtgaaaccccatctctattaaaaatacaaaaattagccaggcatggtggcacacgcctatagtctcagctacttgggaggctgaggcagaagaattgcttgaacctgggaggcagaggttgcagtgagctgagatcatgccactgcactccagcctgggtgacagagtgagactctgtctcaaaaaataaataaactagccatgatatctattgctggaaggatgtagagggaaaggagctttctgacactactaatagaaatatgaagtgttttccagactttctgaaaaataatctgacaacatatcctagaaatagtggtaatgcttgtcagcatacaagtcactaaatagatcatccgtactgtgaaatatgatgtgaccattaagggagaatcagtactgtgtcggatgccttgaagggatttcataagatactgaatgaaagacagtgtataaaagtaagtgtactgtggtgccgttttaggaaacaatgacccctcccccacacaagcctttaaatgtgtgtgtgtgtgtgtgtgtgtgtgtgtgtgtgtgkacaagaacagagaaaaataagaaagaatatatgctacattggtgtagagagctaatggagggggaaggacaagagaggaaactgtgtaggaaaccaaaagaggaaaaagaaaaaattaacattgcactaaaaaattaatcacaggtatatgatcacattcactcatgaatgtaaaattttgtatatatggggatatttgtagacagaaattaataagatttgtatttgtttctttaaagtatgagtttttcagatggttggaatttcaggacacagataagatatgttggtcataagattcttggttgttgcctgataactctactttctgcctatacaaccctggcactgagtttgatatctctgtgatttgtaatatttgctgaatctttgtggttatggttctttctctagtgatttcattatccacatagttttcaagaaaaatagtaaaaacaagtttgctggattaacagataaaacttttcaattagtgggtcccaatataaagcttatttaggagtatgtgtcttagaaattagacacttaggaaaaacattcttgttggtcatttaaaatgcattttgataaatgaggtatgcatagaaaaaaattgtagaggaagagcatcttgtccgtaatttaacacagactaggtttttgaagcttacagagctaaagttgtaaatatagtattaatataaaatgtatatacttttttttgagacaggatcttgctctgttgcccaggctggagcgtagtggcacaatcacagctcactgcagtctcgaccttctgggcccaagcgatcctcccacctcagcctcccaagtagctgggactacaggctcacatcaccatgctcagctaatttttgtattttttttctttttttgtagagacagggtttcactatgttgttcaggctggtctcaaactcctgagctcaagccatcctcctgcctgggcttcccaaagtgttgggattacaggcgtgagccaccacacccagccaaaatgtacacacttttatgaaagggctaagtgctaacaaatagcattaagacaagtgttaggaatcagtacaggcccagtgtgatttactatattgtatttgtatttcagatgcctttggtgcttcatgaagaatatttccagatatctcacagacattaagcctttgcctcccaacataaaagacagactgattaaaataatgagtatgcagggacagataacagattcaaatataagtgaggtaagagtatgaataactgtaaagcaagcatattatattttctgtttagatatggttttagatttttggaacaatggtatatggtaagactggtaatcatttttaatttttttttttttatacagggtcatgctccgttgcccaggctggagtacagtggtgcaatctcagctcactgcaacctccgctgcctggacttaggtgatccctcttcagcctcctgagtagttgggactataggtgtacaccaccatgcctggctaatttttgcattttttgtagagacagggtttcaccatgttgcccaggctggtctcgaactccggagctcaagtgatccatccgcctcagcctctcaaaatgctgggattacaggtgtgagccaccatgcctggcccacattttagaatattataaagtataagggtttgtttttttccctccagataaccaaaatgtccatatgyaattatcagaggaacctgcccccaatatttcaatgtaggttctttctatttttcctaagtgtcggctggtctgagaaataaagagaaagagtacaaagagaggaattttacagctgggccgccgggggtgacatcacatatcggtaggactgtgatgcccacctgagccacaaaaccagcaagtttttattaaggatttcaaaaggggaggaatgtacgaacagggagtaggtcacatgctttaaagggcaaaaagcagagcaaagatcacatgcttctgaggaaacagggcaaggacaaaatcagaactcctgataagggtctatgttcagcagtgcacgtattgtcttgataaacatcttaacagaaaacggttcgagagcagagaaccagtctgacctcaaatttaccagggctggggtttcccaatcctagtaagcctgagggtactgcaggagaccagggcgtatctcagtccttatctcaaccgcataggacagacactcccataggacagacactcccagagtggccatttatagacctccccccaggaatgcaattctttccctagggtcttaatattccttgctaggaaaagaatttagcaatatctctcctacttgcacgtctgtttataggctctctgcaagaagaaaaatatggctctttttgcctgaccccgcaggcagtcagaccttatggtcgtcttcccttgttcgctaaaattgctgttattctgttctttttcaaggtgcactgatttcatattgttcaaacacatgttttacaatcaatttgtacagttaatgcaatcatcacagtggtccagaggtgacgtacatcctcagtttatgaagataataggattaagagattaaaataaagacaggcataagaaattatgaaagcattatttgggaagtgataaatgtccatgaaatcttcacaatttatgttcctctgccatggctccagctggtccctccatttggggtccctgacttcccgcaacatgtaatagttcctaaaacatcttctaccattgtctcagttacttctcttgtgtcaaccagagtcgtggagactgaaaatccaagcaaaaaggtttattggtggttttagaattgaattcaaggaacacagattccagaggcatctgaaatcatgtcctaactatttaattcatatgtcctaagagatatatgaggtcttttaaagagaaaggtgggagagggttatcaaacaattcattagttagaataagggtttctaggcagaagtccttgattcaggggtttggaaaaagttcagtcatcagcatagcatagtcttttcagaagtggcagcaatttcatctgcagcatcagcaagtacgttctacagtcaagcagttgcagaatgacattcaggaacaaaatggtgttgttctggtcagctcccattagccttccatacacacttgtcttcatggtacctgtacccttgacctccgtgttttcaaaaagtttaaaactttttgatcaagactcacaataagaaatatacgttacattgtgactgtagtacacaaaccacacttaggtgtaacagtataatgtatagtacattttggtcttttctatttaattttattctatttagtcttattttactgaaaaaatattgatcacagtctgctaaactgattttgtaatccattcatggataatgaccagtagttaaaaaatcactcttctcatctatactgttcttttttcaactgctatatttttcatatttaatatttccaattcacctttttatggtttcttgttttatcttattaatcttttcttatttcttttagcatattattatgcttattaatatatttggcctctctgttctaattcctctgctcctgatggaatcagtaatctttgtttttcttttgaaatagtggtgctctctagatgtcttgttttggcctgtgaacatatctctgtatactctctggtagtggtaagagtaaaggaggccagacccaagtctgtttcggccctactaagctgacatagggggtggaggcctggagaggggctggagtgatgagctccaaggcagagagccccaagcactagaaaaagatrgttaatcactctttgttctgctaaacagcccgtgagattagggcttaaccttcagcctctgattttaaaggttattaaatagcagagtagataatttccttcgatactactcctgtgttatcttttgtatttttgctatttgtgtttcaaaaagtgaaaatgctagttagtagtttctacactacttacatttaaatattgtctttgggtttgcagccaccaccactctgcagccatcaccatctagtctgcagagactagaactgccaattgctgttgggggtgagcggcatctatccaggctggtgggatggtggtaaaagaatttaccaagacagttgtaggtaaagaaaggcagatttttttttttttttttttttttttgagacggagtcttgctgtttcacccaggctggagcgcagtggcatgatcttggctcactgcaacctctgcctcccaggttcacgccattctcctgcctcagcctcctgagtagctgggactacaggcgcccgccaccacacccagctaattttttgtatttttagtagagacggggtttcaccatgttagccaggatggtctcgatctcctgaccttgtgatctgcccgcctcagcctcccaaagtgctgggattacaggcgtgagccaccgcgcccggccaagaaaggcagatttattagagaaaatatgaaaatacattgcaagggagcaacgggcagaaccagcaagagaggacccaactgccaggagacaaaggcttgctggggattttatagaatggaacttgggctgattgacagcaccaaggtaggagggaactaacttgcatccttctgtcagccgaggtgtttgatgatagatcaaagtgtttggtgataagcaggaggtttatgagttttgtatgttgtctgcacaggagggctatatgttctgggccataaagaaaggcagacctatagcttatctgcttcttctttttgtttatatgttctggaccatgaagaaaggcagacctgtagcttatttgctttccccttgtcctgccagcctgactccttttccctaattaggactccacaattgctctgacttcacttcaccttctgcctaaagcctgtaatcaaaaggaagcaaggtctgatgatagcactccagcatatgtttttctgtggtttttgcttgtttgttgttttttttttgagacagggtctcactctgtcacccagggtagagtgcataatcatggctcactgcagcctcaacctcctgggctcaggtgatcctcccacctcagcctcctgagtagctaggactacaggcacccactaccacatccagctaatttttgtattttttttagagacagggtttcaccatgttgcccaggctggtcttgamcctctgggctcaagcaatctgcccaccttggcctcccaaagatctaggattataagtgtgagccacagtgcccagcctacatgctagagcatgtgactaaccctgtgactttacattggaattgcactttaacctgtttttaatgtttcttctgcattaacctgatatatctttattataatgctttattttcttcatgttagcttgcatttgaacatagataccttagtggtgtagtttgcttggctctgtggaagtagaataatatctccacgttcttattgttgatggttctgttgaagtatgtaatgttatatgtgactcatagatgaaccataatgacactgtagaaaaatggtggttttcttcacttttccaccatccacatttcttactatccctttagcttatccttcagtgacttaggtttttgtttgatggcaatccttaccattttttaagcctaattttagctgaatttaaaaggaggggtgaagagggtgaatgagatagaaaaacaagacatgatttttctgggtactctccctctagtctccatccttaacaagagtcttgcttatgacattattcaaaaagccagatacaacatccattacaaagtgacacacatctttggatggctgtttttgaagtatttcataaatctttttatactctctggatggagaaggcctttttaaacatgatactaaagttggaaaccaagaaaaaaagttggatggatttgattacataaaaatacagacttccttatggcaagaagaaaaaaaaaaaagaaacaaagtcaaaaacttggaaaaatatttacagtatgtatgaaaatctaggggcttttttatcttgacaatataaagaatccctccaagccaataagaaaaaacaaaacaaccaaataaaaaaccagaagaatcaggaaatactcagaggaaaaaatacaaatctccaataacatatcaaaggatatttaaccttactagtcatcaaagtgacagtttgcctttcagtttggcagagactttaaaaaaatcccaaaacccaatgttagcaatagtgtggagaaactgtcacttttatctcctgctagtgagagtgtaaattgatttaaaaaaaccttttagacggacagtttggcattattaaaaattctaaagatttgcttattattaattcaacaatttacttcctgtagaaatctcaggaagataatagaaaagtacacacatatattcattataatatcatttatgataataagcatagttatatatagcatatgttataagcaagacacctttatttctcacaacatatcctgttttagtaataaggctagtaaagcacagagagaaaactgagcttgatggcaatcatagggttccaggttgggcagtctgcttgcaaagcacatgttcttaatcacggcataatattgcctacctaaagcaacctaaatgttcaactcaagtgtttgccagtgtaggatgcatttaataagttatgatacttgcagaaaatggaataatatacaaccacaatctattgattttataaaaagtgctcatcttatatgtgatctgatcctgttgttcttcaaagcgttttttaaactcaaaaaacatcaaaatgaatatatacagccataaaatcatgtcctttacagcaacatggatgcagctggaggccgttatcctaatgaataaatgcagacacagaaaaccaaatactgcatgttctcacttataagtgggagccaatcgctgggtgcacacagacataaagatgggaaaaatacacactggggacttcaaaagggaggaaggaggaagggaagcaaggattgaaaaactacctgtcaagtactgtgttcactcttkgggtgatgggttcaattgaagcctaaacttcagcatcatgcagtatatccctgtaactaacctgcacatgtaccccctgaatctaacagttttaaaaagctaatataattttatctctgggtattggtattatgggtaattttagttatagaggttaaaaggttaggctttggaattaaaaggacctgggttccaatcccagctccactccttttggctatgttctttatgttggctacttaagctctcagggtcttaattcccgatttgtaaaatggcaatgaccaatcccttgggggcgggcagkggggtggtgggcagtggaaagagagagagagagaatattaaataacataatgtaggccaggcacagtggctcacgcctgtaatcccagcactttgggaggccaaggcgggcagatcacctgaagccgggagtttgagaccagcctgaccaacatggagaaaccacatctctactaaaaaatacaaaattagccaggcgtggtggtgcatgcctgtaatcccagctactgggaggctgaggcaggagaatcgcttgaacccgggaggcggaggttgcagtgagccgagatcacgccattgcactccagcctgggcaacaagagtgaaattccatctcaaaaataaaataaaataaaaaataatataatgtatatgacagtacccttcctggtaagcatctaataaatagaaatcattattcttataacttattataatttttctaaattgtctgagtgttttacaataataataccttattttattttcagaaaggtaaagccatttctattttggaaaaaaaataaagaacasaaaaatacaggaaagagctcagaatgcttaggaattaatctattatttgtcaacctcaagaaaacacccaataatactggggtattttattagctcccaaaaataatgatatagaaggtaaatgttctagataagcagtactagtgctctgtaagcacttggtacacaagtgattaaagactcatacttcctaagcacagaggcccatagggagagtctctaatgccagcagctaccagaagattattactcactgccacattggttaagcttctcaggtctatggatccttcccctgaattagccatctcaacagtgctttgtgtcccaagaaggactttgccagcactgaaagctgcacctcctgctggaagtagaagtggttttctcctgctttgtgtgtctgtctgcacatggatatgcttctgtattctttgctgtattttacatcagccacttgtctgttatgaccaccaaaacactgaatatggaataaatatttgtatttatagaaagaaataattttttcaaaatcacttatttgttatagattttacatcctgaagtccaaactctagatctacggagctgcgatatatcagatgctgctctcctgcacctgtctaactgtagaaaactgaagaaattaaatttaaatgcttcaaaagggaaccgagtttctgtaacttcagaaggtatgtttattaacactgagtacattggtagattactattcactatctggtaaaattgtggagtaagggagaaaatacgtcaaaagagagtatgaagaagtcagagaaatatgaattatatttatcagtaaaaacattcagactaagaaaataatccaagttagaattcttgcttataatcagtgctcaaagttaagaaagacactgggtaagtcactaccttgtattttaaacatatgtaaaataaacatgggccaggctaggtggcttatgacagtcattccagcacttttttagctgggaggccggcagactgcttgagccaaggagttcgatgccagcctggccagcatgatgaaccgcccccgacccctacctcatctctacaaaaaatacaaaagttagccaggcatggtggtgcaccctgtagtcccagctacttaggaggtggaggcacgagaatcccttgagcctgggaggtagcagttgcaatgagctgagattgcaccactactccagcctgggtgacatasggagactctatcagaaagaaataaaaaatagggccaggtgcggtggctcatgcctgtaatcccagcactctgggaggccgaggcaggtggatcacctgaggtcaggagttcgagaccagcctgaccaacatggagaaaccctgtctctactaaaaatacaaaattagccaggcgtggtggtgcatgcctgtaatcccagctacttgggaggctgaggtaggagaatcgcttgaacctaggaggtggaggttgcattgagctgagattgtgccattgcactccagcctgggcaatgagagcaaaactctctcaaaaataaacaacaacaacaacaaaaaattggccaggcgtgttggctcacgcctgtaatcccagcactttgggaggcctaggcgggtggatcacgaggtcaggagatcgagaccatcctggctaacatggtgaaaccccgtctctactaaaactacaaaaaattagccgggcatggtgacacgtgcctgtagtcccagctactcgggaggctgaggtaggagaatcgcttgaactggggaggtggaggttgcagtgagccgagattgcgccactgcactccagcctgagcaacagagcaagactccgtctcaaaaaaataaataaaattaaaattaaaactaaaaaaaaaacaaaacatggatacatacgtctgtattttaaatattttgcctggtatagtggaagaagaaatgaccagttcatattttgttaaggcttttttgatgccatattacaaaagaattaatcatcagattaaatttactaggtactctcctatcagtttgtgtaatgcatagctttttatagctagacaaactgcattgttcagtgtcactattacatgagttagtgaatctttaccttttttcctctctatagacctctttttttcaatatttggtttgcattaatacttatttttatttatttatttaagacagtgtcttgatctgtcacccaagctggaatgcagtggcacaatcttggctcactgtagcctcagcctcccaggctcaagcgatcctcccacctcagcctcccaagtagctgggaccgcagatgtgcaccaccacccactgcgaattttttatttttagtagagacgaggtctcactaggttgcccaggctttttttttttttttaaatataagaaagagggacttttttggcctcttagaattctggaaaactgtgtgggtagttgagtatattttgcagtcatcttggttagcgagttaggatattcataatattgcaaacacgcataagttttaatatgtttacataaataataactcacaaaaaagaacttctccaataaaaccacatttctctacactcacaccacacttctgacagcaaatgtgtggggttttttcacaccaaacaattctccaactctctggacaccagctgggtgcgctacaatttaattcaattctgacactatctacctggagttagcctcagatcccacaagttaagggctcagtcccacaagactatccccacttcagatgccaattgcaaggccaggcctctggtacatatgactgaccaactataaatggagggtttccatgacctcctcctccattcaataatttgtcagaatggctcacaaaactcagggaaacacttttgttacatttaccagtttattctaagagattataaaggatacagatgaacagcaagatgaagagtacatagggtgaggtctggaagcgcaggagcccctgtccccatggagttgggatacactgccctcccagcatgtggatgcattcaccaacccagaagctcatcaagtcttcttgttcaagaggttttttgtttgttttttcttcttcctttttcttttcttttctttctttttttttttttttttttttttttttgagacagagtctcaccatattgcccaggcttgagtgtagtggtgccatctcggctcactgcatcctccacctctgggttcaagtgattctgattctcctgcctcagcctccggagtagctgggattacaggcatgtaacaccatgcccagctaatttttgtatttttagtagagacagggtttcaccatgttggccaggctgctctcaaactcctgagctcaagtaatctgcccgcctcggcctcccaaagtgctgagattacaggtgtgaaccaccacacccgkcccaagagtttttatagagcttaatccccatcccctattccctgccgtccctgacccccacctcgccaaaggtctgtggactgagctgaatgttctaaccctctactcacttgatttttctggagacaggccccaaccttaggctatctaggggtcacatgctgtcacctcattagcttaaactcaggtatgatcaaaaggggcttattatgactaacaaaaggcactccggtcactcaggaaattataaggcttttcggagctctgtgtcagggactgggaacaaagatcaaatacagttcttattgtatcacaacttccatgctggacactgataaataaaataactggtcttaagaaaaaaaaaaagttctttcttaagatatggaaaacagtaaaaatgacctacccatgaatttaccatcttcccttctgtgtattttgcccataaaggtatcttttaacagtgctaccatgtttgtttatgaccaaagggcccaggatccccgaagtactcttttatttatgtgcacccatctccaatgggcacttatatcagcttaactggatttaaagacttctcttttttgaccctcaggaaaatgtaagattggtccaggctaacagaaggagcatggtggtagaaaataaattcacttttgagaacagagtcaaagtggagcgagagagaacacataggcatagctataaatttctaaccgcaagcatgaagatcatgactgaaaccatttgggcagtttaacttttggtttgcctccaaagtccactagaaaagtaatttgattacttgaaaatttttgttttaaccaaaaggagaatcgcctactatttcactatctaattgggttctgaatgacttttgcctatttcctaaaaggaattcaacctgtggacaataaagccttgccattaattgcagatactacagmctgtgtagagaattcctgaaacattccaaaagagttctgaataatgacagcatcactggaaaatcagtatttcctcacaggtggactactttgaaaagggctaacactgaactggtgattgctaaaatgaaaatcagtcacatttctcatgtatacatatacacacatatagctcattgatatataattatattttcccccaggaataaaagctgtggcttcatcttgttcatacctacacgaagcttctttgaaaagatgctgcaatctcactgacgaaggagtcgttgctcttgcactcaattgccagctgctaaagatcatcgatttaggtggctgcttaagtattactgatgtgtccttacatgcattaggaaaaaactgcccatttttgcagtgtgtcgacttttcagctactcaggtaaatgacatataggctacaaacatatagactatgtgtttaccaaatgtattttcatgactaatgagaacatatcataaggagttcattttgtttttgttgaaactattgaccacttcatgctttttgtggttaagtaattgagatatatattggcatattcctctcaattaagtagcaagggtgaaaggtatatatggctaaaacacatgtttgatgaatgggaggcattaagactatatctaaataatgaatacattttggaaaattctacttccgttgtctggattcatggactgtgtttctttttccctttgcttaggtatctgacagtggtgtgattgcacttgttagtggaccttgtgcgaagaaattagaggtaattttaaarcaattataaagatggtggtgattaaatttttatattcttagaaattatgtttaaaacctascrgataaccaatgctttatcaattacgtattttagggactttgttggtgggtgttctatctctttattgccagagtaaataaaaattgttaggatataaaataaaggtgctttaaaataaaaactcattttacttccaataaaaggccttatttcccagaagttttagcttctaacagatttaagaatcatcttattatggatgaagattatgaatgtttatcagtgtaaagtgatattatttataataggatttcaggtcttaatgatatttctaccaggagtattaattctcttgacatcctgtcatcctatttttcttgatagccacattgtacgatcatttaaaaaagtttttttttttttttgagacggagtctcccactgttgcccaggctggagtgcagtggcataatctcggctcactggaacctccacctcccaggttcaagcacttctcgtgcctcagcctcccaagcagctaggattacagatgtgtgccaccgactaatttttgtatttttagtagagacggggtttcaccatgttggccaggctggtctcgaactcccgacctcaggtgatccgaccgcctcggcctctcatagtactgggattacaggagtgagccactgcacccggcctaaaaaagatcttaaatttgtgttcatcctttgaattgaatcactaatgcacttgtaacctatttctaaatatattaagaagccttttatcccaggattttggtttctgtcttccccagttgacaagtggtttaatataactatgctatttaacagtaagctacatcaaatcctttttggaagtaggcaggctgtaaattaattataaaaatgttagtaaaaataactattttaatagggcacagtggtgcattcctgtagtcccagctactcagggaggctgaggcaggaggatcccttgaacccaagagttggagtccagcctggcaacatagtgagaacttatatcttaaataaataaataaataaatacttttttattttaattttaattaattaattwatttatttattttgagacggagtcttgctctgtcgcccaggctggagtgcagtggtgtgatctcagctcactgcaacttccatgtcccaagttcaagcgattctccagcctcagtctcctgagtagctgggactgcaggcatgtgccaccacatccagctaatttttatattagagacagggttttgccatgttggctaggctggtctcagacttctgacctcaggtgatccgcccccctcgacctcccaaagtgctgggattgcaggtgtgagccaccgtgccctgccataaatacattttttaaaaagccaactattgtaatggaatgacaatgccacgtttttgccaaaatatttatccttgagttattgcccaaagagattcttttttgtgattttatatatctgggtcttggtagcatatatattttttaaatattttattaagaaattaccatattaggttgggcatggtggctcacgcctataatcccagcactttgggaggccgagacaggtggatcacctgaggccaggagttcaagaccagcctggccaacatggagaaaccccatctctactaaaaatacaaaaaattagctgggcatggtggcaggtacctgtaatcccagctacttgggagcctgagataggagaatcacttgaacctgggaggtgggaggttgcagtgagccgagactgcgctattgcattccagcctgggcaacaagagcgaaactccatctcaaaaaaaaaaaaaaaagaaagaaagaaagaaagaaattactatatttattattataccaagttttgaattccaaattgcatcctaaatgcaggagcagtaatttttggtattttaagtgcaaacatttgtcgagcacttactgttatgccaggctgtatactaactgccttatattcactaggttatgtaatgcttacaacattatcttgtaattactataattttaaataaagttctcagttaaattagtttatcaccttcaaataaaaccaccaagaaattagttgttatgcatgatagtaaatatactgacctatttacctcaacattataaaattaagagcaccaacctaagtagaatgagaaaaaaatgcaataaccagtgtgttggtgattatagtgccatatcattacattttttattttttcagttttccaaagattattccaaagtgccaaaacattttaatggaaatgtctctaaaatttattagaacttaatgccttacttaaacaaagtagggtgaatatactttttaaaaaaattgttttgttttgttttgttttgtagagacagggtctttttatgttgcccaggctggtctcaaactcctggcctcagtgatcctcctgtcttgacttcctaaagtgctagaactataggtgtgagccacatgcttggcctgagtgaatatactttaacctttggtttatagcatcctctgactcaaactgaaggacaaacttaaattttgttttttgagacagggtcttgttctgtcacccagggtggagtacagtggcacratcatggcttacagcagccttgactgccctggctcaagcaatcctcccacctcagcttcctaaatagctggggctacaggtatgtgcccccactcctggctacttttttattttttgtagagatgggtcttgccatgttgcccaggatgatcttgaactcctggactcaagcagttctcctgccttggcttcccaaagtgctggaattacaggtataagccaccatgtctggccttaattttttttttttttttttttgagacagagtttcgctcttgtggcccaggctggagtgcaatagtgtgatctcagctcactgcaacctccgtctcccaggtacaagcaattcttctgcctcagcctcccaagtagctgggattataggcagctgccaccatgcccagctaatttttgtatttttagtagagccagggtttcaccatgttggccaggctggtctcaaacacctgatttcaggtgatccaccctccttggccccccaaagtgctgggattacaggtgtgagccaccgcacccagccctaatttttttttttttttactaactactctcataggtaatgcggaggcctacctttcatcacattttaatctgttgcttttaatttrttccattctgggaaattaaattattaatgttgctaaattatttataatttggaaatcaatttgattaaaggtctaaggacctttcctaaagattgacaagaggctgaatgtggtggctcacttctgtaatttcagcactttgggaggctaaagcaagtggatcccttgagctcaggatttcaagaacatcctgggcaacacagtgaaaccttgtctctatgaaaaatacaggctgggtgcggtggctcacacctgtaatcccagcactttgggaggctgaggtgggcagatcacctgaggttgggagtttgagaccagcctgaccaacatggagaaaccccgtctctactaaaaatacaaaattagctgggtgtggtggcgcatgcctgtaatcccaactacttaggaggctgaggcaggagaattgcttgaacccaagaggcagaggttgtggtgagctgagatcacaccattgcactccaccctgggcaacaagagcaaaactccatctaaaaaaaaaaagaaaaaagaaaaatacaaacattggctggacatggtggcttacgcctgtaatcccagcactttgggaggccgaggcaggtggatcacatgaagctgggagttcagagacgagcctgaccaacatggagaaacctcatctctactaaaaatacaaaattagctgggcatggtggtgcatgcctgtaatcccagctactcaggaggctgaggcttgaacctgggaggtggaggatgcagtgagctaagatcacgcaattgcactccagcctgggcaacaagagcgaaactccatctcaaaaaaaaaattaaccagaggtggtggtgcatgcctgtactcccagctgctcaggagtctggagtggggagatcaattgatctccttcaacttgggaggttgaagctacggtgaactgtgtttgcactactgcactccagcttggggaacagagtgagaccgtgtctcaaaaaaattataaaattaaagaaaaaaagatcaacaagcacttagtacaaacttatgttacagcatttagcaaatatcatgatcgtttctgaaatctctgttgatcattgtgttcatcattttgttcattttatcctcagcttttaatacaattctagatatgtggtagtacctcaataaatgttatcacattcttagccttatattacagtcatttcataagtttctttaatccttataattaaaatttaatttgctgtataaaatttcatttattaataaatatttattaagcatttactgttctagatcctggcatatcagagaacagactgtccgtataatgtaacatacttgttttttattgttggtaattcagattgtttctggtttttagctattagaaataattatatattgggacagtcacttttccttccgttgctataatgaattcccaaaaatggaacaaatggattaataggtatgaatatttttttaacagtcctaaattgttttccataaaagttatgctatgagtatgcaatttcagtaagaccctaatctgccagaaatattttcttttttttaatgccttaatttaatatgttttttttcgtttgtttttttttttgagacagagtctcactttgtcactcaggctggtatgcagtgatctcggctcactgcaacctccacctccygggttcaagcgattcttctgcctcagcttcccaagtagctgggactacaggtgcacaccaccacgcccagctaatttttgtatttttagtagagacagggtttcactatgttggccaggctggtctcgaactcctgacctcaggtgatctgcccgccttggcctcccaaagtgctggatttgttctttttctaaaataatgttacagctgggtgcagtggctcacacctgtaatcccaacactttgagaggctgannnnnnnnnnnnnnnnnnnnaggctgaggcgggtggatcacttgaggtcagagtttgaggccagcctgaccaacatggtgaaaccctgtctctactaaaaatacaaaaattagccaggcatatttgcacatgcctgtaatcccagctacttgggaggctgaggcagaagaatcacttgagccctggaggcagaggttgcaatgagccgagactgctccattgcactccagcctgggcaacaagaatgaaactctgtctcaaaaaaataaataaagtaaaataaaataaaataatgttacatctaaagccctgctcaattattctccctttctgccttcagaagtaaccactatcctaaatatgattatgtatctctccttgcatgtttggataccttttcttttttttcttcctgtggaccctgctcagacagaaatggatactttttctattatgtacaaatctataaataagatatagccttgttttatatgctttcaaattttacataatagcttcataatatatgtccctttacaatttgttattcaaaattatgttttctgaaatttttcaggtataattgaggtataatttacatacaagaaaattcactcatattatgtgcatagttggataaattttggtaattgttatacagccatataaccaccaccacaattgatgtatagaacattttcatcaccctaaaaagttgtctgtgttctctgtggttttattttgtttttttgtctctggtcctttgtagttgatccccttctgtgaccctctcttaggcaaccactgatttactttgtcattgttttggcttttctataattgtatataaattcaattttatatacatataattttatataatggaattctgcagaatataatatactattttggtttttatttctttattttacttccttcacttagcatagtgtttgtgagattgatccatgttattgcatatgttaatatttcattcctttttttttttttttgagacggagtcttgctctatcacccaggctggagtgcagtggcatgatctcggctcactgcaacctccatctcccaggttcaagtgattctcctgcctcagcctcccaagtagtggggactacaggcatgttccaccatgcccagctaatttttttgtatttttagtagagacggggggtttcaccatgttagccaggatggtctcggtctcctgacctcatgatccacccaccctggcctcccaaagtgctgggattacaggcatgagccaccacactcagcccctttttattgctaagtagtgttccatagtatggatatgccataatttatttataattttaccatttgatgcaaagataaatagctgggaattaaatgtaaacagcttttgcacagcaaaaggaatagtcagcagagtaaacagataacccacagaatgggagaaaatcttcacaatctatacatctgacaaaggactaatatccagaatctagaacaaactcaaacaaattagcaagaaaaaagcaaacagtcccatcaaacagtgggctaaggacatgaatagacaattctcaaaagaagatatacaaatggccaacaaacatgaaaaaatgctcaacatcatttgtgattacggaaatgcaaagcaaaaccacaatgcgataccacctgactcctgcaagaatggccataataaaaaaaataaaaaaataatagatgttggtgtggatgtggtgaacagggaacacttctacactgctggtgggaatgtaaactagtacaaccactattgaaaacagtgtggaaattctttaaataactaaaagtagaagtaccatttgatccagcaatcccactactgggtgtctacccagagaaaaaagtcattatacgaaaaagatacttgtacacacatgtttatagcagcacaatttgcaattgcaaaaatgtggaaccaatgcaaatgcccatcaatcaacgagtggatacagaaactgtggtatatgtatacaatggaatactactcagccataaaaaggaatgaattaatggcattcacagcaacctggatgggattggagattattcttctaagtgaagtaactcaggaatggaaaggcaaacatcatacgttctcactcataagtaggagctaaattatgaggatgcaaatgcataagaatgacataatggactttggggactcagggggaaagggtgggaaggaggtgaggggtaaaagactaaaaatcgggttcagtgtatactgcttggttgatggttgcaccaaaatctcacaaatgaccactaaagaacttacttatgtaaccaaataccacctgttccccaaaaacctatggaaatttttaaaaaatttaaaaataattttatcatttgatggacatttgggttccaattttggactgctgcagacatttgcatacaaacctctgtgtagacatatgtttttatttttcttgggtaaatgcctacgagtgaaattgctgggtcatatagcaaatacatgtttagctttataagatactaccatactgtttgccaaagggtctgaactaacatgtttgagatttatgtctattaatacaagtagatatttttcattttagctgttttctataaagcattgattttcccgttctccactttttttactattacaagtaatactgcaaagggcatatttataaattgtttccttgtgcacatgtagaagagattctctgtagatcaacaattggaattgctgagttctggggcatactcatcttcagctttaatagctattacacattactttataaaatggttgggcatttaactttttaagctgctccttccaaattacttcagacttatattggtcttttctatatactttttttttgcaagtagatatctggttctttttgtatcagaatgtttctcaaaattgttcatactgttattatagatctttgttttcatttgactttattttctttatttttgcataggagattcatatgggacattgtgtaaatctgactgatggggctgtcgaagctgtccttacttactgtcctcaaatacgtatattactcttccatggatgccccttgataacaggttagtgcaatagattgcttgggttcaaattctggcttcatcttttactgtgtgaccttgagtacattacttaacccatttcattattcagtttcctcatctgtaaaacaggcataatgagagtacctacctcatagacttagtcatgattatctgacaattctttattttattttattttatttwaattttttgggagacggagtcttgctctgtcacccaagctggagtgcaatggtgcaatctcagctcactgcaacctccacctcctgggttaaagcaattctcctgcctcagcctcctgagtagctgggactacaggtgcacgccaccatgccaggctaattttttttgtatttttagcagagacgggatttccccgtgttgcccaggctggtctctaactcctgagctcaggcaatccgcctgccttggcctcccaaagtgctaggattacagacgttagctgccgcgcccggcctctgacaattccttatgtggtggccttgcacatagtaagagctcaataaatgttagtcatgataacgataaatgaaggtggtaatggtggccagtgctcaataaatgttacctatgaagaagattatgatggcagcagtggttgtgttcatgatattgaacatgatgctttatgtaaacaataagaaaatttcaagtttataatattacatctatcaaatacactaaatgacttgttaactattatcaaactgtagacattaggatcagaatagccgggcgtggtggctcatgcctataatcccattactttgggaggccaaggcgggtggatcacctgaggttgggagttcgagaccagcctgaccaacatgaagataccccatctctactaaaattacaaaattagccaggtgtggtggtgcgcacctgtaatcccagctactcgggagattgaggacggagaatcacttgaactcgggaggtggaggttgcagtgagctgagatcacgccattgcattccagcctgggcaacaagagcgaaactccgtctcaaacaaacaaacaaaaagtcagaaaaatttggactcttaggctaatgtggctcttcactggaggagaacaaaacagcagtagcccattttgcctgtataagagccatggtatatatcctcctaccctagaaaccatggcaccctttcatattacccctataataggtccacaccgtaayataaactggatctaacttgtaaatcagtagttatgcccagtccttccagctcatttttcttattacagtctaaataattattccaattattcttttttttttttttgrgacagaatctcgctctgtcacccgccgaggctggagtgcagtggtgcaatcttggctcactgcaacctctgccttccaggttcaagtgattctcctgcctcagcctcccaagtagctgggactacaggcgcatgccaccacatccaactaatttttgtatttttagtagagacggggtatcaccatactggtcaggccaggctcctgacctcatgatccacccaccccagcctcccaaagtgctgggatcacaggcgtgagccaccatgcccagccagtctaaacaattattctgtaggttaagctattatcctggaagtccctttgacaacttctcttttatttttaggaagtccctttgacarcttctcttttttatttttaggttgccagccttaaccaaggctgtaaccatagattgtatctgggtatcagtgacatctgtagtgaagattagatctttatgcaaagacatttcttaagaaactagagccagtaaggacactggtggccgggtgcagtggtttatgcctgtaatcccagcactgtgggaggctaaggtgggtggatcacttaagcctgggaggtcgaagctgcagtgagccatgatcaccccactgcaccccagtctgggtaacagagtgagaccctgtgtcaaaaaaagaaaaagaaaaaagaaaaaaagaaactgttaactggggttagctgcacagaaagttgtgaaggaacaagagtaggaaaaaaaatgtcattgtatacccttttgtatcttttgaattttatatcatgtggattatttttaaactattaaaaattaattggttggacgtggtggctgtcagcacacagatgatccctgacttaaaatgatcaatttacagtttttcgactttacaatggtgcaaaagccatatgcattcagtagaagccatacttcaagaacctgtgcaagcatttttttcactttcagtataatattcaatagattacatgagacagtcaacactttattaaaaaataggctttgtgtcggaaaattttgcccatctgtaggctaatttaagtgttctgagcatgtaggctaggctaagctatgttgttcagtaagttaggtatattgaacacattttcgactttgtgtattttcgacttatgagtttgtcagggtgtaaccccatcataaattgagaagcatctgtagagagaagcaataaataccaattttcttttttctttttttgaggcagaatctcactctgtcacccaggctggagtgcagaggcatgatcttggctcactgcaacctccacctcctgggttcaagtgcttctcctgcctcagcctcccaagtagctgggattacaggcttgcaccaccctacccagctaatttttgtattttagtagagacagggtttcaccatgttggccaggctggtcttgaactcctgacctcaggtgatccacctggctcagtctcccaaagtgctgggattacaggcatgaatcaccatgcctggcctaaataccagttttcaagtctggaaaatatactggagtggttaatcagattttcaaaccaaggagtcttttgagataaattatgtcattatggagatcactagtaaccaaagatatgttaacagatcatggatttaagataaatgcctagttgatgtgatttcagacaccaggaaagcttaatgacactaaatgattaatgagtgcaatgagcttaatcacactaaatgattgcaatgagctgagatcacgtcattgcactccagcttgggcaacaagagtgaaactccgtttccaaaaaaaaaaaaataataacaaatgcggttgagcattccttttttctttctttctttctttttttttttttttttgataatgagtcttgctctgtcgcccaggctggagtgcagtggtgcaatcttgactcactgcaacctccgcctcccaggttcaagtgattctcctgcctcagcctcccaagtagctgggattacagacgcccgccaccaggtctggctaatttttgtatttttagtagaaatggtgtttcaccatgttggccaggctgttgtcgaactcctgacctcaggtgatctgcccgccttggmctcccaaagttctgggattacaagcgtgagctaccacgcccagctgtttgagcgttctatagtggaaaaaatgtgaaagtcatggtattaactaaattttcatttaagagtgtgggaagaatgatccttcaatggacagctttggagggaccaagggagacaaaagtagaattgctgttaatgttgaaccttaagagccatctttgttcaacatacaaattaaaataccattataggccaggcgaagtggctcacgcctgtaatcccaacactttgggaggctgaggtgggcagaccacttgaggtcaggagttcaagaccaacctggccaacatggtgaaaccctgtgtctactaaaaatacaaaaattagttgagtgtggggctgggtgcctgtaatcccagctacttgggaggctgaggcaggagaatagcttgaacctggaaggcagaggttacagtgagccaagatctcctcactgcactcmagcctgggcaagagtgggcaggactctatctcaaaaaaaaaaaaaaaacaattatggaaaacaaaatttataaaaatctaaaagatatgtgatataaatgtaactcacttaagaagcatcttagattttgtattccccgtatgtttcagagcaattctattggttttaccttcgtatttttatgttggtgatgagaaaacacttaaccatttgtaggtttcagtaattgaaataatactttctggtagtatttttcaaatagaccccaggacccatttacattcttaaaaattattgaggatcccaggccgggcgcggtggctcacgccggtaatcccagcactttgcgaggccaaggcaggtggatcacaaggtcaggagatcgagatcatcctggctaacayggtgaaaccctgtccgtactaaaaatacaaaaaaattagccgggcatggtggcgggcgcctgtagtcccagctattcaggaggctgaggcaggagaatggcatgaacttgggaggccgagcttgcagtgagccaagatcgcacaacggcactccagcctgggcaatagagtgagactccatctcaaaaaaaaaaaaaaaatcactgaggatccccaaagagtttttgtttatgtatatttgttaaattaaaatttctattaaaacagataaattttaatagacattcattttttaaaaatcgtaaatctattacctagaaaagagatatattttcattcagatcatcacttttcagatcattgtggatactcttctttgataccccaaaactcagcaagtggtaatttcttatgggttgttgcaatgtggaacttgaaaacatatcaatgaactttgcgtacattttgttatgatgcacttttcatacatttgtgttatgatgcactagtctgtcttgaattttgagttgatctttaccaatgcatgattttgtaacatcatgcattggcagttcggaaaatattggttctctgagttatatagatcttttaaatattgacacattttattatccaaaacaaaaatcagttgttaayataataactgatgtcattagaaaggtcctggatagctttcaagatcacagtggcagctacgaggcttccaaaattcacttgaaagctaaagctttatcactgacaacaaattctgtcatttgttttctttgaaatgacagcctcatttcttctattttcatgaaatagtctgccaagtactcaaataagaataaccttacactgtagtcattgtattagtccgttttcacactgctgatacagacatacccaagactgggtaacttataaagaaaaagaggtttaatggactcacagttccacgtggctggggaagcctcacaatcatggctgaaggcgaaaggcacgtcttacagggtggcaggcaagagagaatgagagccaagagaaggggtttccccttttaaaaccatcagatctcatgagacttatttactatcataagaacagcacaggaaagacttgcccccatgattcaattacctcccaccgggtccctctcacgacacatgggaattgtgggagctacaattcaagatgagatttgggtggygacacagtcaaaccatatcaatcattcttttaaaaagtaaaaatggtgttccatgaraaaagtaactagttcagttcacaaccctgaaagggtctcagactacagaatatgcagactacactttgggaaccactgctttatggtaaagaaaaattatcagtcaacttcaacatttgcagcaagaatagcatatcattttctggccaggtgyggtagctcacgcctgtagtcctgcactttgggaggccaaggcaggcagatcacttgagattaggagtttgagaccagcctggccaatatggtgaaaccccctctctactaaaaatacaaaaattagctgggcatggtggcgcacgcctgtaatcccagctactctgatggctgacgcatgaggatcacttgagcctggggggcagaggttgcaattagccaagattgtgccactgcactccagcctgagtgacaaggtgagacactgtctcaaaaaaaaaaaaaaaaagaatagcatacccctttcaaatcacttcttatatttttgtgtggctgccagaagtagtggaagtagacattgaaatggcaggagttcaaaatatttggaataaaaatatttttgatctggaagatcacagttggtaaatgctggactaggtgttaccgttacatgatctaaaaatgacctttggggccctgtgttgtttacttcttcacagcaaccaggactgttagctcaaaagcccatcatcaccaaatcaaatgtttacacatccaattgtttaagtatagcctaaataaccaaattattagccatctatctagagcccacctgctttacataccctgcaaactacactcaacgtctactatccatagataaaaaccccaggctataaaagaccccaaatcactgctgccctttggagctctgtaacccagagacacccccccacccgccccgccgatcttgctgctaaacaacgtcatgacacatacaccctctctctagtcctccaggaattctcttaccctcccccttctgagtagtggccgccctacactgtcgctgcctttggaaggtctcatgctgtgagggacttcccggcatacaaacctgtcaaagcgctgtccaaagagagcttgttgtgtcccactgccaccttgtggtcacatctttttctttgttctgccctgaaatccttcagattcactgcagttacatggtgtgccataacataaaacaaaaagtgtttatatgtccaaaaagtttgtgaagggcaacatgccactattatgaatgttaatttgtcaaaggctctgagaaatactatagctaagaaactgtttaacttcgtttgtccaagcatttccaaatttctagcacagaacacttttttgattaccctagccaactccatcacattttaaaatgttatttttctgatccctgatttcacagaataggaaagtgagatattgaaatgttatttgtgtcagggtgcggtggctcatgcctgtaatcccagcactttgggaggccaaggtgggtggatcgcttgaatgcaggagtttgacaccagcctgggcaacatagagaaaccctgcttctataaaaaattgttttaattagctgggcatggtggtgcacacctatagtcccagctactcgggaggctgaggtgggaggatcgcttgaggccccaggggtttgaaatcagcctgcacaacattaactgagacttgctgtctaataaaataataatagtgctaagactaaaactaaaatcttaagatacagtaaaacgaacgctgatcccatccacgccatctctccagaacatcgaataaatcacttaactcttatggatctcgactttgccttgtgcataatggccaattatcataacattgagagatctaatattaataataatgcaagaggccgggcatggtggctcacgcctgtaatcccagaactttgggaggccgaggcaggtggatcacctgaggtcaggactatgagaccagcctgaccaacatggtgaaaccctgtctctactaaaaatacaaaaattagccaggcatgatgatgtatgcctgtaattccagctactcaggaggctaaggcaggagaattgcttgaacgcaggaggcagaggttgcagtgagccaaggtcatgccactatactccagcctgagcaacaagagcgaaacttcgtctcaaaaaaaataaataaaaataataatgcaagagttcatacaatatattctaccttgagtcatcacatcaaaaaaaataaattttttaaatagttcatataaaatggcttttattaataaactaaagagaaaaaagctgaagaaattttaactacccagatcacttctactcttcccacttaaccatcagtacccctaaatcttctataatgatatatttttgctaacatcattgaatggaagtaaagtgggctaacatgttcaccttatatttgatttttaatttcttctttttccaaggaagataaatgctggttgtgtttgtgggggttttttgtttgatacatggaaggcctttcttctttcgtgacaccttatataacatgattcctcttatatattcatatggttgctcacatatgagtatttaagaccataaaatttatattatatagaaagtatttactatacttgcatatgcatgtgcaattataatattgttaccctcaaagcaacctgactcccagattagcactgctcactgtaatttcccatcagatctcctgaattaacctattttctcgactatgtttctaagtatttataaaatttcttaaccttagttagaataaaacataacttcacattatgaattaggacttgaaactgttagaagtactctgagttggtttctgcagaagagataaaaactaagctgctattagaaatatgaaaattatggttttggctgtgtatggtggctcacgcctgtaatcccagccctgtgggggggccgaggcaggcggatcacctgaggtcaggagtttgagaccagcttggccaacatggtgaaaccccgtctctactaaaaatacagaaatgagtcgggcgtggtgacgggtgcctataatcccaggtatttgggaggctgagacaggagaattgcttgaacccgggaggcggaggttgcagtgagccaagatcacaccactacactccagcctgggcaacaaagagcaaaactccatctcaaaagaaaagaaaaaaaaagaaaatgagttgctacaagagctttgaaaannnnnnnnnnnnnnnnnnnnattgggacagtcacttttccttccgttgctataatgaattcccaaaaatggaacaaatggattaataggtatgaatatttttttaacagtcctaaattgttttccataaaagttatgctatgagtatgcaatttcagtaagaccctaatctgccagaaatattttcttttttttaatgccttaatttaatatgttttttttcgtttgttttttttttttgagacagagtctcactttgtcactcaggctggtatgcagtgatctcggctcactgcaacctccacctcccgggttcaagcgattctcctgtctcagcctcctgagttgggatcacaagcgggtgccaccacacccggctaattttttgtatttttagtagagacagggtttcaccattttggccagcctagtctcgaactcctgacctcaggtgatctgcccacctcagcctcccaaagtactgagattacaggtgtgagccaccaagcctgtcctaaaacttactaaagcattttaattcaattaggtcttcaatgattatcagtaagttcacctcacatacctttgctaatctcctacagcagacatgcattgccgtttctcatagttatctaagcatgtttgacagtattcaaagacatggaggattttagaagggcaataaagcagttagagagtccttatgttttaccctgagaggcaggagaatccaacaggaaatctgccactttcaatttagtcgacttgaattttaatcttatctgaggatttgttttaacctgatttaaaggcaagttcttttttttgaaatggagtctcactctgttgcccaggctggagtgcagtggcaccatctcagtttactgcaacctccgcctcccaggttcaagcgattctcctgcctcagcctcctgaatagctgggattaaaggtgtgtgccaccatgcctggctaatttttttgtatttttttagtagagatagggtttcaccatgttgaccaggctggtcttgaactcctgacctcaggtgagccacctgcctcggcctcccaaagtgctgggattacaggtgtgagccaccacacccagccagcaagttctttacttagattctggataatgtagatgtcaggatttaccacaaagagccaaaacagtattttaaatttttatttatttatttatttataaatagagacggggtttcgccatgttggtcagactgtctcgaactcttgggctcaagagatccacccacgttggcctctcaaagtgctgggattacaggcgtgagctgccatgcccagccaaaacagtattttaagacccaagtggtttgcttcagggtttccctttaattaaagctggttccttgcttaaaggagaactcatttttttatttcatatttgtcttartcctgtattattctgtttcctcattattcattcattcattactaatcctacatgacatgtttatttttgccagatcactgtaatgaaacattaggactttgatcattatttgtaaaaatgtgttcagccatacttttttcactgtgtgttctctaaaaatgtctaaattacatttcctttgaacatttgaaaaaaatactttgttaaaagtttgtattctttggccgggcacggtggtggctcacgcctgtaatcccagcactttgggaggccaaggtgggcggatcataaggtcaggagttcgagaccagcctggccaatatggtgaaaccccatctctactaaaaatacaaaaattagccgggtgtggtggtgggcacctgtagtcccagctactcgggagactgaggcaggagagtcacttgaacccaggagacggaggttgcagtgagctgagatgacaccattgcactccagcctaggcgacagagtgagactctgtctcaacataaaaaaaaaaaaaagtttgtatttcccatagtttcttcttcttcttggtgttccaagtgctcctgccatgaatctttcaaaaaatgctctccatctatattgtcatagatttttacagaggtggtcaacagttccttagaggttgggaggcagaaaggtatacctttcctcacccatcataagggtcaaggctgacagtcctatacgaaaagggaggttaataagagaaaggcgtaacaggtttatttggtcaaagatttataagagacttcagaaatgaagagccaaacacccagggaaaactgcttgtttttatgcttatgaagcatggacagccatgtagagatgtgactggaaaagagaatgaactaatagtaagagtggagaaacccagcaaggcctgttcagattcttcttggcctttctgtgtgaccttcctttttccagggtatagggcggggccactctggaatgagggccttatgatctcctatctgacaagggtacatcagagaatttctttatggccagctcctaggcagaaaggctggggaagtttagagtaatatttgtaggttttatgtcttcctttggggaaaagggttctagtttctgtgacccaccttggggaagaggaatcctggtttctgtgactcacttgcggagaatgaagggtaagagataggagggcaggagaaggtcagagaccttggttctgaggtggattctgaggccttccaatgtcctttagttcaaagtactcagcatgccaaagtgccatactttggggaatccttttctgagccccaacaaggtcatctatacaactccctcattttaaagataagggaacagagatacaattgatttaagtggcttgccccacatcttagaaatagttgatagaactggaagtaaaacctaagtcatctgaaccacaatctataattccttcctgagcctttaatgtaaagtggcttaactgttactaggatagagaaacaaataggaaggtgacatcaagcatcagtcgggtgattagcataaatgacccgttagccctttttcagtctggagagtatgtgattctttttctttttcttttttttgagacggagtctcgctcagtcacccaggctggagtgcagtggcgcgatctcggctcactgcaagctccgcctcccaggttcacgccattctcctgcctcagcctcccgagtagttgggactacaggtgcacgccactacgcccagctaatttttttgtattttttagtagaggcggggtttcaccatgttagccaggatagtctcgatctcctgacctcgtgatccgcccgtctcgtcctcccaaagtgctgggattacaggtgtgagccgccgcgcccggccaagagagtatgtgtttctataaaatgttctgccaagagattatgaaatacttagcgaccccatagtttttccctgtagcataataaaggcattgaatattcttatttaaacccacagtcctaaatactctatcttcatgggaagaagctgcctaaggagactgtaatataacactgccatctggcatcaaaaatttttaattacataaaaatgttacatgcttactattggagggaaaagcatcttcctataatgtgcaatagtgaattcaaaacagaatagtgacaaatgtagacagaagacaaattttatatatgtttgataacatattcacaacttggaaaaatgccaaaatgattgtagacacaccagctaaaatgaaattgggaagtgttggccaggcgcggtggctcacacctgtaattgcagcactttgggaggccaaggcgggcagatttcgaggtcaggagatcgagaccatcctggctaacatggtgaaaccccatcttttactccattacagaaaaattagctgggggggccaaattctggctaatttttgcatttttagtagagacggggtttcgccatgttgcccaggctagtctcaaactcctgaactcaagcgatccacctgccttggcctcccaaagtgctgagattacaggtgtgagccaccttaccaggccccatcttattgatttctgcaaaaaataaaaagccagcttgtattttgatatgaatttcattgaatctataggtaatttgggaaatattgctatcttaataatattaagccttctggtttggatttctttatttaggtctttaatttctttcaataaagtcttatagttttcagagtataagtttttcactttcatttgatttattcctaagtattctattctttttgatggtaacataaatggagttattttctagttcatttttggattattcattgttgatgtatagaaatacatttgatttttatatattgttcttgtaccttgctgaactcatttattctatttttttagtgaattccttgggatattgtatacacagtataacatctacaaatagatagttttacttcttccttctaacctgaatgccttttctttttcttgcctaatttccatggctggaacctctggtacatgccatttctatgttggatagaaatggcaagagtggacatcctggcgggtaacggtggctcacgcctgtaaccccagcactttgggaggccaaggcaggtggatcaggtctcaaactgctgaggtcaggagttcaagaccagcctggccagcatggttaaaccccgtctccactaaaaatacaaaaaattagctgggcgtggttgcgggcgcctgtaatcccagctactcgggaggctgaggcaggagaatcacttgagcctggaagccagggttgcagtgagccaagatcacatcattgaactccagcctgggcaaagggtgagactctgtctcaaaaaaaaaaaaaagtgtggatatccttgtcttgatcctagggagaaaacatttaatttttcactattagctataggtttttcttgtttgtttttgagacagggtcttgctctgttgctcaggctggagtgcagtggtgtgaacacactcactgcaacctctgcctcccaggctcaattggatcctcctacctcagcctcccaagtaattgggactacaggcatgtgccaccacactcagctaatttttaaatttctttcgcagagacagggtctcactatatttcccaggctggtcttgaactcctgggctcaagtgatcctcccaccttggcctcccaaaatgctgggattacagacatgagccactgcatcctgccatctatgggtttttcatagacgccctttatcaggttgaggaagttatcttctattcctagttggttgaatgagcattggtttttgtcaactggtgtttctttttttttttttttgacactgggtcttgctgtgttgcccaggctggagtacagtggcaccatctcagctcactgcaatctctgcctcctggattcaagcgattcccctgcctcggtctcctgagtagctgggattacaagcacccaccaccatgcatggctaatttttttttttgtatttttagtagagacggggttttcccatcttagccaggctggtcttgaactcttgacctcaggtgatccgccctcagcctcccaaagtgctggaattacaggcatgagccaccgtacccagccaattggtgtttctttgtctattgagatgatcatgtggttttagttctttgttctattagaatggtgtaggtggtaagctgaataatgctctcacccacccaatgatatccacgttctaatgcccaaaatgtgagtatgttatgttacataaggttgccaatggaattaaagttgctaatcagttgatttttaagtagggagatcattctgtattatctatgtaggcccaaaataatcataagggtccttaaaagtagaaggagagaggaccatagagatggcagcttgagaaggactgtgctcaatgatgcccacttttttttttttttgagatggagtctcactctgtcacccaggcaagagtacgatggcatggtcttggcttactgcaatctccgcctccctggttcaagcaattctcccacctcagcctcccaggtagctgggactacaggtgcatgccacagtgctcggctaatttttgtatttttagtagagatgggggtttcactatgttggccaggctggtctcaaactcctgacctcatgatctgcccgcctcagcctcccaaagtgctgggattgcaggcgtgagccaccgcacccagcccaatgttgttcactttaaataagcaggaaggaatgcaaggaatgtggtagtttctagaagctagaaaagtaaaggaagtagattcccctgtagagcctccaaaaaaaaaaaaagataagactttcctctaaaaagtaacgcagacctgcccacacctgattttagcccagtgagacccattttggaattctgaccttcaaaactgtacaataacaaatttgttgctttaagccactaaatttgtggtaatttgttacagcagcaataggacattaacacagtatattatactaattgattttcagatgttaaagtaaccttgcattcctatgataaatctcagttggtcatggtatgtaatcctttcttctagtggctggatttggtgtgctggtgttttgttgagcattttttagtctacattaataaaagatccttgtctgcagttttctttttcatgtgatgtctttgtctggctttggtatcagggtaacactggcctcacagaaagagttggaaagtgtttcccccttcttctatagccacccagctttgtcatggttgccatttaaatggtatgtctttgtccattcttttactttcaacataatttgaaccyatctttgattgagatttcctctacaataaccaataatatttttatgaccatgaataaaactgcatttatcttactagctgcttttttaaaaaattgtaaacctttgttttcccaatgataataacttttcatttctatacactctctggttctcttgctggcaataaaccttggtatttttgcttaattttgttaaacttaaaataaaattttgtcactgtatatgttgggcccatctttttttttttttctactggtctgtgaaatctgtctaggaaccaccaaattacaggatttccaagactaggttagagatatgttgtacataaaacataggttgtatctatggaaacaagtttattaaacttatgagtaatatttaaactaacaaaattttatcagtatttttgctttaattcagatttttaaaagacatcctaaaactaggatggaaaccatatcaaaatcacgactgtacattgtgaaaaactgaaaacatctaaatgtccaataatatagattggttaaattacagtgtatttatataatggttatctatttaaaatcatgctttatagtagtattatacagacatggaaaaatgttcagctacaggtcaacttgtcacgttcggtgactactacctcctytaaccctttgggtgtgttgcagcttcccaaggtggtttaccgtacctattggctttctttaatcctacttttttggtaaatattcccttcattaaatgctgttcagtcaccccactttagtgaatcatctatttccggctaagatcctgaaaaaagttattaaccattaacacaggttaatggtgaaattagaccattactctggttggtggaattatgatgaaattacagagaaaacaacaaatgcctgttttttttttttaaacaagtaataccatgataggtgcactacacctaataatagtgagggctaccattaattaattattagtgagttagttgtatattgtgctttatagatcacctcctttaatcctttaaataactgtataataattaacatcacctccagttagacatgaggaaacattaaacattttttattgtcaattaatatattgtcattrttttcttttatagatcattcccgagaagtgttggagcaattagtaggcccaaacaaactaaagcaagtgacatggactgtttattgatgcttttttgaagatgatcaatgctaggaaagcttatcaaaactactttcccaggaaaccatctatagagatttgcattctacttaatgttaacactatttttaattattttattgtsttaagttataactctcagagaattagctaagtcttggtatatacatggtttgtgctttactcttaaacatctttaaagtgctattattctatatctgttggatgagtcattatttttgaaatgataatcctagcatgaactctgatctrtggtgttggattctgtttcttaaataactttaaaattaactgttttcccttgagatttccttctcctatgtaggtatttgagctattgttctaagtttacctgtaagtataaaccttgggagaatctaagtaaacatatttctaaaagcatagttaccttcctattttctggctcttaccttcttggagtatttaaatgcccatttgccaaaagcagacctgaacatcaagcctgttaattcttcaaagaatttaggtatttgtttcaccgaaatgaagtgacttattagccattcagcgtattagtattacagaggctcttgcccagccacatccattcattgatttttatggctactcttcccagttacattttatgcatctgtaagctttccttccttagcaaaattgcattcaaaaatgkgtaaaaatgagtaaatacagaatatcactacagagacttgtatcctcaggtttattgatttcacattgtgaaataaacagcaaaggtcttagttttcaagtgraaactttttggtaatcacaaaattacctgacacataccacgcttaaaccaacccccaaatttagcatattcattttgccatgagccagtcttgagattttcttaaaagatttcttattttgcctctgatgtagtgaaaaacggggtaagtatgctaactttcttgtatatgttggggggtacttattcaaytccatttcttgtccttacaagatttataaatgtggtatgtttatagtgtggatatatatgttgccactgcaaaggtggtgcatatgtatatatgtgcaaaatgggtaaggcctgttctaactatgaaatttttctaaagacaaattcaataaaatttaatactgaatatttaaccaagtcaatcacattttcccctttttgcagaaactagtttcgacatctaaattgtgagcttctttgggtctatgaaggatttatcttcctaaaacagtttgcagtttgatatttctccttttttatgttgctagctgtattaactatttctcaccactctgtttaaaatatctgtaccccatccagtacccagtattccctattacccttacttctttttctccttactacctatcaccatctgatgcctgttttcatttgttcattatgtctccctactctagaatacaaatttcataaggacaaagtatttatctttttttttcattgctgtatccccatatccccagtgcctagaacagtgcctggtatataataagcactcaaatattcattgaataagtaaatatggaaagaaataaaggaggaaagaaagaaatacccagtaatacccagcctggccaatgtagcaagactccatgtctacaaaaaatacaaaataaaaaaactagccaggcatcatggtggtgcatgcctacagtcctagctactaaggaggctgaagtgggaggattacctgagcctagaaagtcgaggctgcagtgagcacggtcgcattgctgaactccagcctggatgagagagcaagacctgtctaaaaacaaacaaaacaaaacacccaacaacaacaacaaaaatttccagtctctagtctgatttatattttctaatataaagagattggaagtcatcattcccatcctcacaataagaaaaaagctcaataaactgaaaagtcaacaacacttagatccattagagaattaaggttaaagagagaatgcctcacaaattagaaacgcaaatacaaagaaccatagcttacagggagcagaagcctgttgctggagccagtaccaataggaacatttatgctgtaattcctgagttgctggaggctccatgtggatggacttaagaatcaaaagctccagcctggcacagtggctcacacgtgtaatcccagcacttggggaggctgaggcaggtggatcacctgaggtcaggagttcgagaccagcctggccaacatggcgaagccctgtctttactaaaaatacaaaaattagctgggcatggtggtgcatgcctgtaatcccagctgggtttggtggtgtatacctgtaatcccagctactcaggaggctgaggcaggagaatcactttaacccaggaggtggaggttgcagtgagccaagatcacgccattgcactccagcctgggcaataagagtgaaactctgcctcaaaaaaaaaaaaaaaagaatcaaaagctctaggaatctgtccataaacgttatctaaccaggtgtggcaaccctgcagtcactctgaacctattctgcttttgggagctgcccaattcacagattgttctttgctcaattaaactttgttaaattaaaacaaacaaactccagggggcccactcctaggggagacaccacactttcatagttttacctccaggatacctaccaggttctcagggtgaggatcagagaaaaatcccctcttctggtatgaggatagggaaagtaaccattttgaaatatgcccaagtgttcagttctccttaacaaaagccagttctcaagggaaactattttaccagagcctcgttgacctgggggaaaggaagcacccaactccagctgcctctagccttcctgtctcaccaaagtgacaaaagaaaagctgaaagcacttgtgaaggtcacagcaggggcacaggctgacttaactgactgagacttaatcacaggactatagaacataccttctcccataccttatcacatcagttaggctactgtataataacagggaattacaggtgaaaaaaactgcaagcttcagactctatataagaaggaatctctagggaaactcaaagataacagaggagacaatagccaggacactagaggaaaatttagcctgtaatatctactctacagcaaacagtagccctacccagattttaaaacctcatgctaccttagtttacttgtttatttatgcaatacatcatgtctagctatcaacaaaaaattacaaggcatgctaaaagacaaaaaaacagtctgaaaagaaaacaagcatcagaaccagactcagttatggcagacattttagaattaccagatcataaatttaaaataactgattaacatgcaaagggctctaatgcgaaaagcatacaacacgcaagaatgatgggtgacgtaagcagagatagaagctataagaaaaaatcaaaaggaagtgatagaagtaaaaaacatcgtcaggctggcgtggtggctcacacctgtaatcctagcactttgggaggccaaggcgggtggatcacctgaggtcaggagtttgagaccggcctggccaacatggcaaaaccccgtctctactaaaaatacaaaaattagccaggcatggtggtgcacacctaaaatcccagctactctggaggctgagacaggacaatcgcttgattgggggaggtggaggctacagtgagccgagacatgagtcactgcactccagcctggacgacagagctgagactccatctcaaaaaaaaaaaaaagcccagagttcaaggctgcagtgcccaatgattaagcctctgaatagccactgcattccagcctgggagcaaagtgagactgtctctaaaaaaagaaaaaatatatatatagtcttcttctgttttgttttgtttgtttaattcaaagttacatcacagttgtcctcaactacagaaacagatccagctacaatgtttaattcttctccattacttaaattaaatgctgccaccattgagtatggcattgtataatcatattccttcagcggttaaaatagaaaaaaaaatgcagatagagatgtgtataattggcatgcatagaaatacagaaccagttacatgacaaaagtaaacaaaactctaaaccttcatattttaaaaacaagattttccatttaacaagaattacattcattaaactggagagtatctcctatagagaaaacttttagagtcagatccaaacattactatattcatacttggaagcactttgacaactcaaggctgaaaaccccacactgtgcttgttgtcagtccactgttttcctgcctagtagactccaaaagtgaatattctaccactttgtgcaggtgatgctgaatgctgtgtccactgaactggggccgcccagggtcaccaatcagtactcgagttctataggtccagaagcacttcttcagccactgatgaagactatctgcaaggtcttcatcataaaacatatcgccaagaacaacaaggtcccacttatcttgttccaaattcaaaatgttttggattaaaataggaaaaggattcagtctgttcaattcacaatttagtgtaatagccattcctgcaacttaaaaaaaaaaaaagcacaaaatgaattggtatatgctaggctgttataattccatgttgattaaataatttagaagatctgctaacaatatatttttcttcctttttgatgaaagttgttttttaaagtagagaagtataaaggttatcccaatataagctataccacaatttccaaatacatgactggatatcctgaaaacaaacaattcaaaacacctagaaatgctgggacttttaggaatatttgctgatttcattaaccaaaagattttgtttttttactgtggacagggaaacgagacttgggcttgattgagcatggcaataaattagaactgagaccccttggctgggcgcagtggctcacgcctataatcccagtactttgggaggccgaggcgggtggatcacctgaggtcaggagttcaagaccagcctggccaacatggtcaaaccctgtctctaataaaaatacaaaaattagctgggcatggtggtgcatgcctgtaatcccagctactcgggaggctgaggcaggagaatcacttgaacccacgaggtggaggttgcagtgagccaagaccgtgccactgcactccagcctgggcaatagagtgagactctgtatcaaaaaaaaaaaaagaaaaaaaaagaactgagactcctttataaaataaaggttttcagccaggcgcggtggctcatgcctgtaatcctagcactttgggaggccaagacgggcagatcacgaggtcaggagattgagaccatcctgactaacacggtgaaaccccatctctactaaaaatgcaaaaaaaaaaaaattagccaggcatggtggcaggcacctatagtcccagctactcaggaggctgaggcaggagaatggtgtgaacccgggaggcggagcttgcagtgagctgagattgtgctactgcactccagcctgggtgacagagggagactctgtctcaaaataaataaataaataaaataaaataaaggttttcaaggactatattctcagtgaaagggtagaccagaagaaaatcagatcaaataaaaacttacctgtctcagcctgggttctaatggaataaaaataaccctcaaagacaggtcaatactcacttgggtttggggtcaaataaacactatttacatatttcaggaaattcctagcccataaattaacataagtgcttactctggatgtctggcagacacaaatcctcttgggaaaaatgcaccatctactcagacctcaggggattcctacagataatgtcccagtgcacagagattcacaatgtccaatcacaaaatacatataacgataagctaccacactgagcatgtgtacatatttatcccagagaaaaaaaaaagatgagccttaaatattttaaaatatgaatccttactagggtctatgtcattggccaagatccttgatgccccactcatcttagcagcaatagctgtagctccacatccactcccaagatctaatacagattttcctctgacaacatcaggattatccaaaagatacctaaattaaaaaggagaaacatgtctcagagagatgaggaaaaataaatgttgggaacaggccccccaaaatctggccataaactggccccaaaactggctataaacaaaatctctgcagcactgtgacatgttcatgatggccataacacccacgctggaaggctgtgggtttaccggaatgagggcaaggaacacctggcctgcccagggcagagaactgcttaaaggcgttcttaaaccacaaacaatagcatgggcgatctgtgccttaaggacatgctcctgctgcagataactaacccaacccatccctttatttcagcccatcccttcatttcccataagggatacttttagttaatctaatatctatagaaacaatgctaatgactggcttgctgttaataaacatgtgggtaaatctctgttcggggctctcaggtctgaaggctgtgagacgcctgatttcccacttcacacctctacatttctgtgtgtgtatctttaattcctctagtgtcactgggttagggtctccccagccgagctggtctcagcaaataagaggtatgcaaaaaaagaaaaaagaaaagaaaaggaaaagaaagaaaagagatgtctttaggttgactggacaaaagaaatagtgaaaagtagcagaacttggtccaaccttggcaagtttggtctgactagagtgacacaaaaagtccatctccagagctgggcagaggtggcagaagaaaggacctagtcatttggtctttctcttcagcaggtgtgaagcacagtaccacacaactgactgattatgctattcaagtcaatttttttcaaaaaaaagttgtaggctgggcacagtggctcctgcctgtaatcccagcactttgggaggctgagcaggtggatcacctgaggtcaggagttcgagaccagtctggc

SEQ ID NO: 7064 - DNA, 46148 bp, Homo sapiens
tgtcttttatgtaatagtttttttttttctttgagactgagtctcactctgtcacccaggctggagtgcagtggtgcaatcttggctcactgcaacctccacctaccatgttcaagtgtttctcgggcctcagtctcccaggtagctgggattacaggtgtgtgccacaatgcctggctgatttttgtatttttagtagagacagcgtttcaccatgttggccagggtggtctcatggaactcctgacctcaaatgatccacccaccttggcctcccaaagtgctggaattacaggcatgagcaaacgcgcctcttgggctgtcttttacgtaatgatttttgaagatttgtatatattctgataatttgttggatatacatattgtagatattttctcccatcctatgtcttaacttttcattttcttaataaagtattttaagtgaacagaagttctttattgtgttttcattatggttagctccctgtgtgtcctatttaagaaaatttttcttgccctaaggaagttatcatatcatgaagatattttcctacattttctttgaaattgacttttgtatacagtgtgaggtagaaatcaatattttttactgtattattcaattgacttgggtctatttattgaaaagactatacttaaccctataccattaatcataggactatattatatatataggtctgtttctggactgtatttgagaagcagttaattgttaaacttttctaattattttctcaagtaggatttattacatacttactatgaactaggcatcacattatgctaagcatttcaactgtatcatttcatttcaaatttcatcaaccctctgtgagataggaactattattatccccgtttatagatgtgaaaatcaaacaagttgcccaagttctcctagctagtacatagcagaatgcaggtctagttgactttaaagtatggttctttaccgtttcgcagagcagcctttgagggggaaaggaacgataacattttgggggttgatgggggagaagtgacggacaagagtgaggacctataaaaagatgaacaggtgaagaatgaagaggtagagtatgctaaaaacgatgtctgcaagcatcacacttttgcttggaagaggtattctaattgtttgtgtgttttgttgtagtgccaaatccccatttgaagccaacttatcatttccccaagacaatgtcatttttagtcaccccctccattttcatcaggggcacctatgttatttcagtgtcttcagctttggaggtacctttcacttctgtatcctttgtgccctatgcccaatgactcatatcttttaccacttatttcttcaactcactcttaaatgaaattttccgtttccattcccaccacttcctgtactctatctatattgcctcccctttaaaacaatagtgaacatttaagtgaacatttagtgaacatttaagtcttaccatgtgccaggcagtagcctaaacactttaaatgcaacgtttaattgattctcacaagaatactgtgaagtagttactgtcattattcccattttacagaagacgatgaaaatttgaagaacattaagtgatgctcaacgccacatagctggtaaatggcagagccaggatttatatataaatttgatttcagatatctaccagtccaaaccaccactgtattatgtacaatacttccctagctctaaactaatctctgcaccctagcatttaagaatgccccaaatctagctctaatctctctttctgatctttctttcactaatccttttcaaaaattcttctccagctcaagtgagctactcaaattcctctaaagaacctgtggatatttccacctctaatcctttaccgaaactcccttgccttgactgccccctcctctcctctcctctcctctcctctcctctcctctcaagagctacctttaagtcatagcttaagtcccacttcctctacaaagcctttcctgcctcttactaatccctctgtctcaatgtatctggtacctttcctccataaaaaaagtttctaattcttttaagtatcacaaaccaccatgggccttattgaaaggcaatatgtatggtggtcaatagcgtgagctttgggctaggtgctgtggctcacacctgtaatcccagcactttggaaggccgaggtgggagtatagcttgagctcagtagtgtgagaccagcctgagaaacatagtgagaccctgtatctacaaaaatcttttttcaaatagccaggtgtggtggcagcagcctatggaccagctactaagcaggctgaggtgggaagattgcttgagcctgggagttgaggctgcagtgagccatgactgtgccactgcactctagcctgggcaacagagagataacactctctctctacctatctctctctatatatacatatatgtgtgtgtgtatatatatatgtatatatttagtattagtactcacattgctataaagaactacctgggactgggtaatttgtaaagaaaagaggtttaattcactcgcagttctacaggctgcacaagaagcacggctggggaggcttcaggaaatttacaatcgtagtggaaggtgaagaggaagcagacatgtcttacatggcaggagtaggagaaagagagcaaagagggaggtgttacacacttttaaacaaccagatttcttgaaaattctatcacaagacagcactagggagatggtggtaaaccattagaaaccacccccatgatccaatcacctcccattaggccccacctctaacattggggattacaattcaacataagatttggctggggacacagagccaaaccatatcacacacacacacacatatatatggtgtgagctttgaagtcacttatatttgtgccccatttgcttactcatgactctggaagtgttatataatttttttaaaaaaatctgttttcttattgtaaaatagggataataatagtacccacttcatttgttcaataaatattctgagcaactatcatgtgtctggcactgtgctgagcactggggattccacactgaaaaagagaggtatgcttcctgccattgtggagcttgcatctcagtgagggaaacagggctaaattattactacgtatgtagctaagtgcaatggaaagtaatgtgcatattatcagtaatcctatctagtctgtgggagagatgctcatgaaaggcctttccttcacctaagttgagttttgaaggataaagaggagttagggaggcaaacagaaagggtttaagaccattccgggtagaggaaatggtaaatttgcagaggcatgcatgttgaagaaacaaagaaagcccagcgtggctccataacatcaaatgttatggaggttaagtgagacagcagatggttctggatatttatcggtatataacaaacaacctcaaagtcttagtggcttgaaacaattatacttattctgattattagtctgcaatctgggtgaggctcagtgaagttacttcatctctgctccactccatgtcagctaaagaagtagagtgacaaacccaggcagaagctctaacaccttttgcaacttagcatcagaagtgtcttagcattacttctgctatagtcactgacatgcccagattcaaagctgtggccataggtattagcttatgttagagaagtgtcagcatcatattataaaaagaacatggaaaatgcaatcttctcaaagacacacagtattagtagaatgcatattcagccaggcgcagtggctcacccctgtaatcccagcactttaggaggccaaggcgggatcacttgaggtcaggagttcgagaccagcctggccaacatggtgaaaccctgcctctactaaaaatacaaaaattagccaggcatggtggctcacacctgtagtcccagctactgggaaggctgaagcaggagaatggcttgaacccgggaggtggaggttgagctgagatggcaccactatacttcagcctgggtgatgaagtgagaccctgtctcaaaaaaaaaaaaagaaaagaaaagaaagaatgcacatttgttgggcgtggtggcttacgcctgtaagtccagcactttgggagaccaaggtgggtggatcacctgaggtcaggagttcgagaccagcctgaccaacatggtgaaaccccatctctagtaaaaaaatacaaaaattagccgggcgtattgtgcgcctctagtcccagctactcgggaggctgagacaggagaattgctcgaacccaggaggcgggggttggagtgagctgagatcacgccactacactccagcctgggtgacagagtgagactcggtcttgaataaaaaagaatgcacagtcatagtttatatcagaattattacttggtattatcaccaccatcatcacccaacttccctcatcctgaccacatacttaatatagtattttgttgctttgagttacatagcattggtgcacatttaaattttcatatccattgaaataacatattttataaattaggaacaacaggttcatgcatgtactagacacttggtatatgatagaatatattgttgtagttattccacacattgtctgtcttactagtcaaccttcaaggataaggagttgctgttacatacctgtaaccctgatgtctagggcagtgtcctgcccagagtaggcactgaataaatgtttgtgttttttattgttgttgagctataattgttaacttgagatttcctaagcaggtgggttttctatcctgtattatttctagttcagatcatgcaatctatgcctaatatatattttctatttactctttttcagtaactgctgtctcaaagtaaaaaatggaaatctttgcctgaatggactggtagcaacagatctgaaattcttagaaatgttggaaccagaagctacttcccacacaatccatgaagtgggggagagagagacagagagagagagagaaaagagagaaagagagagagagaaactgggtcttatagagagacagacacaagtactacccagttctcgaccctcaccaggtttgtggctttaggttctgtgcctctcttccttatgtgtaaaatgaggctaataacacagcagcacagggttgttggaagagtaaaatgaagcaacaaacaagaagatgctagggatggtagaaaaatgctaataaatgtcaaatatggatagaaaggaaattggatatgaggtataggtctgtttagttttattaacaataaaataattatatatttaatatatttaccaaaaaagaaactgcttgacaaaataattccatatactataacgtcaaattgtaaggcttcctattgctttcactttttttagtaaaagtttttattgaagtataatctgattgcattttggaataagttaatttacaataatttaatttatcttatagccttttaagatcacattcagtgcaatggataaagcagaatgtatctataatttattgtcagggttagagacttgaactgataaggatatcgttatctactgtttagggcaaaagatgtaaaatgactgtgcattaagtgccaaggttttctctaaaaagggcccactgtaaacgccagaagcgtgccagttcaattcaacaaatatttaattagcacttgtgatttccaaggcaccgttttgggtactgaggaggaagcaaaaaatgaatagctgctaatgccagcgagagacaagacatgaaccaaacaactagagtggaaagagtggggcgtcgtgatgtagaaaaggcaaagcacaggaagaacctagtggcgcttaaaataatccaacttttcctgccttttttcttcttctttttaagattctattttggatcccttttcgcatgtgccaggtcgcttgtcggcagagaatcctcaaccctgagaaatctctcctcctattctttctttcctcacaaattcgatgagctcttctgccatcagcactgcttttggaatggtatctattgtgtgggtggcgaaacgatggagagatatttttgttctaattatgagaactgttttactgggggaaggagggagaggctgatctgaagcgctgatgagctgctctgagaggatcctccgaggaggcgttactaaggttactagagagaggacggcaggtgataggcacggtaaaacaaaatatattttcaaatgagaggcgtgggctaagcagcaagcagtgccagcggtactagatgccggattccctagaggggaaaggaaggaggcccagggaaaaactgggagccgcgacttggcgaaagctggaagcctcttcgtccctttccgggccgtttctcccgctgcccttgtttcccggagctgttctggctgtagcacaaggtcggcgcactcgggggacggtgccatttagatgtaacacgtggccgtgtcggaccggaagtggtgcccagtcgggacccgtagggagaggcgggttgcgggcggcggcggcggcggcggcggyggtggtggttgtggcgaggctgtgcggcagggcgcacgggacctgtcctgcagcggctctctcaggccgtgggtcgtcgctgcagctgccgggaaagaaggaaacgacgactccgggggcgaacttggcacacagggaggaagggaaagggtgtgtgaggagggctgtgggtatatttggcatcagggagaaggacctcaaaacttgtttttcatatagtactagctgatcgtcgggtttttttttgttttggtttggtttttttttttttggatgacagattctggagacacctggcatctccgtttttgagtttctccccgctcttgtcagttgattcgtaggcctgaagtgagtgagagctttttagttcaaccagtgagttaagataggtatgggtcggatggagcggccagcgaataaagaaatgggagagtgggagcaagaataggaagtcgtgtcctggggcgagggaaaagatgatgatgatgatgtaacatttactgggtttcactgtacaagacaccgttaaaaccctttagatgaggcaactcttttaatctccattcgtatgaggtcagccatcttactagcctctttttataaatgaggacactgaggcttggagaggttaaggaacaggcccaaagaaagacaaatggaaagtgcagagccaagcagtgaaatctagtaggctgatcctagaatatatctctaaacacactacagctgtcccccatcaagatgtaaagaacgtgaggacataggacaaagagtgagaggacaatatggcttgaacagatgtgrtaagacagctggagttgacctaaaaaagggtgtaaaatccaggtgtgtaaggcaataacagatgtaagggagggtagagttggaactcgggctttcaaaccttcatctccaaccttaactagcatcttcctatctaggattttagtggggcagagaagagaggtatatacccacacacctatgtttgaaaatggaattacagactttaaaggttatttaaagatttaaacaacttaaagattatttcatgtagctatcttatttaatagatgaagtccagggagatgaaatgacttattcaaggtagccaggactagaaacatgtcgtttaccctagatccaatgcaatgaagtttagagagttctttcctctttttccagctgcacttgctgtcgttatattagttttaacaatttgatatatcatttaacctggactgttccttccagccatgtaaattagttatgtatgacatcaaatagtccatccttccttcttagtgtgtgttccaaattcagtgcaaagctggaactaggagcttcttccaatacaattgagtggcaactgaggtcttccagcatttctaagaatttcagttctaaaatgaagtcccagcattttgggatgctgaggtggrcggattgctcaagcccaggagtttgagaccggcgtgggcaacatggcgaaaccccttatctacaaaaaaaaaatttttttaagtttgccaggtgtgattatgcactcctgtagtctcagctacttggagaggctgaggtgggaggattgattgagcccaggaggttgaggatgtgagccatcatggcgccacagcactccagcctgagcaatagagcgagactctccaaaaataactggataaataaaatgaaacaagagaaagctgactaatccaaagggcaaggtggtttaccttaaagaaactcaaaagaaaatggaaatctctacatatattgaaaaagattacaggaaaattttcatcaattgatgatgtactgttcacaaatactgtaattctcctggaatatagtaaatcatattccagagaggaaatttggagtaattgaaattgtgggcgcaggmatcaagtacagcagattagccacttactggatttgtaaatagatttacttaactttgattacttcattcctaaatgaagataactttctaacttgcagaattagaagtgttgtttgtaaagtatttaacacaatgtctagaacaaagttggtgataaacacacagtgattattactactctgaatcaaaagtgaaggattgctaaaccttgtaagcagtcactgcagcttttargcctggtttttcagtgaaaagatcaaagagtagccttctttgttcacctaatgataattaagggtgaaaaatgttgatgcatttcctgaaaggtatgtctcttatttaaaagcgaatgaaagttttagatggctagatggcctgtgaataggaatctgcccacaatgatcctttaaaactattgtggctgtttaagataacttatttttgaattattgtttcctggacaattggcaacatagattctaaatagctgactttgtactcctttacagatgcatggtcatggaggctatgattctgattttagtgatgatgaacrctgtggagaatccagcaaaaggaaaaaaaggtaagtaatttttttttattgatctatttttcacatcctttctagattaatatgaagtataaataaacaagagtgaaatttttgaattstgtttacatgtgaagacaattgctctagtgaatgaatttttgttcattaagctaatacattgattaaaaattggagaacaattgtgggaaaaataaaaattaattctgcaaaggggtttattgaaagggaaagaagagtttcagatttctggaatcttttcagaaatcagtgaaaccttttcattacatatatttttcattcaactgtcaaggactgtttatttgtaaatgttgtagctcagaaggggcttgaatggtggtctcttgccattacttgccttcaaagtgaagttartatggaggatgaaagtataatgcagcacagttcttacgcatacgtgaatgagcagactaaggtcacgggaagaaactcaaggaaggtttttttgaattgcaagagacaaaaactcttagcacataaagcctgtgcrttataagcaggatacgtcttggtggagctgctgtgcgtaggagcattgttcttagctttcagtgcatagaaactcagttttatactttgactcaggagtggttgactgatgtatactaaccaaacttacacggctgttgactgatttttttaagcaaatgtatagaaattggcttattatttcacactgagagcaatatattaggcatactaacaggttctgaacatttttataggatactcagtctctgcaataaaggatagtactaattataataaattacatttttgatgctttacattttctagatttttcattcaaaaatactactttgtaagaatagaatttgagcaaatctagttggatactytgctccaggattatattcatcactrtaactagggctgacagtctatggcagggtgtccagtcttttggctttcctgggccacatyggaagaagaattgtcttgggccacgtactacagtggagcacacacaattgtgaatctgttggttcacattgttggcctgaagcagtgctgggcctgcgtaaaatacactaatgatagccaatgaggtttaaaaaaatgtgaaaaagtgtcttaatgttttaagaaagtttacaaatttgtgttgggccacattcaaagccatcctgggccacatgaggcccatgggttgggcgagctggatctgtggtttgtgttctctataatcagccttgctttttgcgtatcattaattaccaaaaacttccttatcactatgttacagatagagaaatgaagaaacaaagagataaataattgaatcttattaagattaaggtagtaattgacagaattaggatttgaatcaggaagctaggtgatatgacactagagtccatgcttttgttagttccatcttccccgtgttataggtattaaataatgttaaggtattaattaagctatttaaggaaatgtaaaatatctcattaaagatcagtgagtcttcttaaagttaagacttacattctttaaagtatattccagttatgaaaatataaagaattagaaaataacctttgaaaaaagtgaactcttattttcttcttaatatatcaggacagttgaagacgacttactgctccaaaaaccatttcagaaagaaaaacatggaaaggtggcccataaacaagttgcagcagaattgctggataggtatggtatttcagtgtcaattctatttcttggtttaagttgcttcggattaggggatttgattatgttaatttgaatataaacattttgaattttcttaaaaaaatttgttttaacagggaagaagcaagaaatagaaggtttcatctcatagctatggatgctgtatcctttttttatttccagatttttataactagtagaatattttaaaatctgcttttttgttttataaaatcttgtgaagtcaaataggcttttttatttttaaagataagtatttagtgatgtaggattttgccatttatacttttgggtacaattctcttttactaatatataggaaagatttagagacaaaaataataaaacatattactagtactctataaataggtttataaagtacatgaatctgcaaatatattttccaaattgttttttcaagctttcaacatttccttttcctatacttatctttagtctcattttaatttattctcttcctacctggttctttgctatttaaggtctctataaaacttgtatttaaaattaggtctatccagtctgtccctggatctaaggaaaaaataaaaataaaatgaggcctgcctgtggactgtcctcaggcctgccatggctttaatttttaggcatgacttaaagctatctttaagataaaccctgcttcctggttatagccatttgtcaactcagtttcttaataagactggctgatgacactaactgctacgctggccatccatactgctgttgagaatattggagaatttaagagataccaagcaaaaactgaagtatttttgggtatttattgctgtgatcagaattgggagaaggagacagtgtcaatttgatacgccccctacctgtaatcatctgtttcactgtgctattccaatatttttcttttaagttatagaagtaccattgtgtcactaattgatttattcttcttatctcctaacccaatagctagcttttccatggatctcatctgccatttgttcctttagcatttaaacatttgctctgccttctctgacacctactgcattgggggcacctagttatagcctggtgagagtgaaagtatgggtactcttttttctggcataggaggagttggagccacagttttttttgtttgtttgttttttgttttgtgtgtgaggatttattttattttatttttctttattttattttattactttaaattctgggatacatgtgcagaacgtgcaggattgttacatagggtatacatgtrccatggtggtttgctgcacctatcaacccatcaccctcacccttccccgcccaccggctccagtgtgtgatgttcccctccctgtgtccatgtgttctcattgttcagctcccatttatgggtgacaacatgtggtgtttggttttctgttcctgtgttagtttgctgaggatggtggcttccagcttcatccatgtccctgcaaaggacatgatctcattcctttttgtggttgcatagtattccatggtgtatatgtaccacattttctttatctggtctatcattgatggacatttggattggttccatgtctttgctattgtgaatagtgctgcaataaacatacatgtgcatgtatctttataatagaatgatttatattccttttggtatatacccagtaatgggattgctggatcagatgttatttctggttctaggtccttgaggaattgccacattgtcttcaataatggttgaaccattttacattcccaccaacagtgtaaaagtgttcgtatttctccacagccttgctagcatctgttgtttcctgactttttaataattgcgattctgactgggagccacagttttctctgtgttgtttgacaagagtagagtagttattgtctcaaagttgtcttgctaggctgactcttggtcatttggttagagagaacagcttttgttgacgattttttagtccgtgcctgttggtgtttccrggttgtcaccttctttacctccaattctaggatacatgagacaaaaagaaaacctagggaactcgctatcatgtcataccataggtcttcaggaggtccctagcggggcgccttcttccttccaccttttagagtctttttatgtttgatatataatgtataaggattttagttgttattagtatgaggaatagggagaagtacatctttgcctactccatcttcccggaagcaaaagttacacccaccacctgttcttgtacataaaattatattggaatacagccatgcttcatttatatgttgtctttggctgctttcatgctaaaatggcagaactgagcatttgcaacagagaccatatggcttgcaaagcctgaaatatttaccatctggccgtttgcagaaaatgtttgctgaccccagctctaataggttacatgacttgccatggtcatgtgaccagttagtggtagatcaagagctagaatccagatctccaggtatttggtttttctgtctctctcttttttttttttcctgaaatattaactggtttgttacaatatggaaataccataatctgattaaattgtctrttagtacacattatgatcagttaaatcactatacatgtttaatagtcacagagaatattgtagaaggtgaggttagctattatgtgcatgtttggctctagagagagtgctgttgagctttttaaaacaaaaagtaaaatgctcatatattttgttacaatgctttgaaaaaacatggcattttattctttgaatttaaaagactataaaaattgattttttatatttgcttttttgaaagtttaatgttgggatttaattataaattataaatataattataaaagttgcatcttctatttagaggctttatcattactaaaatagataaattatattttatgataatgaaagataaattctctacttttagaaactataatttttaaatttttcatattgtgattattagaatgagtggtggtaggaggctatatgcagttcagcaatagaataagaagctctatttctccccagatggagrtatatttttatcacaagagtagtatatgcttgaaaaatagtcamaagaragcctgtactttacartcttcactttcaacaatttaatatatacccttctagattttctgaatgtgtaagcatgtatagtgtgtgaatatttttaaaaagctaaatagactcatattgtgctttttttaccaccaatcagcaatatattatgacaccaaacagctcctaagagaataaaatccttaattttttgcatttcagtatcaaagacatasaaagttcgtaaatgactatattttatactatggtggcaaaaaagaagacttcaagcgtttggggtaagtatcaggaagtttacatagaagggaatgtgggttatgggaaactttaaagacccacagctactgtgccttctgattctgtcattcttccctgctttctattccggtgtgccttttttttttttttttttttttaagatggagtctcactctgtcrcccaggctggagaacagtggcttgatctcggctcactgcaacctgtgccgctgtggttcaagcgattctcctacctcaggctcccgagtagctgggattacaggctcctgccaccatgcctggctaatttttgtatttttagtagagacggggtttcaccatcttggccaggctggtcttgaactcgtgaccttgtgatccacctgtcttggcctcccaaactgctgggattacaggcgtgagccactgcacctggccccagtttcttttttatattataaggtagagataccatccacagctcctgagtagctcttcatgaatcccatttttttggacaggcctcaggtagactctttacctgctgagccgggcacaaccctggtgataaaagaatatctgaagaatactcatgtgtcttcttggcaaagatctttgaaataaggaaatttttataccttgatgtttgggattgctttttaaaagataggtaaacaagaactctcagtctagcatttcttgcacatcaaagtccttcccatgtttaaggctcttctatcagaacttgttttttgttttgttttgtttttgtttttttaaatttttatttttatttcaatagtttttgaggtacaggtggtttttggttgcctggataagttctttagtggtgatttctgagattttagtgcacccatcacccaagcactgtatgctatacctaaaatgtagtcttttatccctcacctcccttctggccttcccccacattgagtccctaaagtccattatatcagtcttttgcctttgcatcctcatagcttagctcccacatataaatgagaacatatgatatttgattttccattcctgagttacttcacttagaataatggcctccagctccatccaagttgctgcaaaaagacatcatttcattcctttctatggctgagtagtattccatggtatatataaatggtgtgtgtatatatatatggtatatatatatatatatatatatatatatggtgtatatatatatggtatatatatatggtgtatatatatggtgtgtatatatatatggtgtgtatatatatggtgtgtatatatatatggtgtgtatatatatatggtgtatgtatgtgtgtatatatatatatatatggtgtgtatatatatatatgatatatatatatatatatatatatatatacacacacaccacattttctttatccactcattggttgatgggcactttggtcagttccatagctttgcaattgcgaattgtgctgctatagtgtgtgtgtgtcttagaacttcttagttttatgtgaggttttttttttccctctaacaattttctgagttggtaggactctgagaaaatttagtaccacctcatttacccccaatttatctcacctatcaatttatcctatatctcccaacaatcacttttttttttcctttttttttttacccccagactgttagcattttattttgaaaggtcaatccctttggctttcttcctcctttactcagtcttctacctaggaaactagtaaaatgagatacggaaaacttttcatattttttaaaattaaatctcagcagagtggttggttagaatgaaacttattttcattcactttattcatttagtgtttagtcaggtttctcattctagctttggtaacttagcaccatttgtataattgaaaccaatgctacagacagattccttatccatttaacttgcttctgtagtagtatttttataagtgccttttgaaaatactgaaatatttttataaatatgtgaacaaatttatactcaccaaaaaactatcttcatgtattatatttttaataaaattttccaaaactcacagagctatttaacctaaatttgactacttttgtttttgtattaaattgaaaaagttctgttttccagggaaaatgacaagacagacttggatgttatacgagaaaatcatagattcctatggaatgaggaggacgaaatggacatgacttggtaattagccatcagaggcgtaatgcatcaaatgctttagtcctgtttctcctgttttctgagtggttttttagtcaaggtgttcagccccttcatagaacagttctgaatcaaggacataaaatcaagcctaggattatttggttcttttggtaatttttggcagttttaactgacttctcattgtttgacttagtcttcaaaaaaataacattcttttttacagtattgtgtgttatcttgtaatatgttattatatgctgctgttttagaaaaaagtcatacctgaaaatgtttttttaaatccaaacattacaaagggtaaacagtgaagagtgattctccttcttatttgtgactgtcagttctccaatttccctccctgagtgaaccacttttaatagttaatatccagatattccatgcacatgtaagtaatagttctcttaaaacattaatatttatgtagtatgtattctktgacatcacttgaaagtagcaaaccatggttgagtttctaaatgtataatatttatattttcatgggtctagggagaagagacttgctaagaaatactatgataaattatttaaggaatactgcatagcagatctcagtaaatataaagaaaataaggtatgctttccacatatttatggaaagaggttcttattcaagtaaaatattaacttttattatactgtcatgccccacattattcttttaaagatgctaattctagactcagttgtcctgcgtttatgatgtgtcatttggaccatttaacctctgcagctgtggagtttacaaaaggcctatggaaatttatgaaggacaaggatgcttttttttgtttgtgagctgaggcatgaaaagtctaaaattaaacgcaagtgggtattggatcctgtttcatcctgactctagtctagagcctctagtgattgtaatgaatgacttaactctacagaataatgtcttatttcacagatgatgtttgaaactgatagattttaaaaattgattaccatttatagagatccagatgcacatcttctattacataaatgtctattctagtaaaattaacatttcaatcagtgctaattagtaatgacagatttcctttcccactttacatcttactttagttaatatttttatttttggttgggcgtgatggctcatgcctgtaatctcagcactttgggaggctgaggcaggaagattgcttgaggccaggagttcaagaccagcctgggcaatatagtgagactttgtctccacaaaaactaaaaaaaattagccrggtgcagtgrtgcatgcctatagttctagctacttgggaggctgaggttagaaggttgcttgagtccaggagtttgaggctgcagtgagctatgatcgtgccactgcatttcagtgtgggtgacagtgagactctaaaaaatagaaagttacttttatttctatctcaaacatcaaattatagctggaaaaggtgacccaggagcagatctcagttagaaatgtgagaggagggaatgttgcataaatatgtgttatagatactgtatatttgtattaagaaaaaaacctatttaaaaagctatcttgtatttatctatcatgaagatttatttgtcatttaaatcatttgatctcattagaaccagggttgatttaataattttttcagtagtgcctttaatatgtgtgttgcttcacagtttcttatagaaaatagtaataaygttcattttgtataccctatttataaacccgtgcacttaatttatccccagaactgctgtttcttatgaactagttatggactctggttcacagctgtcttctctgtaccacatctggttcaaaaagcaccacagtaattggagttacttaaagttactgtattgtaaatcaagtgtgaaaattatgtctttctaggagcatgtaacaaaggagatttttcagccctggcttattcatggattgttcttaagttgttgttttttttctttttttcatttatttttccccacctcctaataccatcataattcttcagtattttgttgttgttgtcagtatctattgaaactggactaggtactgtgggttaatacatggtgactacttttcagaaaaagctagtctagttgaggggagaaaatatacataaataaaaattaaatatttgagttctcaatttttcaaaaatggataccactagaaatcgtactttaaagaaaataatcttgaaaaaatgtgtattttcctgctagaacatgatgagtgattgtacatgagagtaaatgcagcaagaaatccgatatgactcgcagattctgaccatggatgctgagaaaaatacagaatttggaggaggattttttttgtggggggaagataatgagtttggttttggcataccatgtttgaggtgttggagaaagagtaatgcctttggttccctcactaggatgcattttctcttctctttatttatacaaagacaatgtattattcagttaattaaaaccagctcctaatatatatagtagatacttttagagcatttttagtgaatttccacctttgcctcttactcctattcctttctttattgcatttcccctttttagttggatcaatgtatcagttaggattaggtccagctgcaaggacagagaagactccccgaaaaaaaccactggcttaaatgagctggaaagtttatttttcttatacataaaagttcaagtcgatggtcataaagtcagaatccttcttgtttactgcttgcgtacgtgacctcattgtgatgagtgcagagtgagaagaaaaggaggctcagcaccaaatcctgaataacttcagctttaatccaaactaggacatttatgtcaggaaataatatacagtctttaactagtaggatataatgtaatttgttttgttacatttattatttcctcataagattataatcttggtgacacactattttaataatcactttttatcctcagtggaatgccaagcccaataggtagttgcttaataagttgtctgttgaatagattaatgaatgaagaagaaagtttggaaactattgctgttacacttggctgtgcttcagtagacatcctaacatatgttggatggcaagcaatctccacatacatatataggctgaaaaatagaattaaacagagttatcctgaaattttattttttcccctagatttggaggattttatttttgttgggttttaatcagagtattttgaaatattttgagcctttatttgcatttaaaatacaaaattgccaaattcaagtaatagattaatgattttttaaaaaaaataattgaaattgccaggcacggtggctcttgcctgtaatcccagtactttgggaggctgaggtgggaggatagcttgaggccaggagttcaaaaccagcctaggcaatatagtgagaccttgtctctataaaaaataaaattagccaggcagggtagcacatgcctgaagtcctagctattcggaaggctgaaaaaaaaaaaaaaaaccccacaacaaactgaagttagcaaggcattgaacactttatatgaatcctctgtcttactataacaatccggtgaacttaaggttgttactatttccatttttatacatgaagaggaagtagagaagttaagtaactttcccaaggttaagacctaatgagtgacaagagcttcttgagttgggtacaggtatgcatgtttctagactggagtggttttttatttgttgttattttttgttgttgtagtttttgtttgtttgttttgagacaggctcttgttcagttgcccagggtggatggaatgcagtggcatgatcatggctcactgcagcctccacctcccaggttcaagtaatcttcccaagtgtattttttgtttgcttttaatttttagagcatttttaggtttacaacaaaattgagcagaaagcacagaattcccatataccccctgctctcatacatgcataacatcccctactgtcagcatcccacaccagaggggtacatttgttacaatcagtgaacctacgttgatacatcattatttgaagtccatagcttacattagggttcactcttggtattgtacattcaactgctttgacaaatgtgtaatgacgtgtgtctaccattatagtaccatagagaatacttgcactgccctaaaaatcctctgtgctccacctgttcatcccaccctccttcctaatccctggcaactactgatcttgctacttcctccatagttttgccttttctggaatatcatacagttgaaatcatatatatgtagtcttttcagattgggttttttcactttgtaatatgtacttaagtttctccatgtcttcatggtttgatatttcttcttaccactgaataatattaattgtctggatgtaccacagttgtttatccattcacttaatgaagaacatcttggttgcttccaagtttcagcaattagaaataaagttgctgtaaacatctatatttaggttttcatgtggacattagttttcagcttatttgagtaaataccaagaagcatgattgttggagtatactagttactattctaagtgtttcatatgtattatctcatttaaacctctttaaacctcagtaccaaggaagtaggtactcatatttctactttacatatatgaggaagctgaggcaaaaaagagattaatttgcccagtactatacaactgttaagtggtagagctaaaatgcaaatgtaaataatctgactccaaaggctgtacttttttgtactagaatatactacctctttactataccataacctctttttttcttgtcactcttacagaacaggatatattatttgttaacttaggtatcttgtggcctggcacctataacttttaagctatcttaaagtagattgttcttaacagataaattggtgattgttcaatgtattttcttcaaatcctataagaagagaaaaatctgtcatgatgggaattacatttattttttaggttggtgaatgtcattgttggctccatgtttagatttctgtataatttaaatttacattggcataaatgtaatttttttattatcagtttggatttaggtggcgagtagaaaaagaagtaatttcaggaaaaggtaattctttaaaatttttactttttaataggataaacttattttgttaagttactgaattggagtcattaagatcattcctaacatatacaagaaattattagctacaaaagtaaaattagagaaggtgtattcatgatacattrttagcaaaggtctgaatataatgctttaatgattattacctttatacttttgcctttagaacattcagttgaatgttctgcatatttctaagtatgtagaaaatattttacaaattaaagatttcatagcaagacaactttcaacaaaaaagaaaggtttatttttttcctttctttattaatttttggaataatgaattggtrttactgtttttcagccaaatccacatttcaaaagtagaagttaaatatcactttaatcccaatagaattttggggcaggctagtactcatttttggaagtcccttatattgagcccaaatacttagtctaatagcaaaagaccagacatttggtaggcaatcagtaaatgctttttctatgcattattgtaaatctattcattaaatttttcctggaaattgtgtatctccatactgtctcttgctataaaattagctccttactgagtaattgcattttaagtgttaaagtactgaaaactatatagtagcactaaggaaataattttaaacttactttaaaaaaccttttaaatggaaagattacatttttaaatgattaaatatttatgctatcattgtggctcatatatatcttccataagttggctatgttaggtgtgaaattgcatatgccataaaacaacattaaggaaaaagaataaatttaaagctattttaacttttcttagggttatattttagtttatgtttttatctaaaataatgagaaatcctgaaatgtctatcacaattttaagatgtacttttattgaatgagattttcaggtgagtttataatgctaccttttaaaaaaattgatgggtagtctctaaattcatataactgaataaaagactagttaggaaagggaaagaaagctgctaatgtgatttatgtgatttcttttataaagttataattttgttgctgttttaacaacaaagccttacctactaaacatatagatttaataaaatattcatttggaatgagtttaaaaggctgatttagaaataagtctttttaggatataattttctaaattcattttgataatttcttaatttttatgaaaaagatttgctggttacagatttgcttctgttagtgcaaattattgtgatataaattaataagagtttgatcttgtctttttgccaaagtaaattactgttgagttgtttctctttttttctctcaggttatcagttagtctttttttggaggttttaatatattgtggacatggtaatgtgtgtgatgttaataatagtgtcaagttattctaaaatttagagtatcaggtttgactgcgtattgtacttcacctcaaagtgctagaatttttaaaggtgttttcaaggccatctatgctagtatttaaaataaatgtcattatgctaatacttaaaactattaactattattaccattaaatattgaaaggtttcacccagctataagtgtgtgtactttggaaagtgcgtttttttttkgggggggtatttgtgagtatgttgttttttttgtttttgtttttttatttgtttttccttaaaccaactttctgagaaatatgtccattctttaatactgtctttccaaagtgtaagattccctaatagggagtcgctaaaatgtctatctaaatacagtctatcaagcaagaattctgtgactgattttttttggtaacagtactttgatttgatacttgtatacaagttggttgaacatattactctggtcagtttttaaaggctgactatggttaatttgcatattttagaagtacattttaggggtaatactagatcrtatagataaatattatcaccaactaccatagctaatattcctttcctttctgcaggtcaatttttctgtggaaataaatattgtgataaaaaagaaggcttaaagagttgggaagttaattttggttatattgagcatggtgagaagagaaatgcacttgttaaattaagtaagttgattttagggggtatatgattgattcttccaagtttgtctttaatttaaaaatatatagactttmaaattcaaatgcaatttttaacatatctttctggaagtgctcttttttcttggagcttcccaaagtctcaaagaacttttcagcctcagttttttacatttttagyattacagtggtgtttcagtaaaaagaattctaatgtcaaatgtaaactggtaatttgtagagtggggctccgtccccattaacttgagaatgccaccacattacatagctaagaggcacagtatcagaaaaggcagtgtaatctcacattagctgattactcagtgatatcgttgtagcacagataataaacaaattcactctgtttcacagtattaataaagaaaaactttaggaaggcataattgttcttgacctcagtcttaaaaccatagggaataaatactccagaatacagcagtttcccttaggatgcatgttttagagtctgtcattcttttatttattttttaagttagtcttcatgtgtcagctgttcctctagccttctctgggtcctaagtaaatgtgccttcagagttttctgctcatacctaataaaagtcaagaatgtccccacatgctacgtatgcatgtcaatacagactgatttctgagttccttctggaagtgctcaagaggaaaagtcagccagtgtgaactgagattaaggcaaaaaaaaaaaaaaaagagaccacaattatggaactatttgaaaagctcctttgcatttgaaagttcttagagcacttcagaggaaatgactatactcacattattattagatatctttgatgtgagacacatgttaatgtgcctgtggaacacagtttgtttttggaacaaattgacaacmcatttttctaaaatagtgttattttcarttcctcaagctaatatttttattatatgtatgtgtgtatatatttgcatttttgaggtgatgaaggtcagattgttttctttggattgtttgtttaccctcttatagtaatggaatataaagaaagtgcgaatttatgatattaaaagtagattagcagtgtggttattcaaaatcagccattcagtggtgtcttttctttttagggttatgccaagaatgttccattaaattaaatttccatcacaggtamtgtcttttaaaatgccattcttaatgtttagtaatccaggatatagtcatttacctgcactaagtatctaaatgtagacttaggtggttgatggttgaattggttgatcatgtagaaaatstggcattgtcgtatggctacataaacgaggggtttagaagtccgctatgccctattcttgccaagcagttttaaatgtaaaggcctatgtgaggtggtagatggatgttagaatttttagtttggagccaatgttctgacactttaatattagaaattatgttgtaaagcagacttcataaagcagttcttgtgtctcatttagacagtgttttagctggagtttgccattcttacaaaggattagacacctctatactcattttaaatgttaaaatcaagaacaggcgcggtggctcatgcctgtaatcctagcacttggggaggccagtttgggtggatcacttgaggtcagaagttcgagaccagcctggccaacatggtaaaaccctgtctctactgaaaatacagaaattaactgggcgtggtggcaggtgcctgtaatcccagctactggggaggctgaggcaggagaattgcttgaacctgggaggcagaggttgcagtgagccaagattgagccactgcattccagcctagcaacagagcaaaactctgtctcaaaaaaaaaaaaagttaaaatcaggcttttattgaatgagctttaatgtatctgccacattgaatgtgtgggaataccagtgtcctgcagttatggggtttgaaatcagacctcagtttttaatctcagcttctccgcttactaggcttcttcttgggcaaactgcttaacctctgtaaggcttaattttatcacctgtaaaaatgaggctactcaggctattgtggggaataaatgaaagtgcatgtaargtgcttgccacagtacctggcattaaagatgttcacactgattcttcgcaacttgcctttgtgatggtcaggttttatgcgctggataacagttaaaagttcagcttttgcaactttataaaatgtatacataagcatattaattttaaaatagctttcttttttttcaatcacatgggttgtcaaaaaataacagctttgttataaatgtgcctatatagtattttagctgttaaaaataaatgttaaataatatttttaattcttaaaattagcaggattatttttattattttcattattctttatttttttgagacaaggtctcactctgttgcctaggctgaagcacagtggtgtgatcatggctcattgcagcctcagcctcctgggctcaagtgatcctcacacctcagcctccagaatagctgagactacaggagtacatcaccaaacctggataatttttttttaaagtttttgtagagatggtgtttccctatgttgcccaggctggtctcaaactcctggactcaagcagtcctcctgcctcagccgcccaaggtgctgggatgataggcataagcctccacacttggccagaacttttttggattactggaatagcctaaacctttatttccccttcccatcagtgatactgaaagaaagcagggatttgttttgaccttgacttttgagcttcatttcaaaatggaaatgattcttacaaaatatgcaaaagtggttaatgcattaaatactattatagcatttagtagatgtactttaacttggaaaatctactgaacaagttttttgaaagtaatcttttcctttgtctctattctccttgccagtcccaatttcagcattatcactttttcccatttagtatttcttttcttaacctattaaaattaattaattgtttgccaaccttgtaaacctgctctagaagagataaagctgcaacaataagagtataaattataagtggcctgatgttgatatatgaattaacaataagccctttccattttcattccattatgcttctactatattcctttattcttaagagtagaaatttctatttactggtggcttagagctgttcagcagtttcttcttmtttgtgtttttttaacatgtaggtggatatggattatgtgaagggaaatgaggcttttttttgtaatttagttttaaatggctaagtgatagaatatagaaagaaagaaacaaatacaattataatttgtatttactatggtcgtatacagaacttatagaaagtaattatttgtgtcagtgttaagacttcattatcttayagaatgattttaattaatatacaagcataaaatatttacagtctcacttaacgttccttattatataaatcacatttaaaaaataagtattttaactgattttggttttttgttcatatgatggttatttttgaaaaggtcagttggaaaagttaactttaattttatattgtttaacacaaaggagaaaagaaatcaagtcaaaaaaaagaaaagataaaaccaaaaaagactgtgaagagtcatcacataaaaaatccagattatyttctgcagaagaggcctccaagaaaaaagataaaggtaaaaggaaattaagataaggcatctactcacatttgtgagcatgaaatataatctgccatatttcattcatctaattggtgaatgcattgagaatttcattttatggtagttgagaggaaactggctgagaatttagatatgaacttaaagtgacttacaggagttttaagaactcctctaaattaattaagggttaattttagttcatttttggcagatagtataatattgccaacagttttctaattcctggctttgtcacctacagacttgttactttgcatcagtcactgaactgctttatttttcttatgtgtataggggtgaggtgcatacctggccttcatactggtcaagcttattgtggaaactcaaataagaatgtgaaagggactttgatcagtgcctttaaacagtctataatctataaatcaatataaaattgtaacactgattttatttataatggcctgtgtgactttttttactagtttatgagtttctagaaatgagaaagattgtcatatatctgtgttctcagagcctagcatggtgctgtgcacctatacttagaactgcctgctttttctttagcagtccttaagctcgctaagactcaatttcttcatgtgtaaaatggtcttgattccttttagaattgttcagaagttgaaacgagataattcattaagcagtttgcatagtacttggcacatattagctattatgaaggttacttctagttgctttttttagcccataataaagtagagtcaatcggctgtaatttatagtgaatcagactaatctagataggtaattgaattagattcaagccaatgttaatataatatttggacaggagagggctctcttgctccagctatgaagatcattagctatgttgcatgcttagaagcatttacttcttcttgcacatggtaatatattcattatgtagcagagtttaaatctgtgtgcccttgtgatactgtctactcccatagcttcaagtatatggtgtcaccaacctttagacttcgtaaaattgatagatggtgagaggaagatattgttattttattgcttattgagagatggcatttgtagcagaatgccttttttgtctctatcttaattattttccactctaaggtaaattttaaccaataaatgttaaaaatatgttttgagttttaaaaacttatttatccttatatgctagtaaaacatttaatatgtcacttaagaaatttgttgccctcattgtattatatgttcattcttatcacaactgtgataccatgttaatcactgygtattccaaatgaaagaactagtctctactttataaaatgttactcagtacaatcaaagtagatcaggtagatgaatgctcaggttcagggctraggttggacccttcgtattatgcgtacatatgcacatgatcttccttatagacatttttcccttagtgttctgtcagtagatgacacctatgttgacctaaaaactaatatcagaaatctgsggattatccttgatactttctttccccttattatttatgtttaatttgtcaccaagtcctgtgaattttacccccagagtatatatttctcaagttctctccaccctactacaaaccactatattttctcttataggctactgttatattctccttacgggttccgcctctgtcttgccatcccaccttccctcctcttaatccattctccataaatcagtgatttcctgttgtttttaggctgataagcaaaatcctggacaaagctaaaaggttctctgtgatccagaacttgtgtactatacaaggcttgtttcttaccactccgtacctcacgttcacactccccccatgtagcctttcagtttctggaaaatgtcaagcctctttcaattttaggggttacatggatgctgtgtcttctcttcctaaaactctcagttctatcccagctcatccttcaggtctaagctcttaaatgtcatttccaaggatcctttcctgatttcatcccccaccttgaatctaaattaggactctcatttgtaatgctgtcatggctcctgacactttctattattacacatatgacgatgtaaaagccaaagaggcagagattctgcctgctttgttcattgctatatccccagcaccccactagctcatgttcagcataaataataatcagtaaaggactttgaagattcttcagggatagaagaccaaagcaaggtggaattgagacatctctttcttatgtattctctatttagaatgcctttgaaagcaaagtctctagaaatatagcttttttacccccaacttctatggtatataacagaaaataacaaaattttagcaaacttttaggaaaaccatgtggaactctttaatatcttatctgggatcatctagaattagctttatcattgatttgattctttcttgccagaccaccttaatttggaccagacttgaagagtaattaataaacgcttaacatctcagctgcgtttggactgttgacaacttcctttaattttatttctatctttctggcctctctttagctaatgctttttttttttttgtaagacagggtcttgttctgtcacccaggccccaggctggagtgctggaatacagtggcatgatcttggctcactgcagcaggcttaacctcrgaggcccatgtgatcctcctttctcagcctcccaggtaactgggactacaggcctgcactaccatactcagctaattttgttgttgttgttgttgcagagacagggtcttgctgtttcccagactggtctcaaactcctggcctcaagcaattctctcaccttggccccccaaagtgctgggattaccagcatgagtcatcacacccgacctccttagctgcttttaactgaagttccttctcagtcttacatttagctgttagagttcctcggggctcttacctagatttctctagtttctctctgtactcccagtgtaatcccatcaactctcatagctttaggttaccgtcttagaaaatgttaaataagtaatagatggatgaactagatagctgaatgaatggatagagagaaaaaataagaaagatcagtagctgactttaaggaccagtctgctttggcaggtatgaggagaacaagatatttaggtagactgtcttggcaaaatgttcagaatcttatctgtctcaccatcacccctttcccaaaagctacgtcatccttcaggtttctgcttagctcaattccttggaaaggcccttcctgacacccttctcctcacttctccaaataagattatgttcctcttacatattccaataatacctgtcacttctcctttagaaatacatagtatccttggaataaattgtttattttctgtaagggaagggactgtgtgacatgtttacttcgttatctctaattcctaatagtgcttgctcccataggaggcattcaataagtgtaggtgagtgaatcagtgaattcaaccacattttctgaaagttgaaaggaacttcagagatcagtcctggaatcatgactgaaaggatattctttaattttgcttttcaaagtaaagtcctctgggcagcatttaggaacttgttagcaactcacaatctcagacccttccagatctactaacaagttcccagggcgaatcatatgcactaaagtttgagagaggcactgytgtatattatgtgattgttctgcattggttcaacatttccagggaaaaggaacccactactatcaaaaataaagctttacattttcaggtagttgtatttgctagcacgtttctcttaacattcagccaaaatctacagcttcctccctttggttctaattatgttcttgggcctccaaattaagcctaacgtcttttttacctatggacctttggatattgggaagcaggtatcatgttcctcattagaggatgacaggaaagaatacatttcctgtttccttaccctgtagttcttatactcttcatctggtctaaaggggccaaaaactttgggttacraggcctcctatccaggaacattggaggaattgttactgtccatstgtcacctgcccttttttactttatcatccttcagaaatattttccctgaggtcttattgcaggaagctctgtatcgtggtgattttttttttaaattacactgaccgatcttcagtgcctttctctctctctttctctcactggatgaccattgtagagctgagaatttttgttttatgacataattgtgttgtgttcttatcagtttctgagaactaatacttacctgcatatatgactttagaaaagatactgtaaaaagcaagtatttatttgtaaactgctttcaaatgttgaacatctctatagataataaattattgcttatattgcagctaattatctgtgaggttttctttttagcaatatgagattttttttgcaggtattcattattttttgttttgtgctggctattacagaccatatgagcacataagatatgatctctgcctaaaagaacgtaacattttaatgagggasataagrctaaggaacatgaaagattagaaaacagtgaagtgcttatctgtaagactataagcaaactagaatattgctaagaattctggttatagctacaatgattgcactattacaagatgatagttaataaatcaatgatgtttccttttcaggacattcatcttcaaagaaatctgaagattctctacttagtaagtaacaagtgtttatttaataaaaatatgcatttgaggtatttgcaatttagatttcccatgaatcgtatcttgctgtgatgtgaattattttttgtttttgttaattatttttgtacatgagaaaaactgtagaaaaaaggccaaaagtgtataggatttattccccaattaagggcattaagaagtttcttattttaagtatagagagcattaaaaatttttccagtaaatacaatggatatatctttcaatttcatgttataaaatgtgaaggaagaaagataaagggatgaggttgaaatggatttaaattaggcctatggttttcactagtttggatcaaaacagattggatttcgttgagtatttgctgcaaattttattattttttccctgcaatattccaaaaagtattcacaatgacttataaaaacatacacaataagtttttttaaggttaaaaaagtcagaataatggaaaaataaggtagaatagcaatgtaaarctacaggtgaaatttatacacacaaatgtattccaaaaagtcctgcataattgcagagatagatcacagatttgtcagtgttcttcctaacaaccaaacctaagagtgaaaccagcaatagaaagattaattgtacccataagataataatgagaactcctggagtgttcagctttttgctggcagttttgagagaagagtcttctatgggtttataaaagggtacatccatttgtgtcataacaaacagtagctttgaatctaaacagtaatataatgttgaattttttaaagacttgtagtaggctcaaggcctaataataaggtgtagttcaatagcatatctaattcattttatactctctggacttatctcatagaaatttagaaacttgagatttctaggcttacttagttattttattttatttttttggagatggagtcatgctctttcacccaggttggagtgcagtggcgcgatctcagctgactgcagcccctgcttcccaggttcaagtgattctcctgcctcagcctcccaagtcgccgggactgcagacacccatcactatgcccagctaatttttgtgtatttagtagagatggggtttcaccatgttggccaggctggtcttgaactcctgaccttgtgatctgcctgcctcggcctcccaaagtgctgggattacaggcrtgagccaccacgcctggtcacttggttatttataaacctaagaattaagaaaaaattttttatgactttaaaataatatttattgtggcaaactcagggaaaaaagtttgatgattattctaaatttcaaaactcaaatataaacattatttgcatttagtataattcttaacaagaaattttaaatattcaatgatcagaaattttgcactgagaaaaatagaaatgttaagatatttgttgtttaaaaatttagcagagagggagatgttgatggaggtattcctctcttaggaatatagtatattccttataattattttgcttgtacgaactttgttttcaacatatttgaagtgtcttaaagcactgactctttctctccacgtaaattctaatttatcaggaggtcctttcctaaattaggtaaaatgtagtgacagtttcgaaaatacattcaagtataagaccagtggaccaatgttatctcaggatgaaatcatagatacatacttcaacaaaggtgtacacaggctaaagtgggagagygtattttagttttcatccatttccaacagtgagaggtgtgaatgcttatgcaatatagaaaaaattcccctttttcagttctaattttttatccttaaaaagtcttttggggcaaattcttgaatcactgatttatattattcttttatttcttctgcctgccttctccttcccactgtctttcaccccctgccctttgaatccttccctgcttcctagaaatagcccttaatgctcttttacctctcctcagctaagtcaaatttttactagtagaagcagggtgaatactgtgaagactatatccaatctgagaaacccctagctaatttgatcttgaaaaaacaaactatccacttcaagctgacctgctgtttggcagccggtacgctatttaccatagcaagcatgaaacatatacattgttatggtatgccaaccccagatatcctctcaggtggtcagtcatctgtattacatggtcttggcaatttcagacctcacattttgctctttatttccatttggacaatactcagttaccttcttaacccatttgacacctggattattaaaaccaaatccatggagaaaaactcaatttctgttgggacagtaacaagtgctttagatatgttacctcatttaatcttaataatgtgcatataatatcctcgttttgtagatgagaaaaatcaagacctagagaatgtctttaaatgaatgaagaaactcaatttttaaaaatatatatatttaaagtatacaacttgatgatttgctgccctcttaacaaatttcaagtattgttatctttagtcaccttgcacatgagatcgcccaagaaccaaagaattgaagtaaagtgcccaaggtcaaatagttaatggcaaagctgggattaaacataagtttataattccaaagtctatgccctttacctgtatcatcaatcaataactgttcatcagtgaaatcaactgtatgtctattctttatacctcagttttggcatatgcattgtacagatccacattaaatgatttgatctatgtttcacttctgtctataaaatgggtataaagagacctacttcgttggattattatcagaatcaaatgagaaaacatacatgtaaagtatgtgcctgacgcaaagtaagtccttgataacctgtagctatcattgttatcagagaaaagaaaaatacagacatataaatcctgtgtttgttctctagaattgatgaaatcaaaagttaagtctataaaaatctgacctgtccatttgttaccatgattattggagacatttgccatttcttcagtggtgcaagttattagttaccatataatatccacaaaaaccaagatgatagacctactttcattattcaaaacatgtaggaaaaattgtatataattttaggcaccacactctaaagggaacattgaaaacttgaagcaggtcaagaagaaaaaaactgaggtatggagaaaacttgaaattatattgtaggaagaatgtyggaggaactgcagatgtttacctgggagaagagtgaaaggatgggagggaagaggtgaggaagtagacatggaaattactgtatggatatttgcaaggctgctactatgtaggagacttattttttatgactctgggttggcagaactgcccaaaracagatttttgccttaatttaaggaaaaacttgtcccttagaactgtctgacaaaaggaatggagaaatgggctgcctctggagtagcgagtgttccagcatggaytggattggcacttattggaggtgttgcagtgaaagttcattcattggataagtgttggattaaatgacctccaggttcccctttcaactcagaaagtcagtgacttaaattctgatccctacttaccaataatcactgaatagatttgacagtgatgcattcttttgtgttgcctgttcttccaattgttatttccttagtaacactcctcccgcccctggcaggttgtaacagttatgatagcaatgatttgtagtgactrccaaccctcagggaaccaggatactatagattcatagggttataagggaccttaaaggtcatttagtccagtcttgtagacttgattctctagggatatctggccacttttttagtggggattttttaagacagttagtttataatgttactctaaactgacttgattttttagtaaaattgactggtatcagaaaactggtgtaagaaagctggcatgtgggaagtactcttggaagggaacaagataacagctgtccacttctaaaggccttgtaggtttcgttctctggcatcattaacattagcagagtaatacaatagtaataaccttgctaggcctaattaatttttctctgctttctttatctcatattaatgagttttcataaaaataagagaagattttaattctttttttccctcacattatcaatttgggacactggccattccagtgatggctgtcattgagtcaggaatcttgttttcaagattaaaattttatcatttgtatgtagatcattagaatacaaaatgccctcccccacttttgccatttttgctagaattggtgtcagaatagattcagttaggagcaaagttcagacacacatgttgattcagggatcagagtccaacaggtaaaaggctagaactaccgtaacaaatcaatgctgttttatttttatgttgtgtttaactaaaggacattctgtattgacaggccacatttgtgccatttcttttttagactaataatcattattggagaggagttgtctgctaatgtaactactttgtgagttatagtgttattgtctgataattttgcagtatttttaaatttttagttgactaatacaggtgatttatttgaaacatatctattttgtcatctttaataaaatgtctttattgtttttactgattttgaaggtaattcatgctcattgtttaaaatacaaacaatttgaaaatgtttaaaatagaaagtaaaagtattccaggcccacaggtaatataatcagttaaatttggttggcttttgcaaacttacaatacrtacataaaattacatgtatgtatatratgtgcatatgtttttaacatatctattatactatgcatactttttgtaactttttaaaaatttgatatagaatggacatttttctattgcagtacatacagatatgctaatgtttttaaacagctgtatagtatttatttaaccagtccttaatccctaattggtggggaattaggttttttgttgttgttgttacacagtgtgcatctttgtacatatgtatcagaggtgcttatttatgtatgtaagtaatcaaattcctaaaagcagcattgctggtcaaagggtatgcgttttaaactgatctatattgccagatttttctccagaaaaaggtttacagaattttcactcccagcaatgtgtgagaatgccagtttcttccctgaaacaggcttcttctcattatgtaatcagcattggttttttaaaatgtctgacaattttttttaaaataatttaactagctggtcttacatactagctcagttcttaaggtactaatcctaatgtaaacatgttctctacaaatgtaaatcttaacttgcgtgtcttctgtgtaaccaagaaaaagaagaaactagatcagagacaactatattgcaagagataattgacttacaagagttratattggaattgctactttaactcagtgtaacttagagaagtttcgatgagacttaaaatccttggcctttttgctgagattctttggtaacccttggcttatttatatatgttttaaaagaatttattgtacctgtgagagtgaattaaatttctagagagtcataaaagttgaagctgagttaaataaaaagttaattgtattggcgaataattcaaaatgtgctttaagtataataggtttttaaaaatcatcttttttaaatgaacaggaaactctgatgaggaagaamgtgcttcagaatctgaactttggaagggtccactaccagagacagatgaaaaatcacagtaagtgctgatattaatagagaatatgtaccttttcaatcagtttaggaagctataaccacagctttattaatggaaaaatacaacatcatggtgatctatttaatgccaaggactgcctagcctggtaagattagagcttattcccagccattgtcataagcagccaacacatccagcttcctcctggtaaataaatctttcatcagttcactttaacagatgaacctctggtccttgcttggatttcttcagagatggctgtttcctaagcttccagagaagcctattccatcatactgtgattatcataaacctatgcaagggaatcccttgcatgggaagtacacttctatactgctatcccactggtcttttaaaaagtaaaataataatatttactgttacaaatacataatatatttactatgctcagtgtagtaaaaaaactacagcctaaggagatttacccaattccccttagttattccccaatataacttaggcttacatttttccttaaaaatagtttcttttttattcacttcttgagcagactataatttaaaatgagaatgaacagagaagttataaagtaagcccacaaagtaaagagaagcaatgacatttcacaagtatttcaaagcaaaattttaggtaatacatttagggagaggtgccaccatatgaaatatttttattttaatcaatctgggtatagttatgattattctagaaactaagaattatttgatggctgaatcatggcratatattgatatatagcagaatcagccaatatgttgacttaaagtattttatttttattaatctcatataatgtatcatgtagtaatttttttactctattgatcttaagtatgcttttttttttaaatagggaagaagaatttgatgagtattttcaggatttgtttctatgagacgagagagagaagcctccgctccttaatgtgaaacttcatgaagttttaaacttcatgcaatttgaaattccatataagtttttatctgcaagttacagcttgtgtggtttgtctttggaaataaaaatccaggttctctcagaatgtcagaggctttggaagttcattagttcaattaaagactttcctgtcctttaaatatcttttcaattgcttatctacaattctgttttatttgtagctcctagaggatagagctggacagattccattgttcctacattttgtaggttttttttcactgccttcattatgtatcttctcttgccttcattattttattttattatttcttctttttctcttttttagagccaccaatactggatttgtttgtttttcatttttttcttttgtrgaaacggagtcctcctgtgttgcccaggctggtattcaaactcctggccttatgcattcctcccaccctggcctcccagagtgctgggattacaggtgtgagccaccatgctctgccaattattttaaattactaggattaaagtatattatgtatgtctttaacttctttctttcccattgataaactggcacccttcttttaagtacctgctctcccattaccacctatttccagctgctttttgaggttttttgcttgcctgtctcttgcttccttcttaacctctaccacttaagagagtttgttataatcaaatttgacttcctagcctgtggataatttactattaagtaaattattaccacagggagccagtgaggtcccagtagtctaaaacagttcatgtgttcacaaaaattgcctccccggcagagattatgcagtaagataatttaactgaataatactatgtgcatgtatcttgcctcagatatactcatgcaaatatgaatatacctctgatatggtttggctctgtgtccccacccaaatctcatcttgaatgtgtactcccataattcccacattttataggagggatccagtgagagataatttgaatcaagggggcggtttcccccatattgttcttgtggtagtgaataagtctcacaagatctgatggttttatcaggggcttctgcttttgcatccttctcattttcttttgctgctgccatgtaagaagtgccttttgcctcccaccatgactctgaggctttcccagccatgtggaactgtaagtccaattaaacctctttttcttccccagtctctggtatgtctttatcagcagtgtgaaaatggactaatagaacttctatgcagaaatataaaatgtaacttcttaacataaggtcctagtcgcaagggtctatggaggtgcttcaggagatccaagcctttttagaatctgtgcaaacttctgtgtatgttttttggaggaaaagtccataaatttcaaattttcaaaaatcagattttcaaaaggatttattgatttctgaaaactagcaaagatctgcttttataaagagcaaatagatggatagatataggagaagatgcttgacttgatgaataagagaaaggacatatagaaaatgaactgaacataagcaagtattttattgaagatatactattttaaataacatttaaacacggaatgattggcaataaactgcaaaatgagtaatttggtatcattttaaaatggttattatcagagattttccttttattaaacagttattcattaattccacaaatatttatcaggcttctattatatgtgaggcactgagctgggcatggctgtaaaggaaccatctaggaagtaattatgcaatcatttctgaacctgtttcagaaaagtaaatcagtgttgggtttatcagtgtttaacattgtttgatagtcccctcacttcttgaataaattgttttttttcacctcactacttgtagtgtgtaaaaatgaatctgtatttccggtgaaaaagtgtttgaaatgtccagccgcaagactgatattagtagtagaatatatgcagttaaacattcttatggtaaaaatatgtccattgtttagtggttgtcagaaagtaaaattcctgcaaaattaaaattaggaatttaactaggaagaatatctaaagaccctttaaaaatagatcagtgtatttggtatttcaagtagatttatgacatcaggctcatttataaatttatataaaatcacaatacttaatccatgcatacacagtgacagataatgggagttatgtttttaaggagtcttgaaaaggcctctaacatgatgagtttaaaaagtaattctcctacacacctatctcaaactttgctatagtgcggtcagtggtggtcagcagaccactggtctgggggtgttgaagttaggccttcttatacttgctcttatgcagagttcatgtatttggcagaccttcagtggtggacatctctaccctcaatacaatttctggtgactaaggaggggaagttgtttgagctgactgatgttttggggtctaaaattacatagggctaaaggaataacgtttcttacgtggtttttaaaataatagtgcttctggaagtggaatttcaaaattattttaagcaatggaaataagggagcatgcatcacttagctaagttgattactttaataaacaatactcatttgagtgtacatatgacttactgtcataccttatttatatctgtttgttgtaacatttattcacatagtattcattcatattactgagtgcctaccttgtgccaggcactgctctaggtgccgagatagagctgtgaacaaaacagacaaaatagacaaaatctttcctcataaattttacattctaatgtgagagaagcagtctgacaattctaagtacctaacttataaaaataaatggcgattcatttcttggctgctcaaaattgaacattatcttgtctattacaaaatatataggttcattgatgttcaattctttagactgtagatagcttgtgacaaaaaaattctatgataaaatatatggcataactatattattctattttctaattttatctatgattatagataagtaaaagaagaaatcttaaatttctcgaatatccagacagacatataccatgcagtcgaagtagttgattgcccttagtttgtcttaacaatttaatatttagaatgcctggtaggtctattaatcatttttagaaagtcatcttggttgaagtttttctgtactatttttgataaggttcttgcataatccaatcacatgcttcttaacgcataatattcattagctgctttaacttgcattatgattatccagttagaatcttgtgcattgataatctttttaatgaaaagaatagttctgaactgtaaaaaatattcttagttacacccaaaataattgatttcaaactttgaaggaggagtgtaggtcaaaggcatagttttaataaatattgccaaaaaatagtttggtcttcatcattctattatcaagggtaaaagtagagaaaagagataagcatttcagatggaatgacgttgaataaaatgacatcattattttctatatcatatttacaacactatacattctatactgcgtttactcttttattaagatgttgagagattttagttcggggagtggcttgaggtatgaatcacagttacgaatgttatgggtgaattgtgtctcccccacccctcacccatttcatatatttaagccccaatccccagtacctcagaatgtgactgtatttggagataaggccattaacgaggtaattaagactaaaatgaggtcacatgggtaggccctaatccagtcctactggagtccttataagaaaaggagattaggacacagacacacagagggaagaccatgtgaagacacagggagaagatggccatctgcaaaccaagttgagaggcctcccaagaaaccaaccctgccaactccttgatcttgaacttccagcccccaggactttgagaaaatacatttctattggttaagcacccagtctgtggtactttgttatagcagccttagcaaataaatacaattaatgttttaaaaaagaatttgtgactagtttcaggattgcatattttttaatttaaaataaattggcaccaaaaatgtacctatttttgtcatattttgcacttttgttgaactttattttgcccctgggatttttgggctagcaatatatattttcttcatagtcacagggtagtttttctgaagatcctgttacgtgatgatttgttgaagttcttttgaatgttttctggttttcttcaaaggtaaaatgatatttgaagtttagaccagttagataatattacaacattaaacatgttttggactttttgtcatcaccacctcctgaatcttcagcagctagtaaaatcaaggaaagcaatattattaggagttagtggatatacagtgtttttattctaacattcccatgatagtagtgtcaactttgtagactaattagtcattttaacctagcaagtactgtgggtttgaccatgtaaaaacttgaattaatattcagagttggtccattcaaaaaataaaatctgggttaggtgcagtggctcctgcctgtaatcccagcactttgggaggctgaggcgggtggatcccttgagattaggagtgcaagaccagcctggtcaatatggtgaaaccctgtctctactaaaaatataaaaattagctgagtgtggtggcatgtgcctgtaatcccagctactcaggaggctgaggtgggagaatcgcttgaatctgggaggcacaggttgcaatgaactgagatcatgccattgcactccagcctgggcgacagagtgagtgagactccgtctcaaaaaaataaattaaataaataaaaaacagaatctgatcaatggttggccagttaacatcttagtttctcactgagacaatgcagtctggaaatctgagcttgatgcacaaagctccatgcctggtgatagaaaataatgatcttagtccacaaagaattctctatgtagtagcaaaaaaactcagaagtaaatttttgtgcaaataaaatacagatccatatccaatgtcacttaaaggacctgatcatctcttcataataaagttgagataaaggttaaatctaatagtactaagaaataccctcacttttcacttgcttggtaaaaatcacttattgttttgaaatgcaaatcatatcttaccttaaatctctcaaatgacccatgaacatttttagcccaccttcaaggcaatacagtatctggcagctacctgcactaccagcttcatatgtacttcgcactctttactctctagactccagctatatcagcttaaaaatttttcaattgcaccaagcttattcctactccaagcctttgtacatattttcttactcttcctccccaatgcctgctttctgtggttagcgtaagcattcttcaggaaagccttctccatggcccatgtgcacactagtgccttcttcgagatcgttaattgtgcattggttcacaatgtttagttcccccaccaaatggtaaattgttcaagataaaggatcccatctttccccagggcctgcctaacaccgggctttatacagagaagacatctgataaatacataagtgaatggatatcaaggagtcaaaaactcctgcttttattctgaaggacatccttaactttgttaagaaaaatattttctcctatgaattatttaaaatttcactaaatgcaatagagccacctaaaaggaacatgtcagggcctttccacatagagatgatttctttgttaagcaataacaattgcttacaaaaccttcagagtgataaactttcaagacagaaattagcattccactttcaaaatgatgtttgggccatctgatgaactaatagttaatcctaagcattttaagaatccaaaaacaacattaaacttgacaaagtgactttaggaatagaaatttcatgccagaaaaaaaatggcacaggaatctcatgccagaaaaacatctcccaatgagacatttgggagaccggcaatttcagccttactctacatgtagggcttccttaagctgaagatctgtaaaaccacctcattacatggagaagaatattaaactcagcgaggttaagcaagctgcccaaggtctcacagctaatgcataatgttgggacaaaaacttttttctcacctaactctaatcccccagattctgtagtttacatattatccctaagcacccagtgttctgcagaggagccaccttctagcaagatgaagaagcctagctccaacctctacttcaactggaccggtcaattcgatctggagttatacataagatgttgtctgtggcagggccagggggacctgaaaaccactaatcggcctgttaaaatgatcagtctgcaccagtaaagcaggttttctgtttgtggtgactctttatggctttgtcacatgccattaagctcagcctagcttctggctacattacagggagcaaaaacagagcccatctaacctttttcggctcctccttcttgcttttttgcctcctcttcaatgaccttcatctttgcatcatactcatcagctagtgatttccattctactctgttattctgaagaccactcagcataggtgtgatttctttgtgaaaccgtgagaactcctaaaaggaattttaggtcagaaactacataaat

SEQ ID NO: 7065 - DNA, 283351 bp, Homo sapiens
  misc_feature (1)...(283351): n = A,T,C or G, or insertion/deletion polymorphism (see Tables 1-2)
ccacctcccaggttcaagcaattctcctgcctcagcctcccgagtagctgggactacaggtgtgcgtcatcacacctggctaatttttgtatttttagtagagacagggtttcgccatgttggccaagctcatctcaaactcttgacctcagatgatctgcctgccttggcctcccaaagttctggaattgcaggcatgagccactgcgcccagcacacatcttaaatttctattcatgctgtaatccactacaacctggtatctgccttctctgttccacacaaatgaatcttatcaagagcacccacctccatgttgccaaatccagtgacattttgtgtccttatagtacttggctgtgacctcttgttggcactgacttggtccttattccctcgctcctcatacacacttctcttttgttacctttcaaatgtttctctcctgattttccccccacccagtccctctcaactctctttgctggcttttcctttccaactcaacctttaatagggatacttcagggctagatcctagacccctttctcttctttatttacatctttccctagataatcccatctgttttccatgggtttcaatgccctctaacgctagtgattttcaaagcaaagtcatcatacctcctaagaagtctcttcttaatttttgtcttacatcaaattattgacttaatatttctattcaaatatctcaaaagtggctgggcacggtggctcatgcttgtaatcccagcactttgggaggccaaggcaggcggatcacctgaggtcaggagttcaagaccagcctggccaacatggcaaaaccacgtctctattaagaatacaaaaattagctgggtgtggtggcacatgcctgtagtcccagctacttgggaggctgaggcaggagaatcgcttgaacccgggaggcaaaggctgtagtgagccgagatcacgccactgcactccagcctgggcaacagagggagactccatctcaaaaaaacaaaacaaaaaccccacaaatgtttcaaaagtgtcttaagcctaatatgttcaaaatagaactcttgatttcttaaaactgttccatctaactaaatggcggcccgtcttcccaagtcagaaaattagaatttatttatgattccttttttctccctatcccacattcagtcttcaaaaaggtcttaagaattctactctcccattccactccttcctcaatataaatccatgtacttcttttcccagctgctatcacctcagtctaggccatgattttctttttcctggacaactgcaacagcttcctaactagggaccctacttctatcttttgatatcttccaacttttttgtgtgtgcagtagaaaaattttaattaaaaaaattttttttgtagggacggggtttcaccatgttgtccaggttggtcttgaactcctggaatcaagcaatcagcctgcctcagcctcccacagtgctctgggattacaggcgtgagccactgcatccagctgacattcttaaaatacaaatagaactatttcatttcctgactaaagaatcatcaaaggcctcccctgagaataaaacccaaattcttcattctgacttgcaaggcaagtataattcccgcctatctctctgatgttgcctgacttcttgatatagtcttaggccatttcccttgagcttcttaatcctcagcctctttcattttttttttttttttatttgtttttgagacagggtcttgctctgtcacccaggctggagtgcagtggcacgatcatggctcactgtagccttcactgccaggctcatgggatcgtcccacctcagcctcccaagtagctgggactacaggtatgcaccaccatgctcgttcgattaaaattttttttttttttagtagaaatggggtcttggtatgttgcccaggctggtctcgaactcctgagctcacataatcctcctaccttggcctcccagagtgctgagattacaggcatgagccactgcacccagcagcctctcagatttttattctttgcactcaacaagctcttttctgcctttggcttttacacattatttcctttccctgaaaagcttctcccccacattttgtatatccgactcctttttgttcctcatagataataaaatgaatatcacttcttcagagagatctccactgattatctttttttcttctttctacctaaattttatccttgtttttcttttaaaacttttaaaaagcacatataaaatgcttatgtgtgtgatactattctattcacaacaatctcataattagattatattattatctcctttttagatatgacacaactgagaaacacacagctagtaagtggcaaagttggatatgacccaagtagactagcttgtgctttttttttttgctttttttcttttcttttttttgagacggagtctcactctgtcacttgggctagagtgcagtggcggatctctgctcactccaacctccaactcccgaattcaagtgattctcctgcctcagcctcccgagtagctgggattacaggcgcccaccaccacacccagctaatttttgtatttttagtagagatggggtttcaccatgttggttgggctggtctcgaactcctgacctcagatgatccgcccacctcggcctcccaaagtactgggactacaggtgtaagccaccgagcctggcctttttttcttttcttttggtgagtcttgctttgtcaccaggctagagcacagtggcacaatcagtacattgcagccttaatctcttgggttcaagccatcatactgcctcagcctcctaagtattggggaccacaggcatgtattaccatgcccagctagtattttttaattttttgtagccatgaggtctcgctatgttgcccaggctggtcttgaactgctggcctcaagtgacccttctgcctcagcctcccaaagtgctaggattaccagtatgagccaccacacccagcctaggaatgctttaagaaattattttctatatacctgtcattgatatatatgcaatacatatggcatatacgaaaaaagagggaactgtaactatgcagtactggaacagcatggtgtataggaaaataaatttggctgggcatggtggctcacatctgtaatcccagaactttgggaggccagggtgggaggatcacttgatcccaggagtttgagaccagcctgggcaacatagacagaccctgtctctacaaaaatttaaaaaattagctgagtgtggtggtattcatctgtagttccagctactcaggaggctgaggtgggaggatcgcttgagtccaggaggttgaggctgcagggagtcatgatcatgccactccactccagcctaagtgatggagaccctgtctcagaaaaaaagagaaaaaaaacaagaaaataagtttatcttctttacgttaaataccaacatttaaggatcaaagttcaactaagcaacatcttaaagtgtcagagtgtgcaagacatgcctgaaatcagacaaaagtgacaagtgacaaaagtgtatcaatcagaaaaacggggcaggatagagcataggggctggaccacaatggaaatttagcaaaaaggaaagtcacagaggcaaactctgttcttagtttgatccaaaggagagggaggcacaggcaatctagtgcgagtcttatgatccctttggaaggcctatgcttacagtttgtagagtgaggaacagccagaggcttcctgggaaggcaggttagctacctgcaattgcaggttccatctcttttcagcagttcatcatcattcatcaacgtgtcagaggtcagatgccacgggagcacacaggaggggcttcccacctggagtgcgagataaggaaagatgggtcggatgttgtagtcattatcatccgcttctctacaaggctggaatttatggtggctgcacatttggaatgttttctccttttatttatttatttttagatcagacaatcacaagagactattcttttgttttatttttagatcagacaatcacatgagaatattctgttgtgatcgctggcgtttagaaggaaacttgtctggtttgtgaagcaatggaaaacacatccagacagcctgctagtggaaactttggaagggcactgtcatatgctttttctcccacgccatcaacaagtgtcctttttttttttttttttttgagatggagtctctgttgcctaggctggagtatagtggtgccatctgtaccctccacctcctggattcaagcaattctcctgcctcagcctcccaagtagctgggatcacaggcgtgcaccaccatacctggctaatttttgtatttttagtagagatgggatttcaccatgtgggccaggctagtcttgaactccggacctcaaatgatccatccacttctgcctcccaaagtgctgggattataggcgtgagccactgtgcccggtcaacaatcatcttttttttttttttttttttttttttaccaggtacacaatgatgggagagttgagtcctgctttctaacttagaaaacgcatgtgtgttcatcacctggtcactgagaaacagctctggaataggtgccatgcagaagaagagagggaactggaaagacccactgatctgtgggtctcacagcctcccgttacacagaaattgcttcttttctctcatgttgcgttcttcctcttgattctcgacccttctccactctttcatttactccactcttactttgctttcacctccttttgtaaccgttcatcatcactcttcatatggattaatgtgattatcttaaaagcatgtaatatgtagttgctgggtttgtatgagtaatgagtgaacctgaagccaacataatgatcccgtttagtgctcccgagttaagattccagagttgcctgactttggacaaatcacatctccctttgcctttcaccccctgtaaactgaggataatggctcttacctcaaagcattgttaggattggagagaacgcatgttacatacttagaagaatgcttggtatgggtctcaagaactcttagctcttattgtttaaaaaatgcttattacagggcatcgttggtatcttatatagggaatttcaagcagttttcctttattgaagacacagagtaaggtgctttgatggaaactattggggcaagatatacagtacctagctagaggtttcctgggtgcatgtattgtggagatattttttttctgagtggatagcgctcttgtgatacgctgggtgagggcgagcaatatttagcggactgtcctgtgaggatagtaaggttatctggtgagagtgttaggtggcccaggccagacttgggagaggcagggagagagggggacgacggaggagggcgccttggggtgcgtcttgaaagctttgggaaacccagcggtcttttgggggcaggtggcccaaaaagccttctgcgcgcccaggggacgaggaggatgcgcgggccgcgaccgcgatagttttgtttgcttttctcgggagaaagcgttccaggcagtttcctgagcttcggccctcgacgtagcaaaagagcccgggcgcccacgccgctctcggggtcttctactgccaccgggacaaagccctgggaggagctcccgcccccgcgagccggacagggcggaggctcccccgccgcgcgcgccccaccgcttcccagtcccggacccgtcgcctgcgcctcctcctggcgcgcctcacggtgcagcgggcggcggccccgcgcgccctgcgggaggcgcctcgggatgtttccgtctggtccttccctccgccccccgcgctgactccatccgctccccgccccctgctcggagccgccgccacgcgggaagggagggagccggccccgagactgcatcattccgcaccggctgctgcagggccagagggagcaggtggagcgagagagcgagccgcgagccrgagcgcgccagacccagggcgagactgcagtgacgcggcccgggagacatggcggacgggcgtctctgaataagcagaatccggagcccctcsctacccgcggccgccgcagcccgggccatgccgcacggctgctgaccgcacgcaggggccggccccgaggacacatgcggcggcctttgccgcctcgcccctgaccctctgccctgttctccatgttgcatttctcgtcagtttctcgggcggtgtagctgccgctgccaccagagccggcggggcatcgcgctgctcattcatccggccgcactttcttttccgtttccacccatcccttcccatttccttctccctttccccgccagcttcgcatccatctcycccaccccgtaaccccctcctgcctccatccaccggggctatggccgcagaagaggtattgcagacggtggaccattataagactgagatagagaggctaaccaaggagctcacggagaccacccacgagaagatccaggctgccgagtacggrctggtggtgctggaggagaagctgaccctcaaacagcagtatgatgaactggaggctgagtacgacagcctcaaacaggagctggagcagctcaaagaggtgagttgcctgtcacctctccctttcctggccctcactccccccacccgcaaggcccactcatcatgatcaagaagtcataaaggagktgattgaaaggactgttttttcttctagggccctttgttggtaagagaagattgaaagagtccattgtttcctcccccaagagaaaaattgcctaagaaatgaatatataagctggaatttgggaggcaatggctgtttggcctgcgggggagggagattagtaagagtcatcaagtctcakcactctaagacgacattcaagtgggttggaatgtataaatcaaacttctcaaaaccgctgttatctcaaacccaggtttcagcgacaatttcgtagtccacaaaagtgatgaggtttgtgcctgaggacccacaatttcaggatttagactgtgtggcacctcagctttcctctggatgtaaccactccttggtgagagagggaactcctcaccaatcccatttgacaaaggctaggcaatcttcattctgcttggctttagtcattcttgtcattgggctgcagaagaaaaacaactttgctgggtgatcccactgccttgatttcacctcggagcgaggctgggccatgtccaagtcttatgaggtcaccctgactagaaaaaattgaactcacctacaaatagtctgaaagagtggtgtatatcaaatacgtgggtagtgttgcatttcaaatgaggctcttctggttgaaatgatayatttataaraccagaatatcamaaatgggtgatgtataatgtctctttagttttttggtatttggcctcttttaaagcctgtcggatgtatgggagaaaacaatgaacgtgctttgatttcctatcagtcactcttaagaacatacatattgtttaagtaactcggtcttttttatctgattcttgagrcactatgggtagcaartaaccacttacaaatttaaatgtaatatacactccttttctgtgtgtcaagtccttatttttaggtgcatattgacatttaaatgttaattattgtttggcatataatatcaaaaatctattatttattttatgctgttacagttaaaagatgtgatttatgacatactgaatcaacttgccttccaatttagtgtgtaatatggtaagcatttatacttttagatatgtcttatttttatttggatgcctgtctaccaaaaaataaatgtactacctatgattaaaaatcccaactaggaatctaatttttgtgtgtcaggctgtaaatttctggttcctattttacttaccatgtacctgtctggtcttaacaacagctggacttgtttatattttccaacttagattaggctgacatgtttaaatgcagtgatgctaaaccttgtgaartgaggaarcasgatgatgactgtcattctcagagatgttttgatattgtctatacctatcaacactgctttgccaagatagggaagtgcaaaccagaaastggtaagccatcaccttcttgataaaggagatggacttaatttaatgaaatgtrcctcttactgactytgctgcttgatttaaacaatccttctagggatatttctgtcattgcacttaccttgcatagcaaaccttaatgcaattgtgttttgcctttgctacaccatgagctttgcatcccaagtctttaacacaaaagmtagcacacagtgggcatgaaatattttatgaaagaatcagtttgtactagaagaaggcacacttttatcargggttcactagtcaatattgattagtgttagataaatactaagaaaattaggatgtataggaagtgacagatgttaataaaactacctgtattagtttcaccagcagtaatgagaaaaatgtgaaaaaaacgttttgtaggaataatgtaactgtggtttcttaatacagaataatgcaaataccaactaaaattttttmtataaatattttaatatatattttgttmtatatagcaggaggttaataaaaatttaccagcattatttttactaaacgattcttgttcatatatttattttcagttgcatttagcataagtgaaattcgagattcctaaaaaactggtttayacagttatataaaaatgtattttaggtaataaaattattatagttgattatttgatagtgaggcctattatttttattctttaaacatagaatatactttagttggaaatataacttaaatgagttaaattgatttcaagtaacatttcttgtatgaaaagtaaatccaaaataattgtgcaaactgaggtgttccaacacctcagttttgaaaaatattttgtgagtgttttgatttttcaaaagaaagttttgctcatcaggtatgtatagtaaatgatgttgcattatatctataaagccaagcataaaataaatctttgcttatttctaggatttttgaacaaatatgatttatttaaaaataattgaaccagtttatgggaatgtcaacagaaaactactgtattaagtccaaattggacattagtaatttgcartatagcaacatggctcagtctttgcagatcattttgttttccagagtcagtacccaccaatgttgctaccttccttcccaggctaggtactgctgtgacaataatgcaagtcggcagtgttgcctaaagatgtgcaaaatcaagaagatgaaattcattaaatttttttcctagttatttcttccctcaactcaattgttttttgacctggcctgatgttgtttagtgctctgcatggactactgtaattcagctcacagaagaacacacttgaaagaatagtactaaggatttgaaaaaaggatgacttctgacatcatcaaagtgttctccttttcatgattctttgggcagctggacagagcagtatgtccactagaatacttgagtctggttttgtgatttcacaagtaacacttgctcttcagtgacctgagtgagggtcacccatgcccagttatgttcagggcctggctgattatatgtttgggatgtacgtaaatcagcactgtgcgcctgtcacccaggccagaatagtgtttgaagaagagtcatagctccaaaataacctgaaaactaaaaatatacatatataaaaataccttggatctaaacttaagagttttttttacaccgcatgttctcactcatagatgggaattgaacaatgagaacacatggacacaggaaggggaacatcacactctggggactgttgtggggtggggggaggggggatggatagcattaggagatatacctaatgctaaatgacgagttaatgggtgcagcacaccagcatggcacatgtatacatatgtaactaatctgcacrttgtgcacatgtaccctaaaacttaaagtataataataaaaaaaaagagtttttttttaacttaaaaatggttgaaatttaaaatgttgtaaagttgaaaaagagccccttagaaaggaatgattcagcattactgatggcattttaaaaaggaaatgtatctgtgagacagctttagaaaagttttgcagcttggataccgtaaactatgcactaatgagcttcaacccattttcttgcttattttgtcaaccctgacaccaaggatagttaccagctgctgaagaagcactttctggacattgggcagctttttcttttggagccaactctattctttttcagggttatagttaaatcattcaacacaaaaatatgtacttacacagttttagagcttgtcacattggtgacctgatgaatgccacttaaattacctagattcatctttaagcagaattgttttcccttcagatgcttagaaagattgttagtttcttttatatctttaagttstaaatcacaaaatcatatggcaagaaaaaccccagatttcttttccaatctatgaataaacataaagagacagttwatacttaattgatctatctgaactatgatttttaacttctctcattgtttttatttttttattttattttattttattttgagatggagtctcgcactttcacccagcctggagtgcggtggtgtgatctcggctcactgcaagctccacctcccgggttcacgccattctcctgcctcagcctccggagtagctgagactacacgcattcaccaccacaccyggctaatttttcgtatttttagtagagatgggctttcaccttgttagccaggatggtctcgatgtttttaaagaaaaaatatttacatttattatcaaattaatcttaaaatctaaaatacattaagatatgcttttggaaactgtttacaaacaacctcaacaaataaacatcatcgctttcaatcacatttctttttttctggacccagttgctctaacttgcactatcccttttttttttttttttttttttgagatggagtttcactcttgttgcccaggctggagtgcaatggtgtgatctcggctcaccgcaaattctgcctcttgggttcaagtgattcttctgcttcagcctcccgagtagctaggattacaggcatgcgccaccacacctggccagttttgtatttttagtagagatagcgtttcttcatgttggtgaggttggtcttgaactcccgacctcaggtgatccgcctgcctcagcctcccaaagtgctgggaytacaggcgtgagcccccacgcccagccccttctttttatttgaaatcaagatttcgtctctggcgaagttatttctcagatataacttagcaagaatttatcatcttttatcacattccccatgtttatgtgaacatgtatgacagcgatggtttgaagrtttcttcagaactttctgcttgcaaatattttgccctatcatccccttaaatatagttgtactcatggatattgctttccaaatttgaaaatacggtaattaattacttgcatgttgaaatatacataaaggacttgcccacacataagattccacctgtaattayggctttgaggagaggagggcatgaagggctgcatagtcttagtattaaataattcattacgctaaaggagaatgcacgtaaagtcaagtggcaggagatgcaattgtgaaagggccatggccacattttgtcttggggatgtggagccattgaaaataaatgaaacagtcactgtgtttaatctcaccagtcttcaaaacaattcagagggcttactgctcatttttactgataagaagataataaaaataataaagcattgacttaggtacaaggctccatttagaactaggttctttacaagcctcrcctctaattcatgcagcaatccttactcaaggtaggtgtttcttgcattatacagaagaggaaactgggtcttagagaggtttaggtctcttcccagggccacaaaactaaacgatgaaacttggaagaagcccacttttttttcactgcatcatactaccttgaatatgaaatatctctgccaagtctacaagtgcagtatagaaggttatggtgatggtcatagtgggtggattgaggctgtgtggtgggacagacagtggcagtagggatcgtgaggagggggcacgtctaagagctatttgggaggtagggtggaacaggcattggatgttactatatgtggaaagtgaggaagacagtggagctgagaatcttctcaggctggataggaggtggttctrtttacaaaggaaggtattatggggcagagcagttttagagggtgaaattgatgctcaagttacatgagtttctgttgtttttgacacagggtttctctctgtcacccaggctggagtgcagtggtgctgttacagctcaccgcaaccttaactaaccatcctggctcaagtgatcctcccatctcagcctcccaaggagctgggaatacagacccatgccaccatgcctggctaatttttttttgagactgagtctccctctgtttccccagctggagtgcagtggcatgatctcagcccactgcaacctttgcctcctgggttcaagtgattctcctgcctcagcctcccaagtaactgggactacaggagcataccaccatgcttgggtaatttttttttttttttttgagctggaatctcactctatcacccaggctggagtgyagtggtctgatctcagctcactgcaacctccacctcccaggttcaagcgattctcctgcctcagcctcctgaataggtgggactacaggtgcctgccaccatgcctgaataatttttttttttccaagacagaatctcgctctgtcgcctaggctggagtgcagtggcgcaatctcggcttactgcaacctctgcctcccgggttcaagtgattctcstgcgtcagccacctgtagatgggattataggcgcgcgccaccacgcctggctagtttttgtattttttttagtagagacagggtttcaccatgttggccagagtggtcttgatcttctgacctcgtgatccacccaccttggcctccgaaagtgctgggattataggcatgagccaccgcgcccagcctaatttttgtacttttagtagagagaagatttcaaacatgttgcccaggctggtctgaaattcctgagctmgagcgatctgcctgccttgccctcgtaaagtgtggagattacaggcatgagccattgtgcccagccacataagtccttttaattcatgttttctttgctggggaagcgtacattgcatgatggattcagatmctcaactttcttttttttctttttttgagatggggtctcattttgtcacctaggctggagtacagtggtgtgatcgtggcttactgcagccttgacctcctgggctcaagcaatcctcatgcctcagcccccaagtagctgggactacaggtgcacaccgccatgcctgactaatttttgtattttttttgtagacacasggttttgccatgtaagccaggttggtctakaactcttgagctaaggacagtccgcctgtkttggcctcccaaagtgctaggattacasgctaactttcaatttaataaaaaaaattaatttgtgcaattggttgttattttatagaagcctaatttctakaatatgggatataaacaatttaataatgtkttcaccagttagtttgattgctttctaaattaggaaaaatgaaaacaaataaacgatgggcaaaaaagctgactggggacagtaaggtctaagaaggcagcctaagtggaaaattagcccttactcaccatttagggttatgggggctgggagcaacagtcctcactgctcactgactaatctttatcaatcttatttaatctttattgaagatgcattagcatttttaatttaagtgggtttttttcctcttttcttttggtggggggtgtgggcggcgggggagtttcaatatgttgaccaggctggtcttgaactcctggcctcaagcgattctccckcctcagcctcccaaagtgctgggattacaggcatgagccattgcacccagccttttctatttttcatttcaagagtttgctttttaagaattaaaattgtgtaattatgacagtttttattrcagtactccaagctagagaaaagcatatataaattaatagttttcccttcttctcccacagttctgtctctgttgttaacactttgctgagtattcttctgtacttgttttaaatgtctttaaacatataggcagggtttttgtgtgtgtggtgtttttgktttttttttttttgctgtttttcttcctttgtttttataaaaacaggatcttgcagcctggtgttttaaatttagtagtatgtcctttcaaaaggcaggtatttacgagacaaagctgcatttttaaagcactggtgaagtgtgaagaaaatgagaccgattagggaagaaaacccgagaagctcaragtttgggtgaccctggggatgtgggaaggtggtgwaaatggtaccctgagggtagcatggatggtaagtgaaagaggaaaaggtgtaggtttgcataaaaraaactgatggaatttggatgcccmatagcaracccaggggaatgataccaggggaaaagatggacagttttgtgggtaaattagcagkgattttgattccttgtcttgttagctgctgatggagatacrtgtatcagcataatacctggctagtttccatggccggcaagagccagtcctgcagtgtgaccacatcctgtccattctgggtcttggtggcaagccaggatgattcaggcagttgggctttattacgttatcccttctttgccctctgaaagctgagttttgaaatagttaggatcttatacaacatctcagattcagcatgctgtgcasgaggtggggagaaaagggtacaaaagaggaaaatgttcagtgaaggtgttattacaatggaggggawtatgaaagtggaaattgataccttttcctcttgggatttaattaagtctataaaattraggtgttgcaatacataatgtctatgatttttttttaccasctctaaatctctgagatggctgtgttttagagctgcatgtkctgcttatttactgcctgtcctttacatttcaaattcattcaatatttttccaaagtacasaatagttttgcctagttgcagtaattttcacctagacttcagggatcttccatcaactcttttatgtattttttctcctttgtttttccactctggtcactcagttctagccaagatagtccaccttattttagcacttgtactatgtctctgtctctgtctgtctgtctgtctgtctstctctctctctctctctctctctctctatatatatatatatatatgtaattttgagatggagtctcactctgtcgctctgactgaagtacagtggtgcgattacagcccactgcagccttgacctcacaggttcaagtaatcctcccacctcagcctccagagtagctgggaccacaggtgcacaccactatgctggctattttttttttttaacctgattttgtttttactggaggctcaggtggcccaactaatttttagaaattattatttgcagagatgaggttttgttatgttgctcaggctggtcttgaacttctgggctcaagtgattctcccacctcagcctcccaaagtgttgggattgtaggtgtgaactactgtgcctggccttctacattttttttttamccatttcatagttccctttttctttgaacacttggtccaaactcacttttyttctggattcatattttctgatctcacmtattatgttatagaactgatatgttacgtttgttttcattgatgcgtstgtacttggcttcagagagcagaacaaggccctgtgagtcactgggagccagattttggatcaaaataaatcactttctgacaagtgtagttgtctagtaatggaatgaggcagtcttcttaggaagtaatgaattccctgtcaccaaaagggagaagctagtgagccacttgctgagaatactctatggggagttgtccttaggaaggggtatatctagaatgatctctaaggttcattcttattcggatttctttgatttttatcattccaggtgttccaaataatttgataagtttatgttttttatacttttcccaccaccagagcagtgtttccaacatggttaaattgttctgctttaatgtttggcatttcacactatttgatgactgtaaacatttggaatgttttcacagtgtctcaaaactttattttgatttatgttttgctttattttcagaagaaaactaatgggtaatataaagctttaagatgagtgtatctctaaatttggagagctttcagtgaaactgtacattttgaagctacgtggttgcattgagggaggtctacagcctccagaatcttctttttcacacacacgggcacatgtgcatgtgcatgactttatattttgtcatttacgcttagtcatatatatatatatatacacaaatatatayayacacacacacacacacacacmyatatatatatatatatatatttttttttttaagaccatatttygctctcgttgtccaggctggagtgcaatggcatgatctcagctcaccgcaacctccacctcccagtttcaagcaattctcctgcctcaggctcccgagtagctgggattacaggcatgcaccaccatgcccagctaattttgtattttyagtagagacagggtttctccatgttggtcaggctggtcgcgaactcctgacctcaggtgatctgctcgcctcggcctcccaaagtgctgggattacaggcgtgagccatcgcaccggcccgcttagtccaatattttattttattttattttattttatttattttttttgagatggagtctcactctgtcgcccaggctggagtgcagtggcgcgaactcggctcactgcaagctccgcttccctgggttcatgccattctcctgtctcagcctcccaagtagctgggactacaggtgcccgccactacgcctggccaatttttgtatttttagtacagatggggtttcaccgtgttagccaggatggtctcgatctcttgaccttgtgatccgcccgcctcggcctcccaaagtgctgggattacaggtgtgagccaccgagcctggcctagtccaatattttataatctgcatygtcaactagtcaggccccagaatctgtgggttcagcatccttggattctgcatccttggattgaaaatatttggaaaaaaaattgcatcggtactaaacgtatacaggctttttttggtcattgttccctgaataattcagcataacagctatttacatagcatttacatcgtattaggtattataagtaatctagagatgatttaatgtatactggaggatgtgtgtaggttacatgcaaatactacactattttatctcaragacttgagcatctgtggattttggtatctgcagggggtcctggaacccccacaccctcacccagactgagggatgactgtatttacgttatctaccactctgatgttttctttttgctttarattgcccattacctcttcatctgtttcatttattcattcaaaaatttgtattgagtggctactgtgtcgggcatggtgccacttgctggagatacagcgttgaacaagacagacccaatggggctgcctgggtggagcttatgtttcakactgggaagagagtcaacgaacatccacacatatttcagttgtgagaggtgccatgagggaagagacagactggctggggaaagcgtgatcaggcagtcttccccaggaggtgagacttgagcccagacctgaatgatgacaaggagccagtcatgtggagactggggaatgtgatttttaagaagaggacaagtgccaagatctgcgaactctgttgtagttgttaggggaagggatgggttaccatgctctgtaaaaatgaccattcatatttgaaatatgaccattctgtaacacagtgtattgcctactggatttttctaatgaggtattgggtctcaacattggaaatgtttgagcagaccttggatatctccctgaggtcttctctgagaagaggtgggtaggaactagtgactttcaatacagactgtatgttagaatcacctgggtgatttataaaactactgctgcctggaccccactccgggagagttaaatcactcattggaagtggagcctggcttcagcatgtgaatcccacttcccttagagatgcagccagggtaaagaacccctcttctatatttccaacttgaggactaaatgaccccatgggcgtagaagtgtttagtaagaaaatctagttccgggtgcagtggctcatgcctgtaatgccagcacttagggagaccaaggcagatggatcatatgaggccaggagtttgagaccagcctgaccaacgtggcgaaaccccatctctattaaaaatacagaattagctgggcatgctggcatgcgcctgtagtcccagctattcgggagactgaggcatgagaattgcttgaacccaggaggtggaggttgcagtgagctgagatcgtgacacttcactccagcttgggcgacagaacaagactctgtctcaaaacaaaacaaaacaaaacaaaaaactgggaagttatgagctaatacataaaccttcattgcacagtcttttaaaatttgttgtttctactttctgaaaatgaaaatattaaatccttcctgaaaacagaaaatatcaaaaacttaactgcattagacagagatatatgttaactttgagtgcatttaattttgtattcttgagtactgtttaaagtgtcttttaaaagttctctcttattgtgtctatttattttattctgtttgcagtttttatgccaactttacacatttgtaaatagaatatttaaaaagaattttttttgagggattgatctctaacttcttggtgacttatagttgttcttttggttgtacatctttactgttttccaacattttaaggagaaaaagcactactctcaaatgtaatatttaactgctgtgtttctatctttaaatatagaattgaaaatgagaacctgtttatatttatgggagcaatagcaatatgtgtacaataacagtagcaatttccttaagaatgttctgttgcagtttggcgtgggtctgtgatagaaggttcagaatgatgggtctttgtttttctcttgcatactgcagagtaatgtggaatcaaataccactattgaagagctcttagtcatcaatttttgaaactgaaagaggtttatattgtaagaaggatgggccctgttgataagcctcactgattgctacttgctagatggttttaggagatatcttgaagttgaccttgtgtgaggttactggatggaaacagcatgagtttaatyttgtacatgacttcttttgttgagctggagatactattgtyttgcagattatytytttggcacgcatgaccatttttttttgtyttttaaatcacaaactggctttytttctgctaaggttggtgtgcttagattctttaagctccaaatctcaagaaaatataggaaggaaaatcaaccattagagagagagagagagagaraaaaaaaaaaggaaaaaatataatgtgctccaaactgattataaatagcttttgaattgttggctccatagaattttttttttttttttttgagacggagtctcgccctattgcccaggctggagtgcagtggcgtgatctcagctcactgcagccaccgcctcctgggttcaagtgattctcctgcctcagcctcccgagtagctgggattacaggcgtgtgccaccatgcctggctaagtttttgtatctttagtagagacggggtttcacaatgttgtgcaggctcgtctcaaactgttggactcaagacatctacctgcctcagcctccaaaggtgctgggattacaggtgtgtaccactgtacccagcctcagtttgttaatattttacaataatttagaagtagaaccctttcttaaggctgggcgcgctggctcacacctgtaatcccagcactttgggaggccgaggtgggtggatcacgaggtcaggaratcgagaccatcctaacacagatcgagaccatcctaacacagatcgagaccatcctgactaacatggtgaaacccccgtctctatgaaaaatacaaaaaattagccgggcttggtggtgggcgcctgtagtcccagctactcaggaggctgaggcaggagaatggtgtgaacctgggaggcggagcttgcagtgagctgagatcgcgccactgcagtccagcctgggcgacagagcaagactccgtttcaaaaaaaaaaaaacaaataacaaaaaaagaagtagaaccctttcttaagagcattctcaggtcttctatcttaattactgtagttatttccagtcatgttttataatcaggtgctatttttcattgtggcataataagtaatatatttttgtaaatcatgttgaagtgcttgagacaatacaagcaattatttgctaaaatttagaccagggtctcaaaacaacaattacatttttagataatggtcacagtaagtcttttcaraaaaaagcaacgaagaaagctctagaccaatgagattttagtcatcattaatcaatgccaarcgaaaaaatcttaagatgtatttaaatttgtgatgccagtgtgattcagaaatttgaaaaatggatttcaaagtaatgctgtgagcagataggtcattgtataaacataactaatggttcattcattcattcctacaataatgattcagtgtcagatttgggtgttgaaaatacagcagagaacaaacacaacagaaggtccatatttgcggagcctacattttgtgggggaagagagatgataaacaaaatgaatgagttaagtagatagcacgttagatcatccaaaatgctatggggggraaaaaccctgggaatagggagatggcatgtgaagtggaagaaggttatgattttcaatagagtgatcagagaaagcctcattgagaagacacnctaaggaggccatgtggctggaggggactgagttagggggtgaatagtaggtgagaccagagggggccacatgatgtagcagcttctagattatcaggactttggcttttgctctgagtgagatgggaaactttcagagagctttgagcagaaaagtcacaatgttctgcactttttccttcattgagataacctctgcatacattcaagcacgactaagacccccttcagggaaaagaagttttcattaactcagtatcccatgaggtatatggcattctcttccttcccaccatagcaggtgtttaatagrtggttatggtattgcactgatttaggctgggaaaaaawtaaagatgaagttattaagacagccagttgtggtcgggcacagtggcgcacgccggtaatcccagcagtttgggaggctgaggcgggcggatcacctgaggtcaggagttcaagaccagcctggccaacatggtgaaaccccatctctattaaaaatacaaaaaataagccaggcgtggtggcaggtgcctgtaatcccagctacccgggggctgagccaggagaatmgcttgaacctgggagatggaggttgcagtgagccgagattgcgccactgcactccatcctgggcgacagagcaagactccgtctgaaaagaaaaaaaaaaaagacagccagttatttgaaaagaggttggagtagaccacttgttttaaaaataaccacttgtttgcctaggttaaacccatttactcaaaagacactgcgctgacttgcctggttccttgtacctgaatctttacctaagtgtcttgtgctctctgtcctttattctccataatgcgagctatccagtagaccctagccaaaggggacataaagacagtctcaacattgtattactggttctktgctacagttgtcattcaagttcctgagaaaatggaatgaatgtctgttattcatttatttattaaatctttagagagcatyatctatatgccaggtattatgcaggctatacaaaaattaggaagacgtgatctttatttttaagttacttatttgttgttgragrcaacagagataaatgaattgtgatattttactggaaacaatatgrgtttttgagttaagaacagactgtgtttgaaatccctttagcagctatgtgaccttaggccaatatttgaaatgatgtgaacgttggtttcctcctcagtaaaatggagaatgataataactataagtggtaaggaaaaatgcatgtgaaggatttaatacagtayctgacacatgacaagcacttgataaatgatggatgtgatggtgacaataatagtaataataataaaataataatrtgttggctgtgctcgataggagtggagggtagcaaactcagcttgaatcagagtaatctcctgatcaggcaacatttgagggggctttgaagaataagtagggattttccggggagagaagaggggcaaagtcattcaggargatgaaacagcctgtagargagggaaggctggagagagtgctgcttgtcagtgtctgtgttgttgcagtagggaggtagatggaatggggtgagaggggaggtgagcctggagagatggtttggggccagatggggaaagctgtgttayggggcttgtcagtttctgccagccaaggcttcagcatagctgactgtaacaaagttgggaaggccttgcttttgagagccagaccaggagtacctgtgactaacaaggggtctgggaggatctgctgctcccatgccctcctttgtrtrttttaaatctgtttgagccttctgggctcctgtgaattagggagwggcagctcctcagtctaactcctaytgtgaccaggttgcctaattggccctttggtttgggcacccactgtccttctgcgtggttggatagatgctgctcccaatgtccctgatctcttacagacccctctgattcttcactcttggctttgagagcccctgatgccctgcagtcttgactgagcttctaatggttgatcagacccttgaatgttgagctctttccatactagacttgaatattctcctgcccatttgatttgttaattaggattcattggctgtttctstgctctcctcttttctctctgttcctgctggttcaagtttaacctccattttctttctcctctgggaagtttcccttatgcctcttgaacagggtcaagagcacttaggagctcagatttacactgtatatcatgagaaaagcattgaaagtttcaaagcaggagagtgacataattagctttatgttttaaagcggmtttttgactttagattctggcaatacagtggtcctgtggtctaagacatctgactaaccttcctgmtagcaacaattaaaaatgctgagtgcaataaaaaactagcccttaaatggaatgaatgagtygactacttggtaaggatgctcagaggctaaaactgaatcaaagcaggaactcttaraagtaagcagtgtgttggctaggcgcagtggctcagcctgtaatcccaacactttgggaagccaaggcaggtggatcacttgagctcaggagtttgagacctgccggggcaacatggcaagaccccgtctctaaaaaaaaaaaaaatgccaaaattaggcagacatggtggcacacacttgtagtcccagctgctcgggagcctgaggtgggagaatcgcttgagcccaggaggtggagtttgcagttagctgagattgtgtcactgcactccagcctgggcaacagagcaagactccatctcaaaaaaaaaaaaaaaaaataagcagtgcatcaaatctgacttttgccttgaatgcatttgctgaatcagtattggttcaatactgagcattagttttccggccacttagagtagaggaaataggagataaagcctagaatctccccagatttgggctccagaggaccctacaactattgtggggggaactggatgtggtgggaaaaattgtatacctcttctcagacttcataccccaccaatgggctstcaccacggtttgcagactgttcacaccgagtktgtgtagaaaggatgaaatcttaagattagaatgagagtgaacgcaggttggtcatgcctgcagctctctttgaagacactcgctatcatggygggctagaaatagtcaccatagatagtattcttaaaaaaaaaaaagttgctggccgggtatggtggctcacacctgtaatcttagcattttgggaggccgaggygggtggatcacttgataccaggagttcgagatcagcctggccaacatagtgaaaccttgtttctactaaaaatacaaaaattagtttggcatggtgatgcaagcctgtaatcccagctacttgggaggctgaggcaggagaattgcttgaacccgggaggtgaaggttgcagtgagccgagatcagatcacgccactgcactcyagcctgggcgacagagtgagactctgtttaaaaaaaaagaaaaagaccctgcagaaattaaaattgtaaaaatataaatatacaaggaacaggcaccaggcacctttggctccacatcctygtcatcacttcataccttgtggctctagtttgcatttttgtggctgcttatgaggtcgtgcctcttcagtatttacaggcatttatgactatcctgcactgaaatgcatttcatgtctttgctcatttaccattggattgtttacatttttcttcctgatttgtaagagtatacacctatactcatattctgtatactaagcctttttagttatttagatatgttggaaatatcttttcctagtccatgggttgtctttttactctttctgtggtatcctttgaagaagagaagtttataattttaatttagttgatttatcactsttttgtgtttctaggttgtatttttctattcttaagaaatcctttccatgaagtcataaaaacatgcacctatattgtcttctgaatatcttmtggtttgacttttatatttaaatctttaattctccctggaattgakttttgtgtttggtgtgaggtagaaatctaatttaaattttttcccatgattccaccccaccccccaataaaattagccagtgatctcartaccacaggttactgaacagttgatctttcctgcactaatttccaatgtstgttttgtgataaatcaagtttttatatatgcatgggtctatttttggactattctgttacattggtttgttggtctattcttgtgcaaatgccacactgtcttactcttaccattttaatataagttcttggtagctgatggaataattcttcttattttgttcttccccaggagtcactggctttggacaccttccttgctgtcataggctctttgctttggaaagctctcaacatttacaaggaagtgacaagtgtgaacgaaggcagatcacactgtttatttccgtttccccaataagcattaaggaggaggatattgagggtctagttgtggttgtcttagactttgcacatgtttttataagcaaagcagacaagctccagcaagggaactcaattgtctaattagatgttacyagaaatcttattggggctgtgatctaattcttttttttttttttgagacagactcttgctstgtcatccaggctgcagtgcagtggcgcgatctcagttcactgcagcctytgcctccgaggctccagtgattctcctgcctcagcctcctaggtagcggggattacaggtgcatgccaccacacccggctaatttttgtatttttagtagagacrgggtttcaccgtgttggccaggctggtctcaaactcctgacctcaggtgatctgcccgcctccgcctcccaaagtgttgggatcacaggcgtgagccaccgcacccggcctgagctaattcttaagaagtcactttggaaaaaaatattatttaagggcttttcataaagtattcaraaaggtacaagttctaatctaacagttctatttgtgatttttgaggaagcatatgcgtatttccacttaagcatctgaaatattgcctmtagtgctgaacaaattcttcccttggttattttcctcttatctcagtccctggarraataaatgcctgtactaattctctatatacataaatggtctctttaggtataaataacctcataatcacataaaagttaaagttttaatggaaaaggctgagatgaaatattacctaagtaggaattaattgctttttatcactttacattatttcatttttagtattatgaaaaatataattgttccttttcttaaaaaaaaccagygtaatttgtgcttagttttaaaccaaaatttttcctatatgtttatagtttatattttcaagccaaaatacttgagtttttttcctgtcataatatatcaatatgagaaatgtattgttactttagaatcttttaaaacttctttttattcctttttttgttttttaagatagggtattgttttgttgcgcaggctagaatgcaagggcacgatcttggcttactgtagcctcagcctcccaggttcaagcaaccctcccacatcagccatacaagtagccgggactacaggcatgcaccaccatgtccaactaattttttttttctttttttttgagacagaatctcgctctgttgcccaggctggagtgcagtggcacgatcttggctcactgcaacctctgcctcccagattcaagagattctcctgcctcagcctcccgagtagctgggattatgcaccattgtgcctggctaatttttgtatttttatagagatggggtttcaccatgttgtccaggctggtctcgaactcctgacctcaggtgatctgcccgcctcggcctcccaaagtgctgggattacaggtgtgagtcaccacgccaggctgctccgtgacatttaaataaaatcatattttaaagtccagttgtaagcctatacatcccccttatcacttatctctaattcacttctagacctggtttgaactttggatttagtgctttcaaagtgtgatttttttaaaaaaattatttttctgttgccgtatatttcagctcttctcggtcttgaannnnnnnnnnnnnnnnnnnntcgagtagtcatcactcagctccccaaagtgctgggggttagaggccaactaattttttaaaaattttttgtaggccgggcatggtggcttatgcctgtaatcccagcactttgtggagtccaggcagacggatcacctgaggtcaggagttggagaccagcctggccaacatagtgaaatcctgtctctactaaaaataaaaaaaattagccaggtatggtggcacatgcctatagtcccagctacttgtggaggctgtggcaggacaattgcttgaacccaggaggtggaggttgcagtgagctgagatggcgcaactatactccagcctgggcgacagagcgagaytccatctcaaaaaaaaaaaaaaaaaaaaaaattctgtaaacacaaggtgtcactatgtttcccaggctggtctcaaactctgggctcaaccgatcttcccacctcagcctcccacagtcctgggattatagacatgagccaccgcacctggcctaaaactctttcttcaacattaagaaataagacttttccagtctctttcttaaccctgtacccttttctttctcatcttcttttatcccctcccttcattaactttacattgcaataccaaggacttaatggtttgttaaaaaaatgaattctactcagtagaaaattcctgagaatatttattaaatgtcactgggaggaaatttccctaagcaagatacaaaacttagaatcaaaagggaggactgacttatttggttttagaaatgaaaaagaacagtttggaagaaatagtgcgatgtggatgacttacaaacaattattattcctaaaatataggtacratgagtttattgaaaacaacataatgcaataggaaaaaaggacaaagascaactagtcagagaggatttgcaagtaaatcagtaaatgggaagagatgttcaatctgagtagtcagtgaatgtaaattaaggaagtttactttttttcccattaatttacaaaaattttaaatatgataatatacagtgacaaaatttttttttttttttgagatggagtctcgctctgtcgcccaggctggagtgcactgggcaatctcggctcactgcaagctccgcctctcgggttcatgcccttctcctgcctcagcctcccaagtagctgggactacaggcgcctgccaccgcgctcggctaactttttgtgtttttagtagagacggggtttcaccgtggtctcgatctcctgacctcgtgatctgcctgcctcagcctcccaaagtgctgggattacaggcgtgagccaccacgcccggccccaaaatttttaaataatgataatatacagtgtcggaaagtgtgtagaggtagaagtgtgaattgctgtgaactttgagaacgtggattggcagtctgtattaagatctaaaatgcatacagtgcttgggcccagcagtctcacagaagccataggtgattgtatgtcagttcccaaataccactcgttagagagaagcactgtttaacatctagtatctcatttagaccctgtttgagcatagatcatatgtgtgtggaacataaaagtaatcgaagtatgctcattctttttttaacatatctttccaggcttctatatagttaaataaataatgctccttgacatttatgtatttatttatttagatggagtctatttctgtcgcccaggttggagttcagtggtgtgatctcagctcactgcaacctctgcctttcgggttcaagcaattctcctgccttagcctctcaagctgggactataggcatgcaccaccattcccggctaatttttgtatttttagtagagacggggtttcgtcatgttggccaggctggtctcgaactcctgacctcaggtgatctgcccgcctcrgcctcccaaagtgctgggattacaggtgtgagtcaccacgccaggctgctccgtgacatttaaataaaatcatattttaaagtccagttgtaagcctatacatcccccttatcacttatctctaattcacttctagacctggtttgaactttggatttagtgctttcaaagtgtgatttttttaaaaaaattatttttctgttgccgtatatttcagctcttctcggtcttgaaaagatttgtgagcctttttgacaaaaggtggtgctcattttctatttcggtggctccagtaaagggagctgctctctcatcggatgattattgcccccagaagtggtcctaccatagctttactggtcagttagccagaatttacacatttactctgaggcttacaaaaatactgtgttcataaaaagccctccttcacattttgtgaaacagttgcatggtgatttgggatattttaagtttaccatcacctctctgtcctctgcaaaaataaaaattgtggaatgtaaaacaactctgttgcacaaaaaggggaacttggtgtaggaaaaaataactagaaatgataactacgagacactgcactcccaaattgaagatttaaaaaaattcctgatcgtaaataagaaaaattatggagacatttatccactgcatatctgatgactaaacgcttggtataccccagccattgttaggtgccagggtacaaagttcctgccctcagcgggttgacacacttgtgggggagaaaggcaacaaaagcttaagcaagtaaatgcataattttacagggtgatatgtgctaaaaastaaataaagcaaggtggaggaataacaagactggcgggggtgctggctggggtggctatttgagaaatgagggccaggcatggcctttcagaggagatgatgttggagctgaatcccaagtggtcagaaggagcaaggtgggaaaatatttgagcaagatgggaaaatatttcagttcctgggtcaaaagtaacagtaagtgtaaagatcttgagatgggggctgggcactgtggctcacacctgtaatcccagctgtttgggaggccaaggtgggcagatcatgaggtcaggagttcgagaccagcttgaccaatatggtgaaaacctgtctctactaaaaatacaaaaattagctgggtgtggtggcaggcgcttgtaatcccagctactcaggaggctgaggcaggagaattgcttgaacccgggaggcggaggttgcagtgaaccgagatygtgccactgcactgcagcctaggcgacagagcgagactctgtctcaaaaaaaaaaaaaaaaagatcttgaratgagaatgaactgggtttttgtgaaaatggcaaatggcattttgggtactgcaagcctttgcggctcggaactgtgctgtgcactgtgggactgtgtggctcaatgcgggacggttagcatccctagtcactgtcattacaaaaacagtcacacattctagacacccactgcccgccccaacgccaagggggcagtactgccttcaaccaggaccccaaaagactccagtgtggcagttgttggggagggggaatgtgagaggggcagtggagagggagtcagcaagcaggttctctgagccctggtgagaagtctggattttattttaagccgcctgagtgatgtgatttcayacatgtttttaaaagatcactstggttaytccttgcasacagtgraagagtgagccaagttaggaggctattgcagtagttcaggtaagagatgatggtggcttagactgagagagaatctacttgagggtaagaagtgatctgattcagggtatatgttgaaagatttgctaattaattaaatatgggaggcaaaagaaggtggagaaatcaggatggctcctaggtttcttataaggagctaggaagaatgtaaagaaatcatatgataaggagatataaaaaggaataaaataatatttcacacttaaatttaggagacgaaatatttgcttatttgaatttgaaaattcttgtggataccaatattgatactttgtctgaaaaataattttaagatgagtctcctggccaggcggggtggctcatgcctgtaatcccagcactttgggaggctgagtcaggtggatcacctgaggtcaggagtttgagaccagcctgaccaacatggtgaaaccccatctctactaaaaatgcaaaaattagmcgggtatggtggtgcacacctgtaatcctagctactcgggaggttgaggcacaagaatcacttgaacctgggaggtagaggttgcagtgagccaagatcgtgccactgcaagccagcctgggcgacagaacaagactccatctgggaaaaaaaaaaaagatgagtctgccaaaatgtttctcatttggaagggattcatgactttgccagaaaaacaagcagcattctatagttataatgctctatgatgtaatttactggacctaagttggctacctttcatgatgcatattaagtgtggagccatatttcttagtttctgttataaagctaaactgttaagtcatttttattcctataaagtcaaacaaactagccatggatactttttaacattctgtgaaaccaactttatccagtttctgaaatggatgccagttctttttttttttttttgagatggagtcttgctctgtcccccaggctggagtgcagtggtacgatctctgatcactgcaacctccgcctcccgggttcacgccattcttctgcctcagcctcttgagtagctgggactacaggcgcctgccaccacgcctggctaattttttgtatttttagtagagacggggtttcactgtgttggccaggatggtcttgatctcctgacctggtgatccacccacctcggcctcccaaagtgctgggattacaggcctgagccactgtgcctggctggatgccagtactttttaaaccaaagttaaaataattatttataggaagcagttgtgcactgtagattaggaacatggagactggggcataaatatattcttgagctagaattaaagtaaaacatgtgactgatggaaataacagctctccctgtgccctaccatggaacttggtaagcctttgttaactcactggcactgctagatcatgctatggtccccgagggccagggaggcaagtgtgytagtccaagtaaaaagctgatatgatctttgtatgaacagaaacactgtttgtaatgtgatgataacgttggtttcttgctcctgggatattgtgttctaggtaaagtggtccagagaccaatgggtggcagatacagggatacagaggtcaacttaatataaaaaaagaccttctctaatgtctaagagcagagtgaaagtgagcaggccatctgaggagagagagacttccctgttggctcatcatgatgcttaagcagagccaaaaagctacttggtagggatgtcaaggaagtgagtcaggtgttttcagcaccgcgactctgtcattgtgtgcctctctccttaatacctcagaattagaataaagtcttgataacagtagtggcaccagtcctgtggtttgttttgcgatgactgtgtggttgttaaactttctaagtgaaacaccatagtgtcgggagcaatgccgacaagcctggccacctttggtctacagcagatattgcaagctgrtatcccgtggccacagtcaggcttggtgattgataaacattttgatttagggagctgcttttttcaagaaacagaatcacataaacaggatttcaggccagtctcaaaaaactggaagatttcacagagccttgggyccacatttctgtgtggcatcagagggctagaggtgaatgagtcctcctctcctctcctctccccctcctcccctccattcccctcccctccccttcccckctcccctcctttattttttttttttatgagacggagtctcactgtgtcacccaggctggagtgcagtggtgtggtctcagttcattgcaacctccatctcccaggttyaagccattctcctgcctcagcctcctgagtagctgggattacaggtgcatgccaccatgcctggctaattttatatttttagtagagatgggctttcaccatgttggccaggctggtcttgaacttgtgacctcaggtgatccgcctgcctcggcctcccaaagtgccgggattacaggcatgagccaccatgcgtggcttttttttttttttttttttttttttttttgagacagggtctcttgcgctgtcacctaggctggagtgcagtgagacraacacagctcactgcagcctagacctgstgggtttaagkgatccttacatctcagcctcstgagtacctgggactacaggtgkgcatcaccacacctggctaatttttaaatttattgtagagacaacacttcactatattggctggcstggtctcaaattccttgcctcaagcgatcttctgcctttacatcccaaagkgctggaattacaggcatgaaccttcacctttcttttagaaagagcgtgaatctctaattcaccagagtccccaccattccatctcatctgagttatctcactatctctgtkcttccctcatttacatcatctgtcacttacctgttgacatgtgagttttgactyttgattgagatgctgacaccctccttcccttctaggaaaggaaaataaagggggaaggaaggtggagagggacaaaggagaggcgtgtggaggatgatagygcaggacttgcattctcagttctgcctcttaaatcttggaacctatttcttcatctaacagtataggactgatgtttatttttgtattagatcatatatataggagtacctggcatataactttgtccaaagtacacattctttagctggtgctcctctgtgttcccctgtaaagactgaggcaactataatgttccactgttctgtgattattgattttcaggtctgtttcctccaccagattatgtgtgtcttactcaactttgtatcaccaagcacctacgtggcattttttcttttttgaaggtagggaccatggctttctctttctttactggacactgtatagatgtcatgcaggtctgaacgtcacactgttaaataattacttaacaactgaccagaactaaggctstggtctagagctccaaaccagaagcaaaaaggaatggtgctgggctggggcactttcctctaacatcacccaaacccagaaaangaggatcgtaagccccttcatgggccaaatgcagggctggggcccttgggctaaccctttagtgcctctggctgcatcactgtcagagtaaggtaaccagcaaggggctgcagggaacaaccagccaggtccagacatggacaaacataattggaaggaagacaggaaatggacaggtcctgtccagtgtagataaaatgacagcagctaaggcaggttgaggggcagaggagaggctgggggatcggtattgtagcaatgcaggagtcctgtcctgagtggctgctcagggtattgacatgccattttgataaatacatgaattaatgagtgagtttcgagagtagggggagagagaataactgggcatccccttctgtagatcctcagtcttctagtctyatctctctagaaggatattcacccatactcaccttgtccactttgtgccagagttgaacattcttaagaaattaagaaggtgattctttgccarccatattccagttctttatttaggagctatattatcagctttgcttatggctccagaagtggccattaatacctggagctaaaacactgttttggtttagcatgactctagttttcactgaatatttagtatttttaagttargtttttttgttgttgttgtttttgtttttgttttgtttgagacagtgtctcgctctgttgcccagactggattgcagtggtgtgatttcggctcactgcagcctacactgcctgggttcaagaaattcttgtgccccagccacctgagtagctgggattacaggcatgcgccaccacacctggttgatttttgtatttttagtagagacagggttttgccgtgtttgccaggctggtcttgaactcctggcctcaagtgatcagcctgcctcggcctttcaaagtgctgggattacaggcatgagccaccgcacctggcctaaggttaattgtttttataagcaaattattttgcttttgtgacccaaagcagtactctcagatacttagtgtagcaatttattactcagatatataactttttacaaagagaatcatagcagaaaagaacaaggtaacgtgttgtagggcatatgttctgaaggagcacttgaccttatcttctgacatcatgtaaagattttggcatttagtgtcatcatgtgcaaccattgttactttttgctactgtatcataataatacttagtcgtatcagtttgattaaatgcctcctttgtatggttcccagcagcatggctgtagaaagtattctcaaatttatcaggagacccaagttttaattcggattccctttgtaaaaaggcctccattactggaggccaaatataaaaacttttttttttttgagacagagtctccttctgtctcctaggctggagtgcagtggcgcgatctcagttcactgcaacctccgcctcccaggttcaagcgattctcctgcctcagtctcccaagtagctgggattacaggcacgcatcaccatgcctggttaatttttggtgtttttagtagggacagggttttgctatgttggccaagctggtctcggactcctgagcttaggcaatccgcctgccttggcctcccaaagtgctgagattacaggcgtgagccaccgtgcctggccaaatatataaagtttaaaaatagctcgcttgtgttcattgcctaccacatactgggtattgtgctagatatttaatatgccagatagcatatgcctcattagcctatgaagtagaggcttttattattatttccacttacatagatgagaaaattgcagcacagataaattaatttgtctagcgatggaaccaaaatctcagtcaggcagtgtgacttcaaagcttgtattgatagaagttctccaagtgctttaaatatattaactcattcagactcaccaagctgtgcatttttagtttatagagttgatatcagtattaaataggaatatgtatgtgtatgtatttatatatgtatgcagatggtccctgacttaacgatggttcatcttaatgattttttgactttataattattttttgactttataattttttgactttatataaaccatattttgggtgcccacacgtctattctgtttttcactttcagtacaccagtcaacaaattacatgagctattcaacactttactttaaataggctttgtgttaggtgatttttgcccaaatataggctaatgtaagtgttttgagcatgtttaaggtaggtgaggctaagtaagctgtatttgataggttaggcgtattaaatgtatttttgacttatgatatttttcaaactatgatgggtttactaggacataatctcatcatcagttgaggagcatctgtatatgtrtgtgtttagatagatataattagatatctatatataatagattctatgctatgggcattgtaagttctaaattgcttcagtggcattattgtacattcttayataagattgaagaattttgtgattttgattaatttatatccttcaaagtgaccaggaaggtagagtttgcatgcagaaaatttgcatgtatattaattccataaataatgtttgtagttaaattttcattttgtttaaacattttttacaagatagagtttactcagtgctgttatttagcagctgtgtgtatgacttcataatttagggggctgtctgttttgtgttctaagccacgtggctgctgtggtgactgctttaraaactttcagttccctttgctgtgaaacaggtttcagtgcatcgtccctgtgtataaggtcaggtttcttacatggactcactctgtttctgtaaatttgtctgagaattttcaaggcagtgctttcatggcctctcctctaattttgtgtgtgtgtgtttgtgtgtgtctgtgtgtgatgatgaaaaagtcaaaagccctaaaattaaatcagagtttaatccatgtccctaaactagataagctgctttagaccttttccttatcccttacacgtcgctcagtaaatacttgctgattgactttcaaattcagattacttttacgmtagcatacggtgggcacaaagggtttttttgtttatttgtktgtttgagacggagtctcgctctgtygccaggctggagcgcagtggtgcaatctcggctcactgcaacctcctcttcctgggttcgagcgattcctcgtgccttagcctcccaagtagctgggactacagacaagcgccaccacgcccagctgatttttgtatttttagtaaaracggggtttcaccatgttggccaggatgctcaaacccctgacctcgcgatccgcccgcctcggcctcccaaagcgmtgagattacmggcgtgagccaccgckcctggcctgggcacagagttaaaaaaaaaatactggtaacagaaaacttgttggcgtgtttcagttttcagagtcttctataaggtcttataccagccgagaagcagcagaaccatctgtccgtgtaccgaggacggatctcarcagctctctgttcagtggctcctgcctttgtagtggattcccttgctgtgctgtaattaagtcagccggcaggagttcctgttttgagggggcctctcccggctggagaagtaccactgcctttgtgttacctgccatgttattgtggagtggataatttttttttcctgcatgggtcttggtttaacagcaggatcctctgggcttcttccaagaagcaccacatttccctgaaaataaatggcagatgaattatttcttgagattatgaaaatctgttagatgaaagcttgcctttttstcatgttcaaaacaatgctaaatgcttataattatactcccaatgaattacttctttcactggcttcctttgctctggcaaaggtggattttttttccatggcagagaaattttataaaaaatgtaatattttagaaawtgcctaaatgtcaagaatacaacatcttgtttgttgttgttgttgttgttttgtttgttttttgatacggagtctcgctctgtcgcccaggctggagtgcagtggcgcaatctcagctcaatgcaaccccgcctcccgggttcaagcaattcgctgcctcagcctcccgagtagcctccattgaaggaagtgccatagtgtgggaggatctttttattttctacgcgcaccgtatttgattctgtgtttacaggaactgtgtctgtagacaaaaagcaaaatgttgggktttagtttcttcaggtgaataaaatgttacttgcatctcctcattgtcacagtgttcgtattacatacttcgtgtgtgtagttttggcatttaaggaaacagagctaaaaaaaaaacaaaggacaataactgcatcaacaacatgttatacaccagaggaaatgcggcgacttaggttctgtgatgggaaacccggatttttttgttgtacttgaaatcttccgtagaacgtacgtgtttgcatgacccagaaaggaaaacacattggaggactttgtactagttccattctaattctgtaaaattctcacaaattcaggcatctgttaacccttcgagggcatataagttcagagccatgttttctgttttgtgtctttccctttggcggagtggttaccttttctgagcccttggcttgctttctgtgaacataaggcgctccatctgccgctttaaagtgaagatttataattcaaacaagacagcgtttcgatgttgcactcctgtcttattagatatcaacttaaagttaagaaaatggaattattcaaggccttgttatctagtttatagcttattcagaatttatatttctgatttttttttgtcctgatgactgcctgtgactaatttgtgtttttgttattaagctaagattgtatgaaaaatatggcaaaaacaaaattctatatttctaatgccccatgagaaatctgatttagaggcccttcctttggacacactttttgttttgttttgtttttgagcggagtcttgctctgtcgcccaggctggagtgcagtggtgcaatctcggctcactgcaccctccacctcctgggttcaagcgattctcctgcctcagcctcccgagtagctcggagtacaggcgcccgccactacgcccagctaatttttctatttttagtagaggtggggtttcaccatgttggccaggctggtctcaaacccctaacctyaaatgatccatccgcctcagcctcccaaagtgctgggattacaggcgtgagccaccgcgcctggcctggacacccattttgaatagcacttaccacagattcccgaagccagtggttttctagcctttttattcgccgttcgttgtaagcttcttgagtcttggtgattcttgtttcatttgtttttgtttctccccagagcctagcacatagtaggtgacgaacaaatgttcatcgaatgtatgggctcaaccatagtctatttttttcaaaaaggtataaatcttatcaatgttttacattttgctgaacaaaacaggagagagcggattcttttcaaataggaaaaattagggagggaaaagagggattgwctgaaactctattgaagtatgtcaacataaaagtttattgacagcctggcgtgatggctcaggcctgtaatcccagcactttaggaggccaaggtgggcgggtcactagaggtcaggagttcgagaccagcctggccaacatggtgaaaccccgtctctattaaaaatacaaaaattagccrggtgtggtggcaggcgcctgtactctgagctactggggaggctgagacaggagaatcgcttgaacctgggaggcagaggttgcagtgagctgagatcgtgtcaccacacttccagcctgggcaaaagagtgagactctgtctaaaaaaaaaaaaaaaaaaaaaaaaamaacaaaaccacccctatctatcctatctatcctatctatctatctatctatctatctatctatctattggtctatctatctagataaaaatagcagtcaactaatttttcaaattaaaaatgctttattgttatttatagcatgattgtttttctataaaaaaggcatattacaacagccttcgcttcacatmtgactcttgcagcattcttataaagagatctcacaccatatttgagggcttcattagttttctaagccttaaaaawatttcatcattaagattattctctcatgaagcacccaaaatatagacagcttttcttattttcttttcttcaattgttgacagtctaatgctgccagatctttatytgtcagggacttttgatgttgttggagccatctcttgtggactttatgaaaycttgcatgcagcacaatttgaaacttcattgtgcattcaatttgcattgcctttgctgtgttcacagtggcactccatgaggcttaactatggagatcctggtgctacaagccgttaaatagttctctcttcycaacctattcccctatcctgcttttcttttcttcatagcacttattacctyctgattatattttttgtttgccttttgtctatcacctgtcattcttttaccagaccatctagtctyatatgtctatataacctttctgaaaaacatcctgtgggaaatataccatatatacagaaaaagtgcacaaacatgaatatacagtttaacaaataatataaacctgytattcatgtagccaccacccagatgaaggaaatagaatatcataagcaccgcasaatctccatttgtgcccttctccatcgtagctttctctgtcccagacaaccattgtccacaacttgttgtaataatttacttaattttcttttatagttttatcacacataatttagtttttgtctgctttttgaactttacatgaatggaataatattgcatatattatttaatgctttttctttcatttaacatttttktktgtgtgtgtgtgagattctccaggttgttgtacacagtgctagttatttcattttgttatggtatagtatcccattgtatgattgtaccacagtttatccattttttagttgatgggttttgacttgctttcattgtttgggctattatgaatagtgctgctctgyacctgttgtacatatagcctggtgaacatgtttgcgaatttctatgagcgtgatcacrgtggtgtagaattgccaatcttcaacctgcctgtattttccaaagcgatcataccaatttatttaccttccagcagtktatgagaattctstattctcaccatcattggatattgtcagattttaacatttggctcaactgatgggtgtataatggtatcctatggtacttataatttgcattatccctagttactaataagcttgagcaatttttcatatttttatttcgatttcctaatttatgaaatgcctgtttaagtcttcagccatttcaaatgttacctgtcttttcaaaatgatctataggagttctttgtataatatatattctggcccctagtcctttattctttgtatgtgttgcaaatatcttcatctctgcagtttactctttttgtggtgtcctttgataaaattctcaatttggtgaatgtaattgaatttattaatttttctctttgttatgtatttttgtgtctttaagaaatttttccctatgtagggaagaaggacaaaaattgtctttcataattagttctttaacccttcataactttgagtatataaattattgtgaccatctttgaatctacagtagttgaattgcatatatagaggcttgagttcttaaattattctttccagggtgaatattagcatatcacaataggacagtagggacagtggctttttcgctaatgaaatctaagatttttccttttctgctcatgaaaaatgtttctgcttaaattgtaatgagtgtacaagaggcataaatccacagtgggtacaaatgtcaaagattatggtttaaaccagcaaaatatgtcttcttagatatacgaaacattttgtcaaatagcccctggcatcatctgggctaaatgaagaatcaccaggacrtgtgatacagtgaaactattccacttatagtaacagcacttagtaattgctttcattaatccaggcaggttaatattctatctacttgcataacaatgtcaaaaaatctattatctactgaaaccttttatatagcaagttaagctcctatttctttcataaagattgagattcaaatattaatccaaactactcagaatcactttctcttcctcacttttctgatacccccactggagagtgactgatcagtgcattatctgtcacctcagagctcagagtgcccctcttttctattcaaatacaaagccattcatttmctttgatggacaaatagccgtggcattagtatgggtaggggcaagtgctgttgtctcttatctaggaaggagttggttcttttctgatggttgaataatatacttaggtatagaaagagacctgagtgtcttgaaagcaacattctttcatttttgtcaatgttttaatcagcacccctgtgcatatattatctttgcatatttcagcactttgtattagacttctacatgttgtggtctttgcttctgataagggacagaataaataggaagaaagaataaaaaagccataatgttaagtacatccattccatgcccatagccatacatcacagaagtcacagggaaggctctgtgacacragataatkatgtggatgtgacagaacatggtagaggaaaaggccacagacaggtgcagagtaggaagaatgaaagaattcattgtggctgtcaaaatcctatgtttgtgttcccaaatcctatttcttttttcttttgacttgtgatgtattgactgtcaattagttatcaggtactatgttcagcccagttattgcacaagagatcctgaaaatctttaagtagctcctggacttggaagagggaaggaaggaggagacactaaaataattacaatatgttactattatacatgacaatatgcagaatgcatttggaacatagccaataactttacacagagatagcagtttttgagctgaattttagaggaccaagttgatagaatttgatgatcagatgaggggttagggagaggaagtctttcagtttattttaaggctggagtgaatattatttttgtaaatgcaggattttaaggaaaaggacaaaatgccagaagacagcagatttctattttctgtatatttgtacatcatgacaatacatttatagatacactaattcttgtacataaataattcatataatgtttgtctttatcagtctgaattgtcagctttggtcatagggaattggaaccaagtgtttactgagcatctactatatgtgaggcactatattaggtgctgggcatgcagtgatgagcaaaacagggatgggtccagctcttatagaacttagagttgagtgggaaaaacagaattaatcaaatttccatatttataattagaaatgacatatacatatgaacaaaggctctctcagaacccaattattcttccctttcactcttcttcctaatcatactaccagcgttaagttgacagttatttatcaggcatatttagcagccagccttacagttttctcttgcacactgttaacaattactgtcrcatggtcactgttacatgttagccaatagtgcctcacattcactgtggcttccaaagcttgggcttggggaagcaggtggatggygatatcatgagctcagatagagatcatgggagaagagatttgagatgttttaaaaaagtgttttgagcagatgaagttaaagagttaaagggaactatggtcaagtggaggtgctggtaggcaggtggaaatatacttctgaatctcaggatgactaatgaaaagcaagaaaatgaacaacaagggactattaatgtgtgttatgctgtgcttatgcattttgtctggtttcaaatcattgtatttaagtagttcttaaagtcacaggagtgaatgagattaagtagaggaagaaggaaaagaggtacagatggagacctagggagtgccaggcctcagagcagacagaggaagggcacgcagtgacagagcccacgaagtgtggccagagagcagtgatgaggaggattacmgagtggctcatggaaaccagcgtggaagctttcttatttcttcttctccttctgcttctctttctcccttcctcctttcctccctccctccctccctccctcccttccttccttccttctcctcctccttctccttcctcttcttcttcctcctcctcctcttcttcttctttctcttcttcttccttcttcctccttcctcctccttcttcttcctttttcttttttgagacagtcttgctctgtcacccaggctggaatgtagtggtatgatcatagctcactgyagcctcgacctccccaggcttaggtgatcctctcaccttagcctcccgaggagctaagaccataggtgtgagccaccatgcccagctaatgttttaatttttgtagacatgggacctccctatgttgcccaggctaatcttgaactcaagtgatcctcctgcctcagcttcccaaagtgctgggattacatatatgagccactgtgcccggctgtgggaagctttcaagaacaagagagaccaatgttgccagacaggccaagtaatattaggactggaaagcagctagattgagagactcacaggaacaagaacagagaattctgaattctaaaatccacaacgctcatttcactgaaaggtcgttcaggtggcggtggtggatttttttcccttagcygtcattttggatatttgattaattatcgaccattatatttccttcttcttgttagttacgatttactaagaagaatttttatgctattttaaagttaaatgatctgtgattgtaaaatcattcattatttacctcaactgctcacttaattttttaaaaacatcttcaaggctccttcagagtttttatgttgataattttaaaaaatctttttcaagttttctagaaacatgaataagtacacaataatttagttaatgtgggcagtaaatacacagttgtgatagtgaaatgtcttctatgaactagaaaataagaaaatagacacttaaagttcagagtagagaaggaaactcaaagagacakaatggttccagggcagsctaactgtacagtacccttaagaaaagtattcgtatctatatctctactgcagtaggccaagtgctgtggcacaygcctaaaattgtagcactttgggaggctgaagtgggaggactgcttgagcctaggtgtttgaggccagccctagcaatatagggagaccccccatctctacaaaaaataagaaaaattagtcaaatgtggtggtgcacacctgtggtcccagctgcttgggaggctgaggtgggaggatcacttgagtctgggaggttgaggctacagtgagccgtgatgacaccatcacactctagcctgggtgacagagcgagactccgtctccaaaaaaaaaaaaaaaaaaaaaaaagaatctgagaagcagatactggccatattcactgaggtgctaagcaggggtgggcaccctgcctggctctgtagtggtcatttctgacaggcctgtgttgtggagacagacacactaggttttcagagtctgatgcagttacattcgaattaggcaaatctcatactgattctgattccatgttccccgcaacaggcacccggtaaactggctttctggagagtctgcctttgagcagagaatgtgattttcccactgtccttctctgacctctcggcagttatacaattcttattgtaaaataaagctctattctggttttgtgcatcagtctcctgtgggtttaattcacatgcaagagcgtcctcgagcctgaatgagcctggaatggaatacagtttcccagcccatgaatcatgacctgaatcatgtcaaattcaccaagttatgctcccttttaaggtcacttggcagacaggcaggtaggaactttcctggtgaaccctccctgtatgaccatgcagctttccactgggarcttttacaggttgctgctatttttataaaaatgatagactgtaatgttgccgggsacagtggctcatgcctgtwatcccagcagtttaggaggctgaggtgggagaaacacttgaggtcaggagtttcagaccagcctaggcaacatggtgaaaccctgtctctactaaaaatacaaaaattagctggacatggtggtgcacacctgtattcccagctcctcaggaggataaggcacgagaatcacttgaacccgggaggtagaggttacagtgagccgagatcacgtcactgtactccaccctgggtgacgaagtgaggctctgtctccaaaaaaaaaaaaaagagttctgtaattgtaaaaatgtgacataggcattctctaatgtgcaatgaatagtcatttttaagcatttcatacaktgttcstgtactgcactggrtctccttgtgctgaactgcatgggataggccatttccatacaatctcatcctctgaataaggaaccatgatgctcmtaaagacatactaaatatagatcytgggtaatattggagtcagtgctggtcatcaatgattttctctgtgatgatagagggggtccactatgaatgatagcattaattttgctgtatgttcttgcatcattggtacataataattcatagacttcataagttattaatatacaagttacagaatttaataatgtaacccacctttgatatgttttcatayacattatggggaaaccatatttttttgaagtcaagaaatgtatattgcttcatgttgcaaaatktgtatgmtwtgtcaaagaagcattgccagaaaatgatctgaaatgtagmacaataaagttacattatagatgtcttaggtgaaccaagagaaaaattagtgtcagagttaaaaagatgcaagtcaggaattaaggcaaaacattgaccctatctgacttaggagaattctggtcatgtgatcttaagaagagagagtaactgacagttctggagactgggaagtccaaatcaaggcatcagcagattcagtgtctggtgggagcttgctgtctgcttcacagatggtgccttcttatggcatcctcacatggtgaaagggaacaaacagsctccctcaagccttttttgtaagggcactaatcccattcatgaaggcagagcacctacttgtaatactatcgtattcgttcgttctcatgctgctaataaagacatacccacgactgggtaatttatttaatggacttgcagttccaggtggctgcggaggcctcacagtcatggcagaaggtgaaggaagaccaaaggyacrtcttacatggcagcaggcaagagggtgtgtgcaggagaactcccctttataaaaccatcagatctcatgagacttactcactatcatgagaatggcatgggaaagacctgtccccatgattcaattaccttycacygggtccctcctacaacacatgggaattatgggagctacaattcaagatgagatttgggtggggacacagccaaactgtatcaactatcatacctcttaatactatcacattggattttaggttccaacatacaaattttgggrggacatgaacatctggacagtagcaatgctagtccattattytggtctgtctgaaggttttatctaggcagggaaaagcgtatgttttttccttgaccttgaaaatttagcttgggctttctttgtacaaacatgaagatcctaggagaagcccaatcaatttkakagagacaagtggatgaaratagggattaaaagaattgtgcttgactgagcagaragactgatgatctgaaaggacaccaggtaaaatgtttctttttagctttacaaatgcactgcttgttaacatctatgaattcatgtactygcttttccatgctatagacgggtaacttccagggctgytgtgtggcacaagtttggggagtagggatggaaatggtacccttaaagttatgcagtgcagacctgcacaacctgacacaggggccttgggtcagtccatgtcggtgagtgtatgatactctgatatcttaaaaaaaaataacataagaatctgtaggctcttgttcaaagatattgcagagacaagaaccccttccacaggtaaagaaggcacgtgagactcatggcaaattcattgactcttctgtccgagcattttcttgtcattttcattatagcccttccttgtaatcttaacatcaatggtaccctgcttcttagcaattttgataaatctttgtatttcagcaaatacttgaaaaaaatgtaggatccactggcttatatcttctgtgtaggcatcaaaacasatggtggtggggttgttgggaagatggtagcagacagrgttgcttaaaaatrtaagacttccttgatgtccaagaatactgagatttatatgattagaaatttctatacaaagctggaaacagtggagcatgttcccayatagaagcacaggttcccagctcccccagaggccctcatacagagctgcagctgcctgtgatggagcctgcacagattcttccagtagacagtcactttccttctttcttggcagtcttgtgccctgacagcccttctgatggctctggagcctctggctgcctgccttcctactcaccaggtgcaacttgttaattacttgcatgcaatatgatcaytggattatggtacagctttggctaaatcacttacatttttcattcttattaatttggagacatgcacgtgccaacccaagtacrataaatggcacactgtttattgcaagcactaaatagatacatcgaaggttatgttctcaggcatccctagcttataagtgtacattatgttgatttgatattgggtgatgaccaaacacagttggtcaaatcctccctctgggagttggagagacatagaaggaaaggaacagaaatgccagtggtgataayagggacagcagaaggaagaggagcagggactgaaagccactgagtcagagtacactgaggcatatgagcaatacctgagtggaatctgtggttgcagggcatccctacctctgcctgcacatctgcttctttcttccctacccccagtttccctttttctccttccctgtggccatagtggaagatggaggcttcacagttcctgagactagatgtcttcagttcaagcagtcagcagagacttgtttttttgttgttgktgttttttgtttttgttttttgagacagagtctcgctgtgtctcccaggctggagtgtagtggcgcgttctcagctcactgcaacctctgcctcccgggttcacgtgattctcctgcctcagactcctgagtagctgggactacaggcacacgctaccatgcctggccaatttttgtatttttagtagagatggggtttcgccatgttgcccaggctggtcttgaactcctgacctcaggtgatccacctgccttggcctcccaaagtgctgggattacaggcagagactagttttttttaactttttttttttttttaacagtcttgctctgtcacataggctggtgtgccatggcatgatcatagctcactttaaccttgaactcctgggctcaagtgatcctcccgtcttagcctcccaagtacctagggctacaggtgcatgccaccatgctcagctaattttcttgccatgatgctgaggcyagtcttgaactcctggcctcaagtgatcctcctgcctcagcttcccaaagtgttgggattacaggcgtgagccaatgcacctggctgagrctggtattttcaaatttcaattctagctgtcagggagagagaaattgattggcccaccagggaccaggtgtttgcttctggtccattcttctataaccagggagacatttatatatataaacttggctgctgaggcccaaccctcaaaacatagagatttgagcaacattagaataaattcttttatttatggaattatttctataggcatatgtcataaccttttattttctttttaagaaatcaagtctacttaatatgataataatatagtcaaagaagtacacagccacgtatggctggatttgatttcttatccaatasctggatctgagaaaaggttgttcagttacattccagaagcttcagtagcaaaactgctcttttttcccccaacttttactttatattcagagggtacatgtgcaggttttttactgaggtatatcgtgtcatgctgaggttttgggtatgaatggtcccatcacccagacactgagcatagtatacagtagtttttcaacccttgctctcctctctccctctcacctctaggcatccctagtgcctagtattgccatctttatgtccataagtacctgatgtgtagctctcatttgtaagtgagaacatacggtatttgtywttcttttcctgcatttctttgcttagaataatggcctccagctgcatctatgttgctgcaaaggacatgattttgattttttatggctgcatagaattccatggtgtttatataccacattttctttatccaagccactgttgatgggaacctaaattgattctgtgtctttgctattgtgaatagtgctgcgataaacatgtgagtgcccttgtctttttggtattaatagagtggtttgttttcttacggatatatacctgaaactattcttgttaagtgagtcaacaaggcccacctggcagaagaggaaacccaagaacattaaatcagttaagatggaggccaaggcgggtggatcactggagctcacgaattcaagaccagcttgggcaacatggcgaaagttcatctctacaaaaaatacaaaactagccaggcatgatggcgtgcacctgtagtcacagctactcaggaggctgaggtgggaggctggcttgggtctgggaggcagaggttgcagtgagccaagattgtgcctctgcactccagcctgggtgatagagccagactttgtatatatatgtgtgtgtacatatatatatatrtrtgtgtgtgtgtgtatatatgtaatacatatatattacatayctaatatatataatatatatgtaataaacatcatgtatatatgatgtttattagccctccaatgcttgaaatcaggggttggaatcaaggctaaccaactctggtctggtcaccatcactgaatgcttgcggtagccatgtgaacattgtttattgtcgtatactcctgggagagtcccagggatgagcttttataaagttgcagacgggaaagggactctcactttggagagaattaagcatgtcacccagttgcctaacaagttattgctgtgcaggcaaaaaacagacaaaagactcacccaactctaagatttttttgatggacttctctaagttcattatgataaagttaatattatgatttttccagttctcaatattttgggtctaaccctttttttattactttatgtatatgttctgggctccgtagactctctggagtgacaagaaaatcttgaaaaataaaaggcgaggtctattggagagctgttcgtggatgattctgatacgtgctcttggttaagaatcactgctctggttttcttcccagtgcctcttacccaccactgttagatcagttctttaaacaccacttmaactcccacttttgtcagcaacctcctcttgacagtcaagctccttagtctggcatgtagcactcaccattacttggtgtgagtcctgaattctgagcagccagtgtctccttatctgtcacattcgtactcatttttatgactttgcaggtcttgctgaaaattcttccttaacttgccttgagaacyaccttttccaccaagcattcccaatgaatgtagctcgtggtgttctttccttccaaattcctgttctcttatctctactgcttataacccaatacttgactatatattgtcttgtataaatgaagtcttttctatcaaagtagatgttcattttcttaggaggaggaatgtctttggtatcctgtacaaaatctagcatagcctggtactcaaagtcaccttaatcatacactaaatggtatctttattgatgggttgtcgataaacctcctgctttatcctgtatccaattaaaatgatccctcgtcagtttttcctctgattcaaacattttaccccacattgtttctgcaattagacagaaaartaagcatctgtgaagtcaacctttttgctttttttactctgaagtgctgctttttttttcagtaagttgtggttttaaaaaaatccagttatttgaatgacatttattatttttgcagttaataaatgtattttaagtttttaaatccacagtgtagataaggccctagaagcaagtgtagacttcgtccacagctgtactccatcggccactgacagtcttattgcattatttcaacggcacaagcaatcatttacacttgttattacccaggggcatttcaaactgttactgaaatgcatccatccctggagtaaccatctgtgaatggtaatgccataaggtagagagactaaatctaattgatatgcaaaaaggagaatttcagctgtccagctatggagattcaaattsaacctttaataggctgaggatttcagctaaatttttaaaatcatgatatctagttcaggcactcatcttttaggtttctcacagattaaagtacagccgtcttccttgaagtaagaacatctcaaagtcaaaaatacttgtttattgtaaaacaaaatgctacagagaaaggaaagttcttgtaaaatacaaagagatcgcttttgttgctatataatagcaaagcagctgcacctttccttggtttttacacttgtttgtgcctcaaattgcctgaaagaaaaaaagggaaaataagaaaatgctttcagatttcagttgcattaaaacataaaaaaaattgggagcaacatttgttaagatattaagatatagtcatttacattaagtggttttataaaagtgatttataatcttttaaagttatctccccctttcttatgacacgtaaccctaaaagagccatttaaattagctgtcaggcaagatgtaccaggcctttccagtgatcccagcccacctggacatatctagcaattctgcagaccagcacatacttctggaaagatgttgcatggtgatttatagatctgtgtggacacataamacctttacaatggagtgaggtcttgaaatagccctgctgttgctgcccattgagagataagtattctcctgaggtattccccaacagctggaaatgaagtagcagctcttgtcagtctgtgacaggagtggattatcagacatttgtaaagagacaacagcagaatcaggcctttttgcaataaaattgcacacatagatattattgctcctccagcgtttcatatgcagtgtcaaggcacgctacagttcaggcagcaggcaagcagctctgtttgaatggtgggacaaacatacctctgtgtgtgaggtgcctgcacttgccctgctttgtcagggaggacacaatgccactttctctgctcctcagcatagctcaattccagctcccgggatgaattaataaagagatatagccgagggcagtcttagttggggctcaggttaccagctgtcacattactgaaatctcaggatatgcttacagtaattgaaggaaagcacattagggttatattgactcagaatgaggcactctctgggagatcaccgtgaacagcattttgggagcaacctagatcatttcccctaaaattctgacatttgctttttggtcttctgggctccaggtacttattactctttcctgaagagctgttaactggctgtcaagtttacattttgaaatagtgccatgatggcatccctatgcttggtattatttaccccacggaggagatgtgtgtattgcagaacactcatgtttagatcagccaagagaactgcttggaacaatcctagaagcaggcaaagctgcattttatgttcttcatatattatttgaaaattactagtggtcaagaaacattccaactgtttgaattctcctctccaaacaggaaaattctgtaaaattgtttttcatatatatatgtataacacacatacattttataacacatacatacacatataagcatatactaaatgagttagtaaatatacaacactttgaactgttgcctgggatataattactggcataattacatgtgctcgttattatttttctaaatcaaaggtctggttttcataggcttaaaaaataataaaattggatgttaatggtacaagttttgaaaatatttgatattgattcaggagatgaaactgtctagaaattactcttgtctattataattaagtccagagtcttattttcagagataagtacttgatccctacttttgtgtgtcaatttgaatttaattttttaatgcatgtcttttaatactrccctttattatagatgcagacgttaatgaagaatccagtcccatttgtacaaatgccaaggagtttaccctctattgaagggatgaaatgttggtagagcaaatgcaggtgtattattatgattacttttggatactttgtattaacaaattttcagacacattcctaaagattctggggggctggagcaagcaggcaaacagaggtccacatactctatgtgtaaatactaaaagtgatcaatcaagggtgctctccaccctttctgcttcttctggaagctaccaagattcctgggtgcccaaggatacctgttgggtggttgcaggggccacctaaccccaaatttccttgccaccattcccttcatcctctcagcatgacagctggtttcctacttttcctcttcttcccccttttttctgtctttggccaaagcttagtgaattttaccttagagattttacttttaacctattcccatattttaaatgtttccacgtattcactgcagtgtgctgatggttggaggtggtaatacagtttcttggttaaggtgtggtctttggaatttgactgcctgtttaggtcctggctccccactattagctktgagaccctgggcaaattacttaacttttctgtggctcaggttccagatgtaaaatgaaatttttaaaaaagcaacacctttaagttttcttaagaattaaatgaggctgggctcagtggctcacacctgtaatcccagcactttgggaggcttacacaggacgataatttgagcctaggggttttttttttcttttttttttttttttgagatggagtttcactcttgttgcccaggctggagtgcagtggtgcaatctcagctcgctgcaacctccgcctcccgggttcaagcgattctcctgcctcagcctcctgagtagctgggattacaggcgcccacccccatgcccggctgatttttgtactttttaagtagagacagggttttgccatgttggccaggctggtcttgaacttctgacctccagtgatctgcccaccttggcctcccaaagtgctgggattacaggcgtgagccaccgtgcctggcccaagcccaggaattgagatcagcctgggcgacacggtgagaccctgcctgtataaaaaagaaaaatttaaaaatttaaaataaaaaaaaattaagtgagttaatatgtggaaagaatacctctggtatataggaaacactcaacaaatattagctattctttttcttggaactctgaaggtggcagacttgctccctcttcctgtgtggagagaagcccatgtactttatttgtggacagtcatctgtgattctcatgaatggctttgcttccttctcatgtggctttcacacttatgcagagctttgttagaacctctgctgcatcctgcagtgtgaaatttacattcccacctctccatctccattggtttgtgagcccttcaaaggcaaaaattgtgttctttggttttgttttcctagggccttgcacagcacttgccactcttgattaagcatgcttaagaaatgcttgttgagtgagtgcgtgaaaggggggccaataacttgtatggttatttgtacgccatcaaacttttttttttgagatggagtctcgctctgtcgcccaggctggaatgcagtggcacaatctcagcgcactgcaacctccgcttcccgggttcaggcaatactcttgcctcagcctcccgagtagctggaattacagtcgcgcaccaccatgcccagctaatttttgtatttttaatagagacggggtttcatcacgttggctaggctggtctcgaacttctgacctcatgtgatccacccaccttggcctcccaaagtgctgatttacaggcgtgagccaccgcacctggctcatcaaacgtttgatttatcggtttcctagcatataaactagctgcgaagatgtgtatttttttgagaagccatgtggagagagtaggggacacagaatctgctcttcaggcatgctgacagcaaaaagtgactactagtaggccatgagggatggaagagagaaatactataaaaagcatagttgtctggggctatttaaggaagacacaataacacactgcacatcccaggacccctttcaggcatcactataatagcatggtgtaagaactgtgtcctctcagtcctgttcagcttcagccactactatcctttgtctattaatacagcaccaaccacttggtcccaaaggaacgttctggcgagaaatgtgcagagwgaatcagttcgccagcaggtgcgattctggaattgtttggctgccagagacccggtatttggtgtgtccgtcattactgggtgtttgtgtccccaagccagagtcatcatgttgaccatcctcctgaactggggctctggttggattcccacctgtttacctggtgccttaacgttcttctccacttatcttgccatacccttcctggagaggaaagaagacaattaatttctacctgtagtttgggttctccttcaagagaaattacaaaactgcctgccttggacccagagctttccttctttaggatggtttgggcctgacagcctgaggtttgaatctggtctccaccatttcctagttcatattcactctcagcaaatatttaactctctaagcctcaaatttctcacccacaaaatagggataataatatcctgttgttgtgcccttagatgacgcatatggcatctaacacatacttagcatgtggtttagtctggcacatacttagtattcagcaaatggtagctgctacccctcccacggccatgtcccagctactggaatagctcactctggatattgttcacttctggaaccaagcccacctttgccaggcagcctcggctaatcccttagagatgtccccacagcaagggaatctctgctagcatgccttccatggcctgttttgacaagatgtttataattctccaggttgttaagaaaaggttttatctttaaaatgtaaagccatcgttagctaagctagcttaaaaattctattgtatactttagaaatatttccacaaatatggctaaaataaatgtaaccactcttggagaggcaatgttcatttatcttgaaatggaagtgcctcacttttttttttttaatggagcctcaatacagtctgaaaaccaggtggaaagtgtttttcagtatcaagtgtggtaaataagagctaactgattcaaattacttttattccttatcatctgatatgaaaatctgaatcatcttgaaatacagtggtgccccttaaaattgcttttctgtcttatattcattcattcatgcagcaatttagggtttattatatacaaggtagtaaggtgggtagatattcctgtttgtgactgttgaaacattttttattaagtttcaggtatcatacacacatacacagatacacacatgtgttttgttttttcccctcttattaaaacttaacacatgaaggtagataatatttcaattgtacttaagcactatctaaatttgctttatgtgcagcaagactatgatataaccttgtaaatatctaacttcattaaaaacacacatttatacagaataggttaactctgtggctctctgagcaatatcttaacctttagtctggaagccttaatgacacactaatatctaatattgcctataacttcttcagatccggaaagaaaagtgatataaatgtcattatgtcttgagactcacctaaatgcaatctttaacatgacttactgagcccccaacatggtaaaagatcttagcctgaaaacactccttgtcaaatcattgcccatcatagtgctgagtagtaatctctccaggctgaaagatggcatgccgtataacaaatgaaagggagctgacactagaaagaacattagtgaaatcaatatgattcaaccagagacacagactccgttaatggtatgtcaatatgaccaattatttccacagcactgacatcatgattgtatttttttcttcatctttaggagagaacagttttacttaaccgtaattgttgaattatagccattggccgagaaagtcttggatgttttacattgttatcgttaccagtttcaatttgtctttatttgatatctaaactcctgatcataacttaccatagtttgaaggttaagatcaataaagtggaccaaacattcagtgaattgtgaattctagaaatgcctgatggtatccactgcccagggaataagatgtaatggaagcaggcagaacttgaagagcaatcagagattgtaaatataatcagaattgaattcatatagttattttgttaatttctgcttcctcaactagactgtaagcttcttaagtgcagggaagtatatattttacttgtcattgtatttgtcattctatgccatgtctatcacctggcatagaaggcactggatgaatattttttgaataattttctaacttttcatgaatttttgttcaattttctcatattgggaagctgccagttttagagttataccaacactgccataataaaaaaaagctgtcaagatcaggaaactgcagatactttygcaggttccagaaccagcaaaggaatgccccttaccatacccgtcagcacccatgaagtaagggaatggacactgcaacttctggtagcaccatcacagagaagggaagtgccttcgtgagcaggcttgatggcagcaacagccatccctcggtctcacatccccctttgtaatcccacaggcatgtgtctgattggtggattctaaaccaccctcagaaatgtagctgcaaaggagtatgaaatgtgcaggttttaatattccagcctctgctggaaagaaggcttacagaaagaagttggaatggatgttgagtgccaatctactgtatctattctacttccttaaagcttacattccattaacagtctttggaagaatgtaatataggcgaagatttttcagtgccaaaaaataactgacatggataaatgacatgaggcagtgattaagtatgggctccagagtgatgctgtctgaagtcaaatcctcttccacctctatgggaatccatttccatatctataaaatgggtatcatctttcttcaaaatatggctttgaggrataaataagaaaaacagtacgatatgcctagcagagtgcctggctaatggtaattcatcaatagaggttagctattatacttccaatccttattcttcaaatttttgttttcctggcaggaaacggagattctttaattaaaaattaaaatttgaggttgggtatggtggctcatgcctgtaaacccagcattttggcagacsgaggcaggaggatcgcttgaattcaggagtttgagaccagcctgggcaacatagcaagaccttgctctgctaaaaacaaacaaaaraattagccaggcgtagtgatatgtgcctgtggtcccagctactcaggaggctgaggcaggaggattgcttgagtttgggaggtggaggctgcagtgagctatgattgtgccattgcactccagactgggagacaaagtgagactctgtcttaaaaaaataaaaaataaaaaatttgatattttataattttaaattatggttttaacatatttagttgaaaaggactcttccaaagcctcatgaatatctcttacacatgttaaatgataacgcaggggtcttgagttctgaggattgttccagtatttctacttgctttttattagctccacacctaagcaaccccaaattgagaacgattttcattataatagattttcatataacattttattatttaattcttcctgccttcttttcattaatttatgcagcatttgagggtttattatgtactagggtactgaggtggataggtacttctgttttatttgaatgatataaattcttatttctttaataatatttttattataagactaatacatgtttattgtggagaatttgacaataaacaagtgtatagagaataacattaaatcacctataatcccactctacagggctgttggtagcaaagtgatattttcctctagtgtttttcttgcatatccttactttttaggaagacattatgtattcagtttggtatcctgcttgttcactcaagactgtattatgagcatgtttctgtgccattaaatattcttggaaaacattttaatggcttgatagtcttttattatatgaaatataaaaatataaaaattgctgtttcccgttttccagtattgtagtcatgtctttggaacatagattctggtgctcaccaaatattccatgtggccctttctatttcctgccttcctgttttgttgagttagaatcatgagactgatatgagtcagtggcccatgaacagaatccactagtaccactcacaggccaatggtcagaacccaagacccctgcgttatcatttcacatgtgtaagagatgttcatgaagctttggactagtctttttcaactaaatatgctaaagccaaaattaaaaactatcaaatttcaaaattttttttttattttctgttttttaagacagagtctcactttgtcttccaggctggagtgcagcagcacaatcatagctcactgcagcctccatctcccgtgtgtttcctttcttcccttcttctcttagtgaaacgaacttagaagtggcatatggcgaatgtcacagctataagttggaggaggaactaccagtctactttcaactttacctagactgatgttgagtcaaatcattgagacttacagatttgtctattatagcagcttgtgttaattatcctgataatgtatagaatgtatcttgtttaccaatggtattgatttattgttatattttttaaggaatctttgcagttttaatggccatgctattatgccccaattctcattagcgcacttaaaaatcagttctttccaccctgtaaactgaaaataaatcagaatatatggttcaaaagtgaaagactaaagaaagtttactaccacgcaatcctatctttgtctctttctcttttttattggcgtcaaactactcagtattttagactgcaaaatttccactgcrtggaggaaagtaaatggattgggattatttcctgcaggtaaatgaaactttatggtatttgttatggaggcaagtagggtactyakagaaagccaaatataacctgtccctccctatcttttccttagttgtgagggtcaaaggggcacattacagtctggattcagaaacccctttcaacagcacgtakatagttaaagagaaagattgttcttcaagggcctctaaggacaaaagtgaatccaytaacactctaggaagcagtgtgactactggaagaaagacattcaagaggtraaatggattttakaaggtcacasgagccaattgtcagtgtttgtactcttcatcaaaattatttttaatgagctccctgacaactgcgcatcctgacagcacgggtgaagtggctcatctggggtcatgcccgtgcctgacactgccctaattagctgacactgctctgctttgctgaagcacagggaggtctctcgagaaagatccagaagggaccatgataaatcggrcaaaatattccttgagagcctgaggttcacatgagagctcagaggaattacaataaagatggattaggaaaatggaatattaggaggggaaagactagagttactagaagagatatttgaaaagagattccaggatttactggacaggtttgtttaaaagtatttgagttggccgggcgcggtggctcatgcctgtaatcccagcactttgggaggccgaggcgggcggatcacgaggtcaggagattgagaccatcctggctaacacggtgaaacaccgtctctactgaaaatacaaaaaaattagacgggcgtggtggcgggcgcttgtagtcccagctactcgggatgttgaggcaggagaatggcgcgaacccgggaggcggagcttgcrgtgagccgagatcgagccactgcactccagcctgggcgacagagcgagactccgtcacaaaacaaaacaaaacaaaaattagctgggcgtggtggtgcgtgcctatagtcccagctactcgggaggctgaggcaagataattgcttgaaccagggagtcggagattgcagtgagctgagatgcgccactgtactacagtctggtgacagagccagactstgtctcaaaaaaaaaaaaaaaaaagtatttgagttgatgctcygtcaaaactcatttatcaagaggatttggttttaggcaacgaaaccttgcctcaaactcatttccaactcagcgggtttgaagatgtgcaaggattcatctgttcaaaagcaaaacatgataaaacaatgcagaacacctcaaaaccatagagaagtacctgtggaactgttcaggagtcctaaaggggctcattctaagtggaaaattattgttactctttcttgagttgtttctgtgaattacgaaaaaggcctatctcagtgaacagaccatgttgatcatactatgaagcagagattgtagagattttattaaactgccatacttctcagttcagagctgttttactccttctccctgggacatttggcaatgtctggagacatttatttatttatttatttatttatttatttatttattttttatttattttttggagccagcgtttcgttctgtcacccaggctggagtgcagtggcgcaatctcggctcactgcagcctctgtttcctgggttcaagcgattctcctgccttagtctcccaagtagctgggattacaggcgtctgccaccatgcctggctaatttttgtatttttagtaaagacggggtttcaccacgttggtcaggctggtctcaaactcctgacttcaggtgatccacctgcctccgccacccaaagtgctgggattacaggtgtgggccaccgcgccaggctatctggagacatttttgattgtcacaactggggggatgcttctggcatctagtgggtagaagctagaggtgctgctaaccatcctacactgcacaggacagccaacaggaaagaatcatccagtctcaaatgtcggtagtgcccaggctgagaaagcttgagttaaagtaaacctgataacctgtatttaaatgaataaaagggataagactaggggagaataaagctgtccacatttgtaagcctctaccaagcacagtgcctgatgtgggattacagacaggcgcctgtctcagtgagatcatagcatcagtaatccctgtaccgtatgtagtcccagattggaatccttgaccgaaggcaagttctcaacctctctaagactcagttacaaaaamgagggcataatagtgtctcttgccttataggttttggtgaaaattgaataagaaaacatcagtaagkatgtggcatggtgcctgacaatctttagatgcccaataagtggtagctagtatcmacatagaaataaaattgaaaagatacacacacaatgtttgcattggttatccttgggtaatgggttttaactttgtttcctagattttaaatttttccaccataacacgtattgcctttataataacataattcacktgttttaagtcgattcaggaagcttctgattmtatattataaattctaaatgttcccttctattttccagagtcaagtttagattatctagatcatgaaataatcagatattttcagctattacctaactcatgagtgtgtggaatgctgtggctttctgttattagaatgaaataaaaatgaaaaataaattgcttatcaatattctgagatagcaaagcaatgatgcatttatgatagactggatgataggatttgtttttgctgaacttattcatacatatttgtgttttgcttaractttaaaattgtttctttttctatgagcacatagcaataactgggaagtggctgagaatcattcttttttttttaatttttgagacggagtcttgcactgtcgcccaggctggagtgcagtggtgagatctcagctcactgcaacctctgcctcctgggttcaagtgattctcttgcctcagcctcccaagtagttaggactacaggcgcatgccaccatgcctggctaatttttgtatttttggttgaaatggggcttcaccatgttggtcaggctggtctcaaactcctgacctcaggtgatctgcccaccttggcctcccaaagtgctgagattacaggtgtgacctaccgcgcctggcctatcattcttatttgacagggatttccctattgctgggtgctaagtgattgagggaaacccagaaacagctttgtgttgtggttaacagcacagattctggagccaggcttccttgtaccaaatctcagccctaccgctaactagctttttgacttcagtgaagtttyttaacttccttgtgattattttcctcatctttgaaaaaggaataatgtcctcaacaggtaacatgaaggttaaaaggagatggcgtgtgtgtgtrtrtgtgtgtgtgtgtgtgtatacttgtgtatctcatccctaaacaaagcctggctcatagtaggccctatataagtgcttgttactatgattgaaagttggatatatttttaaatttctatttttcaatcttttgcaaagaaggaaaacacaactttgataaaggtaattttggtagacattctctaacatgtaaactgcttgtgtaaactgggaaataccagattgctctaaattaattagttctatatttgttcaattacactggattgtgttctgtgtttttattttgttttgtttcttgttttctactcacatggtgagacttggcttgggtgagtcatttctttgaagaccctcagttcatactaaggggcaaaagcagatgagggtccagggcaaggcatggaagccaactgctcagtggtttcaacccgggcttcatgggaaaaggatgggagggtggggttgggtgtccttgagattgaggtgagaacagttgcctgagaacaggaaccagaaagtcctaacagcggtcgatcactgataacatttgtgctgaaaacatttcaggcccaaactgtctcagccatgctgagcaaggcaggaacttgggatgtgaaccactctcttaatcgggtccactgtgtatccaaagttgacccttgagggccaggcacggtggctcactcctgtaatcccagcactctgggaggccaaggcaggtggatcatctgacgtcaggagtttgagtccatcctggccaacatggtgaaaccctgataatacaaaaattagccaggtgtttgtggcgggtacctgtaatcccagctactcgggaggctgaggcaggagaatcgcttgaacccgggaggcggaggttgcattgagccgagatcgcgcgattgcactccagcttgggcaacaagagcgaaacttcatctcaaacaaacaaacaaacccaaaattgaccattgagaaaaacccttgctttgtgcccatctgttgtgaggagatgggacagccttgcccctgcatggaatctgctcaggagctttagtttctgtagtagaaggtgggctctgtgattaactctgtggagtttaaggatctgggttcagtgagcactcaggctctgatggggaattgtacctggaacggttaattatctcgtaaaaagatcaatggaaaaattattttcaagaaaaataatagataaaatttacctactctgatacttagcacaataaatatttattgaactgttgaatcttttctaggtatttgaagttttattttcaggctagtggcttttgaattctgccacaggagaattcagttctccttctgaggccttctgaggaggggagagagtgaaaggaagggaagaagcagcttggcctggacccattttttccattaattttttttttcttagtagagacgagctctctgctatgttgcccaggctggtctcagactcctgggctcaagcgatcctcccgcctcggcctctcaaagtgttgggattacaggcgtgagccactgtgcccagcctggacccattttatatactagacttttctagaaggttctctttgaagaaaagttttctctgctaaccacactttgaaaaattatttctgtaggaaaatgatatattatccttygataacctaggtcgctggacagcttttgttaaaaagttctacccatgtggctttagcttccaaagatacacttcctttttttgagacagagtctcactgtgttgcccaggctggtcttgaactcctgggctcaagtgatcctcctgacttggcctcagcctcccaaagtgctgggattacaggcatgagccactgcgcstggcccccaagatacactttcaccaaactgtgtttcaaagttatgcttttaaattgtatttaaagttcatataagaacaggcttagctgtgacactgtagaggcgagaatgtggagttgacacgggtccttttcacacttgttccccacacagggcccacatgaaacctgtccctgagtttaatcctaagaaaaaccttgtttcactagcaaataattcccttctctgagaaggcaaattaattattttatttccaactttctcttaggcatcctgaaattytgagctcagtttcatgctctgaaaaagaaaaaataactgctagagtcacagaaatggtattgactttttggattggaatatttgttttctctgttccttacctgtttccccctatttttcttacttcctttccattttattttgtatgcctctttgtaagctgccttaaatgctttttggaatgaggcaggatayacattcaataaataaaatatgtytgagccacttatgaacaaaaccttyttgggccagagcctaaacattacttatataaaaagacctgattcctcaccttctacaacaatattatttagtcatttctctgcattgtactcaactctttaaaggttatagaattgtagttagcgtattagaaggctcatggatmtagattmtatgtcctcagcaggtgaagtcttttttacacaatgccactgtacggattgtagagttcttgggctggcataattttatgtgaccaaaatttggcaaagggtcttatcaktttgaggagagattaktggagcattgaatttcasagtttgaaatgacattagagattatctggtccagtgattctcaaccagggagacatttggttatttccggagatatttttggtcacaactgaggtgggtgctactggcttctakggatggaggtcaggaaagctgccaagaacccgacagtgtacaggacagcccccacaccagcatgtsactactgccgaggacgagaagccctgatctagccaatcctgtcatttttcagactccagggagtttgtgacctgaccttcaaatataagatttaatatttaattgcccaaattcattcttaaaatatagcaaaatgatgagaaatttcccttcaaaactgagaacaagacaaagatgtctattatgatagaccgttcttagaagtttactgctcctcctggggatgcctctcaatagagaaattctacattcccgcctgttgaaagcagacatggttacttgacttgtttgggcctatgaaatgtgaacasaggcgacacacgtcacgatcaggtgggagacttagtaacacatgcctggtgtcccatgcccttttccctctgccagtgttccagggcgtggcaggactgccagcctggtcttggagtcacagctgggccccgaaggcgatgctgtgggacctggaaataaagctttgctgttgttttaaaaatggaatcacattgtaaattaggatcctggggagcgtggcactaggtattcttatgcagagctagatggtgatgctttcctttccttatcacttcaagtctgcagacacagccttcagggcgttcttcttctgtggttcctcagttggggcaccttgtctggagtacacagtaaggctatgccacagtcctgctatgactgagatggcaatatgagtgcttttctttgttggtggtttttatatttatgtttaaaaaattataaactaggctaggcacagtggctcacacctataatctcagcactttgggaggccgaggcggatggatcactctaggtcaggagctggagaccagtctggccaacatggtgaagcccggtctctactaaaaatgtaaaaattagctgggcatggtggcgtgcacctgtagtcccagctacttgggaggctgaggcaggagaattgcttgaacccaggaggcggaggttgccctgagctaagatcatgccactgcactccagcctgggtaacaaagcaagacttggtctcaaaaaatacacacacacacacacacacacacacacacacacacacacacacacacactaaaactgctgacattgagcattatacagtaagacagattttccttccttgtttctttgcatcaattttctctgcctctccctccgttccttttctgtttgcttctactcaggactgggcacgaatgcacacattgctgtctggcttgtatctatgtggtaagtctagaatgatcagttactgaaagaagagggaatcagtgctagtgaaggatataggttgtggttaactggagttcccaagtagctggatcttttgtgacagggattggctagtttggttttataccagatactagttatatagagatgaaaagacaagtttccttcactcaaaggaaccttagcttagagtcttgcagggaaattgatttgcaagcaagctgctttgctcccttactctaaactcacacttgaatctctgatcttaacactttgatggtgaagaaaaagccctccagagaaaaggtagtaagagatccagaatctagagcctttcccaaggcttcaggtagatctggttgaattcaccttgttctctcttgccccctattctcttatcagtcattcccacagctttaagtgttttaaaggagtggaaagctcccaagactcaggcccttatgtcactcctgacatgcacttataggggagtccagagtgtttagtcctccagggtttttatgaatggtcagtgttactctcagaagatgctgacctgggtaggacaggttgttcatccattcatttgtgtgcttaccatgtgccaggcacagttccagaactggggatccactgctaaataagactgataaggtctttgctcttaaggagattccatgctagacattaattatattaatcttgactccagtttatgccctaagccaagctatcctctattctctttcggcatttttcagttgttaaaccagcatcaccaggttgacaacataacccaactaataccaacaacataaagtgcctgagttcaccagcccgctcagctcccagctgactgccccggagtcccgccctgttcaggcagaggcagagtttttttttttgttttttttggagacagcgtctcactctgtcgccaggctggagtgcagtggcacgatcgtggatcactgcaacctccgcctccagggttcaagcaattctcctgcctcagcctcctgagtagctgggactaaggctcaccaccacccctggctaattttttttgtttgtttttagtagagatggggtttcaccatgttgcccaggctggtctcaaactcccgagctcaggcaatccgcccgcctcggcctcccaaagtgccgggattacaggcctgagccaccgtgcccggcccaggcagagttttaattgaccaccatccyttgtccgactcctagaaactttcacctggattccttaaagtgatgccttgctgacctgattggataactcagtattcattgctgagtagctgaggtaagcgtgatgttcacttatttctcagctatctatgagagctgtagcttacattgtgatcattctggtaaatgttctctaagaaagaaaacgaaaaaataatggctagagtcatgttcacctagttttaacatctttagagttttgcttcttctcagttcagtagctcaaagagagaaaaaacacccaaagacagcaattcttcactctaaacccaatattcttcaactttctagaaattattagccacttaatttactttgattttcatctctgaaaaagtattcagacttatatatagttgccagatgtgttcatcaaacacttctctaagaaatttgtatatttttggaattcagtcaacattttttggataaatgaatgtgaacactttaggaattgcttattccacaaatgatytcttaccaagatttccagaaactattttcatattgaaacaaaaacaaaacaacacaccactctgcttcttcccacagagttctgagacagcttttacataatgatcttgaacatattgtaatcttgtttatgacagaaatgaaaagctgtcatcacatttctgttttggagagttcattgttttccctgtgaattcataggagttctttgtctattataaatattatcactttgtcttgaaaatagctttcccttctgtactctttctctgtgggctttatgcatcttttgtcttataaaatgtatgatgtctacagagtcagatgtatctgttttttcctttttagcgtctttattttttgtttaacacaaaaacatctgccagttggtaagttatagaaatattcttaaatttcttctaaagttttaatattgtatttttcagttaaagtgtaatccactgagccaggcgtggtgacatacacctgtagtcccaaccacctgggaggccgaggtgggaggattgcttaagcccaggagtttgaggctgcagtgtacaatgttcacactactgcactccagcctgggccacagagcaagaccctgtctccaaaaaaaaaagagaaaaaattaatccattggattactctttgttttcttctagttaaacatccattgtgtcagcataatcaaactatcttgccctatgaaatgagttgctatctcttgtctatattcacatcttttcccagattttctgttctattcccactgatgtatttacaggccagtatcacaacctgtgaaagcattgtcttcagtggaaattttaaaatagtaattactcctttcattatttttttcataattttcttggttatttccagatctttacttttcaatgaacatatttttaaatcgcttaaatcattcagatctgaaacctcattggcagtctaattggagtgaatcttctgattcacaagcatgaaatgtatgtatttctgtttattcaaaccttcttttagtattttaaatatgcgttttgttgtctttttcatgtaggatctatacctttcctaaatgttttatagtttcttgtaaatagaattttaaaattcccattctatctggttattgtaactataagacaaagctattgatttttttcctctttattttctagcatttattatttgcaagcatttattagttgaccttttggggtctgttttctcttttgaatgtgtaagcacaaggtagatcatgtttatcttgtttactagtttatccccagcattctggcaggacaaatgaatgaatgcatgaatggatatctgaaaaagcgtttgagaggagattcaacaatctacactactttcccttttcttctttttaccttgtgtttctaacacatactaagctttttttctttttcttctgaaatggggttttgctctgtcacccaggctggagtgcagtgtcatgatctaggctcactgcaacctctgcctcctgggttcaaacgattttcctgcctcagcctcccgagtagctgggattacaggtgcacgccaccaagcccagctaatttttgtatttttagtagagacgggatttcgccatgttggccaggctgctgtccaactgctgacctcgggtgatccacccacctcggcctccccaaagtgctgagacgacaggcatgagccaccaatcccagcccattctaagcttttaacatccttagattactgttccaaatacgttgggaaggtcccccaattttttccttaactttttaaaagcaactttattgaaatatattttatatatcataaaaatcacctatttcaagatgattttagtattcaataatttttagtagctttactgagtgatgcaactgtaatgtaacgatagatgttcaggtttagaacgttttcatcctcctaataggatctctcatgtccatttatagttaatccctgttcgcacctttacccctattcacaagcaatcgttaatttacttcttgtttcagtggatttgcctgttctggacatttcatataaatgagatggtaccatatgtgaacttttgtgtctgactgctttcgcttagcataatgttttcaaggttcatctatgttgtcgcctgtgtcagtattctcttcctctgttgctgaataatattcccttgtatgcatgtactacattttgtgtatctgttcattagtttttggacatgtaggttgtttctactttttggttattatgagtaatgctccagtgaacttcacatgtaagtctctgtgtggacatatgttttcatttcttttcrgtaggtacctaggagcggaattggtggttcattttatgttttttgagaaattgtcaaactattttccaaagtggccacaccattttatatttctagcagtaatgtatgagggttcctattcctcttttcttaacatttttctcacagtttattgatgtatgattgaggtatcatttacattgaggtataacttacatatgataaaatgctcagatcttaagtgtacagttcaattatttttggacacatgtatacatgcatgtatacaaccactgcgtcaatcaagatacgaaacatttgcatcattctagaaagtcccttgttccttgccctcagattttgatttctatcattctatcatactgttttgatttctatcattgtagattagtgtttattccagaatttcatacaaatcaaatcatacagtatgtactcctttgtgttgtcttctttcactcatcgtaagggtttcgagtttcatcagtgttattgtgtttatctcagttgtttgttcctttttattgctgagagcactccattgtatgaatgtcccacatttttgtttatccagttacctgttgatggacatttgagtcatttttcatttgtagttattaggaacaaaggtactattaaacatttatataccagtctttttgtggacatgatttcatttttcttgggtgaattcccaagagtgtaattgctgggtcatagggtagttatatgttacttactgttttttatctagtattaagtcactttacaaaattctttaagaattacagttttttggccgggcatggtggctcacgcctgtaatcccagcactttgggaggctgaggcgggcgcatgccttgaggccaagagttcaagaccagcctggccaacatggtgaaaccccatctctactagaaatacaaaaattagccaggcgtggtggtgcgcacctgtaatcygagctacttgggaggctgaggcatragaatctcttgaacccgggaggtggagattgcagtgagctgagatcacaccatggcactccagtctgggcaacacagctagactcagtctcaaaaaaaaaaaagaatgacagtttctaaaatatcgtgtctttgattttctaaattattatacaatttgctgataggtataattttgagttagatctttatctgttgatctggaggagtttcygggactttttttttttttaaagaagcacacaagttgcccagaaatgtatatagtataatccaaattttgtaagacaaacaataacatgtatgtatatgttcgcgattctataggcaaaagaaaagatgtgaaagatgttcactggcatgctaaccatggtttcgtggctggagtggcggaggtggttaaggggaggtgtagagggttgagtttacaaaaaaaggaaacagggataaagaaaacacattattaaagttaaatgatttagtagagtataaatatataaatatatttatatatttataaaaatatataaatatatttatatatttatataaaatatatataaatattttaatatatatttaatatataaatatttataaaaatataaatatttatataaaatataaaatatttattgcaaaaactttttaatgataaaaatattggaaccagcataaagatgagcttaccaaagttatttgcagctgttaaaaatagtgatatacgtgtgtttagaatgtatgttaaattcaaattcagattgcaaagcagtatgcattctatggccctgactactttgtgctaatatgattgtgattatgggcatttttgtttactttttaaaatcttatgggggaaaaaagcaggagttatttctagaagtatgaatcactgaaacacagtaatattccttaaattatacttttcttaggatagctgtaattatataagatttagtcaaatctttaattagatggtaggctgattgagggtagggatccctcaagattctatttgtcaccgtcagagctcagaataattctgactcattcataacatgaagagatcaccgttgaacacagtccataggaaagtaagatctcagcattaaagagatgcaggtatgagtgttaaagaagagcaggccctggtcagagtattctccaattgacgtcaatcagttctccacttgattgacctggagagtactttgacagggcctgctcttcatttacataggctcggtgcctaccttttgcagctgaacaggctcggccccagttcttgctgggttctaagctacagtttcagggaaaaggcagaaagccaagatagggcaggaatgggatgaaaggggactggcctgttggctaggtcagcaaatttgtctgtgatttacagcactaagctcaggatttgacttgattagaatttgattgcctttcatttgattcaagttggagccactgctccgggctgttctatctagtggatggaccatagaagcagggatctcatgacttagcaatattaaaacctcaggcaggtggcttgttggtctgagcagcctctaaatttgtacaaaagcctggtggctggctgggttggtaaaaatggcagytgtcctgcatgctgacattgggagttactctgcactgctgcaggctgtcctggcacactgcaggccgggcatcatttcatggtggaggacgtcactcagttttgcatgaggctcttgcatcacatttgtatttaaggaattcacaccttattttagggaaaacatctgttccttggttaaaacagcattgcacttttaacagagcggccacctttttccacatacgataggacaggttttggatatatggagtattaactgaaaagagcactatatatttcatagttctttaaagaccattgatatgtaaatcaatgtgtaagaagatatcgtttaagaggggttatggcacatggtggaaggaatgctgctttgcatttatcygtgtgaagtaatctgcctgtgcatctgaagaaacagcaggccccgccgcaagtgatgaagcagttctgtggagaaacccatttacaccagtttccagatgctattccaccagaaataattccaagaatatacttatattttaaataaatgataaaatcaatttccagatgaagtgtacattacaaagagaaacttggtattattatgtattaatccatattaactaaagttgaacctgacatcaaaatattgatcccttcttaaaatagacaaaaatactttragttaaattgtttttcttcctatttgtgctagccggtgcttaaagtctaatgatgtgataattgaatagtaaaggaatctaaatctctactttcttgattcccagtgtgctaactttactaaaattgtgggaataagcaaaatatttttcatagcagtaataaggatttttaaaaattatgtgacaattgtgtattagactgaagtaattaatacctttgtcacagggaccgggtgcaatggctcatgcctgtwatcttagcactttgggaggccgagacaggcagatcacttgaggtcaggagtttgagaccaacctggccagcatggtgaagcctcatcttactaaaagtacaaaaattagctgggcatggtggtaggcacctgtaatcccagctactcaggaggctgaggcaggagaatttcttgaacccaggaggcaaagattgcagtgagccgacattgcgctactgcactccagcctgggcaacaaagcaagacacgctctcaaaaaaaaaaaaaaaaaaaattggcatgagactaaagaggatttaaggtggaggatttcctcgcagtaggtaaagaagcaaagccctgtttattcagagcctgagctcagacttgaatttcttttttagactttcattttctccctttatgaagtggcaaagtcagttaagtatagatgtggccgtctatgtccctgarcttctgggttcaataatcagctctgcgactcctcttaaagaatccagaggatttcctgcctggaccttgaagtcacctccccgctacatatttcccagctctggttttccacctcctcaggatgaatgtcttcttgaatgtcctctggaagagtgtcagctgcacttaaacttccatcaaaagggggactcagaggccttaaaataggcatcaggtacacattctatttatgattctgggattaggcctattttttggcatttcctgtggtcaaatttttaatttctgaactttatcggatttccaaagataccgtcccttggctgtcttcattgatttcttcaaaggatttcctcggcaaagttaccctagtcttaactggaagagcatggctcccttaaagagtctaaaataagccttttcctttagtgactcccagctctggtcttgtcaggttscatttttctcctaaccttcttctttcctaatcctcactcactaattcaaaaatgttattctgccttccagaacatcacactttgtaaacattttgttaataataaaagctagcattccttgaatactggttttgtaagctagattatctcatttaaccctgtgatgatgttattcattaaggagcatttgctttcttaggtctgcaacatcagtcactcctcgcccatctgtatcccagcttttaacagtttgttactgctctttcctatcatattctcttgtgggcaccaaattttyttttttaattttattgtatctttagaggagttttaggggagagtaaaaataaatatatttttcaatccatctttacccagaaattgaaatattactttttatagtagaaccagaaattaacttaagaatgtttttggcatttggagacatgcatacaaatactaaagaggtgcttataaaaaaattacacttttggccgggcagagtggctcacacctgtaaccccagcagtttgggaggccgaggggggtggatcacttgaggtcaggagttcgagaccagcctgcccaacgtggtgaaaccctgtctctactaaaaatacaaaaattagctgggagtggtggcatgcgcctgtaatcctagccaccggggaggctgaggcaggagaatcgcttggacctgggaggcagaggttgcggtgagcagagatcaccccacggcactccagcctgggcaacagagcgagactctgtctcaaaaaaaaaaaaatttactttttattataaatttgtcatatttaatgccatggtgcattatagttctggctacaaaatgaaacaatttatttttaaacttgattttttttctctaacatttgaaatcattaaaagttactatcaggagcctctcattttatgcatataaatgcaataaaacagctggttatcttatgctctatatgaagggtaatattttaagtgcattttcaaattcagctaagctagtgattctatcagaaaatatcatttttcactcactggcttttgaaacataattagattttctgagcaactgttgcttataattggaatttgcttattatmattttaacagagaaaaacactgacctatgtaattttagtgcaattaaatttttctccttatgcctgtgtgtacctcatcaattcagcaaaagcaaaacctgatctagaagtccctgtgcagcagattgcagggaaagaagcagtcagctgatttgtctgggccataaaaccgtggtgtctggcagaattgtgatagtaattgctctaagatgcattctgtttacaaagactaacattgcagctgcttttaattagctgctagaaatgaaaaactgtcagggtatgcttgttagatctacctgaatttattccattgcaaataaagcagaatttaaagaatatcaatgtaaaacaggaaacttctcattgtaaaccaagttcagaaaggtggtggtaaatatctgaatgtatccttttggttttatgggaagcagaaaaacctgatttcctatgacacagaccattgcattctgtattgtattgttttcttttttctttctttctttctttcttttttttttttttttttttttgagacacagtcttgctctgttgcccaggctggagtacaatggtgcaatctcagctcactgcaacctccacctcccgggtccaggcaattctcctgcctcagcctccctagtagctgggattacaggtgggcgtcaccatgcccaggtaatttttgtatttttagtagagatgggctttcatcatgttggccaggctggtcttgaactcctgacctcaagtgatctgcccaccttggagtcccaaagtactggaaatataggcatgagccaccatgccccgctgttttctacatttcttttatatgtaaatttctgtcctgagcagatgattcacttccagagaaaaggatctttgcattccctgctgtctggcattgtgcataataaatatatactggcaaatacataatggtagtatttttatttataaaagtatgagaaattgctttgagaaaatcaaagggttagaaataaaagaaaattaaaagcattgttacaatttatcatgaaatttagtgagtattacagagctttgtacactgggttagaaaatttgtgtttttttctttttcttttcttttctttctttyttttttttttttttttttaaagagatagtgtcttgctctgttgacaaggctggaatgcagtggtgtgatcacagatcactgcagccttgacctagactcgagcaatccttccacctcagcctccagactagctggaactacaggtgtgcaccagtgcactcagctcattgttttattttttaaatgttttgtagagacggagtcttgctttgttgcccaggctggtctcaaagtcctggcctcaagtgatcctcccttctcggcctcccaaatcctgggattacaggggtgagccaccacacctggtcttaggtttcttaattttatttctctgtgtttctacaggcttttaggccattttactaataattacttttttttttttttttttagtttttttgagacagagtcttgctctgtcaccaggctggagtgcagtggtgcgatcttggctcattgcaaccgctggttcaagcgattctcctgcctcagcctccctagtagctgagattacaggcacgcgcgccatcacgcccagctaatttttgtatttttagtagagacagggtttcaccatgttggccaggctggtcttgaactcctgwccttgtgatctgcccacctcggcctcccaaagtgctggcattataggcgtgagccactgttcccagcctgctaatagcttttaaaaaggaatattgattttcatagttgtgtggcagacacagctgacaccactagctaacttaagcatactctgagaatgaccttgcatggcagatgcacctgacacaaaatttaagcataacctgaggatgaccctgtagcctaagaagaatgtgtattcagagttcccagctaataaatccaggaaggccaactgggagagtcattccttatctgtgagtaacatctgaaccctcagcccatcctgtggaacacaggccatataggggattgaggccctttgttttgggttagatagaggttgctagggggagggtgctaagcaagaatgctgtataaactgcatgctttttacaagcagttgccattgtctagtccagcccgtcaccactggaccaccctgtatgtaaatcctctcagtaaaccttgtctcatttactggctccaggtctctttgaaagcctctcaaacatggcgccatccctattgcagccattagagtccggcgtggcagtggtcaggactgttgaagaaggctgagaatttagggcactgtgaagtgtttaatcatttatcaaggtatcaatttagtgtctctcaaggaaaaaacatatttgttgatttgatttcatgccaacactgatgttttttgctactctatggccttgaatagtcaggcattgactgtaaccaaaaggatgtatggaaaataattgttttcttttttgagatggaatcttgctctgtcgccaggctggagtgcagtggcgcgatcttggctcactgcaacctccacctctcgggttcaagcgattctcctgcctcagcctcccgagtagctgggattacagacgcatgccaccacgcccagctaatttttgtatctttattagagatggagtttcaccatgttggcyaggctgctcttgaactcctgacctcgtgatccacccacctcggcctcccaaagtgctgggattacaggtgtgagccaccgcgcccggccaaaataattgttttctatccttagtgaagagctaaagagaatttccttagaataacagcaaaggaacttaaagtgttcagaaaaacaaagtgaggatggtaggaatcctttcgcctgaaactttggaaaaaggtggaygaattacaactaagtcatcttttagctttgctttcttgatcttccttcaaagtttatgatacctaaattctctcttcaactcataaaatgtgttttatggtttaatagaaaagctataagcacatgacaaaattagttcttattagctatatgcctacagaaccaattttgtggttttcaatatgatatgttcaattccagaaggtgttttataaatcagttggtaggaacctgttttatgtgtaagctgtgtccagatggatgtttctttacccttttatgtacctggaccaatagtaccagaaaccatgggagcataaccaccccacaagaactccacccctgccacagccttcactatttggcaggggaagcagagactctgccatcttcaagccactggtagagcccctttcacatgacctgggaggtaatttcacaagcaaagaagtctaaagraaaggttgtacctaatttaaattattgcttttgtcatattctctaccactcacaggaatgttttattattaatcacaaatcataagcaatttatactcttgattatttcaaaagagccacatccactgctatggttttgaaattattacattatacattattagtcagcttagactaaattatgctgtggtaacaaaccccaaaatttcaagggcttacaacaataaaggtttgtctttcatgctgtacattcattgcaggtaactaagacactattccatgtcactgtcattctgagatatgggctgaaggaacatcctctccctgaggctttgctagtgtttcagtagacagaaaaagaacgcaatgggaacacacacaatggttcttaaagcttcagcttcaaagcagcacatgtcatggcactcacactttacaaagcaagtcagacggctgctctggggacctgcagtcgtgcaggagaggggctcccaaatcagacagccactcctggcatcaatgacgcagggatctatagtccttttatgctgaggggtggtgaatccaccacagttaacaaaatcttgagacttgccataaacaaattctcatctgtttgtgtgatgaggtccagatgatggcccacttcagtagcaaagacagtgcactgtgctcaccacgccatttcatcttttccctgggttgataggaagatggccttctcaacccctttgcatctgtgtggggccaggagactaaacaccgccagttgattatgaggaggaatgacgtgtggcacttccagacctagctcacaaacgtggcaaaatccactctcccccaactccttgagcctgtctctccaaattgctgcatagaggcaatgtttccaggagaacctcacctggccagaaacatctgccttgaacatggttagaacaaatgaaacttttttgtattaaaacacwtgagattctgtggctcttcgttactgtgttaccctatcctgaccttgctttgtggtttatttaatgatgcacatttactagagtggtgtacattcaatagtgaggtggccacatacaacatacccctaaaacattgctgaaagtacacagccatttctactataaaaatataagtatatgagtgaagaactgatttttgaattttgctttaattaatttaaatttaagtggtcacatgtgggtagtggccaccgtattggaycacagaaccttaagcagtaggaagctttttgctacgtgatgtattataaatctttccactgtctcagcaatctaaacataaaaccaacatgtctaaatttcacactttctagatgatgaagagtcataaaatgaacagaaagtctttatatggtgtttcagggggacagttgtgacattggagtgctggtcaaagttctttattattttttatttgtttccaaatatggagtgcagaaaaccaaatggtggaatggacatttttgccaaagtataattgtggtctttaatgatgtaaaataaaataccatattcatttctgaatttttttcatcgtgaagtgtgtgagatgtgacttgacaactttgcaaatgtcgtgcctctgcttaaatctctgcattatatttatggaaatgtttgagatcctggaaaccatttagaggtgttataaaatactttatttcttgaggtccaaaagacttcaaaataggggctgagtgatataatggaaagaacactggattaggagccagaatatctgggttaygttgcctgctctctcactaactggctcagtgaatttgggcaggttatttgaactctctggatctcggtttcttctatggtgagtttatgggcttagattaatcacccacctctaaaattccaggtcttttcttttttctgactttaggtcaggtcttttcttgtgaagtattaaaactgagcccacccatgtcaatataacttaactctttgttccacgaaattcgtgcccaggaagataagacagtaaattaataaataaattcactgtttgctttaggaaagtcttgcaaatcaatttatcaggacaaacagtttgctcatctgggcaaacagttgtcttattaaaacaatatattgctcacctgggcaaacagcttgacaagtttgtgaaagaatgtcactatgcattgtggttttgaaaatgaatctatgggctgggcgcggtggctcacgtctgtaatctcagcactttgggaggccgaggcgggcagatcacaaggtcaggagttggagaccagcctgaccaacatggtgaaaccccgtctgtactaaaaatacaaaaattattcgggcgtggtggcgcgctcctataatcccagctactcaggaggctgaggcatgaaaatcgcttgaacctgggaggcggaggttgcagtgagccaagattgtgcccccgcactccagcctgggcaacagagcgagactccatatcaaaaaaaaggaaaaagaaaaaagaaaatgattctatggaaacagyagacactggggactccaaaagaaggacaaagatgtaagaactacctattgggtactatgtttattatttgggtaaggaattcagcaggaacccaaacctcccacatcacacaatatatccatctaacaaacctgcacatgtacccctgaatctaaattttgttgttgttgttgttttttgagacggagtctcgctctgtcacgcaggctggaatctactataaatgcatttttttttttttagacggagtctcgctctgttgcccaggctagagtgcaatggcacgatctcggctcactgcaacctccgcctcccgggttcatgcaattctcccacctcagcctcctgaatagctgggattacagaaacctgccatcatgcctggctaatttttgtatttttgtagagacggggtttcaccatgtgggctgggctggtcttgaactcctgacctcaggtgatccacccacctcggcctcccaaagtactgggattacagtcatgagccactgcgcctggccaactataaatgcaattttatttactatttaactgggagtagaatatcttagtatgtaagtctaggtatttttccaactagcacaacacttcagatagtttatatattggtgagattaattacaagattagtgagcacatcatagacattgagttaattatgacaaggtgaatgaacaaaaccaattttctgtgtcaaacgtagtttacaactttatgtaaacatttatcatatacattgtaagaaattcagttttctgtaaaaaaatacgtagtcttaagtttacaattcaaaacccatagaggttccctgacattacttgccaacatttaagagctacttattagtttgaagagagacagagtatgtgcacatttaaacttaaggcagaaatttgtgtctgttggcctaagtgttctttgttcactgggctctgaagaccatcaaataaaagtaattcttaacttagtgtttttggcactgaatcttgaattcctttttttttttttgagacagagtctcactctattgcccaggatggagtgcagtggtgcaatcttggctcactgcaacctccgcctctggggctcaagtgattttcctgcctcagcctcccgagtagctgggactacaggcgcccactaccatgcctggctaatttttgtatgtttttagtagagacggggtttcaccatgttggccaggctggtgcatcctgaattcttaaataaccagtaccaaagttatttttcttgaaccttctcactaagtatctttatcgcacatgagttctctctttaattttaactaaggcctaattaaaatattttcaaatttataatttttattttctcatgaagcctgataggaaaagctttgcccttaggctcatagttttacctgaggaaattcaacaatggatctgaaagcagcttattgaggacatgcagttagaacttaagaagaatgtgcctttaaggaggaataaccctgagaaatagttccatgacatttaaattctattgctctgacagagccattctgacaggttttaagtttcaaagttatcagacaatgtgcagacaacctcaccatctcctgagcttcacctcactgttaaccagcctatggtaatgtctttctctttttctcctcctcttcctcctactccctatccttgccctgtcaatattggatataatggcaggtcagaaatggggtgaggcatgaggtgaaaaccaaagagaactgtgcagaaggttaagggttaaataacatcaggcaaaccagccaagtataactagacattagaagttcagctctagtataaaagttaaaagacaaaagtattaaaaatcactatacctgcataatttgttgatgaatacacagtataaaaaggtgtaaagtgtgacatcaacaccatagaatggtgggtgggggataagtaaaagtgtagtaattttttttttttttttttgagacagggtcttgctctgttgcccaggctggagtgcagtggtgcaatctcggctcactgcaacctctgcctcccgggttcaagagattctcctgcctcagcctcccgagtagctgggactacaggcacgcaccaccatgccaggctaatttttgtatttgtagtagagatggggtttcaccatgttggccaggttggtctccaactcctgacctcgagttatctgctcacctccgcctcccaaagtgctgggattacaggcgtgagccaccgcacctggcaagtgtagaatttttgtatgcaattgaagttgagttgttaccagtttaaacagaatgttttgttttatgtaaggtccatggtaaccccaaagaacctacctttagtagaaacacagaagataaagaaatgaatcaaagcataccactacaaaaaaaaatttaaagtcacaaagcaagactgtaagagaggaagaaaggaacaaatgaactgcaaaacaaaacaaaatagttaagtccttaactctcaataattagtttaaatgtaaatggattgaattccccaaccaaagataaacagtggccaaatggattaaaagaaaacccaagatctaacaatattcgtgtgtacaagaaattcactttagacttaaggacatacataggctgaaagtaaagggatggaagaaaatattccacgcaaatagtaatcaaaagagagcaggagtggctttatttatatcagactaaatagactttcagtcaaaatctgtcacagaagacaaagaagatcactatataataataaagaggtcagttcatcaagaggatataacaattataaatatatgtgcaccccacattgaagcatctaaatacataaagcacatattaacagagctgaagggaaaaacagacatcaatacaacaatagcaggatgcctcagtacccctttcaacagtgggtagattatccagacagaaaatcaatgaggaaacagtggcctgaataacattatagaccaagtggacctaacagrcatacacagaccatctcatccaatagcagcagaatacacgtttttctcaaggacgcttggaacattcacaagggctagattatatgttgggccacaaaacaagacttaacaaatttaagaagattggaatcatctccagtaccttttctgatcataataacattagaaattaataacaggaattatgaaaaatggacatatgtagacattaagcacacactcctgaacaactacttggttgaagaagaaatcaaaagagagattaggaagtatcttgaggcaaatgcaaatggatacacaacataccaaaagttacaggatgcagcaaaagcaattctaagagggaagtttagagggataaaggcctacattcggaagaaagatcttaaacaacctaatttcacaccccaaggaactagaaaaagaagaacaaactaagcccaaagtcagcagaaggagacaaagattggagcaaaaagaagctaaggagacagtagaaaagatcaacaaaactgagatttgttttttgaagagaaacaaaattgacaaatcctttatctagctttaccaagaaaaaaagagagaactcaaataaatgaaattataaatgaaagaagagatacaggcataccttggtttattgcactttattgtactttgcagatattgcattttttacaaattgaaggtttgtggcaaccctgcatggagcaagtctgttggcaacgtttttcccgcatgtgctcactctgtgtctctgtgtcccattttggtaattcacacaatatatcaaagtttttcattattgkattatatatataatattatgtatatataatatgtaatatatataatacgtatataatatataatatatgttatatattatatgttatatgcaatatatgttatatataatatatattatatataatacatatatattatgatattattatatcacaatgctgattgtgatcagtgatctttgatgttacaatagtaattgctttggggtatcacagactgtccccatgtaagaaggtgaatttaatcaatagatatcatgtggtctctgactactacagtgtgggctctgctactgttctgactggcctttccctctcattgagcctccctattccctgagacacaacagtattgagattaaaccaattaataaccctataatggcctctaattgttcaagtgaaaggaagagttacacatctctcactttaaatcgaaatgtagaaatgattaagcttagtgaagaaggcatattgaaagcccagataggcctattgtgtcaaacagtcaagttgtgaaggccaagaaacgttcttgaaggaaattaaaagtgctattccagtgaacacacaaaagataaagcaggccaggtgcggtggctcacgcctgtaatcccagcactttgggaggccaaggtgggcagatcacaaggtcaagagatcgagaccatcctggctaacatggtgaaaccccatctctactaaaaatacaaaaaaaaagtagccaggcatggtggcacgtgcctgtagtcccagctacttgggaggctgaggtgggagaattgcttgaacccaggaggcggaggttgcagtgagctaagatcgtgccattgcactccagcctgggtggcagagcgagactctgttaaataaataaataaataaataaatagatagatagatagatagatagacaaataaagcaaaaaaacctattactgatatacagaaagtttgagtcttctggatagaagatcaaaccaaccacaacattccgttaagccaaagcttaatccagagcaaggtctttcttcagttctatgaagactgagagaggcagtgctatggaaggagagtttggtactagcagagactggttcatgagatttaaggaaagaagccatttccattacataaaagtgcaaataagcagcaaatgctgatgtaggggccgcagcaagtcatccagaagatctagctaagattattagtaaaggtggatgattttgaggggttcaagacttcagtggaggaaggaactgcagatgtggtggaaacagcaagagagctagaattagaagtgaagcctgaagatgtgactgaattgctgcaatctgaggataaaatgtgaatgaatgagtacttgtttcttatggatgaacatccttcttaaagatggaatctactcctggtgaagatgctgtggatattgttgaagtgacaacaaaagatgtagaatatttcacaaacttagttgataaccagtggcagaatttgagaggattgactccaattttgaaaaaagttctactgtgggtaaaatgctgccagacagtattgcctattacagagaaatctttcacgaaaggaacagttgatcaatgcattaaacttgtcttattttaagaaattgccacagccaccccaaccttcaacaaccaccaacctgatcagtcagcaggcctcagtaatgagacaagaccttctaccagcaaaaaagattgtgactcactgaagacttagatgatcattatcattttttagcaataaagtatttttaaggtatgtacattgttgttttagacataatggtattattgcacattactagactacagtatagtgtcaacataactttcatatgcactgggaaaccaaaaaatggatgtgacttgttttattgtggtatttgctctgttgtggtggtttggaactggacctgcaatgtatcagaggtatacctgtattatagctaataccaaataaatagaatcataagagactactgtgaataattgtatgcctacaaattggataacctggaagaaatggatcaattcctagaaacatacaacctacaaagattgaatcataaaaaaactagaaaatataaacgaccaaataagtaaggagattaaatgagtcatcaaaaacctccagcaaagaaaaaccccaaactagatggcttctttggtgagttctactatgcgtttaaataagaattaacaccaatccttctcaaactcttccaagaaattcgagaggagggaacacttccaaattcattttatgaggccagcaacaccctcataccaaagccagataaggacactacaagaaaattccagatcagtatcactgatgaacatagatgcaaaagttctcaacaaaataccagcgaacctaattcaacagcacactaaaaacatcatacaccataatcaatgaaatgtatctctgagatgcaaggatggttcaaatatatgcaaattagtaaatgtgatataccacattaacaggatgagggataaaaatcacatgatcatctcaatagttgcagaaaaagtatttgacaatattcaacatcctttcatgattaaaaactattaacaaatcagatacagaaggaatatacctcaacataataaaggccatatatgacaagctcacaactaacatcctactcaatggtgaaaagctaaaagcttttcctctaaaaccaagaacaagagaaggatgcccacactcaccacttctgttatacatagtactagaagtcctagctagagcaattaggcaagaaaaagaaacaaaagacatccaaattagggaaagctaaatagtctctktttgcagatgtcatgatcttatatattaaccctaaagattccacagttagaactaataaatgaattcagtaaagttgcaggatacaaaattaacatacaaatattagttgcatttctgtatactgacaactaaccagaaattaagaaaacaatcctatttacaatagcatcagaaagaataaaataggccaggcgtggtggctcatgcctgtaatcccaacattttgggaggccgaggggggtggatcacatgaggttgggattttgagaccagcctgaccaacagggagaaaccccatctctactaaaaatacaaaaaattagccgggcgtggtggcgcatgcctgtaatcccagctactcaggaggctgaggtaggagaatcgcttgaaccgggaggtggacgttgcggtgagccgagatcatgccattgcactcccgcctgggcaacaagagcaaaactccatcccaaaaaataaaataaaacaaaataaaatgaaataaaataaaatacctaggaataccaagaaggtgaaagatctgtacattgaaaactgtaaaatattaatgaaagaaattgaaggctggggcrgaaggattgcgtgattccaggagtttgaggctgcagtaagtcatgattgtgccactgcactgcagcctgtgtgacagagtgagaccaaaaaaaaaaaaaaaaaaaattgaagacagaaataaatggaaaggtatcctctgttcaaagagtggaatagttaatattgttaaaatgtccatactactgaaagcaacatacagattcaatgcgatgcctatcaaaattttaatggcatttttcacagatatcagaaaaacaatcctaatatttgtatggaatygcaaaagacyccaagtaaccaaagcaatcttgagaaagaaggacaaagctggaggaaccacttcctggtttcaaactacttcctggtttcaaactacattacaaagctctagtaattaaaacagtatggaactggcctaaaaacggccactagggtcactgggacagaatagaaagactagaaataaacccaaacatatatggtcatctaatctttgacaagggtgccaagaatacacaatggggaaaagatmatctcttcaataaatagtgttggaaaaactggatatctatatgcaaaagattgaaattggacccttgatttacaacatatacaacaattcaagtgaattgaagacttaactgaatgtgagatttgaaatcgtaaaagtcttggaagaaaacatcagcaaaaagctcaaccttggtcttggcaatgatttttttggaaatgacaacaaaagcacaggcaacaaatgcaaaaataatgaaatgggactatgttaaactaaaaaaacttctgcacaacaaaggaaacaatcaacaaaattaaaagacagcctaaagaatgggacaaaatatttgcaagccatatgtttgataaggagttaatatccaaaatatataaggaattcacataaaggatttcacrtaactcattagcaagaaaacataaagcccaatttaaaaacggacaaaggacttgaatggacrtttttccaaagaagacatacaaatggctgacagacatgtgaaaagttgcccaagattactaatcatgagagaaatgcaagtcaaaaccaccatgagctatcaccttgcacctgttataatgactttatcaaaatgacaagagatagtaagtgttggcgaggatgtggagaaaagagaatttttgtatattgttggtggaaatatcaatttgtacaggaattatcaaaaaacagtatggacgttcttccaaaatttaaaaaaagagctaccatatgatccagccatcccacttctgggatgaaataaaatctgtgtcttgaagagacatctgcaccccatgttcatagcagcactattcacaatagccaagatatggaaacaacctamgtatctgtcagccaatgaatgaataaagaaaatgtggtgtgtatacacaatggaatattatttagccatgaagaaggaaatcctgccatttgcaaaaacagaaacgaacctggaggacatgatggtaagtaaaataagccaaacacagcaagacaaatattgttttgtcttacttatatgtagaatctaaaaagttgaactcttagtaacagagtagaatggtggttgccagggtctgggggtgagggattaggggagatattagtcagagtgtacaaacttttagttttaagatgaataagttcagtggatctaatgttcaacatggtgaatatagttgacgatactgtgtttacttgaaattagataagaagatagattttaagtgtcagcactgcaaccacacacagatgataactgggtggtgatggatatgttagttaatttgattgtggtagtcagtacacactgtgtatgtatatcaaatcatcatgttgtacgccttgaatatgtacaacttttctttgttaaataagtactttaaaattttacaaaagacatttacaagccacacttactcatcttgggaaaagctatcagtcatttaaagcaaagcatcctttccttttcaagattttactttttttttttttttgagacagagtctcaggctagagtgcagtggcacgatctcagctcactacaacctctgcctcccaggttcaagagattcttatgcctcagcctccggagtagctgggattacaggcatacttcaycatgcccaactgatttttgtatttttggtagaggcggggtttcaccatgttggccaggctggtcttgaactcctgacctcaggtgatctgcccaccttggcctcccaaagtgctgggattacaggcttaaaccactgcacctggcctcaagattttacttatattttaaatgtctacatcttgaatttcaattcttattctacctagaagctaaaagcattggcagggttatgagttggggtggaaatatttgggcctgtggaagataaattcatattgtttgaagaaaataatctgcttataattatcagtttattataatcaggcccaaagaaggaaaccaaaagtcttaatattttcttagtgataaagtggaggaagtaactgacaaagtaattttggctctttaccagggatgcttcatataaaggagggagaacaatttccttgacaaccaattaatatgtatagcttaaggctatgactgtattctgcaagaaatagattacatttctgaggtctgcacatctgaagatattataaactagctaggagatttttatgatgatatgatacagatcagcaatacgtaagacagaaagggggyttcacccagcaagagttaggatttatagtcccagtrtgcccgagttttacatattgtgaactttgctaaccttcacctttatcaacaagctgtgagtgactctccagcacaaagctttgagtatcaagcatgcatatagtaaaaaaaaaaaattgccaggcaccgtggctcatgcctgtaatcccagcattttgggaggccaaggcgggtggatcacctgaagtggggagttcgagaccagcctgaccaatatggagaaacctcgtctctactaaaaatgcaaaattagccgggcgtggtggctcatgcctgtaatcccagctactcgggtggctgaggcaagagaatcgcttgaacctgggaggcagaggttgcggtgagctgagatcgtgccattgtactccagcctgggcatcaagagcaaaacttcgtctgaaaaaagaaaaaaaaattatactgatgatttgggggagagcaccaaatacccttaaagtttttacggcacagactttttagtaaatcttatgaggggatgattatgggaataatatgcatatatmtatatatatatatatatatatatatatatatatatattccaaaaatattggcaaaaataatgaagaacctgaaagtcctccatggtcagagttaaggtcagggtcagggatgaatgttgcattagttggcaataaaaagcagccattgtacagtttgacaggcctgtgtgaatatcctgctttgtagctgagtgttcttgcttgttaatctgcttcccctatccccactcttttttttttwtwttaatctggtggttgagaggtgcttccaagcctacctattttatttaccacttcctcgttagttttttgggcttcttaaaatggtcctccactcttatgacttctggctgtttgtacacaagaactgtccacctctctcctcctgccgtcaagggtgttgctaaacctatcatcctcaacctgaagctccttccacatccttcttgccagctcactatcagtcatttcctgagactgacatcacaaaagagtcattagatttaagccctggtttcagcaattactggacctgttgtgattctagacagggttcttaacttttaattttccatgacattttttcccttgacatcccagtccaagctgttgacttttgcatttactgctcatttctacctttaatattccattttcctctgttaatattatatgctgtgaaacccaggagaagtcagcattactatggtcttgggtagaactgagagagataaagacatgaatttgaggctgttgggggatgagttgcagagaggcataaatacgaggcagaaaataagttatgagtgagaatacaacttattaatagcttttgtaaacttctggcaaaaaaagatattgaagataattagagttgaaaaattatatargacatcacttasgattgggattcaatcacattttatagaaaattcaaataagagttgcttaagcatgaaagaagttcagaggtaagtagctcagggcttgtatggcaactccatggtcacagggggcccaggttccttctcacattgttttctcccatccttggtgctggcttacatgccaaatgtctcctcatgaccacaagatgctcctggtgttcccagaccaaactgagggttgggctgctatttctcgtggcccaataacgagaagcagatgaactggggaggaagagtttttatttctgcaactggttatggggggaaggcctggaaattatcaccagaccaactcaaaattacagttttccagagcttatataccttctaagctatatgtctacgtgtaagtgtgcattcatctaaagacataagtgattaacttcttctaatctatagctaaggtctgagtcytgaagaccttcctctggagcctcagtaaatttacttaatctaaatgggtccagctgctggggtgattacccttattatgtctcctgcttaaatcacggaggtttggggagttccttcagacctccaataaacttgtttgtggaggtctggggagtttcttcagacccacaataaaactcgtttaatcctaaatgggtcctgttaagaattcctttgttattttgttatgctttaaggcccaggaaaagcctaggcaaaactcttggtgggctttygttacattccagcctttgtataagggcactggcttttttaacttttaatatttaacttaaccactcagtcagtactgaaacagttgttatggaggcctgcgttagtgagagctggcctgccacactggtgctccagctattatgtccacgttccaagatggaagaaagtataatggcaaaagtacctatctctcagctgaatcagtttgctttaaagggcttccttggcttccatccacttctgcttacacttccttgaacacctccagaaaccaaggaggttgggaaagctttaggctgaggacattatcactccaaataacatatttttaagtcaggaagtgggaagagtggatattgtgtaggcaactcacagtcccttccaccatagccgaccaggacagagatagctggatgatggtttgctctagttgagcctaaacaagctcatggctccctctccttaaactacttttatattttctttctctaagttcagagcaaagctttcatattattttatgaatgtttcttaacaagctcatcgtttctggtgttttgctgcaattctgcagtagatagtatggtatatttggtggacagattcagggccaccaggctttgaatagcagtggtgctacttagaagctgagaggttatgaaccttatatgcaaccatagggaatagtgttgttactataaataatgattgtactgaaccttatatgcaryagtgaataatgttattataaataatgattgtactgaaccttatatgcaacatagggaataatgttattataaataatgattttcagactgaggcagttttctaaaaattcaagtgaaagatcacattactttacatgaggaccacaaggcacattcaaaagatacggttgattcactttgttaaacaataagaatataagtgtccaaatacagaacaaaggaaataatatgtccaagaaacatttttctttgcttaatactaaaagcctcttgatctgtttcctatatcctagtcacaactgaattttaagaaagtcgaggtcatgttggtaactccatgtcaatactgctttktgtactaactgcaagatcaggaatcgtccctcattacttccatcttggctttcaaaagagcctactgtaattttttcttctgaaatagtatgaaataacttttttcctgaaagaaaatctcctttctatggttctttcttctgaaacaaggctttccttctctgagcttccagctagaataatttcctctgacatactctgatctaggaggattgtagtgtggtcacaatgcctcagctgatttcagttaattttcttgagctgaatcaaatgaatgtcttaacaagttgtcctttaaaaggatagacgtgcttttatacaaaacttgcatttaaatgaaaccactagacttcttcatacaatgtaatgaagtcttggtattccagcgatttggcayctaaatgcataggcactcagtaaatattggagggaaggaggatggtggaaagaaagaaagggggagcagggaaaattaggggggaaattattttttcttcctggggataggtttcatttttaattgggaaatgtaatgtgaaatgtattactttcaaacttgaggacccagaatataacttatgatgatttaagttttcttccttttatttacattttaatgataaagacactcattggccaagacccagaaaaaaagtttaaataaaaatttacattttaatgataaagacactcattggccaagacccagaaaaaatagtttacctatattttatacgtgtttgtttaaaaaaaaaaaacacaatctttgaaaaatctggagaatttatttcgggttataatagtcagaaaatgtgtgcctttaagttttgcttctgaatagacatattctgctaagcaagcaatctcctcttagactgcttgctgagcacatatactttcygtatgctgatttttaaagtgtctgtatttggttggtggctttagtaataagagactagcttttaacacagccagaagaagctgatgtgaaccascagaaataacactgatcatatataatacktatggaacagtggttgcccaccatttttgaacccaagatttcctgacatttatcactgtgccaacaaaaagaaaaactaggaacctggggaggacttagagagaggaagcatggacagctgccagcctgggcagatggcgtctgtttggttgagacagattcaccaggaaacaagatcagatcctagtttgagacccaaaacctggtgagtaagaacaagtgttcaggacttcaaggggcccagtaggcaattgtgggaaaaaatctggaggtcctgaacttgcccaaattacaggggtaggtgagaaaaggtaatccaaggggtaatatttttttctgctttttggtgttatctatattttctttaacaattatatatattacttaaaggaaaaaactctaggtcttatatattcctgactaagcttcatcaatatgtatttgcttcttttatacaaagtaacattgttttcatttacagattgccattaggataccttagtaatgatgtccagttatgatgcagatatttcaaagtttattgtttatttatttattattattttggaggcagggtcttactgtgttgcccaggcttgggtacagtggtgtgatcttggctcactgcagcctcgaccttccaggctcaagcagtcctcccatctcagcctcccaagtagctggaactacaggtgtgcaccaccatgcctgtctaatttttatattttttgtagagatggggtctcgccatgttgcccaggctggtcttgaacacctgggctcaagagatctgcccgcctcagcctccccaaatgctgggattataggcgtgagccaccgcaccaggcccaaagttaaaataacttamtgaataaggtttggatgatgtcaggtaccccttttttctcaggggaactggctcctacttagatatcttatgaccattagtgggacattataggatagcctagaaacagaaacactcacgtcagtgtgatttatggctaagctggcactcgacatcagtgggataggagggggtaatacattaaatggtgcatgggaaattgattattcgttcagaaaataattgaaatggatctgtacttcatttcatacacaaaaatcaatttcagggagattaagggacttaagttataaaaggcaaaactttgaaacttttggaaatagtataggagaatagctttatgaccttggaggagggaaggatttacaaatagtgttagctataaggcaaaggtttggtcattgagccatcttaaaatcaaggaaattacttcatcaaaagacatcgctaaaagagtgggagagaaaaaccacacactgggagaaaatatgtgccatacatatgtgtggcaggcacacctgacagcaacaaccgaagcataccctgagaatgaccctatggtctaagaagaatgtgtgtttggagttctcagctgaggaacctggtagtggccaacccggagactgattccttgtctatgaggaacatctgaacccccggcccatttcggattaaaggagggttgccaggtgaaggttgcaggaggggagctaagtaaaaatgctatataaactgcatactttttagaaacggtagtggttcgtccatccagcctgctaccactggaccgctgcatatgtaagtcccctcgagaagccctatatctcatttgccagctctcggtctcttctttggcctctcttctttggcctctcgaacctgtgctatccctatccaactcaataggggtctggcacaatarcatgtaactaacaattaggaaacagaaacctgtcttttagaatgtgggacttctcttcatcaaaagcactgtaaaatgagttaagaaacaacccataaatacttgaggaagatacttgccatacatgtaactgacaaattaataaaggaaaaaggtactctggagaaaaatgaacaaaagccytgaatagaaactacacagaagtggaaatgtgaggttgggcgtggtggctcacacctgtaatcccaacattttgggaggcctagacaggtggattgcttgagcccaggagtttgaggccagcctgggcaacatggtgaaaccccatctctacaaaaaatgcataaattaactgggtgtggtggcagacatctgtggtcccagctacttgggaggctgaggtgggaagattgcctgagcctgggaggtggaggttgcaatgagctgtgatcatgccattgcactctaacctgggcaacagaggagaccctgtcaaaaaaaaaaaaaaatgaaaatgtgaatggtcaataaaaatgtgaaactacttaacttcattagtaatcagggaaatgcaaatgagaagcaccaggtgatactgtttcacactctccggggcggccaaaatttttaagtcttaamaaacaaccctaacaatgtagagtcacaaacaggaatccttagacactgctggtggcagttgaattagtacagccactttggagaactctgcagccttgtcaggaagagttgaagctgtgtgtaatccacaacactgcccacactccacagcaatgcttctcaagcctggcataatatattagcatcccaaaatgagcatgttggaaatacttacacctggcccttaccccagacctgtgattctcaaatggtatgccaagatgccctggggaaccacagcaaactcacagaagacgatgggatatcttaaatgttcaakgggaatgcagtgatacttggcatctgttgaacgcagtgtgaattactagctcaagacacttcagttcagtctcaatgttaccccacgcatcatccctttctattatgcgaagctggattttcagtggttgctgtaacaaaaagcagatatcatgaaaatcagtatggaagaggaaataagggtgatagagtccaatatgattccaaagtttaagaagttgtatagtgcccaacgagtgcacacattccattaataagtaattgaggttatttaagaatgaaataaaacttttttctttggtattttcatacagatttttcaaacagctactgcattgttaggacaaaaaagacttgttaacttttttggacctaactacttaaatggaattgttaggaatttgttctaggggtgcctagaaccctgaaaaaattgagccacttagtagtgtcccttcaactgagaatatttgggaatctctttcccaaattarttaactcagaatggagatggaatctctatgtctttgtttttaaaaagctccccaagtgattctaatgggttcgtaaggttgagaaccactgcttgagagactcttgcacatgtgacttaggataatgctactcaaattgtacctgggggccagcgctggtttgcaaattatttcctacagatctgcagcaagtttatatgaatcatactttcagtgaataatggtacagtttttgtaatcttttgtcttctgattaaatttactgaaatataattttatgtcaaattttataatggaaaaattgaggcttgtactttgtgcttttttctcatatttttctaatatttatgattttacagctttgttgatgtataagtgatcaatttgcactctttaaatatgtgcaatatattatatgtcaattttgacatatgtatatacttgcgaaatcatcaacacaaccaagataatgaacatatccatgactctctaaagtattttctcatccctgtgtaatctctcccatttggccctccacatcccttcataatcctccactcctgtccccgccccagtgcaaccactcatctgcctgttgtcactatagattagtttgcattctctagcatttcatgtaaatggaatgttactgaatgtactcttgcttttgtctggcttcttttacttagcataatgttttgcaattcagccatgttgttggataygtcagtagtttactcctttttattgccgattagtattccattgtatggatatgccacaacttggttttttattcaccaattgwtggatatttgaaatgtttgcattttggctgctatgaacatttgtgtgtaaatctttatgtgatcacgtgctttcatttgtcttggataaataaatacctaggagtggaatggttggattgcatggtaggaatatgcatatagtaatttatttttattgcatttcacaaataaaaagcattagcccacaaggattagaaataaaactctcccaggccgggagcaggggctcatgcctgtaatcccagcactttgggaggctaaggtgggctgatcacctgatgwcaggagttcaaggccagcctggccaacaaggtgaaacctcatatccactaaaaatacaaaaattagctgggygtggtggtgcatgcctgtaatcccagctactcaggaggctgaggtaggagaatcacttgaacctgggagatggaggttgcagtgagccgagatcacgccactgcactccagcctgggagacagagcaagactccttctcaaaaaaaagaaagaaggaaagaaaactcttccttcagcaaatgtattttgaaaagtactagcctaagttaaatgcccaasagtgttcacagctacattgtttataatagcaaaagactggaaacaatccaatcatccattgtcaagagaatggattattaatatgaagtatatatccagtagactactttataacaatgaaaactacattgatgtagctgcagtttatctactacattaatgtagctgcagctacattaatcagaatgaataaacggaatttaaagttgagttccaaaagcaaattgcaaaagagtgcatatggaaggatttcatcatatgaaktttacaaacagtattttactacaatattaaatagcattttatttacagaaacatacatatatggtaaactataaagaaaatggtgatacaaaatgcaggatagtgtttacttggggagtggccraaggtacaatgagagagataggaccaaggaggacagacagaggcctttgaggctagtgggtcttggtcccgttcttaaactataggaattcattttaatgttacattttgtgtttatattttgtcataaattttttgtgcatattcaatatgtaaccacaaaatacaaaaaaactctctaaacagttgacaagggagtttattaagcaaatagaggtaccaattacaaaccatcagggttagaaaaaaaatccaggctttaagtaaatataaatctaagtaataggctattgactattatcttagaaaaacttggggtattacaccaggttatcacagaatatttagttragaagtatggaaaatatgatatgctatttatttgaatgatactcggtaggcatgtaatgtgatgattaaatcagttaagaatatgtgatagattttttttaaaaaaacatctcatttaaaatgcatgtcttttgtttttatgattattgaaaaatggttttcagaatacaaaatgagaatcaaaaattggtaattagatattctgtgtttctcaaatggayggactttataattgggtggagttatgttaaaagctagaaaaactgaagaagttaagaaagaattgaaaattcccattaagagaaaaaagaaaaagctgcaacctttgctaatataaaccgtaagagcctatgcctcttgaaatttctctgtgtttgtctttgtacatttttaatgacttaatgagaaaaaagattcatcaggactcctttcctagcaggaggtttartgtttcacaaatgagtagggagctgctctcataatgaggtaaacggccacctgattcttggataagtccaaggaaaacctttacaccagaggaagcaacagcttgccagtgttcaatctgagactttccaaggtcagaagagaggaggattggtattgatatttaataagcatttactgtgtccaaggcattttggtacgaattktatatctcttatctgatatccttgccttttaggactaggctgtttttacctttaaggtagatgttattattctcattttacacatgaggtaactgaaacatagaacttaaaaaccttgccaaacatttcagaggaggcagatttaaacccagatgcatttgcattaaaccccaatggatttgattccaaagcacgtcgtctttctgctaataatagccaacagtyattgagtacttactatatttataccaaggtctgttccaagtgatacatagattttctcttttaagcctcgtggcagtatgagaaagaagctattattatccccattttacagatgaaaaaatggagtcacagaatgttatgtaatttgcccaatgtcacacagtaagtggcagagttggtccacctcaggagcccacactcttaacctcttttggccttttatgagtacatctgccctttcaaggatcaggcttgagtctgtcagggaggcctcatgtctcctattaacttttgagccatacgcatcatggaaactggtttctcctggctgggtacttctgagttgcctggcctcctgtgagctcttcttttctaattgaatctactctctaagactctttgctgctggaatatgcagcagtagtttgagagacacttctcagtcagttctaacaygtttagctaggttcttcctattttttgtgcttcatcagatcatttgggctcagtgttttctttctttttatttttttctttttttttgagacagtatctcacgttgttgcccaggctgcagtgcagtggtgcaatctcagctcactgcaaccctgcctcctgggttcaagcgattctcctgcgattctcctgcctcagccttcagagtagctgggattacaagcacctgccatcacagccggctaatttttgtatttttaatagagatggggtttcactatgttggtcaggtggaccttaggtgatccacctgcctcagcctcccaaactgctgggattacagacgtgagccaccgcgcccagtctgggctcagtgtttttcagtggaataaggatgaatcattagaagagctttcatacctcttaaactctcaaattccatgccttaataaggatttttattaatacttcatttaaaacaaacagtaattaagcatcattttaaccatttgatgtgattataactcatatgctttctactccaaaaatatttgaagtagaagaaaccaatacaatgggataaacacaaaaaaatgcagaacaatgtagagaaaacagagataattatacaaaaccttaaggtattttcgttattgctgttgagcatttaatgctgaatttcctggcagctgaggcaacagaaaggtaattggtcagataatttttgttatatgttcaaataaagtaaactagttcattggggaggatagggtaccatgtcaggccactagccaacccttttcttcctacaagttaaattatatctgaatatcctctggagcactcagatcttaaaatactttagaagagactgtaaagaactgccagtgattgtctttaaagaggcgtcatggcagtgctgtaattcttgcttagcaacacttatatctaagctttcttctctgagggaaaggccaggttctaggtcactccctcactttgttccagtctctgcccaaaggtcacctcttccctgactgccctttctatatgaggttcccaccgaacgcatctgggttgccctctatccctgtccaacatagtagtcactagccatatatgacaattaaaattaattaaatgacaaaataaaaaattcagtactttggtcataccagccacatttcaaaagctcartagccatgtgtggcaactgggcatattggcaacacagatacgtcatcgcagaaagttccaytgggcactgctagcctatgctcttgccttaactttttcaacactatgccatgccatgcacctattgatttgtttatgttccactagaatacatgctctggatcacagagttttttttttttkttttcccagaacatagctgaatcctcagtgcctaaagcagtgcctgacatagtacagtgctttgtaaatacttgccgagtgaatgaacaacaaatgaatgaatgaattttagtattattttgcagtttcaaatcaaaastattttgtctaatgtccctgggtgacctagtacacgttctgccacagtttttgagatgaaagaacgaaaattctgtgatcaaagagaacattttaaagataaaatgatattaaatatactagtcaaaattttatttcttttatcttttatattatgaagaataatgggtacgaaatttctgtttatcaattaacgtatcatcctgaatatgaacacagaaaatatcaattttctttgcattaagaagtcatgtaagtagaaggagaaaacaaagtacttattacatagctaactggacttacagtcacatctaatttaaagcaaatttgctccatgcaatggaatatactaaaagtaatattgtgcaattatagctacagacatgataggaaatcataatacattctaaaagtatatagaaaaatgtcagtttacttcaacttattttaaacaaaaattacccatgaaatgattgcagtacctaaaaagaatttgcaatctgaacaaaatataactagaagcacgactaccctatatctcctataaatacagattgaagctagttttgtgatttcagccaaagatgcagcttcagtaaccttgaaaaacattgtttcctttctattgggcctggctttgtcaggagatactcaggaggtgatggtgaaaggaggtacctggtggagccagacgagtckggtaaatcagctttaacaagcagccagatgatagatgtcagttgggtgtcatgcccaattctagttgctgacaattaggaattagattaaaataggagtgttttctccttcaccctccctttcttaaaagcagccattttctgagtagtgttagttcttagttctcagtggatttgcaaatgcagatcatgaggcacctctagcttgggcaggattggtgttattttgctatttcaagtaaaaaacatgatggttagtgtccttggataacctcatatactttcattgtttttcaaatcaggtccagtgaagggccaagttcttcataaatatcatggctaattttggaaacccatatgttcagttaaggtttctgaaactggaataaatatgaatggaggatttatcaacatttggatatttgcaatttcaattcttgattcttttttgaaaatctattctgggtctayatctgaaatgtttatctcctttggtgctagatccagagtacaatttttgaaaactttaaatcaagggtggaacaataaattcacttgctcttaagactttaggggttgttttagctgccaagagagcattgcctgtgtgctgcgaaaaatacgagagccacagaatggccaaattattgcttttactcaggcagagtgaagaaaatggccctgtgacagacatttccagtttcctgtacatagaaatggggaaacagttgtgaaaaaaaaaaaaaagccagctggggttcttgacacacagttcatgctaattttaaattgtactaatacttgactatatagtgagggatcctttgcaggatgatgatctgttgaagactcagcaggccactgtggggagagggagagaggctgtcagaaccttcccctccagaggccttttaatggatactgaattcagaattgacctcacagaatctgatcattactgatgcaagagcaaagtcaacatcatctgcaaagataatttctcatctattcatgagtacctgtgcttatcaccacatctggaaatctgactactcaaataagaatttctgtcgagagactgaacaagccaggcaccaggaatattttactctgtatgtacagatggacatcgatactggaatatttctgtctcactgatgcttagggaccatcttttgattttgatccgtgtcaagattctaaggcagtttaactaagacatgggttttcagtgtttttttgtttttgtttttgttttaatttctgtttctgtgagtgtaatttagggaggagtaccagcttgttttttataagttgtttcttacaatgattaacacataatcttttctgccttaaggtttataacaaatgtgaaactaagtttcacaggttaattccagcctaatcttttcatagatgatagcgtagcccagaagcaatatgctgtgacattttattttattttatttttgagacagagtcttgctttgttgcccaggctggagtgcagtggcatgatctcggctcactgcaacctccatctcccagattcaagtgattctcctgcctcagccacccaagtagctgggattacaggcatgcacaagcacgcccagctaatctttgtattttaacagagacggggttttgccacgttggccagactggtttcgaacgcctgacctcaagtgatccaccacctcagcctcccaaagtgctgggattacaggcgtgagccaccgtgtccagcctaccgtgacattttaaatttcaaaatgtaataaaatcacaagttatgccagaaagccaccgtacttctcattgaatatagtatctccttggtgttcatgtccttatgttcttatataactctgtgtgccagtgtttcaccaaatctatcaactcttttaaggcagagactacatttatttattttttaactttttgtttgaaataacaaaactttctgataacttcagacttagaaaaaagttgccccaaaatactacactgattttcatgtacccttgatacagcttccccagatgttaccatcttacataatcatagtacagtgaaggaaacagaaattgacgttgatacaatagcatcactaactaacctaaataacttatttcagtttgccgattgtcctactagtgtcctttttaaagtccaggatccaatctagaatcccatacaacacttacttgtcacgtcttgttagtctcatctagtccggaggagtctttctataattttcacgacttaatacttttgaagagtcccgaccagtgattttgtacaatgtccccagtttgggtttgtctgatgttttcttaggataagaattagcttatgcatttttgacaacaataccactgaagtgatgttgtgcccttcccaatgttttttgttgttgttgtttttgtttttgttttggagaaggggtctccatctgttgccctgcctggagtgcagtggcacaatctcagctcactgcaacctccgtctctcgggttcaagtgattctcckgcctcagcctcccgtgtagctgggaccacaggcacacaccaccacgcctggctaatttttgtatttttagtacagacagggttttgccatgttggccaggctggtcttgaactcctgacctcagatgatctgtctcccacctctgtctcccaaaaagctgggattacagatgtgagccaccgcacccggcccccagtgtattatatgagagggtacatgatgtcagtatgtctcattgctgttgatctaagttttggtcacttagataatgtggtgtctaccaggtttctccactgcaaagttactgttcttcccattagaattaataagtactttgtggggagatgctttaagactctgcaaacatcctgtttctcatcatacttttgcccattaattttagatactattgatgattcttacctgtaacagttattagtgtttgctaaatgctgatatattttatttccatcattccttctatattattgtaattctactgtaaggaagagctgttctttcttctgctatttattgatttattatgttaatgtggatatataattagttactataatttttttctcaaaatatctcagatttggccattggaagccccttcagacaggctcctgtctccttttgacatrtcctcatyatcttttaaatgcatgttgtaactctggcatcacaagatgtgtctggcttattttgctccagccctagaatcagtaacttctccaaagaccctagttctttttactgtagactggtatttagaaacaaaatctgggtgctggatatgctcattgctactggtatatcattgcttctaggccctctcagcttacagtgctaggaaataatgtgtctgtatatccagacacatgtttctctctccctctctctccatatctatatgcctatgactatctacctattaaaaacaataagtttatctacttattaatacttccacttacaattcaataccactagtttccttttagatatctctttccttactcgtggctttttctccaacagttagaaacctggcattcattatctacaatatatttacttatttgctcaaccctagtatatatgtaaagaagtttcagaactgtgatttccataatctctatgagaaacaagtttaccaacaagactatatagcatccaggtgcagtcctttttgtctttagtcttaaggtatataataaaagtactggtttccaaaattaggttagatattttctttcttacctctttcatggtggctgttgttttttacttgtaatacagctaggttcttttgttactgttcgtgttccattttgggttcccccaacaccgagaggttggttttaattattctttattagggggatgtgaaacatgattattgttctcagagtcagaactctgtgaaaaggggccggtcgtggtggctcatgcctgtaatcccagcactctgggaggccaaggtggttgaatcacttgaggtcaggagtttgagaccagcctggccaacaaggtgaaaccccttctctactaaaaggacaaaaattagctgggcatggtgatgggcgtctgtaatcccagctacatgggaggctgaagtaggagaattgcttgaacccaggaggcagaggttgcagtgagccgagatcataccactgcattctatcctgggtggcaagctagactccatctcaaaargaaaaaagaaccatgtgaaaaggcatttcagaaaagtgtcattccacctcatcccttctgtcacgtttcagtctcccattcttcccatctaccccgtaagtgaccagtttagtttctacttttttcttctgtatttctttttgcacaaataaacaggcacatatatgttttcttatacagagatgatattcagtgtctttttttgtgtggtactgggcaatttaaatgctgtttggtaattttaactcttaaggatactgtttataattgatctgtccttaatgccaatgtattagaaagcacactaaatgattgttttcttttttgtaaaatatttgtgagattttttaaaaaatgaaggtgacatgaattttgatgggcttattaacactgaactatttcttgataagagttgtctaaaaaaatgagaacatatgccaggcgcggtggctyatgcctgtaatcccagaactttgggaggctgagacgggcggatcacaaggtcaggggatcgaaaccatcctggctaacaaggtgaaaccccgtctctactaaaaatacaaaaaaaaaattagccgggcgtgttggtgggcacctgtagtcccagctactcgggaggctgaggcaggagaatggcgtgaacccrggaggcggagcttgcagtgatccgagattgcaccactgccctccagcctgggcgacagagcgagactccgtctcaaaaaaaaaaaaaaaaaaaaaaaaaggagmacataaagcaagtaacaatgtttttcaagttttctttaaygcatyacatctttttttcacaagatattttaaaattttatttttccttattaagcgaattgaattatttcaagcatcagtgagagctgctagactgttatatttcgggggtcttgcrgrgtagcttttcttacacatataagcagaagaamacattttcccaagtcttaaaagwgggttatgatgcatttcaktgtgtactctttttcttcccatatactctgcaggcatttgggcagtccttctccatccaccggaaggttgctgaagatggagagactcgggaggaaacgcttctgcaggagtcagcatcgaaggaggcttactatctggggaagatcttggagatgcagaacgagctgaaacagagccgggctgtggtcactaatgtacaggcagaaaacgagaggctcaccgcagtcgtgcaggatctgaaggaggtaaataaacaaattccctatgagagatttgtgagagggagaaataagaaagttctctccatagcagagaggaataacacttttgttttaatcagaggagctgtattaagcacgaaactactaatactgagctagcaacttttcttttttagtgaaatgatagctagcttgttctgagatgagcttttctctcttttattgtttcttgaaaattaagttttgtatgtattgcggacttcggaattggccttactatttctgcaaaggtattttaaaaatacagtgaccttagcacttcctccctgcattagctggtttaatacaatgtggagaagaacggttggctgtaatgctctgtatctgcctgatttccagctgacagtggtgttggctcaggacactgctcatagggaatgacagcctaggcgagtgtcctgagaagtctttgagtctggtgatgcagatccccaaaggatttttctggttatagagaaggcagcaaattatggctggtatgaattaggtcagggagtctctcttgctctgtgagtgttgagcatccaccaaactcagtattccttgttagcttttccaaggcagcatcacctgccatatcattttcaaactggcagagtcatcctttagtggaggggtgatgttggaaacagagatagccaaaagtagcttcatccatcaaacccctgtaagaacatttttggaagctayattcaatcattcactccgtattttgatatgaaagctatagaagagacgcagacgtcctctaactcctacaccaatgcagtgatcattgacaggtccacaaccaagtgggctcactagttgagcattttagtgatagaaatatgtaggatgaaaatattcttcaatattgtaaagtataagacaagcaatccacatttgaaataagtgacatattacaaatagggcttcactattataagatataagttgtccagaatttattggaattttctagataatttacgtttacacatgtccatattacaatgaactaaatgaatactgacagcaaggtcacttatgagataaggtttacttatctcgttatctttggatatgcccaaatatagcaatatgacttgtgaagacagagaaaggatctaatgaagtggaagttagtgttgagtactaagaagaagaygagacagttttcaggataccaggacctcctcatttccctccaacgtgaacaactgttaaaaacagagctactctctggttccttctttctgagacagggtgtcactctattgcccaatctggagtgcagtggcacaatccagcatccattgcagaagtggacagagggtcatgtggagccaaagcccaccattctggattaaggaagtcaccaaacatttgcagggagcaacctcagcagccgtgagcagcagggtcatgtgcaagttggcagagaggatgtggcatgggcaacgtgaggaccgtgtgcacacgcatgcaggtggtttatggagaagaatgtgaccaatgagtcgagtattcttgatggccagttggatggatcctytgaaagctgcaatccccattgtgtgtagcagctgcagctgagccaagaacagccaaggttgaggatggggcagggaatccacagatgcttttctgtgtgagtcaacgtggtgatgattaatggagcatcctcacttacacagccacgcttgaaggcagttccaatgagtagatttatgatgcatggcagaagttaattaattaagcatgaagttacaagttaggaatgaatggaggcagcaaaagaaaaaaaatttgaggggcctttcattcagatcagttctcaaacttgaaggagcatctgaatcacctggagaactcatcagaccatgaacacggggccccctcgcagagattctgattcagtagatcgaggtaggacccaataatttgcatttctaacaagttcccaggtgatgtgggggctgctgctctggaaaccacatattaagaaccactaatttagattttttggcctgcccaaagctgaggaaggctcacaattgggacattgctataagcaccatgatctcctgaataaatcaattggttgtgattcttcaatttttatgcattttacatagtagatttgcagtaagagaataacttgttatatccacatttaggtatttttgatctaaaacagcttgaggcactttagcctatgaatgtgtttattcagatttgtcaggtaactaaaagaaaaaaaagatcttgtgtttctttgtcttctatgtgtgccaataatgtatttgttaatgttctttctgatgagtgagagctggtgatattactataaccctgagtttttgtttttgtttttaatccagcagatacattttattttgctgtacctaagagaattattattaacatttagagctaacataaaaggagaayaggaataaattctattttttggtgtattgatacacacttttaatggttggtattaagttgaaatctcagatttgatttccttttaggctcagttttattttttgtactataagcattaactgatgtacagtgattggaagagagatcatgtaacttagaacagttatgacatgatggaccatgagaaatatacaaggataaccaacccaaaatatagtaaatgatcagtttgacagatgctgtgtctctaagaacttaattaatgggataatttttctttactgaaaggactcatttcctgttttagtaggattgttggtcctggcaaaggtgtgtgtgcgtgcatatatgttgggtgcatcgtgaaagatttacccatgtgtgtgtgattacaatgtcaaattctcttccataaatagtagttacaggatagtatggtggaaaatggaaaaattgctgaattaggtattagaaaatcaatattctagtcagctctgctgaaagttttagtattaaattcatgatatttgtaaaatttatgttaagattatattgatatagagtacatacataaacataagcaattatcattaataatgttctgcatactccaaaaatatcattgacgatatgactcattatgtagatctatattcttagggtaaagaaacatgagataaatatctctgaatttatcacctcaaaaattctttctcttgtgatatgaatcaggcagtagaattacacatttttatttctgccttgactgttaagaagctctgcggctatgcttaagtataaaaaaactaacctagatttttttcatctaattctcacttttaaacgttttgattagccttattgtatatatgtttttaatggtaaactgctttaaataattttatatactatactacaaggctacagtaaccaaaacagcatggtactggtaccaaaacagagatatagatcaatggaacagaacagagcccttagaaataatgccacatatctacaactatctgatctttgacaaacctgagaaaaacaagcaatgggtaaaggattccctatttaataaatggtgctgggaaaactggctagccatatgtagaaagctgaaactggatcccttccttacaccttatacaaaaactaattcaagatggattaaagacttaaacgttagacctaaaaccataaaaaccctagaagaaaacctagccattaccattcaggacataggcatgggcaaggacttcatgtataaaacaccaaaagcaatggcaacaaaagacaamattgacaaatgggatctaattaaactaaagagcttctgcacagcaaaagaaactaccatcagagtgaacaggcaatctacaaaatgggagaaaattttygcaacctactcatctgacaaagggctgatatccagaatctgcaatgaactcaaacaaatttacaagaaaaaaaccaacaaccccgtcaaaaagtgggcgaaggacatgaacagacacttctcagaagaagacatttatgcagccaaaaaacacatgaaaaaatgctcaccatcactggccatcagagaaatgcaaatcaaaaccacaatgagataccatctcacaccaattagaatggcaatcattaaaaagtcaggaaacaacaggtgctggagaggatgtggagaaataggaacacttttacactgttggtgggactgtaaactagttcaacccttgtggaagtcagtgtggcgattcctcagggatctagaactagaaataccatttgacccagccatcccattactgggtatatacccaaaggattataaatcatgctgctataaagacacatgcacacgtatgtttattgcggcattactcacaatagcaaagacttggaaccaacccaaatgtccaacaatgatagactggattaagaaaatgtggcacatatacaccatggaatactatgcagccataaaaaatgatgagttcatgtcctttgtagggacatggatgaaattggaaatcatcattctccgtaaactattgcaagaacaaaaaaccaaacaccgcatattctcactcataggtgggaattgaacaatgagaacacatggacacaggaaggggaacatcacactctggggactgttgtggggtggggggagggggagggatatctttaggagatacacctaatgctaaatgacgagttaatgggtgcagcacaccagcatggcacatgtatacatatgtaactaacctgcacattgtgcacatgtgccctaaaactttaagtataataataataaaattaaaaattaaaaaatttaaaaaaaaatgtaaaatgcttccaacagtgcctgacatgtggcaaaacaaattaataaacgttatctgtatcacaaaaaataaaaaaataaataaataaataaataaaaataaataaaaataattttataggccgggcatggtggctcatgcctgtaatcccagccctttgggaggccgaggcggctggatcacaaggtcgtgagttcaagatcagcctggccaagatggtgaaatcccgtctctactaaaaatacaaaaaatttagctgggtgtggtggtgggtgcctgtccctagmtgcttgggagtttgaggcagagaattgcttgaacccgggaggcagaggttgcagtgagccaagattgcgccactgtactccagcctggygacagagcgagactctgtctcaaaaaataataatgataataataataattttataaaatacagggagtataaasaaaaactgatcacccaaattggagaaccaaattaatagttaatcttaacctaattaggagttaatcctacagggccaataataggcagagtgaagaaatctctgagttctcttgacccagcattatttttggtaagagcataaagaaagcagattgctataggatttaaatagatatttagtaaacaagtttgaatttcattttttctatcttcaacctgtaggtatamtatactagaagatagcctaaaatttgggtaatatttacttttatacttatttatactaaactaaactaaaatccacattaatgaaatcataaaataggataatgaaacttaatactacttaattctcccaattactagctaatgtctcaaatataagatatgttagaattaactgcaatatttacaaagtatacaaagcaattatgcagcattcctaaccagaattggtatatatgggataaaaagatgtcacataagataggccccttcaggtggaatgcagaagattggagttatcaaatgaattatcgaccttagtagagattaagcctataatttaaagtgaaaataacaacatttattgagtgccagacactgttctaaataccttacgtgccttaactgctgaatctttctaacaaccctactgaggcagttcctattatattatacccctattttactgatggggcacgtggatcaaagagaggtcagatcatttgtccagagcacatgggtaccaagtgacaggccatgatctgaactcaggaacactggctctgatgtgccattctttgccatgtcaccgtagctgccaagagcataggtttccctcttccgaaccctgcctcaagcaatgaaatttctagaaaagtatatgaagttttaatacgatagctgctatggtctgaatgtgccccttttaaattcatgcactgaaacttaatcatcaatgtgataatattaagaagtcgggcccttaggaggtgaatgagattagygagtttatatgagggctggagggagctagctaggccttttgrcccttttgtcctttccagcgtatgaggacaaggcattcatcctctccggaggacacagcaacaaggtgccatcttggacgcagagagcagctctcaccagacactgaacctgccagcaccttaatcttagatcttcagcctccagaactgtgatcaataaatttgtgtgtttttawaaattctaatgcaaggtttcttctataaggttattttgtctatgttgaaaatctatgttttagtttagtttacctttatcaatgatcttagctagatctgctggatcacttgctgcattcagttaaagacatcagcacttgctacttcaccttgcactttatgttatggagatggcttctttccttcgacctcataaactaacctctgctggtttcaaacttttcttttgcagcattctcacctctctcagccttcatagaattgaagagaggcatccgggtgtggtagctcacgcctgtaattccagcactttgggaggccaaggcaagtggaccatctgaggtcaagagttcgagaccaggctggccaacatggtgaaaccccgtctctactaaaaatacaaaaattagctgggcatggtggcgaatgcccgtagtcccagctactcgggaggctgaggcggagaatcgcttgaacgtgagaggcaggtgttgcagtgagccaagatcgcgccactgcactggagcctgagtaacagaaagagactttgtctcaawaaaaaaaaaaaaaaaaagaatcaaagagagcccttgctctggattaggctttggctggtttgatcttctatccagacctttcttcatgtcagaaatgagactgtttcgctttcttatcattcatgtgtcaatggagtagcacttttaattttcttcaagaacttttcctttgcattcacaatttggctaacttagctaacttaacttggctaatttggcatatgcttaatcatttcttcctttccttgaaagtacgattctttcacttggacactttgaggccactgtggggttactaattggcctaatttcaatattgtcttatgtcagggaataggaaggcccaaggagaaagagatggggaatggctggtcagtggagtagtcagaacacacatgtttatgggttaagtttgctgtcttatatggatgtggttcatgtcaatataacagataaaataataatgaaaaagcttgaaatattgcaagaattaccaaaatgtgacacagacacacaaagtgagcacatttaatgtatccagtaaaaaccaaagtgtttcttacagtctctgatgtttccttctgagtaattggtcattgggagctgtggttacacatagctgagtgaagcggacacttctgtgaaggcatggcttggctctwgctgggaagttttctgtttcctggcctgttcctgtctctcttctcctctccatacttgttgggaatggacctcatacctctctggaatgatgcagtgcaccaaacagtgaagaactgttgttgtttttaactgatttacataactgataataatatcatagctaacatttattgagctcaccatatgccaggtatgaagcttagcactttactacgttcattattgcatttaattctctcaacaaacttgcagcgcatatgcgattccacaggagagagctctatttcttttggttgaaaagttctttctaatacttgctgagctacagtaaacaaatatgtctattaatgccattgggaatttggaagcaaagtcttaacaaaatatagacaattcatttttgaataattgtgatttgattatgcttttggggaatatcagattaacaaagtgggtttgtttgtaaggattagtttgcaattcaggctcatagaatttttgtgtgtgtgtatacagttgtatcgattttattttattgagatggagtcttgctctgtcacccaggctggagtgcagtgttgcaatctcggctcactgcaacatccacctcccagattcaagcgattctcctgcctcagcctcctgagtagctaggattacaggtgtgcaccactacacttggctaaattttgtatttttaatagagacggggtttcactatgttggccaggctgatctcgaactcctgacctcaagtgatccactcactaaagtgttggggttacaagtgtgagtcactgcgcctggccagttccatgaattttaacttgtaaatagattcatatagccacagccactatcaggaggtagaccagtttcaccacttcagaaatctcccttggtcagtgctactctttgtagtcagagccactcccacctcagcctctgataaccaatgatctattctctattactatagttttgttttatttttttcttttcaggaatgtcatataagtggaataaaacagtatgtaaccttttgagattgggtccttcagcatgatgccttggagattcatataagttgttacatgtgtcaatagtttgttcctttttattgctgagtattattccactgtatagatacattgtggttgcattaatcagttcacctactgaagaacatgagttattttcagattttggtgattataactagagcttctataagcattcatgtacacttacgttttcgtgaagttttcatttttctagagtaaatacttaagagagtgggratactaggtcatatggtaagtgtatggttaagttttccagagcagctgtaccattttgctttcccactagcaatgtgtaaaagttcctgttgcccctattctttccagcccttggtatttgacagttctttttttctgtttttttttttttttttttwaracggagttttgctcttgtccaggctggagttcaatggcatgatctcagctcactgcaacctccaccttccgggttcaagkgattttcctgccttagcctcccgagtagctgggattacaggcacctacaaccacacccggctaattttttgtatttttagtagagacgaggtttcgccatgttgaccaggctggtctcaaactcctggcctcaggtgatccacccacctcggcctcccaaaatgctgagatttcaggcgtgagccaccacgcctggccttgacagtatttttaaaattttagcaactctaataggtgtgtagtgatatctcattatggttttaatttgcatttcactattgactaagaatattgaacatcttttcatgtgcttgtttgccttccatatattctctttggcatagtgtcttttcaagacttttgcccatttttaattgggtgtttcttttcctaggtaagtttttttgttttgttttgtttgtttgctttgagacggagtctcgctctgtcacccatgctggaatgtagtggcatgatctcggctcactgcagcctccacctcctgggttcaagcgattctcctgcctcagcctcctgagtagctgggactacaggcacatgccaccatgcctggctaatttttgtatttttagtagagacagggtttcaccatgttggtcagctggtctcaaactcctgacctcaggtgatccacctgtctcrgcctcccaaagtgcttggattacaggcgttagccatcacacctgacctatttttaaattttatattaatatattaactggatttttgtcaaatagagaattmtctttaaataaccatctcctcacttcacacttagtctgggaaaaaatgagagcaaatttctgtgcatccagggagcatatcaccaaccaggcatgaagcttaaagggagagtgcaggctgagtggccagcaggccatgggcatcccacagggccaggccaggacccaggcttcagcgacccttctcccagcccacctagtggccctcaaatccatgatgggacagacatgcattctcctgtcccagttgagaagccccttctagatggaagggagaggagaaaagccataggaaagaaatcccagaaacactagcaggtaagtacaggggcttcctccccagctgcggtgaccttgctcctgataacacccaacccctggagctcttcgccagtgtgcctggggctggagcctggcggggaagggaatgtgggctcacagtttctggatgttggcctcccacagcttggcacagaccaggggaaggcatgtgaggagggcctggggaggtcctcggggaagataacacagctcaggaggttgagtgtaaagtggctgccagaccaagggagctggatggactgtgaaggaggaggtggctggagagcctcctccatgtaaagctactagagcaaaaatagaacaaggggggacacccgtgccccagaggacagccctaaagatggtaacggggagcacggctgagcagcgccctggattctgagctagtgtggaaagctgggggccaggggcctctctcttccttcatcaccagttgctggtaactttacagtcagatttggaggaggaacaaggccctccatcgcctcccctagcctctgatgctgccccaaggggaggggtaagaatgggcaaagagggtgggaaacagggaggtgggagggagtctactgggtcttcttattttcagaggagggggctgtaatagtgtagtggcagaggctggttcctaggtatgtaggtgttgtgtgggttgcctggcactgacaactgcttctgtggctctggctttggctgccagagcagaggggccaatggggccactgaccagaggttccatgagcccagatagggcagtggcagggattgcaggcatcccatagctccatccatcatgggaggtcctggatagaactcagatggggactgtggattggggtagccaggagggcaaaggtacattccattggcaactggcagaggaaagacataggctctgttgggtatgtaagagtacccgtagcctccattgggggcctcgcccctggaggcttgaaatgccacctggagcattcattgtccaaactgctgtaaggttaacttgtatgaaccccagccctcccagccatctcccgcttcacccttcactgttcttttgaagtagttggcagcaaacaggctagttgatctcacagtccttcatcaggtgaaaaggcatcacgaaggcttcatggagttcttcttcttggacagaaagatgatcggtaaggggtaaggtagacgatgcctttcttggtccctttgaaggactctggcacattcttcttgtcattgaatgtaagttccacatggacgtaggacattaggatgttcttggtgttcttgatcactctgccaccctttgagtgattcttgttgagcacgatagtctcttggaaaggggtcctaagactctcgatgcagggccttgagttcgtttttgcataaaggagttggtttagattgaggttcctttttttggcatataaatgtccaattgtccatttgttgaaaagactactctttctccattgacttgcctttgcacttttgtcaaaatttattggccatgtttgtgtaggtctatttctggaatctgtattctgctctattgatctgtgtgtctatcctttcaccaatacacactgtcatgaagtcagagaggtaacaggaagccagatcatgtagggccttgtagaccattgaaaggatttaggcttttatcttgagtgaaatgaggagctacaggaaggtgctgggcaaaggaggaacctgactttattgaggcaaggataggaatgtgaggttactgcagtcatccagatatgcaaaaatggtggattggaccaggatgatgggtagaagtggtgaaaagtagtcatattctgaataatttttgagagtagccccaatgggattttctaatgggttgaatgtagagaatgagagataggcatgagaaaagaactctagtctgagggtttagcttgaccaacgtgaaaaatggagttatcaattgagatgggaaaaccttcaaatgaagcacattttaggaaggaaggtcagaagttcagtttcgaacatgttaagttttaaatttctattagaggtccacctgtggatgttgagtgaatagtgggtgataagggctaagagcttgggagagaggtctgggaatggaggtatacattttggatcctggcggggcacctgggatcacgcctgtaatcccagcactttgggaggctgaggcgagcggattacttgaggccaggagtttgagacgagcctggctaacatgacaaaaccccatctgtactaaaaatacaaaaaattagccgggcgtggtggtgcatgcctataatcccagccactcaggaggctgaagcaagagaattgcttgaacccgggaggtggaggttgcagtgagccgagattgtgccactgcactccagtcttggcgacagagcaagactctgtctcaaaacaaaaacaaaaacaaaaaatttttggatccatcagtagatagatgctatgtaaggccatggcattggtgaaatcaccaagggcagatatgtagagagaaaagggcaagcactgagccctgggtcactgcagcattgagaggtgggggacaaaaaaagaaactggtaaaggagactaaaaaatagtagtgaggtagaaagaaggtagacaatgctttctgagagccaaataagaaaatgatatccaggaagtaaatgatcaacagtgcggatgctgctaataagtcaaacaagacgaggacatatattgaccattgggtttacgaacaaggggtcattggtcacctcagtgagagaagtttccatagagtgttgggagaaaaaggctgaggatagtaagtttaagagagaataaaaggagaggaattgcaggcagagaatagaagcgtttttcatggagtctgtttgcaaataggaccaaagaaatgaggaggtagctaggggacgagatgggctcacgtgcaagttgttgggttttattcctttttaagatggaagaaataacatttgtgaatgctaatggccatgaccccataaagtgggaaattttaatgatgtaagaaggaaagagaagaaagcctagagcaattgatttccttgagtaaaggagaaarggatggaatctagtacaaaaatggagggattgcccttagaaggagctagaaaatttaatatatggtaacacttggaaaagcagaatatgtggatgtggatgccagcatatgggtagatagatgtgagtgaagcaagtcctcttcagtctgcttccatctcctcactgcggtggaagcaaggtcagcagctgagagggaaggtaggggaggggctgagatttgaagggacaaaagtgggcgataatcacctgggagagtgaaccgtaggagtcatgggagtgagtgcctgccataggagagaagatccctcaaaaagaggaattcagggctggatgcagtggctcctgcctgtaatcctagcaccttaggrggctgagatggaaggattgcttgagcccaggaggtcaggactgcagtgagccaaggtcacaccactgcactccagtctaggcaacagaatgagaccctgtctcaaataaataaataaataaataaataaataaataaataaataagyaarcaaataaataaataggaattcaagaattgagatcatctgtgtgggtattgagaatgccaggaattaagaccagaaattctagagatgatggcaatggcaatgagaaatgaaggggaatgagttggtgtttgctacrtaacagtaacagtgctggatagcggatgatagaatctgatgacatgaggtttaaagcacagaatttttagagaggagagaaggagaatgctctgaaagcagccacgtggagcaaaagcggcgtctgtctcacctcacyttccagccatgtggagcaaaaggggcatctgtctcaggcccagtggcatgggagtgaaatagcacttcagagagttgcaggggaaacagtgtccccaagggagagtcaggtttctgttaaaggaaggtgcattatgcacatctgtgaaattatcatgactgctgtcatcccatctgctcatagaaccagtgaatattgattggtcataaaatgcaagcattattttaaggagcatggacatttaatttctcttttaaggactggaaataattttttccatgatttggaaagtgatattatatttgtcaatgagaaataatgtaatagctttttaatagttcacaaaatgatgtcasttgctctytattcaaaaatatctttagcctttttgaggttattttggggagatgataaggacaggcatctccataatcccaaatatttgggagaaaacttcaaaaattaaagcgtatttaggctgagcatggtgactcatgcctgtaatcccagcactttgggaggtcaaggtgagtggatcacttaaacccaagagtttgagaccatcctgggcaacatggcgaaactctgtctctacaaaaaatacaaaaattagcagggcatggtggcrtgtgcctgtagtcccagatactcgggaggttgaggctgcagtgagctgtgatcataccactgcactccagcctgggtgacagaacaagaccctgccccctaccccctcctccaaaaaaagcatatttaaatattcccrgaatccaaatgttgaacatcatttggacacagcttcaaaatggtaccaattcttttaatttgtgactgctttatttatttatttatttatttatttatttatttwtttattattatactttaagttttagggtacatgtgcacattgtgcagattagttacatacgtatacatgtgccatgctggtgcgctgcacccactaactcatcatctagcattaggtatatcccccaatgctatccttcccccctccccccaccccacaacagtccccagagtggggttccccttcctgtgtccatgtgatctcattgttcaattcccacctatgagtgagaatatgcagtgtttgtttttttgttcttgtgatagtttactgagaatgatggtttccaatttcatccatgtccctacaaaggacatgaactcatcattttttatggctgcatagtattccatggtgtatgtgtgccacattttcttaatccagtctatcattgttggacatttgggttggttccaagtctttgctattgtgaataatgccgcaataaacatacgtgtgcatgtgtctttatagcagcctgatttatagtcctttgggtatatacccagtaatgggatggctgggtcaaatggtatttctagttctagatccctgaggaatcgccacactgacttccacaagggttgaactagtttacagtcccaccaacagtgtaaaagtgttcctatttctccacatcctctccagcacctgttgtttcctgactttttaatgaytgccattctaactggtgtgagatggtatctcactgtggttttgatttgcatttctctgatggccagtgatggtgagcattttttcatgtgttttttggctgcataaatgtcttcttctgagaagtgtctgttcatgtccttcacctactttttgatggggttgtttgtttttttcttgtaaatttgtttgagttcattgyagattctggatatcagccctttgtcagatgagtaggttgcraaaattttctcccattytgtaggttgcctgttcactctgatggtagtttcttttgctgtgcagaagctctttagtttaattagatcccatttgtcaatkttgtcttttgttgccattgcttttggtgttttatacatgaagtccttgcccatgcctatgtcctgaatggtaatggctaggttttcttctagggtttttatggttttaggtcaaacgtttaagtctttaatccatcttgaattgatttttgtataaggtgtaaggaagggatccagtttcagctttctacatatggctagccagttttcccagcaccatttattaaatagggaatcctttccccatgactgctttatttctgcattagacaataagaaggggccgaaacttctggcctgatatgacagtgacatcaacctcttgtgtagtagcctgtcattaagccagcgccaaatggaaaattaaatggaaaatggcagagagcattgcccaggacataatgtagaaatggcaactctggcactgacataggtttaaaaaaattatgttttaaaagtaatcttgctgggaggccaaggcgggcatatcacttgaggtcaagaattcgagaccagcctggccaatatggtgaaaccccatcgctactaaaaatacaaaagttatgttggcatggtggcgggcacatgtaaccccrgctactctggaggctgagacaagagaatcgcttgaacccaggaggaggaggttgcagtaagctgagattgtgccattgcactccagcctggatgacagagcaagagtctgtctttaaaaaaaaaaaaaaaaaaagtargcttacacatattccctttactgtttttcaaggtcattacatttttatctgttattgttcaccatttaaaaataagcagtggaaagcagcctactttttaaaatgcggaactcgtatggtgtacttagcatatatataaggatttctgtcctctctcttgcctccctccctcccgttcttcccccttcctcctccttccttccttccttccctccctccctcccctttcctatcttctgagtagggtcaaacaccagttctctacttctyggaccataagaataaagatctgtgcacaatccattttgtacatattgattcttggactaaaaatagctcaatttggtttcaaactttttctcccaccctaagttcaggttttgttccttgtgcagcctggtaggcgggcaagtaatgcatagtcagcattccatctgggatgcttactggacaattttaatcttttttttacgtcttgacctctatttccaaagagcatcccagttggcaggtctagcctgattaagattctgttcaggcatttaattctcctaagggaatttacagattaatctaaaaatcaaggataccagaatctactcaggacttaacttcttgaaggttataggaaacatatacttgagcaacctaatgaatgagcttagtgatatcgtaatgaatttttatatatacctcaaattacactttttaatgcatatccaacaaaaatatttttaaaaacaaatactgtagacctaactggattagctgtattagtagatccaaatttaactttcaatttgaattaagttagaacactatggatctcataaggcaggctatatattgattacctagttagccagcttccatatcaccacttgttcaggaacattaaaagtacttttttagaaatagttttctgatatatttttggtttcactaagacagctttttaaaaagcaaaattaggcagggcgtggtggctcacgcctgtaatcccagcactttgggaggccgaggcgggcagatcaccggaggtcgggggttcaagaccagcctgatcaacatggagaaaccccatctctactaaaaatacaaaattagccaggtgtggtggctcatgcctgtaatcccagctacttgggaagctgaggcaggaaatcacttgaacctgggaggcggaggttgtggggagccaagatcgcaccactgcgctttagcctgggcaacaagagcaaaactccgtctcaaaaaaaaaaaaagaaagaaagaaagaaagaaagaaaagcagaattataactaaacaccactttttttttctttctttttttttttttttttctggagttagagtctctcactctgttgcccaggctggagtgcagtggcacaattttggcttgctgcaacctccacctcctgagtggaggttactcaggcaatcctccwgcctcagcttcctgagtagctgggactacagccatgtgccatcacacctgaataatttttatattttttgtagagacaggatcaccccatgttgcccaggctggtctcaaactcttgggctcaagcagtctgcctgcctcagcctcccaaagtgctgggattacaggtgtgagccactgttgccagcctaaacatctcgtctgaggctatcacaatatatactattctccagcctacagtagattatagacatctagaatataaaaatttgtttcctgataggcttggcacacaatattcctacagtcctttgaaaacacacatattaacagagtgacaatatttacaggcagaattactcatgtgtcttattgtagcttacaggagagtgtgtctgtctaagaatggggtagaggttggtttgtaaaaacaggtgtcccacaagctttcttggatagttaactcagtagttagaatgaaggatgtaaaataacctgtcaggataacacctgctctcttgccctcaacaattaatgataatgaaactaggcctgaagaggaataaaaatcttgtatcatctttgaattagtcttttgttggtcgtgcgttccaatgaaatgatgtttcacaaccttttcttcattatcatctctgaaaagatcctttatggctatttttttttcctagttgccacaaaattaaacacaggcatactgtgtcttactgtgctttgctttcttgctcttggaagatattgtgggktttttttttacaaattgaaggtttgtggcacccctacattgagcaagtctactgggaccattttcttttcaacagcatatgctccttttatgactgtgtcacattttggtaattcttacagtatttcaaactttttcttttctttttttttttttttttagacagagtctcgatcagccacccaggctggagtgcagtggtgcgatcttggctcactgcaacctccgcctcccaggttcaagtgattctcctgcctcagcctcccaagtagctgggactataggtgcatgccaccacacccagctaatttttttgtatttttagtagagacagggtttcaccatgttggccagactggtctcgatctcttgacctcgtgatctgccctcggcctcccaaagtgctgggattacaggcgtgagccactgcgcctggcccaaactttttcattattgttatatctgttatggtgatctgtgatcactgtctttggtgttactattgtaattgtttggggatggcctgaactgcatccatataacacttaattgaggccaggtgtggtagttcacgcctgtaatcccagcactttgggaggctgaggtgggcagatcgtgaggtcaggaattcgagatcagcctggccaacatagtgaaaccccatctctactaaaaatacaaaaaaattagctgggtgtggtgacgcacacctgtagtcccagctacttgggaggctgaggcaggagaatcgcttgaactggggaggcggaggttgcagtgagccaagatcatgccactgcactctagcctcagtgatagagcaagactccatctcaaataataataataataaagacttaattgatacttaatccataaatgttgtatgtgttctgagtgctccacccaccagctatttcccatctttctcctcctcctcagacctccctattccatgagacacaacaatattgaaattaggccaactaatagccctacaatggcttctacatgttcaagagaaaggaggagttgcacatctctcactttaaatcaaaacatagaaatgattatgcttagtgaggaaggcatgttgaaagcctagataggtcaaaagctaggcctattgtgccaaacagccaaactgtgaatgcaaaggaaaagttcttgaaggaaatgaggagtgctattctgttgaacacacaaatgataagaaagtgaaacagcctcattgccgatatgcagaaaatttgagtggttctagatagaagatcaaaccagccataacattcctttaagccaaagtctaattcttttttttttttttttttttttttcagagtcttgctctgtygcccaggctggagtgcattggcacaatctcggctcactgcaagctctgcctcctgggttcacgccattctcctgcctcagcctcccatgtagctgggactactggtgcccgccaccacacccggctaatttttttgtatttttaatagagacagggtttcaccatgttagccaggatggtctcgatctgatctcctgaccttgtgatctgcccgcctcggcctcccaaagtgctgggattacaggtgtgagccactgtgcttggccaccaaaccctaattcagagcaaggccctaactcccttcaattcactgaaggctgagaaaggtgaggaacttgcagaaggaaagcttgaagccaatgggttggttcatgaggtttaaggaaagacaccatcttcataacataaaagggcaagtaaacagcaagtgctgatagagaagctgcagtaagttatccagaagatctagctgagatcattggtaaagctggcttcaccaaataacaaatcttcaaatgtagatgaaacgactttgtattggaagaagatgccttcaggctaggactttcatagctggagaggagaagtcaatgcttcaaagtttcaagggacaggcttttgtcccttgggctcttgttaggggctaatacagcttgtgactttgagttgaaggcaatgctcattgaacattctaaaaatcctagggcccttaagaatgatactaaatgtactctacttgtactctattaatgaaacaacaaagtctgaatgacagcacgtctgtttatagagtggtttatcaaacgtttaaagcctgctgttgagayctaccactcagaaaaaaaggttcctttcaaaatattactgctcattgacagtgtacctggtcacccaagagctctgaaagtataaggagatgactgttgttttcatacctgctaacacaacatccactgggcagccaatggatccaggagtcattttgactttcaagtcttattatataagaaatacattttataaagatatagctgctgtagatagtgattcctctgatggatctgggcaaagtctattgaaaaccttctggaaaggattcacmattctagatactgttgggaggaggtcaaattatcaacatgaacaggagtttcgaagaagttgattccaaacctcatggtgactttgagggctttaagacttcagtagagcaggctgggcatggtggcctataattccagccctttggaaggctgaagmgggtggatcacaagcatagagttcaagaccagcctgggcaacacagtgagacccccatctcctaaaaaggatttttttttaagacttcagtagaggaagtactcgtaaatatggtggaaatagcaagagaactagcattaagaatgaagcttaaagatgtgactgaattgctgtaatctcatgataaaacttgaatggatgaggagttgcttcttatggatgagcaaaggaaatgatttcttgggagggaatctattcctggagaagacactgtgaaagttgtcgaaatgacaccataggatttagaatatcccataaacttagctgataaagcaggggcaggctttgagaggatcgactgcaattttgaaagaagttgtaccrtgagtaaaatgygatcaaacagcattgcatgcttcagagaaatctttcttcacaaaaggaacaattggtgcagcaaaattaattttcttattttaagaaattgtcagccgggtgtggtggctcacgcctgtaatcccagcactttgggaggccaaggtgggcagatcacctaaggtcaggagtttaagaccagcctggctaacatgctgaaaccccatttctactaaaaatacaaaaaattagccgggcatggtggcacgcctgtaatcccagctacttgggaggctgaggcaggagaatcgattgaacccgggaggtggaggttgcagtgagccgagatcgcgccattgcactccagcttgggcaacaagagcaaaactctgtctcaaaaaaaaaaaaaaaaaaaaggctgggcgcagtggctcacgcctgtaatcccagcactttgggaggccgaggcaggtggatcatgaggtcaggagatcaagaccgtgctggctaacatggcgaaaccccgtctctactaaaaatacaaaaaaattagctgggcgtggtggcaggtgcctgtagtcccagctacttgggaggctgaggcaggagaatggcgtgaacctggcaggcggaggttgcagtgagtcaagattgcaccactgcactgtagcctgggtgacagagtcagactccgtctcaaaaaaaaaaaaaaaaaaagaaaagaaaggaaattgttggccgggcgctgtggcttacgcctgtaatcccagcactttgggaggccgaggcaggcggatcatctgaggtcaggagtttgagaccagcctgatcaacatggagaaaccctgtctctactaaaaatacaaaatgagccgggcgtggtggcgcatgtttgtaatcccagctactcgagaggctgaggcaggagaatcacttgaacccaggaggcagaggttgcagtgagccgagagcgcaccattgcactccagtgcagtggagtgcagtggtgcgatctcggctcacgatcgttagcgttttttaacactcaagtgtttttggttttgttttttgagttggagttttgctcttgttgcccagcctggagtgcaacaagagctggcatgatctcagctcactgcaacctctacctcctgggttcaagtgattctcctgcctcagcctcccaagcagctgggattacaggcatgcaccaccacacccggctaattttgtatttttagtagagatggggtttcaccatgttggtcaggctggtctcaaactcccaacctcaagtgatctgcccgcctcatcctcccaaagtgctgggattacaggcatgagccaccatgcctggcccactcaagcattttttaattaaggtatgtattttttagatatggtattgaacacttaagagactacagtatagtgtaaacataacttttgtatgcactagaaaataaaaatttcatgtgactcacttttttgagatatttgctttattgcagtggtctgaaaccaaacctgtaatatctccaagatatgcctgtactgaagagtaagattttgtcagttagagtttaatcttggaaagactacaaaccactgtaataacctaagcattatttgattccccaaggaccaattttcacccctttgggggccatattaattttttatggctgctataccaaagtactatgaattttatggctgaaaacagcacgaacttattcccttgtagttctagaggccggaaatgcagttcactgggggtaatgtcaaggtgtagggccatacccccaggaaggctctggggaagcgtacatttcctcttccagcttccatctttttctggcttccagacttgcattctgtgtgttcactgactcatgtctgcttcctccatctttcaaagccagcagccgtgtagcatcttgtttcaatgtcacgttgcctttttcttctgtcaagtctccctctgcctgcctctcatgaggacagtgtgattacacttagggtctaccttgctaattccggataatctctgcatctcaaaatccttaatttaatcgtatctgcaaagcttgtgttaccatataaggtaagagtcacaggttcccaggattaggaactggatatctttggggaccaatactcagccacagaggtgataccactccccaccccttaaaaatgcatgttctacaccagtaaggaagaaagaaaataagaaagaagagtaaaagataataaatatgtaactttggctacaaatgaattctttattatatctcattctatttggggcacttgctattagaacaaagagagaagatatatttaaaattaataggattcagaagagtagagttgatgatgttcacctcattgcgatgtactcacccattcatttattttgcattacccttcctgcctggggccagtcagcagaggagggcagtgagtcactccaaggtcagacagtattattaccctcttattgtgatgggcaaatccaccattaagcttcagattgagagaaacaccattgagttggcaaatgctttcgatgtgtacgtgcagaaagtcatatgtatctacaattttccagacagyggcaaagagaaatggaaactctgtgctgtattttaattggctgcaaaatgtttccttcagaaattaccattccattaagcacctactctgtgcaaacgctttgcaaacactgctgggaatagctgcatgtataagggcatgcctacctttattagactgttcaggggaataaaatgaagttacaatttattctaatactagaatgcagttctctccccatggactgcacctttcaggatagtggcctgaatcagagcagaaaacacctgctggatatcctccaagtacacagtctgattagtgccctctgggaaacatggaggcagatactacttggctctccagcctaagggaagtattattaattaaaaacttaaagccaggttcttctctgtgtatggttatgcatgtcctagatggccttgaaattgatctgttctccattagcaatctgtgaattgtactcctgtctgaaattgagtagaggtcagagctatgaaggttgaattcaacaagaatttttatgaagtataactagagttagtgctctgctctaactgcttttggagacagactttccccagtgtatcccatcaaatcacagactaaaaacagtctatttccccttattcttggccagataggacctaggcacctgaatttttttttaaactagatttccaggaaattttattgaaggctaacagcatagcatttcatgttggataaagaagatgcacaagacgggacatggtaagacacacctgtaatcctaccactttggaaggatgaggcaggtggatcacttgagctcaggagttcaagaccagcctgggcaacatggtaagaccctgtctctccaaaacaaacaaacaaacaaacaaaaaaacaaaaattagctgggcatgatggtgtgcacctttagtctcagctactcgggaggctgaagtgggatgatcacctgagcccagggaggtcaaggctgcaatgagccatgattccaycactgcgctccagcctaggatacagagtgagaccctgtctcaaaaaaaaaaaaaaaaaaaaaaaaggccatatgcagtggctcatgtctgtaatcccagcactttgggaggccaaggcaggtggatcgcttgaggtcaggagttcgagaccagcctggtcaacattgtgaaaccagtctctactaaaatacaaaacaaattagctgggcatggtggcaggcacctgtagtcccagctactagggaggccaaggcaggagaattgcctgaccccaggaggcggacgttgcagtgagctgagatcgtgccactgcactttagcctggccgacagagcgagactctgtcttaaaagaaaaaaaaaaaattcacaaaagaaaaattgtattaagtacaatttaatataatttcttacaagtttattacctaaaactttgcaaataattgaagttagaagctttggattttgtttttagagcttaatccttttctgtaagtggaaatcctttccactggtttattttccttttgattttattttactttgacaccctaaaggtttagtgttcctgtttttaaatctactgatcgtttcttatgagattccttagagtgccctttaagtatgcacagattttgcaaatgcattcattttcttatttgccagggtttaacactggctatgcacatgttagctgaataaccttaggcaagtaaattatcctctctgggcctcgatcttgttagctattaagtgggaataatgacaattcctaactcaagggtstgttgtgaggattaaatgagtccttacatgtgacatacttgaaatagtacctggtgcagagttagggctgggtgagtgttagctattrtattattatttcattgctgtttgcatatatttttaaaatgtatttaggattttctttttttttttgagacagggtctcactctttgcccaggccggagtgcagtggtacgatcttggctcactgcaacctccacctcccaggctcaagagatcctcccatctcagcctcccaagtagctaggattacaggcacgccccaccatgcctggctaatttttttttttttttttttttgtatttttggtagagacagggttttgccatgttgcccaggcttgtcccaaactcctgagctcaagcggtctgcctgctttggcctcccaaagtgctaggattacaggcatgagcaactgcgtctggccagggttatttcttagggatagcattccagaaatataattaaaatttattgatccagaaatataattaaaaataattgatcaaatggtagaagactttttaaatttatatttcatcaattttacacatttgttaggttttaatgtttctactacttgtgtgtgccaaaaaattattgattttcttaatcgttttctatgagtagaaatcctttccactggtttgttattttccttttgattttattttacttttgacaccctgaaggtttagtgttcctgtttttaaatstactgattgtttcttaggagattccttagagtgccctttaagcagagaatatctttccctctccttcctcttcccttcactcttctcaaaactataaaaatataatactcatttctacctgttttygtggcttttatactttcratgtgttcatctacatgagatttagtttgatgtgtggaacagcaagagagtttaaattaaaaatcttcccctaaatggctaaatgtcccagtgccatttacagtgtggtacccctcctgtaataagaatattacattcttatccgtattaattatttcttattcaaacttaccagtggcatttaagaaatcattagttcagttgtttataggtaagaagactcattctttatctgctatttcaaaattaaaatcattgtctttcatagatattttctgaaatgaaatatggaaaacaattatttttacaatgagacttggaaaaaaatcaatactaagtttcttttgtatacaagatagccaataatacctaggcctaaaacgttccaatctagttttttgtctgctaataggtgctcagtatgacggagcttttcttgaggaccatttgaccctgtgtctctctttgcctttccccttatgaaaataagctgacccctacatccaatcaaatcatcatagcaaggttttcatcattttttatggaatgtcagccttgccacctgcttgcctggtacccaatacatataatctctcttcaggctgcaacacacagcacttgaggcaggctgtcattaattggagttacctccaattgcctacttcttattctattcctatcaaaaacccagctgacaggtacacaaggggcatagcccaaattacatgtaatccrtaaatctctccattttttcttaagtcttagttttctcttgatataggattttttttttttttttttgagatggagtctcactctgtcgccaggctggagtgcagtggcacgatctcggctcactgcaacctccacctcctgggttcaagcgattctcctgcctcagcctcctgagtagctgggactacaggcacgtgccaccatgcccagctaatttttgtatttttagtagaaatggggtttcaccatgttggccagtatgatctcaatttcttaatctcgtgatctgcctgccttggcctcccaaagtgctgggattacaggtgtgagccaccatgcccggccgacataggctattttttaaaatgcaagctcttctgaaccatataatatgatgttttaaaatatagactctgaagacaaagacctgggctcagaatcaggccccaccacttattttcaatggaatcttgtctgaatcttgtaatctttccaagcctcagttttttcatctgtataatagggataaaaataatagtaaacaaataaatgtatttcttttgaatatctagtagtattttaaaaatcagataactagaattatataactctatgtgctttattttttacttgtttgctgggaatcaaagagcttagttttgttttttgttttttttttttttgagacggagtctcgctctgtcccccaggctggagtgcagtggygcgatctcagctcactgcaagctccccctcccaggttcacgccattctcaaagagcttagtttaagctcaattcargtgactatttgaggcctggtcaggatatctgctgttatttggaacacaagctgtttgcccaggactaagatcaagtgattttcctaaagcaaacagtgtattgaatgtaatccaaatcatcagcaggaacaaaggaggccatatagcttagcaattaaggcatgggatctgaagtcagagagacttggatttgaatcatggccctgacaagttacgtgcctctctctgcctgagtttcttcatctgttagatgagcataatattgcaatatagtgttactttgagaattaaatgaggtaatgcaaagctcttagagtagttactaggataagtgtccaattaaccatagtttaagaaaaaggataagctgggcacggtggctcatgcctgtaatcccacactttgggaggctgaggtgggcggattgtctgaggtcaggagttcgagaccagtctggccaacatagtgaaaccccttctctactaaaaatacaaaaattagccrggtgtggtggcgcacacctgtagtcccagctacttgggaggctgagatgggagaatcgcttgaacccaggaggcagaggttgcagtgagccgagatcgtgtcactgcactacagcctgggtgatagaatgatactctgtctcaaaaaaaaaaaaaaaaaaaaaaaaaaggaaaaaggatgaaatcacaacttggagcaaaaaaacccaaaggcatatttaaagatttgygtattgggttaaaacaagttttaacatctggaaagaaaaagcatccatcaacttttcttatcaagaaatatgaattatagccaggtccagtggtgtgtgcctgaagtcccasctgcttgggaggctgaggcgggaggatcacttgtgactgggagtttgaraacagcctggggaacatagtgagaacccatcaggaaaaaaaaaaaaaaaaaaargttgattaaaaaaagaaaaacaaaagaggccaggcacggtggctcacacttgtaatcccagcattttgggtggccaaggtgggaggatcgcttgaggccagtgattaaagaccagcctggacaacatagtaggactccatctctataaaaattttaaaaattagccagacatggtgccgtgtgcctatagtctcaactactttggaggctaaggcaggaggaatgcttgagcctggggggttgaggctgcagtgagctgtgatggtgtcratgaactctatcctgcagtacagagtgagaccttgtctcaaaaaaaatcatctttacagttatttkattatttgcagattttcagtgtttattgtttttactttccttgccccactattctgcattcatcaaatattcattgaacactgtctttttgccagagactgctgtaggcacaagagatacagcaaaaaacaagacaaaacccttgctctcatgaaacttacagtcaagtgtgtgagatggacataaacatagtactgtgctgtcatgttgtaaaatgggacctctcattgagaagctgggttggtttgggggtggggagtatgacatcaakagttctgttttgatcatgtttagttcaagatgcctgttatggtcaggcaccgtggctcacacctgtaatctagaactttgggagactgaggtgggtggatcccttgagttcaggagtttgagaccagcctgggcaacacagcaaaaccttgtttctacmaaaaatacaaaaattagcccggtatggtggtgtgtgcctgtagtcccagctactagggaggctgaggtgggaggatcacttgagtcatggtaacagactcgctctgggtttcgctctggatgacagagcgagaccctgtatcaaaaaaaaaaaaaaaatgcctattagaccttcaagtggtgaagacaagtaggtaattggatacacaagtctgggctcagggtagaggctgggctagagaaagaaatttgggagtcatcagtgaatagrtgacattttaagccatgggcttggaggagataacctaaggaatgacgagaatacatctgaagatccagcctcagacactctggtgtacagaagcaggtagagaaaaggagaaaccattaaagacctctgttgggccgggcatggtggctcacacctgtaatcccagcactttgggaggccgaggtgggcagatcactcgaggtcaggagttcaagaccagcctggacaatatggagaaaccctgtctctgctaaaaatacaaaaattagctgggtgtggtggtgcacactcacttcactctagccagtagtcccagctactcaggaggctgaggcaggaaaattggttgaactgtgaggcagaggttgcagtgagccgagattgcaccactgcacaccagcctgggcaacagagcaagactgtctcaaaaaaaaagaagactgagtgtgatggctcacgcctgtaatcccagcactttgggaggccaaggcaggcggatcacctgaggtcaggagttcaagaccagcctgaccaacatagtgaaaccccgtctctactaaaaatacaaaaattagccacgtggtggtgcgcacctgtaatcccaactattcgggaggctgaggcaggagaattgcttgaacctgggaggtggaggttgcagtgagccgagatcgcaccactgcactccagcctgagtgacagagcgagactccatcaaacaaacaaacaaamaaaaaaaacaaaaacccaagaagacctctgtctcctagagcagtcacctagaatcctagagaaaaatgtctttccaaaaggaagaaatgcagaactgtgtgagtaaaatgaagctaagaattaattactggrtttggcaagatggaggttgctgatgacttggcaggagagtttccctgaggtgataggaaccaaggtctgatgagagtaggctgaagagcaaatgtggagaaacagagatggcaagaatcaacagttcatrtcaggattttgctgtgaaaggcagcagagggatggggtaccattattttcattttgttttgttgttggtttctgctgcagtggtagtttatgttgagatgtatattttaaactgatgatccttaaagaaggagaaattgatgaaggagagaggtgggagggataattgcaaaaatgaagtccttgagcagtgagatctgcttccttattatgcatatagatgaaacattaaaatgtaaaacagactcttgtgctgattttaagaactctaagttagaagagggtggggagaactgggaagctggggagcccaagatgcaggattttggctctttagctcagctaggttcaggttcttgtctcacaaccaggaggaattaggcacgtggacaccagagggtgagtagagtagaatttattaagcaaaaggaaagctctcagcaaagaggggggtctggaaaagcaggttgttggctgcccccttcacagttgaatactgtgcttaaggcacaaattcctggcggctccaccccatccttccagtgcgcatgtgggcccttagggtgagccactccatattgatttacttcccttactgcacatgtgttaaggaatggaattttccactgcgggcatgtttaggcaagccccctgtgcaagttcccacatctgcacaaaatatctggtgtaagcatttgtggggcgggttggaggttctccagggacccttcccttactgtctgcctaaagcaagctggctaacttcttacacctgtgtattatacagcaccagtctttagggaaaggaacttcaggtgggtagggtagastatagcaatagctggcaagaaaaaaaagatttgaagaaacaaactctgtggtgccctagggagcagatgtgggatggaaaagtgaggctgggccttaaatcacaagaagcccaaggtgtacagggatctctttacaacagaacgtgttcttatatatgagttatttgaaatagcttaattataccactatactgtcattaataatggataaatgtacttcaaagtaatttattagtttgtctgtgaatatgtctttccttgtctcttttccccctyacctagaatgtaaacaagagagaagagaactccagatctgattttcatggaggaaggtgatacagatcattatggctgtaaggggaggattcttgtgtttcccaggtgtcctgaaaccattcacatggagcctaagttaaaatgctctgggttcgggagtgtcttcctggagatcactaagggcttcaggactccttgagatggagttttcttttctctctctctcttttttttttttagtattttaaaatgtatttcgttaattagcagcagtatgccaaagttgttccattattatattttgttcattcttttgtacaagtgtcttccaatgtgatttgataatgccaacaatttgcaagtgattttattgcagcatgactttggttcccaggaatgctgaagcacaggtcctagaacagaggcttgaaaaggaaataaaagggatttgatcataaatgcttctggggttggcataccagatcattttgagctcaaataggagacaaaagaaaggatgttgggaaagctgtatggtggagaggctgaactgttggaatgaaaagacaagaagcatattattatgttaattccagcaccctagatctgcaatgctgaaaggactgccaaaactaaagcttgtcctacaccacgttcatcacaaagaaattctgtttagacgttgagttaaactttctcaactgtattcagtacaggattaagtggttgagatgggccattctgcagttacactgtttccgttccartctgggtctcctcatgtattagctgtgtggaccttgggcaggtaactcctttgtgcctcaaagaaatggagatgacgataatacctacctcagtggggttattgtgaggataaaatgcgattaatagaaaataattagaatggtgcctgggatacatactgctcattaaacattgtatatttttattattagtgcactgtgctataataggatggctatctagaaaacatcatgcaatttgtaatgcacatttatcatccagttaattgaaagaggtagtgatgggacagtggtggcagacattgaatgctcagggatgaaaaatgagacaggttttatcttgttttgttttatttttgcctctcattaggtatccacctacttttcaaaattgtgttattttaatctttattrcatacagacatattctcagtaaattgaggccaccatatggaagtgtaaggatgaagccaggcgcagtggctcatgcctgtaatcctagcactttgggaggctgaggtgggcggatcatttgagcctacgagttcaagaccagcctagacaacatggataaatcctgtctctacaaaaaaaatacaaaaattagccagatgtggtggcatgtgcctatagtcccagctacttgggaggctaaggtgggaggattgcctgagcccaaggaggtcgaggctgcggtgagctgtgatcataccactcacttcactctagccagggtgacacagtgagaccctgtatcaaaaaaaagaagaagtataaggatgaaatcataagcttaggtcctagttcttttgagtgagttagaacctatataaaattttctccttttggaattttatttttctaatgtttacctcattattttctgactataatagaaaattatccttaaagtttgccattacaaagggaattgtacttctttaaaatgccaattaaaaatatcttcttgttgttcttatatatatttttaagttatatatgcatatgttaaaatatttaagtgaaataggaatgacataaaaataaaatcttcctcctcactacctcaacctccagtcccatgctatagaagtaaatacttaaattagtttgctgtaacaaattaccacaaactttgtggcttaaagcaacacgaatccatctcatagttgtgtagctcagcattctgaaatgcgtctcactgggtgaaaaattaaggcatcagcaggactggtttcttcctggaggctctagggaagaatccttttccttgcccttctcacgttctagaccccactattaacactcatatattgtttcagaaatgtttaatgctccttgatttttatcacctaattgtatattttctagaactctccattcttttatatacagctacatactgttctactatatggatgcaccagatgttatgtgtccagctccctgtgttaatggagtcttggtttattttcaagtttttattttcataaattgcatcataaataatatctttatactttcatatttatgcattttgacaaacagatccatgggataagttgttcttggtgtagtttccaggtaaagcaggatgtacatttacacttttgatacttctttttaaattgccttctcaaaagacatctattatctttccctccagtgatgagtaagagttcatatttccacacggttttggggcgctcgggagtttgttttttttacaaaacttttaaaactttaccactatatatataatatatttataataytatttataatatatatatttaaatatcatatatttataatatatatttataataaatattatatattatatatttataatawatatttataaatattatatttataataaatattmtatattatatatttataataaatattatatattmtatattayatattatatatttataataaatattatataatatatactatatattwtatatatattatatatcttgtatatattatatatataacttctctttttacttcgtttcacttgagttataaatttgccatgtttggaggttttcgatggtcctagcraaccagtttccctagaagcaacttcccttcagtccgattcacatcaaagatgtgacttcaataccatctgatgttcaagctatttattttagcagtggtcttacaagtcggatagtgggagcaggtgggtggcatgggccagattcaatcagaggtcagatgactgcctgtccaggagggtctccatctggagactattctcagagtttgggagattcttcccatttcttctacctgcatttagttcagtcaattatcaggcgtttctttcataagaggaggttaagctagtcttataagggtaagctttgttaaaggtttacgagatttgcatccgtgatgaggtggccttatgtcctggaaatccctgggccagcttggaaatccccaggccaggtggcctcacgctgctaagtggcacatagtgtcagtcctgtgagagcttgttaatgccttatagctatcattaatcttgtagtcatgatatgtctcctataggatgctacacagttggttttagcattttactatcgttttgttgttgattacttttgttttctttcgttttttgtttctgtttttgagacagggtcttactctgtcatcccggctggagtgcagtggcatgatcatggctcattgcaacctctgcctcccgggttcatatggaaggcagaggattctcccacctcagcctcctgagtagctgggactacaggtgcacaccaccgcacccaggtaatttttgcattttttgtagagacygggttttgccatgttgcccaggctggtcttgaactcctgggctcaagcagtcggcccgccttggcctcccaaagtgttgggattacaggtgtgagtcatcgtgcccagccagcatcttactatgtttattagccatttggattcctttttctttgaattgctgcttgttaatatattggcccttttttctgttacattattaataatgccaggaattatgctagttgctaygcaagatgcagacttgaggaaaacctggtcccagctttcaaaatgcttactttccaaatctgactcatcgtttgactttaatgccccactggacttctctaacagcattttccattttccctttcaaaaggactcaaaatatacaaatttaatttgatgataagagctcaagaaaggccgtggattctttttttttttatttttatagtaaaagtgatcagactgtttcctcttttaagaagaaaaagaaagcagaggtcaatattaagcttccaattaatgcttattcatcacaaatagtaagtaaataatgacagaaataattccttagtcactctctagcacacttctkttttatttttaacatttttcactatgtgagatttcctagatttgttttattttctgtttccctctaactgcaatacaagctcttgtggactggaaccacacctgtcatattcatgctgtatctcacctgtcatattcactgccaaatcccacctgccataatcactgccgtatcycacctgtcatawtcactgccgtatcccacctgccataatcactgccgtatcccacctgycataatcactgccgtatcccacctgtcataatcactgctgtatcccacctgtcataatcactgccgtatcccacctgtcataatcactgccgtatcccacctgccataatcactgctgtatcccacctgtcatatttactgctgtatcccacctgtcataatcactgccgtatcccacctgccacattcattgcggtatcccacctgccataatcactgcccatatcccacctgccgtattcactgccgaatcccacctgccataatcactgccatattccacgtcatattcactgccatatcccacctgccatattcactgccgtatcccacctgccataatcactgcccatatcccacctgccgtattcactgccgaatcccacctgccataatcactgccatattccacatgtcatattcactgccatatcccacytgccatattcactgccgtatcccacctgccataatcactgcccatattcccacctgccatattcactggcagatcccacctgccataatcactgccgtatcccacctgtcatattcactgccataccccacctaccatattcactgctgtatcccaagcttccagagtaggctctagcatttgtaggtgctcagtgaatatttgctgaattagcaaaatagaaaatttaaatctcttaacaggtaccacgttttgacataatcacttgtaacatctatttagaaatccataggcagcacaagcacataaataaaaacctgaccttccccaagatctttcctcctctgttcagcatgctgtgtcaagagcagcacattgtgtggtcactgtctcattcaattgggacagtcgcatcatctgccccttgctgaatcgagcctttgaattagatgaaggaaatttgggccaagtcttctggaatttagtgactactattatctagtttccctctggtgcaattagaaatgagcaatgaaccaatatataaccttgcttaaaaagcaatttcctttactattctccttgtttaattagtctgttttgttctccctgagctcgagaggcattttttctcccaaagcagaagcattaagtaagatgcattcagtgttttcatgagattcattcattcttcttggacaagatcttggccactgtattagtctgcttgggctgccataacaaaatatcacagaccaggtggcccaaacaacagaaattgatttctcacagtyctggagtctgagaggtctaagatcraggtstctgctgatttggttcctgctgagggccctcttcctgcttgtgacagccaccttcttgctgcatcctcacgtgacttttcctctgtgcttgcatggagagaaagagacaacaagacagattcgctgatgtctcttcatataaaggcactgattccatcaggccactgatcccatcatcccccagcctcatagcctcatccaatcccatttamttcccaaaggccctatctccaattaccatcacattgggaactggggcttcaacataggagtttgggggaactcaaacattcagttcataacagccaccatgtgccagtcatctggacagaggttgaaaaagccctatccatgccaaaatcttacctcttaaggtagtagaggcatactgctaatgtgaacctttaaaaatgctcatttattctacagatattccttgtttatgccatattactcactggcttaaaaatcttctaatgatgaggcatggaacttggagaaaccacccaaagtttctaccatgttctgcaaggctgtgatcaggcacctgcttacctctcacactgctccagccacactggcctgcgtgctgctgctttctcccttagggcctttgctctggctgttcattctccttgtggtgctttgccccagatagctggctcattctcatcattcaggtctcacttaagtgtcatctttcataggacatccctgatacccaatcagaattactcccttggccagctggcctgtgccagatgctttgctggatatgaagacacaaagatcagtagtgcggccaggcgtattaaaatattacccttaatcaatgttgactcgacattaataatagagcatattaatgataatattattaattaattattattaatttatcaatagagcagatattgaacacttactatttgcaaggcattatgctaagtctttgccattattataattattgttattttattttttattcttttagaggtagggtctcactctgtggcccaggctggagtgcagtggtacaatcatagctcactgcaaccttgaccccctgggctcaagcaatcctcctgtctcagcctcctgagtaggcaggactacagccatgcactaccatgcccagctaattttttaattttttgagacgggtttttgctatgttgcccaggctgatctcgaacttctggcttcaagcagtcctcctgctttgaccttcaaaaatgctgggattacaggtgtgagccactacgccctgccctttgccattatttatctaatttaaccctcacagccatcctctgatatacatatgattatcatccccactttgggtcagatcataaaaccgaaccttaaggaggtcaactcacctgccaaaggccacacacaggaaagtgatagagctgagatttacccagttttgttgagcttcaggttttaaagccagaaagatttctcttttagaaaatgataaagaaaagtttttttattttgaaaaattgaacaaataatagataagaaggaaaattgtaaaaagagacagtgatgactaatgaagataaagttgttttgtaatcagacagaccctggtttgtattctgacccagccaccaattggctgtgtcactgtggattcaacacttctcttatctttgttttttatctgtaaaaaggaagttatgagcattacacgaaataaacactgacatgaacagattctcattcaatgttagtttgattttattgaataatattaacaaattacagtatctaattatgcagttcatcatcagacacaaataagcacttaatttctttttaatgatataaaatcttttctggctgggtgtagtggctcacgcctgtaataccagcactttgagaggccaasgcgggcggatcacaagttcaagagatcaagaccatcctggctaacatggtgaaaccccgtctctgctaaaaatacaaaaattagctgggcatggtggcaggtgcctgtagtcccagttacttgggaggctgaggcagaagaattgcctgaaccggggaggcggaggttgcagtgagcagagatggcaccactgcactccagcctggtgacagagggagactcygtctcaaaaaaaaaaaaaaaaaaaaaaaatctttttaaagcatcactaggatcagaaatgcaaatttttcagaaatttcaaaaatgtggagaaaaggttggacattttgttagggaagtaaaagcatatacatataaaattatatttgttctggaatataaaatatgttatttgtattgctcactatagatctagkgattgtaagaacttatgtagcattttatcaagcctccatatctctttggagacttcaaagactttagaaaggtatagataatatcaaatgttggtcaagatggtagtcaacaggaactctcaaacattgagagtaggcatgtaatttggtacaaccatcttgaaaaactgtttggccttatctagtaaagctaaagatgtatagatcctaagatctagcaattccagttggaggtatgaaccctagaaagscttgcacttttgagtcagaagatgtagacaacaaaactcacagcagcactgtttgtaacagagaaaactaaaaacaacggaaattactatccacagtaaatagaatgaattacagtaaatatggttatacaatggaaccttatgtttgtgcagtttattcaagtggttgcatgtggccacagttcattttgttctcaatatatataatatatagatgatacatgtatgtgtgtatacatatatttcattgtgtgactatactacatttaatttttccattctgttgtcatttgacgtttcagtttcagatagttagctattatgaaagagctactatgaacatccttgttcatgtattttggagcatgtatatgagcatttctgtttattatacgcctagaggtagaattgcagcagagtatgcttgttcagctttagtagagactgccaaacaattttccatagtggttgtaccagtagacaggcccaatatgtgagggtttgcttactccacagcttcaccaacatttggtattttttcatttcaatacttactttcattttcattttatatttcatttcaaaactttcatttcagtattttagttcattttgatgcattttcattgtagtcactctagtgagtgtatagtgatattgtactatggtttcaacttgtattttccttatgactaatgaaatcgaagaccttttaatatgtgtgttggtcatttgatatgctattattttaaagtaataaatatagggtccagacctatggggcttagcgggtgttctctccgtgtgtggaracgagagatctaagaaataaagacacaagacaaagagataaagagaagacagctgggcccgggggaccactaccaccaagacgcagagaccagtaatggccccgaatggttgggcgtgctgatatttatcgtatacaagacaacggggcagggtaaggagggtgagtcatccaagtgattgataaggtcaagcaagtcacgtgatcataggacagggggcccttcccttataggtagctgaagcagagagggaagacagcatacatcagcattttcttctatgcacttatcagaaagatcaaagactttaagactttcactatttcttctaccactatcttctaacaacttcaaagaggaaccaggagtacgggaggaacatgaaagtggacaaggagcgtgaccactgaagcacagcaccacagggaggggtttaagcctccggatgactgcgggcaggaatggataatatccaacctcccacaagaagctggtggagcagagtgttccctgagtcctccaaggaaaggaagactccctttcacagtctgctaagtaacaggtgctttcccaggcactggcattaccgcttgaccagggagccctcaagtggcccttatgtgggcgtaagagagggctcacctcttgccttcttggtcacttctcacaatgtcccttcrgcacctgaccctatacccgccgttattccttggttatattagtaacacaacaaagagtaatattaaaagttaatgattaataatgtccacgatcatctctatatctaatttgtattataactattctaactgttttctttattacactgaaacagtttgtgccttcagtttcttgccttggcacctgggtaatcctccacccacaaataaataaaggattattggaaaaattacttaataagattgattacgatctatgtaaagcaatgtatcagtggactgaggcttggttatcctaacagtgacacatgacttgagaatctcagtagcttaaggcaaggtttaactcttgttcttgctgcatgtctatttccaacagtcagtgggtctgctccacatcagcatcattctggcagcttctgtgaagggacagcctcaatatggggcattgctggtctccaggcagagagaaaggagagatggcaacacaatgggccacacacaagttcttagaactttggctcagaagtggcacacacttcacttacactcacatttcattggccaaaggagatcagatgtccaagactgatgttagtgagtggattatataatctaaaggcaagggcttgtaggaagaggcagtcaatatttgtgaacaagagaatgatcagtaacatctttctgcagagtaggcttataagagtattactgtaggatagagaaaacaagctgtgtgtctgtgggctgttgtcaacacatatatatacactacacactttttttttttttttttgagatggagttttgctcttattgcccaggctggaatgcagtggcttgatcttggctcaccacaacctctgcctcccgggttcaagtgattctcctgcctcagcctcccaagtagctgggattacaggcatgcaccaccacgcccagctaatttttgtatttttagtagagacaggatttcttcatgttgatcaggctggtctcgaactccccacctcagatgatccacccgcctccgcctcccaaagtgttgggattgcaggcatgagccaccacgcccagcctcactttttttcttttgttttgttgaactggttgccaacgtttaaaaattatgacatttaacaaagatgcagatttctggcttcttttggaaatcctaagctatagcaagaatcatttggaactgagttgtagctgcccttctggtgggatgtgcactctctggttttccatgactgtatctgcctgtcttctctgcagcagtgcctttcaaacattttttacgtagctcacaataaacaatacattttacattgctaccaaggactcgcatgcatgtgtgtgtgtctgcattcatatataggtatagatatgcatatacatatacattccaaagtaaaatacatcaaggaaacagtgcttaccattactcattgaaattgtctgttctattctatcctattgtattctagtacttttttttttttttaatgctggaatcaactccctaaattgatttcacaaaccacttctgggtcatagcccataggttgaaaacatggttgtctatcatgttacttgtctgtttctcctctaaatgctattggttagttttctagcctggattcctgtctaagccctttagggtttcaggacaattcactgtgtgggtgagcagcatctgcttcccttcacttaaacctgggcaattactggttttgcccaagggtcttaaaacttaaactgcttgaatatctggcagtttccccgctgacttttcccttgtctgatttcctatttcaataaaaatagccttgtaggcgaatatgccactgattcggagaatctcagtttcctgactgggctaggcaatcaagggcaaatgaaagtgagtcctgttgtacaggaaggagagttctcagatgatgaggatggtcatggggactttgttaccgaaggaggcccaagctcatgatttcacaggattgattcctccatctcactgatcatttaacaaatacttatggatgacccatgtgccagaccctgtgctagggaactcatccaaaacttacaaaaatttctcctagatgcacagacgatgaatagtaattacctcttcctgtgttttacccttcctatttcttcttttcttcccttgacccagaaattcatcaattgccctagggctgttccggcttagtgcttgttggtcagttggatgtgcccttctgctcaggtctttgtgggctctcactggtgttcgtatgcatatagaatggatgtctgcatcacattgtagggacagtgtatggggatgtgaagacaataagtgaaagtctgccgcccactaagacacaagcagcattgctataaactccagtggaaaaaggtgatattatagggaaggaaaaccgtattgtcatattttcatggaattcagtgaattgcattttgaggaccagtgccattttgatgctggaggattccaccacctttgtggtgttgtttcctggaagagattctactactgaagtggtgttggcagcaggtgtacccagcaaaatcaggtagcaaggcctggtggaacttggcagaaaggagctcactggggccatcagagacagtagtgaggcccccttgtgccagttagggggcagcagagacccaaaagtggattttaccagaaagggttgaagcaggagaggaaggaaatggcgaatgccttgacaggccatgtttgtgagtccaggaagacaactcatgggagctctcagaaataattgtggggtgaggtgagtgcatacttggatagagatgttacagtacctgacaggggcaagacccagtaatatatgggttgttactattaaacgtgaccccattttaagtcgtgggtttatataacaaggttatttatgcttgttatatgctttatgtgcattacctataaatgtccttaaacttttatcacagtgcaaatgcagctcattaccagaatccgtgagcactgtcttcaaaccctccccattgccttgacattggctttttcttaattctgtctctttttttggccactctgctcttgatcttgtgtctacatctgagcctgaaattggagagtccttggctactctataatctgagtcttctacttcctgctttccctattcagtctcccatttccttctccagccccatccctggtactagcaagtccctccctgatgtcttcaccatcygttcctttcagacacctgccacccttcacattagcaaaatgacaaaaaataagaataaataaggtgagtatagtagattgcatagtggcccccaaaagatacaccacagagctccacacatactaacccttggtccctcagaatgtgacttatttggaataagggtctttgccaatgtaattaagataaggatctagagatgagtccatctcctgggttacagtgagccttaaagccaatgacaagtatccttataagagacagcaaaggagaaggtggccatgtgaagacagagacagagattggaattctgctgccataagacaaggaatgccaggggcaccagaagcaggagctttctgaaggtgcatggcccctgccagcaccttaatttcaagtgtctggcctccagaactgtgagagaacaaactctgctgtttaaaccaccaaatttaggctgtgagtggtggctcacgcctgtaatcccagcactttgaaaggccaaggtgggcggatcgcttgagctcaggagtttgagaccagcctggccaacatggtgaaatctcgtctctattgaaaaaaaaaaaattagccaggtgtggtggtgcacgcctgtagtcccagctacttcggagagaggatcacctgagcccgggcagccaaggctgtagtgagctatgatctggccactgcactccagcctgggcaacagagtgagagccggtctcaaaatcaaacaaaaaagccactaagtttgtggtaatttataacagcagccctaggaaactgagacaatgggtgaccatacagcaccaaaggacttctatttcatgattggtgaacattttaaaataagaaaaggccaggcatggtggctcacgcctataatcccagcactttgggaggccgaggcgggtggatcacgaggtcaggagttcaagaccactctcgccaagatggtgaaaccctgcctgtactaaaaatacaaaaattggccaggtgtggcggtgggcacctgtaatcccagctactcgggaggctgaggcagagaactggttgagcccgggaggcagaggttgcagtgagccaagatcacgccactgcactccagcctgggtgacagtgagactccatcccaaaaagaaaaaaaaaaaaaaagtattacagaaaagaatgtgagaacatgtttcaagtattaacaaataaaagaatgcatgctaaataattatttgcaacacatcatagagccagttctcacctggcaataaggtactccaaaagttcattcataagtaaattgagactcagaatgcatatttttcctgcaggagtcatgtgatatattatggatgttttcaaatattaatccataataatcattttaagttaatcatatgcggactatagttttcttgaagcgagggattgttctacacgtatttaagtcttgctgtctagcagagtgctttgcatgggtagggcctccaataaatgcttgatgagtagtagttcattaaaaaattctttaaaattttttttaccacaaaacatctgcaagtagagtagttcattttttaaagcaccatacactaatatttaatagcagctgttttagagtcagattgcaaggcttcagatcctggctctgccacttacagaatgcaaatcattaagcaaatttacataatctctgtgtgcttcaatttatttgtctataaaattgtgatattaatacctatctcacaatgctgttgtgaggagtaaatgaattattatgtactaaatacttagaacattacttgcatgtacggattcaataaatcttaaatattgttattagctcttaagtatatctcctcaactaaattataaactctgaggaagaggcaagatcctatcctttttaaaatcccggcatctacacaatttcttgcatattgtgtgcactcagtgagtatttgttgaactactaaaaggaatgaatgattggctatatgtttacaataccttctccataaaaaatacatatagaattgataacattctaacatttgttacagtaaaaaatgtttttagaaattaaatagaattttttttttaagacagtgtcttgctgtgtcgcccaggctggagtgcagtggcatgatgtcagctcactgcaacctctgcctcctgggtccaagcaattctcctgcctcagcctcccaagtagctgggactacaggcacgtgccaccacaccctcctaatttttgtatttttagtagagatggggtttcaccattgttggccaggctggtctcaaactcctaacctcaagtgatccacctaccttggcctcccaaaatgctgggattacaggtgtgagccaccatgcccagcctaaatagaatttttaagatgtcagagcaaaaaggaaattattaccagtgtgaaattcttcactatattttagcccctaagaggcagagaccttgtcctgtttctttgtaactgctgcattttgcgtgatgttttgcagaataggcatgtgcgaccttgtacacagaaagggcttaagcaaatccttatgcagattcctggagttatttttctgtgctggtcgctcctttccagaattctactctgcaacttccagctgccttagccttctgaactcagagccccctctccttacctccacgaggcctctggggtctctgggtttccccttcttgcacttgcagtttatacattgcctccaagcagaaggcccaggtgtttctcatgctcatcccatctgtttcccctctaacagagattagtcttacaaggcctcgtgttcagtctgaaaacagctgcttcctgtacttcgttcagttctctaattgctcacaataaaaagctaagtcctttcttacttcatcatggcyagaagcagttcccatgcgaatgtcttggttaaaggagaaaaatgtataaggtaactataaactaagactttcacatcaattcagttggttcttttgttaagaattacagggttgggcacgatggctcacacctgtaatcccagaactttgggaggctgaggcgggaggatcccttgaggccaagattttaagatcagcctgggaaacatagtgagaccccgtttctacagaaaaaaaaaaaaaaaagtaaaaattaggcacagtgtcrcatgcctctagtctcagctacttgggaagctgaggcaggatgatcaatcccttgagcccaagagttcgcggttacagtgagctataattgtgccactgcattcagcctaggtgacacagcgagatcctatttaaaaaaaaaaaaaaaaagacaaaaagaaaagaaaattacagtataatttttctgtgttgaagagcttctgctggacaaattttcagtcttggtcggcagtttaactcaagaacagactcttctatcttcacttccagcttacataaattagaatggagaagagaattctaaagtataaagaatgtacactgttctctgccccaattacacatctgtctcacggcttgttaggcagcatgatgaataagcgtgtcatctctctccatttatttgtgcatccatttttatatccatagtctatagagactttcattgcttctcacaaatttgtttaaacttttaatagtgatatatacagacttcctcatctaagcacagacacgatttctatttaggtcatttctgtgcagtcacttcctcttcctaggtcatagccctgtagttctatcatacatagactgtctattttaatagaaacctgcagcaatggtggaaggaggggaacgggagtcatttcatcagaaagatgcattgtatctactggagaattttcttgtcttagaaacactagaaattatattttytggaaatttcaaattttactaaaatgtggtcattgtcaattatgtaacaggggctttccttttcaatatagcgactatcagtaatagtgctggaaatatgataacaggccacattctaaaaattcatttcctctttaattaggacctaactcttggaaactccttcatgtgagctgccacaacatcatctaaaagcaaactgccaaaaaatcatcttaaaccgcatcatctaaaagttattttggcaaaatgcatggtctcaaatggaagataatgacagctaagatagaatttagaatgagccccagcactttgggaggccaaggcgggtggatcacttgaggtcaggagttcgagaccagcctggccaacatggtgaaaccctgtctctaccaaaaatataaaaaawtagccaggcgtggtggtgcatgcctataatcccagctactcgggaggctgaggcagaagaatcacttgaacccaggagatggaggttgcagtgagccaagatcacgtcaccgcactctagcctgggcaatagaatgagactctgtctcaaaaaaaaaaaaaaaaatttagaatgagcacgaagttaatgaataatacctcagtcacattctagtaagaaaccattcctccytgtgggaattagagccctgcccccagaaccctggctctgaggtttgacttctgttatgtactgrcagtccccattacgctcatggttccatggtgccagcacaggagtggctgatgacagaggctgacatgtcatgcacatcattctgtctatctcattgtttagtgtctcttccttggtaaatgctctctgataggtgttaccatgcaatcgaaagatcacacacctgatactactatgtgtctatccatttgcctctttcctagacatcttatccctagcctttcaaactttctccttctggatccctgcatatgtacacagtgtatacaatgaactgtaattaaataaactacataatttacttattgattaggtctcttttaaactatttcttgtgagttcaagaaagcagagatctttgtagtttttttgttttgtattttaattactactgtatccctagcacttataatagtgtgtggcagagaacaagtactcagtaaatagttgctgggtgaatccatactaaatataaatctttgtcaattagtatatgtgtgagaaatatctattcctagttagaggctggtcttttcatttactttattgtaaatgatgtttgaatgaacagaagtatggaattttaatgtagttaaatttatcaatccttattaagctatttttttgtttcttatttaagaaattctctgctgcaaagtgataaatatgttctggtatattttcttctaacccatctttcccccactgatctgcaatgacatttttgttgttaattaacttttattaccagtgaatctgtttctaggctctctattttgtttcattgtctgactatcctttttaaaataagtttttttagagacagggtctaactctgttgcccaggctggagtgcagtggcacaatcatggctcactacaccctctaactcctgggctcaagtgatccgccgcagcctcctgagtcactgggactacaggcatgggccatcacttctggctaatttaaaaagtgtttttttttgaagaaatggtgtcttactgtgtagcccagactggcctcaaactcctggccttcctcccacctcagtgtcccaaagcactgggattacaggtgtgagccactgcacccagcctatcctatttatttttatttaccattatttatttttaattgctggacagtttgacaagtccagtttgagctagttatgtatcacatcccatttgcaagggttgtttgtcttgttcaaaggacaatgagtacaaccaatgtcaacagaagttgtttttcttccttcgaagagaagggatgcgccaggatggagagtgcctgcattcctgcccatcagggtactatggacactgagccccagatatgaacagatgtgcaacttctctcggagaaaacaaaataaaaaatacgtcattggtccatgttcaactgcccatcgtaaaaaagaaatacatcattggataagcaacttcattcaaaagtcagtgccacagcaagcaagaaattagaagcttgtaaaaataagatggaattttgagctgggcayggtcgctcatgcctgtaatcttagcgctttgggaggccaaggcaggtggatcacttgaggtcaggaattcaagaccagcttagccaacatggcgaaaccccgtctctactaaaaatacaaaaattagccaggtgaggtggtgagtgcctgtaatcccagctacttgggaggctgaggcagaagaatcacttgaacccaggaggcggaggttgcagtgagccaagatcgcgccactgcactccagcctgggtgacaataaaaataaataaatgaaatgaaaataaaataaggtggaattttcacccattgacaaaaagttaataattattattrtatctaatttctggacattgaatagctcataagccaacctacttatgagcatctgttttctggatgagcttcaaccgttgcaagtggatttttcttctttggactacttgtcaaactgtagtgtgaatcagaggagtttaatacagattgctgaagtttttgatttgtaggtctgggatgggacttgagaatttgcttttttccaagttcccatgtgatgttgatactgctggttctgggaccacattttgagaaactttgttgtcaataatgtgcccacagctgcattattttttttttattttcccaagaattaatgtcatcagatttaaatagtagtatatattaatactgaatgacaagttagaaagatagatttgtttaaaagataatattggaaataggcacatgaatattttgaacttaaaataaatgtttcagtgatttttattaaagtaatatgaatattgtcctccaaaactttgatgatagagttttgtttctttaatgtgaattactttcttacattgtgaaaacttagagcatattcttcctcaggcctaagtactgtataggaactattaagtgagaactttaacagtaattctccatatgcaaaaaagcatttttactagtctgtacttaacaacttgcaaatttgcttttatccraaaggaagagaattagagaaatgattttagtaagaaatgctaaaatcaaaaagataggtaaatatttaaggaatcattgtagtattcccaacagttttatagatgaaattttaagttctctgggttataacttgctttstgatgccattataaacctgayggctgagacactggtcgatcacccattaggaatatatgctaaaattgttgctttcagtttttaaaatatggcttaattttatgtttgcttaaaattggtttgttttggcctggtaatatctcgggtcccacacatatgatcattcacaattatcatatcgggctgagcagggtggctcacgcttgtaatcccagcactttggaaggccgaggtrgacagatcacatgagtttgggcccagcctggccaacgtagcaaaaccccatctctactaacaataaaaaaattagccaggcgtggtggcacgtacctatagtcccagctactcgggaggccgaggcaggagaattgctgaacccaggaggcggatgttgcagtgagccaagatggcrccactgctctccagcctgagcgacaaagccagactccctctaaaaaaaaaaaaaaaattattattatttagttttatcttctctatctgttaatgagagagactaaaataatgatgaagaaaacattttaatatggtatatgaatagtaataaaataatataataagatgtatctccaaaatctgaatctaatggtactatattcgtattatagctgattctttacaaaaagcagtcttggcttactggaaaattcacattttaaaagtcgatcagtttcattttttctggagaatgttagctttactgaaagtataaaagtttcgttgttgtagacaccaggtcctaataaaaacaagtaaaagaagaaaaagtttgttatgggtrgaactgattaagtgaggtaccactgaagaattaaagatatctcacacatactttgattaattaaatggtgaataagaacttgttttaatctcattattcaagtcactaaaatgttaaacaggtaagacaaaaaggcaattattacaagtttttacgtaaaactatgataagattttttaaaaagtgaaacaccacccatacacactgaattcatttggctggtattgattctgaatatgtattttataatatttcattggccttgacccacaaactaaacacagacattttctcaattagtcattttcaggtttattgcctaagatgctaattgaaattcagggcaggcaaaaatacatcattggcctttgtatatctttgaaaggccttctgatgggaccttgctccgtataaaggcttctcttctctgcaaactgaaagggaccctgtgtgtgaagtgtgttcagtggggtcttcaaggaacaacatagagagcagccgctggccagccggaagccaccatgcgctgtcctcaacagagcagctccaggctgtatgacccccaggcaattaggcaccaaaagaagatgytcacactttccaaaattctttcccagggctgggggaagggagccagacttggagcccctatgtggaacttagtctccaaggaaagaaagcatgttctcatcctacaaacactccattttctccctgaattagtgtcctttctttgaaccagatgagacttcgctcagagctggaggctatggccccttagttctgtttccacagtgcttccagccctctccccagtttggaggcccccraaatgaggcgcttatctctttgattttgtgaaagaaaatgcacagttcgtctatttggggcttctgaaagatgttaggccctgaagaaggttgactgggagactgagtggggagtgacagaccatgaccttaattactgaccttttgttatagattaacttccttcctattttattgttcctggcccagaccwgatagcacttgagataaaagatcccttgattattacatccttaatgtggaatgttaaatactcccttcccccaaggaatcactgcctaaaaccagtcagattgctgcgactgtgcactaaccttgtgtggaaaatgctgtcatcctgttaagcttccccataccgtgcctgtataaacaatcctcaaacctcgctgcttcagagcactaaccccatctttttggagtcctcctgggtgaccctcctcaaactttgtgctcagtattttaatcctattgcctggatctcgatttaaagttgataattttcagagaattcttcattttctctttgcatattttattgtttcctttccatctgtttttcttttacttactgcctgaagccaagagacaatgtcaaggtgtcttagtgaaaggagctcatacttaagggttcctgggtcaaaacctacatctctcatttcttagctctatgatctacctgtttccttaatctctctgggcctcagtttacccattattgtagtaaaacatgtactacaagttactttttatttaactacttatgccatatttaattcccaaccactaatattacatattagttatatattgttaaatcataatgttctttcactatttcttttatgactgagaaatttcttttcaatgtataaatcatatacatgttgctcctggacaaaactgagggtcaggctgctacttctcstggcccaataatgagatgcagacaaactggggaagagaggttttatttttgcatytggttacagggagaaggcctagaaattgtcaccacaccaactcaaaattacaaagttttccagagcttataaaccttccaagctgtatgtctacatataagtgtgcattcatctaaagacataagtgattaacttcttttaatctataactaagatctgagtcctgaagacctttctctggagcctcagtaaatttacttaatctaaatgggtccaggtgctagggtgattacccttatcttgtctcctgctaaatcacagaggtttggggagttccttcagacctccaataaacttgtgtgtggaggcctggggaatttcttcagactgacaataaaacttgtttattccagtctggccaacatggtgaaaccctgtctctactaaaaataccaaaaagttagcygggcgtggtgacgtgcacctgtaatctcagctactagtgagacctggcctgccacaatgtggttaaggaaacatattaaaacatttttaaaaatcaagattttccatttcaatggccttgtaattgattgaaaagtttattttgagtcacatggtgttctagactcttgtggagggtttagattggaaaataagtaatgacagtgaagcagttgttatgttcgtataaaagaaagaaaagaaaaacccacaggactttatttggttttaaaagtctatctgcaaagatatagtttataggaaaattcaattccaaatgtttctcattgctctggagtgtgtgaagaagaggcctaagaatattcttaggaaggcaaaaactttcagatgcagttcatatgcttgacacctctgtttcacttttggctgacttgtgtagtctgatttttggtcactgacaggctcagcatcatgagtgtgcaagacgtaagggaggcaggaccttgtcttttcaatggtgtcttcctgggtggctgccagaattcatcattattgcactctactctcatagcctcgatttctgtttttgtttgcttttactgaaattggagtagtgacacagagtcagatcattgaaaagactcacaagattccaaagggtatactggtagagtataaactggaggataaggtacagcgggagaaagcaagtaccagcagacacagagggggctgagactcctgcaagcagcgcctttcctcaggctcactggrtgtgctctgtgtttgggtgtgaaccaccaagatgcatgcatgatatctgttttcagggaagccaagatacaagtgtacagaaaagccattatacccccgtcacattgctgaaactggatgattaaaccacgtaccaagcggtgtctaaatttcagtaataatgatcagctagtagagggtgcctcaaggcagtttcagactttaaataacatagtagaaatcactagctagtccatttcatccttatcattgttgcagaactttctccttagttcagctaaaaccgggttcttgtcacacaaccggaaaagattaggctcagggacacatagaagggtgaggggcagaatttattgggtgaaaaggaaaaaggaaaaagaactctcagcaaagcgagagggagtcttgccaacaggccctccacctcacagactgaacaccaggccaccacacaggaactgaagaggccaggctcctccccgctgaacaagcgtaaacttctcttggctccaccctcttcccccagtgtgcaggtgggcattattcagagagaatcagctgagaaagggcaggctttatccgggaccagcagtccagttcttcagccttcaggctcttttaggcttgaaggcagggtttcgtgggggaccttggtaagaagagttcttttcgacactttaatgtagattgtaagaggtagaaaaaaattgatcacatttaacatatagttacttaaaaacacatctttgagttttctagacttctaatatgattgtagaaaatcagcgtggcagccaacttaagacagatcaatacctcgaagtctgtaactttaataagaacatcagaactgaaattctatattagttaccctattgtactcacagtcatggaatacagaacaggaaagattctggaaacacattttgatagtcagggtcacagatattgctctgtttcagtaaccaggttttctacttatgaaagttatttaaaaggcaatgaatattcaaaatgtgagcagctattgctaccattagctccagaatcagttctgaagaatttgtaggaagtcatcttgaaaataataaagcaatatatttttcagaaatagtatccactaaatcataatctgaggccactttactgaggcgtttatatttatatttatattaatttgttattttacacagaaagggaaactatgacctaaagacagagataacaataatctgattagcattagccaccccattccaacaacaaatcacgttaataaggcatttttagaagtagcaaagcatagtggttaagaacatatgttctagaactagacagtctgagtttgactcctgataccacttattttattctaaaacttttggcaaattattacataacctcccttgcctcagttggccaagctgtaaaatgggactaataatggtgtccaactcacaggattgctatgtaggctaaaaggttaaaagagttttatatttctaaaacaatgtgcttgtaatagtcttggcacattgtaaacattgtgtaagtgcttattaaacaaataaattcatgcttgtaattgaagatcgccatatgagatacacattctagtgatctatatgtttatcattagatatatgatatatacacacactcatatttcagtcccctgagggattaacttttaatcccttgatttgcaaatcaagttgtaaattacacgtataaataaaatacctttgtagtgattcgttcattataaaattatgctaactatgttggttttcatgtaggcataagctggctctataaataaagtttgaaaataagtaaggtataaaggaaccctggcgggatagataagatactaggaacagtggtttgggagtgaggatgggaagtagactgatgtggaacaagatgggagtgagactttttttagtcaccgtctatatttttataatttctgggtctggaatcagtatctcctcatcctaacttgttcatatgatgagttagagtcatatctgcctgctgttagttttttcaaagaatcttcaaatggggcaaccccctttgggtcccctccctttgtatgggagctctgttttcactctattaaatcttgctactgcactcttctggtccatgtttgttacggctggagctgagctttcgcttgccgtccaccactgctgtttgccactgtcgcagacccgccgctgattcccatcgccgctgactcccatccctccagatccrgcagggtgtccgctgtgctcctgatccagcgagactcccattgccactcccgattgtgctaaaagcttgccattgttcctgcacggctaagtgcctgggttcgtcctaatcgagctgaacactagtcactgggttccacggttctcttccatgacccacagcttctaatarctcatcgcatggcccaagattccattccttggaatccgtgaggccaagaaccccaggtcagagaacacgaggcttgccaccatcttggaagccgcccaccaccatcttggaagcsgcttgccaccattttgggagctctgtgagcaaggatccccggtaacattttggcgaccaygaagggacctccgaagcgtttgtctcttccagaattgaaactgtaaaactacaaatggttcttcaaatggagccccagatgcagtccatgactaagatccaccgcagacccctggacyggcctgctagcccatgctccaatgttaatgacatggaaggcacccttccggaggaaatctcaactacacaacacctactatgccccaattcagcaggaagctgttagagcagtcattggccaacctccccaacagcacttgggttttcctgttgagagaggggactgagagacaggactagctggatttcctaggccgactaagaatccctaagcctagctgggaaggtgaccgcatccacctttaaacacggggcttgcaacttagctcacacccaaccagagagttcactaaaatgctaattaggcaaaaataggaggtacagaaatagccaatcatctattgcctgagagcacagcgggagggacaaggatcaggatataaacccaggcattcgagctggcaacggcaaccccctttgggtcccctccctttgtatgggagctctgttttcactgtttcactctattaaatcttgcaactgcaaaaaagaaaaaaaaagaatcttcaaatggctattgatgctaaagaaagttctgaaggagcattctccaatgcagttatttcctacagaagattttaagtgattttttaaaaaactgcctcttttytaaaaatatttcagcttttattttagatatgggggtacatatgtaggattgttacatgggtatattggatccaggtagtgagcatagtaagcaataggtaaaaaaatgacctcttattcaagagggtacctcattactatttacaaagtgctttcaaacattctttctcatttttttctgacaactctggacgtccccccctacttttagaagaaaactaacagtcccaaaaatgttttggtgtaagtcaatatatgaacccaggtccatgtccagaactgtttaccactcacctctttataaaacggtaactgtggccaggcacggtggctcactcctgtaatcccagcacttygggaggccgagggaggtggatcacttgaggccaggagttcaagaccagcctggccaatctgttgaaaccccatgtctactaaaaatagaaaaattagttgggcatggtggcacgcacctgtaatcccagctactcgggaggctgagacaggaaaattgcttgaaccggggaggtgggggttgcagtgagctgagatcatgccactgcactccagcctgggcaacagagcaagactctgtcttaaaaaacaaaaacaaacagtaacagttacttctctgaagctattattttttatcctgttacatatatcaaagacttcatttgggtaactatattcacgattattttaagctttctttttcattaccaatagttgggctaacctttattttctggatggtaaaggtgttttatagcaacaaaaacaaacagctaagtcaatccgtccaggtaccctgttaaagcttcaaagactctggatcagaatgatctctgctatacacacatacccaaagaataaacaaaaatgctattgctaatawctctcagtcccttgagggattaacttttagtcccttgatttgcaaatcaagctgtaaactatattaattcccccctttctgtacctttcctttcggatgatgctcatctagcattttgctgtcttgaataccttctcctttctcatccctatatattttcattctttatttgagtataattccactttaacacattaccttaatgcaaaccattatctccatttttgctcacttctttccctttcacagcacctcttctcaataaaagtctatatgtagtgtgttcccatggtgatgggaactaaaattacttataatcaatggtttttatattgtcgctgctgcttatctcttgggttaggcctctctttgcagccaggtcacaggtaagtctatgaaggtgagatgaaacaatatttaccagagattgaactacttctggaatatttgtgaatccagccttcaccattattgcaccatctagatttcacatctgtttagtgtattaccaatatttcctttttccatataatgaattcttttattgtagtaattgtggtatcagggcaccatggatattcatagttataagaagatattatcatagaagaaaattgtcatgccatcattcattatggtgttttgcatctttgaattttaaacagagaaagagaaagaacagtcaagctagtaagcaagagataaccaatctactttgggaaatgaccaatggttcttgatttcagggtagattatagaaaagagaaaagattatagtattttatatctgcaaaacttattccaaaacaaatcagtaaatccaggttaaaatacccaggtcagacagtcacatttttactaataaaaawtaactagcagcccgggygaggtggctcatgcctgtaatcccagcactttcggaggccgcggccggcggatcacgaggtcaggagatcgagaccatcctggctaacacagtgaaaccctgtctctactaaaaatacaaaraaaaattagccgggcgtgttggcgggcrcctgtagtcccagctactcaggaggctgaggcaggagaatggcatgaacccggagggcggagcttgcagtgagccgagattgcgccactgcacgccagcctgggcgacagagcgagaccctgtctcaaagaaataaaataaataaataaataaataaataawttgcagcccattgagtgaactttaaatgatcatgctactttgtgaaatagaatatcacattactagatctgttgtgtgctggacaaatgccagcacaatgcagtactttgctgatatagtgtggaatagattttgtgctgcagcaaagctgtctatagacttcaaaaaacaaaggttatatgagcattaaccaaactgtttaaaatcttacagtttcaaaggaccacatattctatgattccatttatatgaaatgtccaaaataggcaaatctataaagatagaaaatagattagtggttacctgggacttgcggggatagaagcattacagggtcagggcagtgaccttccctaaaagatacagaatttattttctaggtgatagaaatgttctaaattgattgcggtggtggtcacaactatgtgacaatattaaaaatcattcaattgtatactttaaatgagagaattgtaaatatatgagttatagctcgataaagtgataccaaaagaaagatcttccccaaaaagctttcccgtaaaaatacatgttccacccaattaaaatgcaatgtcaatacgtattcgtttattttattgcttaaaataatgtgttcttttgcacaaagaagaaaaaatagaaatcagaatgtaagaagacaagtcatttatgatttattttgcaccatttatttcaactgtttaaaataaaagggccgattttatgctgctgtcaaggttttgcttatgataaatgtttgaagtgacactgaaatgtgaactggttgtgagacaggctctccttggcttctaatggaggcaggtatcccatgggacagatgcttgtattgcttcaaattcattgtaggagaattaacccttcgtggtgccactttcttcatatgaattaaagtgaaaattgccagggtcagtggcttacgcctgtaatcccagcactttgggaggctgaggcgggtggwtcaccggggtcgggagttcgagaccagcctgactaacatggtgaaaccccaactctactaaaaatacaaaattagccaggcatggtggcacatgcctgtaatcccagctacttgggaggctgaagcaggagaatcacttgaacctgggaggcggaggttgcagtgagccaagatcatgccattgcacgccagcctgggcaacaagagtgaaactgcatctctaaataaataaataaataawtaaaaataaagtgaaaattatgcagtatgggtttcactgtagttttactactcttgtatagaggaggaaaaatttctcctctaccttcttacaatctctggctaggcctaagaattaaacttatataatacagattaatagaagagaagcatacaaattttattataattttacttgcacatgaaagtcctcacaagacaatgaagacccaargaagtgaccagaagtagtaaacttatatatcttttagatgaagaaatgataaatttgtgaagaagtgataagacaaagcagtttggattataggcagtaaattgtgaggaagtcactaaaaatatagagggggaaactaatggaagataagggatattttagtaagtttgtacagatctatttcagagtcaattccaagtctcaggtgataaagatgttcttttcttcctggtacagggagggcacctttctcctggaaattttaatggtgtgtttttaagtagaaagggggaggtcaaaaggctttcctgcatctgctatttctccattgctttcagctctaaataatcagtatgccaaagtggcatattttggggtggcacgtcctgaagtccttcacttgtttactcactcgttgctaatcaggacttgatcatctttgtctcacccctttttacagccgtccagccctatgctttttattttatgccattatttaaatctgatgttccattcagttctctacagttggaagggtctagcttgggctacctttgkattgttcaaaatgcttttttaaaaggacaaaggtcttgtggtcaaatcagtttagcgaatggtgcataccatatcttgctcttacagagtctcagtgcacactaacatattaaagkttctgagaaatccagaagaaaaaacaagtatgtaactttatttaacctaatatttcccaaacttttttttagtgactcacagaaacactccgtagaactagcctctgcagaacaccctatgggaaatggtgttctggagtcataattatctccccctttattaccttattactctttcccagctatgacagatctttttatatttctttttttcttcccgaacatgtttgttttaagccacaattcaaacttgctacatttactttttcctggttattgcccagttgttaagtctggattgccctgggaagatgctgattacatggtgctctgaataccttgcgttctttgccagtagctctcctaaagatttgtgatgcatacattactgcccaacagagaattgggcttgcctcattgcaatttcagaagacaatcctcctgcgtccatcagcttgttattggctggcaccacagagatgtgtttctctggccctcattaattgtaaccaaccctaagagagttaagttgtatcaggcatgtgtayaccttacagtggataagtttgtcagatactttccttagtgcatattttttaaagagatagaataaagtataaatacacatggaatggatgtcaccaataagggtttttaaacactggagaattttatatgggcctgctttgtagatatccttttttttttcaatctatgaactcaaatatatgaaatatgtctgtaccctccttcttttggctgcccagctaagctcatcccaacaasgcttcccagctttcttcaggtcaccaccaatccaatccaggctggaagtgatgagactgagctgtggaatacaaggagcgtgcatggggtgctcttctggatcctggggatatagtggttaaaccgttactgacaacatgctctcatggctcttagatctagtgggggaaagatagccaataaacacacaaagaaatcaaatcttgataaacacttttcagatcactaaaatcagattatgtgagtgtgaccaagtggctgctgtagaaggaatggtcttagaaagctgcttttggagatgacagttaggttgaggatcctagtgaaaagagtgtgaacaaggagaaagaaatccaggcagaggagacagctgctgcaaaaactctaaagcaagacccagcttcaggtcttcttcttyttttttttttttttttttttgacacagggtctcactctgttgcccaggytggagtgcagtgacatggtctcggcccactatagcctccacctcctggactcaagtgatcctcccacttcagcctcccgagtagctggaactataggcacatgccaccacacccagctaatttttgtattttttgtagagtcagggttttgccacgttgcccaggctgcaccttgaagtctttcaagaaccaacagaaggccagggaggggagcaaagtggatgagtgggagaaggatacttcctgagctctttcaaggaggtcagggcaagtcgcatagggttttgttaaccctgacgtggatttgagaawcatcagcacgcaaggaggtatctaaagctggaggcctggatgaggttgcctttgggaagtgaggaaacagcaaaaggaggggcttggtacagacctggatggctcaacctttagaggttgagcagagacgaggggactgcaaagaagcagccaggcaggtaagagttcagatgtcygggaagccacacgagaaagtgtttccaaaagcaacacatgctgttgaagaagcccagaaagaggaagatacagaggtggccaccgatccaatgacaacgtgcaagttgttgatgactttgacgagaccaggttcagtgttctttgggargattgaggaggaatgtgatttaagaatagatgttcatgaccgtagaagtggaaatatgaatataaaggttaaggtttgtttgttttaagatgggacttactgtctttaaactgtctgcagtagaatggaagcaactaatgaaaatgaaggtggggatagaagccatatctccttggggtttttttcccccttaaggaaatatgaggcaaggttttcagggagggaagatggactgactgtaggaagagagagaartaaataacttgctatactgtgaacatgtagtatgaccactggacagtatttacagcctattagaatttgagagattcaggactatttgttttttttaagtccatcactcttatcagtgattttgaccaaatttagttaatacygaagtcaggatctgaacccggggacgtcttgctcagagtctgggcatttgaccactccactccactccactccactccactccactgcctctccacgagttacagctgaaactagtccccagtcagcacagatctgtcatttctccagttctcctcagctatgagcrtgcatagagaaggcasagagttaggttttatgaccaaaagagagagatgagacagaattaaatgtgtttgcaagtcagtaagtatgckatgatggtgaaatcaaagaagtgaagaaccaccgttgtagataatgagcaaattggggatcaaaggataggaaacgttgatgaggtggaagagygagtggtttgattggaagaagtgcagagcctgatttggaagaatcagaggtgcagttattggtgataacatgacaaatgatatgggtgtgagtggctcatgtgggtacaggagcagatcacctgtgttgagaaggttgaggattgagaagtctgggcctgtcccatggatctgacatccaggggtcccagccttyttgttttctacaaaagagaaactcagagcctgtgcccctggaattttcaaataaagcatgtgcttgtcccaaggtatggagaatagcggccgtgcagccaataatgtcactgggctcacttgggctaaagtgggtctcccctttccttccctgccctccctctacccygaaactttccttaactactgaagatcaggccttcttggccccaacacagaaatccctgtggggtggggggcaaggagaactgttgtccactcctgtctgcaacaaaagaagagttcatttttggccaaatgaatgacaatgaatattagggtcttggactgccagaactccctgccagtggcactccctgggagagaaggcctgttcccacacccctctctccagctttctccacctggaccrgatcagttgttctcccttactcccctctaggatccagaattcctggtttgactatcaaaagtaacactacttataaktatttataggatacatcattgactctcacattcactttattataaaatttctttttctmtaacaactctaggtacttttattgttattaggccattgttccttactctttgttttcttgtattatcacatcagtcagcgaccaaatcctgttcattctaactgagatgttccccgatctgtcccctccgtattcttcatgtcttctctcatgttgggcattggagcagctgcttaatttgttctctttgacctttcttgctaaagtccaccctcgcaactctcaacagagtcacttggcaaaacgtaggtctgatcgtgtggctgttttgcttaaaagtctttgatggttccccagrttgctttgttaaacaaaggaatttctactttaaaagtagaatttcctgcggaatctttctcaagttactttgctccaaccacactaaaccgcaccgttccctaaaccacagcctagttaagaactttaaagattccaagcactgactatattttggttcctcccactacttcagaggttcgcgacactagactaatttaacattttattctacaaaatagcaccgaacttaggcatatgtggaaaataactagctgttttccagatttttctgtttctgtcttctcttttcttttgatcactgctccaggcttgctggggctgtaaggaaatgctcagtctaactggagaattttagcattgccttcaacacaaatataaggctacttctgtttgaaggtttatctctggctggaaaatctgccctcctctatctccatttagttaacctttacttttccttcaaggttctacccaatgataacttcctttataaagtgttccctggctcacccaggggtaatcaattgcttagscttttgcgtgtgaacttctgctyktgttaccataaattatctgtatgtctagcatccttgctcattttaccatgttatatcattaaatcctcataattatcatgtaatcttaagtattaggattcctgttttgcagatagtaaacaggggtttgttacccacctaaccaagctattattaatatctaatgtgacaatgggtataattaatttataaaagactaagagcattaaaactggaaggcagtattatttttaatatattgactctgtgtggtgacaagcgttcatctgtattttttcttcttgccaatagtgaagggaatttatgattcctacataaagaaatctttttaatgttaattaaactaaactgtaagaatgctgctatgctcaggtgcaatgcaaataatgaggtgactctatccctgccatctcaggctaatcccctctcccctgaggagctgagactcagctccctggaggtgaaargctaaagcattcccctgttgtgccattttcttccctttctctcatgcattatttttcttactstggttattcttgatgggaatttttagcagagctcagygccatcttatcccaggaagaaaaaaaaattgtaggagataaatgtatgatgaatggtgcaaaacacaacagttgmaatcttttaaatttattgtgaaattaaagaacatgcccctagaatataatcgctggcaattcaaaaagcaaggatttttagcaaaataaataagaccagttttcttcctctgggccttgtgtctgttcatctcagtgagtctttcagcttaaccagtgttgcagcccaagctcttccttgtccttaattagcatcaggagttttcattagttattttacgagttgttagtgatcctcattagctttgctgtggtcttaaattttcttgacatttactgtttcactgcataagattttatggttaattcccagagtatataagccagattattagccgttatattttttacaatgtatatattcccatttcagaatctcttgtatcttaacatttttctttacaattttatataaatgactgtcatccagttcgttgggcttcctgatatcttttttatacatattaaataaggaaaaataagtaaatatatatatcattcactcagttgatagatttttcaagaaagaaaaaaattaagataatatgtttctacaaaaaaagaatgtaatgaaatactgtaatttgactttatagccaaattaggggaacactactatttttcattctacaattattccacactatgctgcaagtattgcccaaggaacagaaggcagaaaccaagtaacttgacaatatattagagaagaataacaagtcaagttattttgaagatttaggtgtattttatttcaaagtgcattgttctccctttgtgcctccttctcaaataacacaacacaggaagctgtcatccatgtaatatatattttttgggggattaatcacttgtatacctgttttattattcattccatggtcattagggcctaaaatgtaccaggtattagggacacaggataacaaggcagcaaaggatcattatattcagatgcaaaaggaaatgtaataaatataaaaygtataaaaagtaagtagccagtttcaaataataatcagtgtcattctgtcaacacttattttctaagtatgtactccatgctaaatactaatctataaagtaactctgatgggtgagtggagggcgaggggagctattttatattagttgctcagggaaggtttccctgaggagatgacatctgaaatgagacttaaataacaagtaaacacagaagagtttttcagctgagtttctgggagtctgtggatagatttcaggaggtctatagacttggatcagaaaaataattacatctgtattttcactcaactcagactgaaatttagcattttcttctatttgaatgtaracaacaaatctcagtagtactagtagcacttgttactttgttaccagtagaaagtatagtttttttaaattatatctcagttttcacaggtgtcttgaaatgttatcattgctttgaaattatgagatttcttggatgtgatactagatctgattctaattgtgttaataaagaagcacatgtattactgtattgattatgtattactgggtaatgaatgacccacaatttgggagctttaaacaataacccatgattctgttggtcagcaatttgggctgtgctcagctgggtggtgtttttttttttgtttttttttttgagatggagtctgtctctgtcgcccaggctggagtgcagtggcacgatcttggctcactgcaagctctgcctcctgggttcacgccattctcctgcctcagcctcccaagtagctgggactacaggtgcccgccaccacacctggttacttttttatattttttagtagaaacgaggtttcaccgtgttagccaggatgatctcgatctcttgaccttgtgatccgcccgcctcggcctcccaaagtgctgggattgcaggcatgagccmctgtgcccggcctcggctgggtggttcttaaggacttgccaggattgctcatgtggttgcagtcatctgacagccccactgggccaaatagtccaagatggccttcctcccatgcccagcagctggtgctgactgcaggctgggccacatggctccaacaggctaccctggggctcttcacatagtcacagtgttacaagacagcaagagcatgagccacaaagccccgtgaggctcaggctcagaactccccagcacttccactgtcttctgtgggtcataacaaatccaaaggccagctcagtcagtttgagagggaattccatgggttgtgacttcagggaagtgtgattaattgggggccattaatatacttacctgtcacctaccaagtcctaatttttttttttttttttttttttctgagacagggtctcactctgtagcccaggctggagtgtagtggcatgatcatggctcactgcaggcttgacctttggggctcaagcartcctcccacttcagccccctgactagctgggactaaaagtgtgcaccaccatacctggctaattttggcatgttctttttttgtacaaaataatcttctggatggggctcmccatgttgcccaggctggtctcaaactcctggactcaagtgatcctcccatctcagcctcccaaggtgtggggtttacaggcatgaaccactgtgcccagcctatgtcataattttaaaaattattataataagttggccgggcttggtgactcacacttgtaatcccagcactttgggaggccaacgcaggtggatcacttgaggtcagaagttcaagaccagcctggccaacacaacgaaatcctgtctctagtaaaaatacaaaaattagccaggtgtggtagcaggcacctgtaatcccagctacttgggagactgaggcacaagaatcacttgaacctgggaggcggaggttgcagtgagccaagaycatgccactgtactccagcctgggtgacagagcaagactctttcaaaaaaaaaaaaaattatagtaattttaacatgttcggtgttttctgtaattttgtcttttacactttttaaaatattattctgagaagaggtacataggcttcagcacattgtcaaagagggtcaagcacattatgagattaggagcccttgatctaaaggcagggagttctggaaagaggagtatagaagcctcaaggcagaagcaagctggcatgtccaatgggatagaggagcagaaggaaagctcctgcggccagagccaaagattgaggggcagagtggttggagacagaggtagggccagatcatgtgacttctttgaaagcttctgaaacttgcaaagggacctccacttccccactgcaccatacccacagagtgtgaaagtaggtattgtatgtaaattgtattttatgattttttggggtcattgytaacttttttcagttatcytggcagaaataagaaaattcttttttgctattccatatatctattgtgatatcagagtctgttgtttgtttgtgtgtttgtttgtttaagacagtcttgctctgttgccaggctgaagtgcagtggtgcgatctcagctcactgcaacttctgcttcccaggttcaagtgattctcctgcttcagcctcccaagtagctaggactacaggcgcgtgccaccacrcccagctaatttttgtattcttagtagagacagggtttcaccatgttggccaggatggtttgatctctcgaacttgtgatccgcccaccttggcctcccaaagtgctgggattacaggcgtaagccaccgcacccagccccagagtctgttgtttatagaggatgattgggcgtagctttctagagctgggaaaaccacctttmaacagtattatataccaatatttactatttcataaattcaggcatatttgcttaaaataatctcctgtagagaggcaagaaacagaagcccatttttttgtttttaggaaattcatagaagccwttggtaaggttcttttaagttggcaaactctattttcagaagacttctatgttgacacttgtgacctacagaattgctttaagaggtcagcactgataaaaacagagggaagctgtaaagggaggattaggctaaagtcaactggtggagtaggcataggtgaattactaaagtgttgatgaaatgactctgttggagttaccagtttattataatgagagctaaagtgaaaaacgccagacagcctagaagcattctgaataacaaggagctccaaccccttatatataaatgaggttacatatagtaggttgaaagcaggtttccaaaacaaccaattagtttgtatagcttcagcttcaggattgatgattacattccataggatattacattaaattgatgaaatctgcacgtctctggggaactccttacaagctagccagtgagcttttatgatgataagatacagaatggataaaaatcttctgatgccaaaaaagctttggccctgcccaagttaggatctatattcatattatcaccaggtaaagtgtcttgcaaactttcttagctttcattcctatcagactgcagttcatgactgtgaggtgtcaaagactctctccttaaccaagcttcagtcatgctctgctaatgtctcttttggaccaggcttcaagcttgctccacccccagctttggcttgcccagcccagccttagcaaggaattctgctaagtcatctcccaaccctagatatctaattacccttgatatctgatcaagttcttcatcctccacctttttgatgtctaagtccttggactgcctttagcaagagtcctgttaggccagcttagcaagaattcccctgcccttgatgtgttcttttagcaatttcccatcctttgacatcctcatgctgttcttggctataaatcttcacttgctcttgctgtttcagagttgagccccttcttttsccccctccaattgcaatggttttgaatgaagtcttccttaccattttaacaagtgtcagaataatttttttaacatctgtctttacaccacagtcaacaaccccttatcctccccaaaactctgagctaacgccactacttagagattacagtgtctgcctattttattagctggaactgcatcagtgattttggagttgaatttttcattttttacatgaaagattatgtgtttataatttgttgttttcacatatgcataaacagaactaggaagagctgtactcaggagtcaagtcagaagaaaaaacatcaccatgttcaaatagacaactgaacatgcctctgaaaaccagagacaaagggagttatttacagttaacatctatagaatatgggccgggtgtagtggctcacgcttataatcccagcactttgggaggccaaagcaggaggattgcttgagcccaggcattcgagaccagcttaggcaacatggcragaccccacctctataaaaaatttaaaaattagctgggcgtgatggtgtgcatctgtaggcccagctactcaggaggctgaggtgggaggatcacttaagcctgggaggtcaaggctacaataagctgtgattaaggcacctgggcaacagagcaagaccctgcttctaccaaaaaaaaaatatatattaaatttgtagaagtctgggcacagtggctcacacctgtaatcccagcactttgggggctgaggcagaaggattgccttcacgagtttgagaccagcctgggcaacatagtgaaataccatctctacaaaaaatacaaaaatgagccagttgtgctggtgtacacctgtagtcccagctacttaggaggctgaggtgggagaatcacttgagcctgggaggtcaagactgcagtaagccgtgatcatgccactgcactgtagcatgggtgacagagtgagamcatgtctttaaaaaaaaaaaatctgtggactatgaagcaagatgagagacatttgaaagcatatgtcggaaagtcaggtatacttctagagctggctctctgttaggatagagacctttaaaatgtttctagtgcttgcagatgtcaccctaccctcctgcaaagataacagtgcatttacttctgtcactgtagattagttttgcccaggtattcttttcttagggctgccgtaacaaagtctgggtggctttaaaacaacagaaatttatcgtctcacagttctggaggccaaaagtcagaaatcatggtgtcggcagggccatgctcccyctggcagctctagggaaaggcctttccttgccccttcctggcttctggtgtttgctggcaatccttgatgttccttggcgtgtagatgggtcacttcggtctttgcctccatggtcacgtggccatcttttccctgtgtttcttcacatagtcttcccatcccacatgcagaagtatgtgtcagtttctgtgtggctgaatttcccctttttataaagacagcagccctatcggattgggcctcctctaatgatctcattttaatttttgcctttgtaaagaccctgggagttaggacttcaacatgtcttttttgggagacaattgaacctacatagcatgtttttgaactttacatgcagaatcatattgtatgtagtcttttgcatctggcttatttcagtcaatatattagtgagattcatctgtgttgcaatagcagtttctattcattgtcagtcctacctaccactatatcaaggctctgcaaattatggtgtgaaggccaaatgcatcatgacttatttttttcgcatatggatatctaggtattacataagaaaatgtggtttttggtttctatgatacttcttcccatatttctctttgtttgaataggaaacaaatctaattaatccttaattaaaagaaaacttttatatcccatctttccatgactatgaatatgttacatgtataaatgtttatatctgttatgtggtcattatacattttgaactaaaacatagcttatacttgccatataagtttatggaaaaagttaaatattttacttaattgattgatttatatcctgtaactttacacataagtcctggtaatacaagcttgttgttaaaaaaaaaattgaaatgatccagaaggacataaaatcaaacgaataggctcctctccttatccctgtggcttgcccagtctaattctttataagtcaccgctattgacagttttctggatattcttacaaatattttttctgacatggaagtgtgcatgtatctgtgtatgtgtgtgttccctgtatttctaacatacctgggatcctaatatgcatactaatctatgacttgcttttyacatttaataatatattgtgactacatttccattttagtacaataaagtttctcctcattctttttttctgtttttgagatrgagtcttgctctgttgcccaggctggagtgaagtggcctgatctcggctcactgcaacctccgcmtcccaggttcaagtgactctcctgcctcagcctcccaagtagctaggattacaggcgcccaccaccacgcctggctaattttttttttttttggtatttttagtagagacggggtttcaccatgttggccaggttggtctcaaactcctgacctcaggtgatccacctaccttgacctcccaaagtgctgggattacaggyrtgagccacagcgcccggcctttctcgtttcttaaaataattttataatgttccgttcaatggatgcatgataatgtgttccccaaatagcaaacgtttagactgtttccaattttttgtgtaagtatacatggatttgtttctgtttctatttacttctatgaaaacatacttaagaatgatttttagatgttgaattgctgggtaatatatatgtgcttttaagtttttgacagataccactaaattgccattcgaaaaaatgcagtaacaatttacaccccatgaggtrtttttattattatttttaactaccaggactttacaccttgtaaaatctacaataagagagttatayattgactgtttactctgttgtttcagaacaatgagatggtggagctacagagaatacggatgaaggatgaaatccgagaatataagttccgggaggcacggctccttcaggactatactgaattggaagaagaaaatatcacattgcagaaactagtgtccacgttgaagcagaaccaggtaaggtttaagaaattttttgttatactgaagatggatctacatcttctgaccactagggttaaatctccaaacttgtcagaatttattgttactcttttatcttctctctataacatttatgtactgcaatgtcccaaccctcctatttcagctaaaatatagaaggaaaaaatacacctgtaagtagtatagtgtacactaaagtttyattgaataagaaaaagaattttagtttttattttagctctgtgttcatttatttcataagtcaaatgtatcgtaacaaatttaacctgacaacttytcattaaaagcctgagtcttagccgggcatggtggtgtgttcctgtaatcccagctacttgggaggctgaggcaggagaatcacttgaacccaagasgtcaaggtagcagtgagcccagattgtgccactgcactccagccttggtgacagagtgagactccgtcttaaaaaaaaaaaaaaaaaaaaaaaaagcctgggtctgtaagcttgtctatgagcttagggtctccctacaatcactggtctctcactcccttaaaattttttctgtaaattgctttcaaatcgtagaggggaatggattatgaagtwtaaatcaagaaragcaaaattayaagaaaaagaggccgggcgtggtggttcaygcccgtaatcccagcactttgggaggccgaggcgggtggatcacctgaggtcaggagtttgagaccagtctggccaacatgatgaaaccccgtctctactaaaaatacaaaaattagccaggcatgttggtgggtacctgtaatctcagctactcaggaggctaaggcaggagaattgcttgaacccaggatgcggaggttgcagtgagccgagattacaccactgcactccagcctgggtgacagagtgagattccgtctcgaaaaaaaaaaaaaaaaaagaaaaagaaaatgcctgttttctttttcagctgtaacctgactacaaagattacattcgtacatttaaatgatttttttgctgtaatgggggtttgatagcttaattttcctgattggtttgcattgtggattttcagaactattaataattattgaatctgtaattttagaagaatttatttatgaatacagttgaatcragtagttaattaagcaaaggtgaattggatgttcgagttcttttcaaggtgcttcctcagcgacacctctattctggtctaaacgctgttgccacctctcagttcagatsaacagcctatgtgccaggtgctgtgctaggttggacagacacaagaatccayagggcatgattcttgtcctctgtaaacttagaagccagcccagatgtatgcttttacctcactcccttcctgagttggtatctacatgatacactgattgattgattgattgatagatataagggttaagagggaaaagaaaaaaaatccagaagagaaaaatccatgtagtggcacaattaaaatttgatttcttttttttttttttkgcgacagagtcttgctgtgttgcccaggctggagtgcagtggcatgatctcagctcactgcaacctccacctcctggttcaagcaattctcctgcctcagcctccsgagtagctgggattacaggcatgagccaccacacccagctaatttttgtattttcagtaaagacagggttgtaccatgttggccaagctggtcttgaactcctgagctcaagtgatccgtccacctcagcctcccaaagtgctgggattacaagcacgagccacagcgtctggccaaaatttgatttctgatcattgccacttcccccagatttggagtgctggggggaaggcatgtaaggggacagtttcagtccatcaaaaaagggctactggagtatccccatgtgtttctgcctcattccttccgtaagcactgaatccccatatgtgtgctgagggctggccattccagaggctccccaggtcttgatttggctgggataagtgagctcacagtggagaaatgtagacttagaaaaatacatttgtaaagatgcttctcgaatactttttaaaataagaaggggtttttttttkttttttttttttgagagacggagtctcgctcygtcaccaggctggagkgcagtggcgcgatcttggctcactgcaacctctgcctcctgggttcargcgattctcctgcctcagcctcccgagtagctgggactacatgcatgtatcaccacgcctggctaattttttatatttttagtagagatggggtttcaacgtgttagccaggatggtctcgatctcctgacctcatgatctgccsgcctcagcctcccaaagtgctgagattataggtgtgagccaccacgcctgacctaagaagggtattttcttgtggtcctttttttggttattgatgaaacacatagaggatttgaaacaaatttacttgaagtgcaactatttaaagtggcccttccttccygattcctacactcctcactgctctctagagcatggtgagagcacgatcagcagcctccctggagagccttccctgaccgcatgtggagactgatggactcaggaggttaatgaaggccagtattagatattcttgaaagactgccaaggtatcccttgagtattcattaacccagatgccggttctgggagaatttgtactgtcattcctgttgtgagtttccccatgcccttctcccagtaattgaaacatggaatccaatggttaactcagaagttttttaaaaaggaggggggacttacacattttttatttccaacatgccatatgctaattttcccaattaagtatctaattaattcattcaaaatcattttctgcacagagcaccattctggtttattccctgaaattgggggaactgaaatgccacaagtctctcccagctaagaaaatgctgtgtttgtttccagtagtaactgatctttctttatagatgctagcatctatcataaactctctctaatcaataaagttttttggttttttggggttttcttgagacagggtcttgctctgtcacccaggctggaatgcagtggcttaatctcggctcactgcaacctccgcctcctggtcttgtgactcggcctcctgagtagctgggattacaggcgtgtgccaccatgtccagctaatttttgtatttttagttgagacagggttttgccatgttgccctccctatgttgcccaggctggactcaagtgatcgcccacctctgcctcccaaagtgctgggattacaggcatgagccaccatgcccggccctaattaatgaagtgttaagtacaatattgtatgtacaaatgccacagagttttttaaagagatgacaatgagtagcattcggtcacaaaattggactgtgttactttgtactgaagttcccaatacgttgtatagtccttcagcctggtttgatgtttctctaaacagcaaagctactaccattttaaaatgcttagttcaaagaattttcccttctgaagtattatttttcttttagttatttattattttctaagtacagtgtaattattgtttaaaaaacacctcttactttctataaagagtctatttattcatttgtttacattccatttccttccattaacatatagcacctacgatagagcctgatccacagtagatattaaataaatacttgttgaaagaataagaaaactggccaggcacggtggctcatgcctgtaatctcagcactttgggaggctgaggaggatcacttgagtccaaaagtttgagaccagcctgggcaacatagggagacctcatctctaccaacaacaaaaaaaattaaccaagtgtgatgatgcacacctgtggttccagctacttgggaggctgagatggaaggattacttgagcctgggaggctgaggctgcagtgagctgtgatcacacctctgtactccagcctgagcgatagagtgagaccctgtctcaaaaaaaaaaaaaatgggaaaaaaaaaagcaacaattcagtcacacttctaatatgaaacatttcctccaatgtcaggtaataatatataagaatatcmccctgggtgcaatggctgatgcctggaatcccagcactttgggaggccgaggtgggcggatygcgaggtcaggagttcgagatcagtctggccaacatagtgaaaccctgtctctactaaaaatataaaaaagaaattagccgggcgtggtgacaggtgcctgtagtcctagctactcaggaggctgaggcaggagaatcgcttgaacccaggaggyggaggttgcagtgagccgagatcacgccactgcactgcagcctgggtgacacagtgagactccgatccacctcaaaaaaaaaaaaaaaaaaaaagaggctgggcatggtggctcatgcctgtaatcccagcacttggggaggccgaggcgggcagatcacctgaggtctggagttcgagaccagcctgaccaacatagagaaaccccrtctctactaaaaatacaaaattagccgggcgtggtggcacatgcckgtaatcccagctactagggaggctgaggcaggagaatcgcttgaacctgggaggcagagattgcagtgagccgagatcatgccattgcactccagcctgggcaacaagagtgaaactccatctcaaaaaaaaaaaaaaaaaaagaatatcataaggtaatatcataaaagacctaggaaatgtattcagttgttttatttcatttaaccggtatttcaggkgtatctctctatgagatcatgtactttttagagacaaaagatacagtcactggctcaaagagcttgtagtcccaatagggactcctagcaatttgtgtaaatgaatattaaagccacatgttaggtttggcaacacagggatagattaagatctttagagttcctaagctctgaaaggattatgatatctaaccttgaccgtcatgtagttaaaaataaagttattaaactatgaagttgccataaggaatcctaataaagcacttatttttcctatggtgactgctttgatgttgtctttaaaatatcaaacaccagtttttaagcaccttcttgttccgtttcttgcttcctctgctttgctggggctctaatcacatggtgcagccttacaacaacggcacagaaaggagtgatgagtttgcctcagtgggcaccaaagacttcagttaggatgagattcttaacttaggtgttaaaagaggaataagagttttccagatgacagccttttcccaggcggagaaacatgaaacagctgggtgaatagtaggagcttgtaccacatttgagtgagtggtgtgagtgaagctgcccagacagaaagagatcagggccaggcacggtggctcacacctgtaatcccaacactttaggaggccaagtcacgaggatcacttgagtttgaaaccagcttgggcaacatagtgagacctcgtctctacaaaaaaamaatttaaaaaatgaggcgagaggatgacttgagtccaggaggttgaggctccaatgagccatgattgtgccactggactcctgcctgggtgacatagcaagagatygggtcttacaggaagtctaggccatcaattgaataaatactactgaattttaaactctgcagtgcaaactaaattaatgtcttcaagtcaagaccagagttagcaaactttttctgtgaagggccagatagtaagtatcttaggtttcataggtcacatgatctctcttgcgactacccagctctgctctggtagaagcagccatagacaacatgtaaacaaatacatgggagtgtgttccaatagaactgtctacacgaaaataggtggtgggctggatttgctccggaggacatactatttttttttttttgagacagaggctcgctctgtcgcccaggctggagtgcaatggtgcgatctcrgctcactgcaagctctgcctcccgggttcacgccattctcctgcctcagcctcccaagtagctgggactacaggcacccgccaccatgcctggctaattttcttgtattttttagtagagacggtgtttcaccgtgttagtcaggatgatctcgatctcctgacctcatgatcctcctgcctcggcctcccaaagtgctgggattacaggcatgagccaccgtgcccagccaggacatactattattggacaacctctggtctaggccatcagtttaacaaagattgcagcaaaacaggtctacaatgcaaactaaagtaatgtctgcaaatataagcttatcacataatctggggcagtcagagggttggttgaaatactaggaaaggttggcaagaggtgtcctatgttgtccagggaaagaaaaggaaagggttgagaggaagatgactttacagtattttttttttttttttttttttttttttttggagacagagtccagctcttttgcccaggctggagtgcagtggaagcaatcctggctcactgcaagctctgcctcccgggttcacgccattctcctgcctcagcctcctgagtagctgggactacaggcacccrccaccatgcccagctaaattttttttttttgtatttttagtagagacagggtttcactgtgttagccagtatggtcttgatctcctgacctcatgatccrcccaccccagcctcccaaagtgctgggattacaggcgcgagtcactgcgcccggcccaactttacagtatttaagcaggcctgaaagaaaccatgacacaaggaaacacactgctgtctgaagcaatttccaagttgcctttcttataaccacactgagggcaatccttgcttctcctttcataaggaggtaaaggcccttctgatttccatactccttcatcccaagtcacctgcaaagcagtaaatcatgttgagcatgcgtttctggattcctctcttcctccacacttcatcctcagtttccccctgcttcctggctaacaaattgagattcctataatcagagaatgaacctttcatttcactaccagagataaagtaaaaaatgcatgtttttgcttgaagtaacaayctagttgaaatgcagtcagtcagcaagtataaaggaaaggtgrctggatgctttagtgtgggaaaggttgtttgctcggtggaaaaggttggagagagtcagtcacagggcaggagcagtgaactcaaatgaccacaagcagcttataaatagcattaagtacaagatgtaaacaaaaagtagaggccgagtgcagtggctcacgcctgtaatcccagcacttcgggaggctgaggtggaaggattgcttcggtccaggagtttgagaccagcctgggcaacatggtacaaaaccttgtctctacaaaaagaaaaaaaaagccaagcatggaggtatgcgcctgcaatcccagctacccaggaggctgaggtgggaggattgattgagactgggagatcaaggctgtagtgagctgtgatcaagccactgtactctagcctgggcaacagagcaagaccctgtcacaaacaaacaaacaaaagaaaaagtagatggaaaaggaacagccagtgctcacttacaggtgatttttgtgctctgtgaaggtgggcccagtgttgcctgaattatttatttatttttatttayttatttttagacggagtcttgctctgtcgcccaggctggagtgcagtggcgcgatctcggctcactgcaacctctgcttcctgggttcacgccattctcctgcctcagccttctgagtagctgggactacatgcacctgccaccacgccccactaattttttgtatttttagtagagacggggtttcactgtgttagcyaggatggtcttgatctcctgacctcgtgatccgcccacctcagcctcccaaagtgctgggattacaggcgtgagccactgagcccagcccgaacttttgatttttttaaaaaagaaatcagaagttttcaaatgtttgtgaaatcatcagttttctaaatattggcaatcaattccaaaagttttataacgtgttacaagccaaataaagcacatctataggctcgatggtctatgggcaccccttgtgatctctgctttaaatcatttgatgtctgaattggtggaagggacacgggagcacacaccagcctggggagcccacyagagtacagaatgcaaactacagggacacatgcctttgagcaggtagtagatagccagggcctgtcaagttattaggtgtcccaggccaggtaataactccttggagttgtgaaaagtatatttcatttccatgccatcatgtttgtaacatgctatttatagtgcccagttatcatttttcccaaagtgcaatttttctcccatgaagtactcataatcttaagtaatgtagttgatatgtaacccagaaactcctacttgattagaagacagttattggtagtatgccattgatagatttgttaattttttgttatatttattcaaatgcatattcatggtagaacaattagcactttctagttttcattctaaataatggatattataaataatggtctccaatattgactcttttgagtaattctatcagggacatgttgaaattccaatgaccattttttttttttttttttttgccttagaggcatcttttgtacataatgtatttctttttttttttttttycctcaagacagggcctcactctgccacccagattggagtgcagtgacaccatcagggctcactgcagccttgacctccctgggcccgagtgatcckcccacctcatcctcccgaatagctgggactataggtgcacgccaccacacctggctaattttcytattttttgtagagagagggtttcattatgttgcccaggctggtctcaaactcctrtgctcaagcaattcaccgagattacaggcctgagattacaggtgctgagattacaggcctgagccaccgtgcccagtcctcataatgcatttcacacaccatagtgtggtgagcacattctttcactgaaataacactatccatattcacatatacaactggcattgttagaaacatctgctatacatatgtctttatgagttgcatcctattagagcaccacagtgtttcggtgaccagtgagtgctggtttaccatcagctttcattgttcccttctgacggtgtatttctcagttttttcctgggcccagtgctgcccagagtaaaggctacattcttcactcctcctcgcagccaaatggcataagactagtaccagccaatgatatataacaagtgatgtgggtaacttttaatgtccttaaagggagacagtgtgctccttattttgtgccaccrcttagaacatgatcaaatggcaagccacctgagatagtatggtctagactagaaggctgtacaacaacagaggaagagcctggctcctggatgacctcatggagcagagattccatgaggaatctcctcctgtctacctccatactgttacataagagaaaaacctctggctgggcgtggtggctcacgcctgtaatcccagcactttgggaggctgaggtgggtggatcacaaggtcaggagattgaaatcatcctagctaacatggtgaaaccctgtctctactaaaaatacaaaaaaattagccaggcgtggtgacgggcacttgtagtcccagctactcaggaggctgaggcaggagaatggcgtcaaccaggaggtagagcttgcagtgagccgagatcacgccactgcactccagcctgggcgacagagcgagactccgtctcaaaaaaaaaaaaatagaaaaagttccatcttgactaagtcactcttgcttaggtgtctgttacatcagccaggctacatcccaactaaatctctaccctaacctttgcgagacaaaccattgcattgagattatataaagggaagttgggggagaaagagaaatatatgatgatgatactggtcaatgttccctattcttcagtttttaaaatattttttaaaattcragttcaaactaatatatrtgctaaaataaatatgaawctragcacatagtktgtattagcatctaatatcatgatgactttattttactttttctactttattttttcattctccatagttctttattcagcaaatgcacattgaacagcagaattstgttttamacmccatgaaggaacwctgaagcactatgaggagcaatgaggtggataaaaaagtacttactttctctaaggagattacagtgtacttgtggagataaaatgtttcttaaaaggtggcatgtgataagtgccatggaaaggatcccaaggaggcatgtcggctcagaggagacatccctgtcacccgtgggccttcatgaccaagagattgtttgaggaggtttatttttattgcatttcaaaagaatattacctcaataacaayatatggccaggtgcagtggctcacacatataatcctagcactttgggaggccaaggccagaggattgcttgagcccaggagttcaagagcagcctgggcaatacagtgagaccgtctctacaagaaataaaaataaaaaataaaaaaaatagccaggtatggtggcacatgcctgtgatacttgaggagctgaaatgggaagatcacttgagcccgggaggttgaggctgcagtgagccatgatcataccattgcaccccagtctgggcaacagagcgagaccctctctcaaaacaaaccaaccaacaaacaaacaaacaaaagcaatgtaggtattttttgttactggatagtttatgtaactgttctttcagattctgtctatcctttaagcacataacaatgatctttgcattttcatcttactctcaaacattttactgagattatgttattataatcgttaacaaatttatctctgggtataaaaatttcctcattattaataaggaaataaaacaaagtaatggtgatgatacaatcttttcttagattgcaaatattctcataagttattacaaaaaatattccctatttattgggcaaacagtgcccscttttgaccactggatcctatgaaagaaatcctaagacaatagactcttcatctctgctaaaaattgaattatatagagagttatatagatgtatattattagatctaattatatataacatttatgttatatcactataatacctaattatatattttatatatggtatataatttctaaagaaactatcctatataactttaaggatatattgtgtgctttttattatttattttttagactcatgttgtattttgttaagtgattaggtccactagagtgtttaatggcagttttgtaagatccacattttagttttatgaatcttctttatcctgtctgattcaggttgaatacgaaggcttaaagcatgagattaagcgatttgaggaggagacggtactgctgaacagccagctggaagatgccatccgattgaaagagattgctgagcaccaactggaagaagccctygagactttaaaaaatgaaagagagcaaaagaacaacctgcggaaggagctctcccagtatatcagcctcaatgataaccatatcagcatctcagtagatggactcaaatttgccgaggatgggagtgaaccaaacaatgatgacaaaatgaacggtcatatccatgggcctcttgtgaaactgaatggagactatcggactcccaccttaaggaaaggagagtctctgaaccctgtctcygacttattcagtgagctgaacatttcagaaatacagaagttgaagcagcagcttatgcaggtaagaactttgtktagggccgctagagtgaatttcttgtagattgcaggtagcatgttgtgggacttctgattctcgcatttcacttctagatttcttttcttttttcttttcttctcttttcttttctgttcttttcgagacagagtcttgctccatcgcccaggctggagtacagtggtgcaatttcggctcactgcaacctccgcctcccaggttcaagtgattctcctgcctcagcctcccgagtagctgggactacaggtgcccgccaccatgcccggctaatttttttgtatttttagtagagacggggtttcaccgtrttagccaggatggtctcgatctcctgacttcgtgatccgcccgccttggcctccaaagtgctgggattacaggcgtgagccaccgcgcccagccccagctttcttttctaaatattgcttcttcarctagaaacttcgaaagtgcagtattttagaaagacatgacagaaggagcgttaaagagaaatgcagtctctcatttgcatcacttcaagaaatgaacttctgagagccacaaattgagctccaatgaagtctgagaaaagacagaaaaaagttccttgggccgggcgcggtggcttacacctgtaatcccagcactttgagaggctgaagcgggcggatcacctgaagtcaggagttcaagaccaacctggccaacatggtaaaaccccatcgctactaaaaatacaaaaaattagctggacgtggtggtgggtgcctgtaatcccacctactcaggaggctgagtcaggagaataacwtgaacccaggaggtggagattgcagtgagccgagatcgccattgcactccagcctgggcaacaagagtgaaacgtcatctcaaaaaaaaaagaaaaagaaaaaagaaaagacagagccttaatgcatttctgattaacaaaagaattcaaaagctttatatacaagtaaaatgatggaaaccatgcagtttttcatcacaagcaactgtgtttatagcttccagatttatggttacatttcacaggaatacttgaagccttaaaagacgtaaaggacttcctatgtacaaattatccaggataccgtatgattaaaaatacagaacaggtataatctaagaccaaaggattcttattgcaacatgagttaaaccttaaatttttagcrtcttcaaaacaaatgtcttgtgaagatcccagccttgaaaaaatcgctttctagtttagagtcttgccttcctgccacatgtaatggaaatgttgtttaagaaacagcagcattaccatcacctgggggcttatttatacaaattgtggagctccgtgtagatctactgaactagaaactgaactagaaatctggtataacaagcttgttaagtgattaaatttgaggcttaatcttcaatctcaatcttatctctccaaggttcttcatgtatagctgataattagaggctgttaagcctctggcagtcatctgcctccacggaaatgatgactggaaaagtgaaattagcagaaataagtaagagaacagagagccaatgatgttgatttgttaacaggtttattttctatgtctttttgctcagtttacactaatatgactagattgattgaaacagaaaacatatttccttgtgaaaaagttttacatgacagatgtattcataagaatttgtgccccccagattgaataccattaaatagaagttttatgagttttgtttaactctcatattggtggctttgagataaaaagttagtgggttcaggctttttgtttattccttttgttttggtggcagtgcagaagataataggaaaagaggcttctatgcatgaaacagcacaacaattttcaascaggtcatctattggctgaaagctcagagctgtgctcagatttaattctaaatgtgatctgaattgggtaatacaaaagtctaaaaaagatgaaaagttcaattaaaagaatggtggaaaacaagtaagtactcagctggagactggctctcctgagttctcaatagactgtcgttttcgtttggtttaggcggttcctcattgccagagaatgttttcttccttgagaaggtttagcgtctctgatcccaactcatgagatgctggttacatttcctcagttgaagtgatgaccagaaactccccatgtatttcaaatgctctgagagtcagccactagttgacagtcattcttagaggacagcactttactttcccatggaatgggatacataataccttcctcgttagagtgtcatgaaggtttatgagttatatgcagagtgctgagaacagggactagtgcacagtaaatgctcattaattatgaactgttatcattatttcaactccattggtcctttaatttattaggcactcactttataataatttagataattattattaactattatttttgggctattagctcaaggccaatcaccccaaaagggactgatgtggatactggtaggaatatagaaaaataacagttaagtctcatggtgcaagaaggtctgaaaaaggatattcatttagcaaaatgttagggtgagaaaaactttgctggataaaccctccatcagtctattgagaaagctgtgtcccttcaaatctttcttcaacccttaactgatgttgacagtttgcaaagatgtagaggggcgcaggtaggtccttatatcccaaagtttgctccagatttagttgtgaaaaccaggttcaacacaggaagggctttgcagcttccaatctcatactaacaacactaactgtaaatttttttttaggtagaatatccatttatcttcttgtaatcagcgtttttaaaaagcatgtcagcttttcctaagaatatattttattcaaacaagtatattcatgagaagtataccttctcatgaactatttttttgcaatacagttttttccttagccacacatctttttgggttaaatttatgtaaataaacacattacaaaaacattacaggatacattgcctagaatttattgtaattggctttgatgttaataaggattaaaaataatatggcaagtctgatcaatgagagtactgtgcacctgaagcatatatgtgtcagtaccattgttctggaaattatgaagaggaaccaatcaaatgtactttaagtatagctatctggaatgcttgggaccaggtgtgttttaaaaattcaggtttcagattgtagaaaggtaatatgcagcatataccacatagattgtgatatctccactgggatcagatgcagcatccggtgatcaaataatattaacatttctgcagtgaaacatgagtattcacactaagaataagatgaggaccattaaaggccttacaccagtcaggtgcagtttggctgccctgggagtttaggactgtctgaatactgccaagtgagttttatcataatcaagtgaattatgataaaacttgatttcgagctttttggattttgcagttgcaggcgttgtaggaatagcactgtcctgttgggcggctgtcagttttgcgcacctcagcttayagtgtcaacatacttggaacgtgacagtttgtattttcatttttttttattattattatactttaagttctagggtacatgtgcacaatgtgcaggtttgttacatatgtatacatgtgccatgttggtgtgctgcacccattaactcgttatttacattaggtatatctcctaatgctatccctgacagtttgtattttcatagttcctttatctcttaggatttctcctggcctggatccaaaacactgcatgggagaggccgccttgtgcctctaatccaacagctgtgcttagctaacagctcatgacagtgtagaggggcacaggcaaggctgtaackccctgaaccaggtgatatgcagcagttcaggttttcttccttctgatcaagtacccctttgatggagtaagttcaagagatctatagtacaacacagtgactgtagttaataacaatgtattgtattgaaaataaaagagtagattttaagtgttctcagtgttgtagaacccctaaatgtaggtccacgtgttggatgggcagtaagccaaatactgacacatcagtgcttagcagcagagaaaggtgtattcatttttccaaaaatgacattgtgggagaggcaatcggtcaaatcctacctgcctttgaacgtaactgggggtttttgtgagtaaggcagctgtgcaggagaatgaaatcccccaatgatcaaagttgtttgtgtcccgcagctcaatcagacttctggatgccatcaaggaggtctgcatgacctaaggatcattgttctttgaaaggaaaacaagttcattaatcttactggctgccagggttaggatgcaaagttaatcaattattagtgactaccgtctaccgaatgactacgtgcaagcagtcatgcatggaggaagaaaaggacaaagagaaaggaaaataagtaaaaaacaaacgtttaatgattttgataatataggctcagttacatcaccacaaacatgataagtatgtcaggtcatgcatgtcataattagctcaatttccactttgcctacatatttcaaaacatcatgttgtacatgataaatatgtacaatttttgtcagttaaaataaatacattaatttgtttttaaagaactcctttgaaaacagtatacctagtccatataccctttcggccttttcttctcctacaaggctcaatgtatgcccatgatttatgttttcccatccataggtatttatttaacctggttccaggaaaaaaaaatgcctctgtcgacgaagcaagtcaaactctgtaaaatattttaagagatttattctgagccaagtatgagtgaccatggcctgtgacatagccctcaggaggtcctgagaacatatgcccaaggtggtcggggtacagcttggttttatatattttagggaggcatgagacatcaattaaatacatttaagaaatacattgggccgggtgcggtggctcacgcctgtaatcccaacactttgggaggccaaggtgggtggatcatgaagtcaagagattgagaccatcctggccaacatggtgaaaccccatctctactaaaaaaaatacaaaaattagctgggcatggtgatgcatgcctgtagtcccagctacttgggaggctgaggcaggagaatcacttgaacccaggaggcggaggttgcagtgagccragatcgcgccactgcactccagcctgcgacagatcaagactctgtctcaaaaaaaagaaaaaagaaagaaatacattggtttggttcagaaaggtgggacagctcacagcgggggcttccaggctataggtaaatttaaacattttctggttgacaattggttgagtttgtctgaaggcgtgggatcaatggaaagaaaatgttcaggttaagataaaggattgtggagaccaagttttattgtgcagaggaagctctcagatagctgacttcagagagagcaggttgtaaaatgtttcttattgcacttagaagggtgcctggctcttagctgattatctcctggatctggaaaggaaggaaggaaaacaaagcggggaaaggggattytctacagaatgtggatttttcccacaagagactttgcagggcaatttcaaggtatggcaaggaaatatattttggttttctttctttgccagtatcagattggaaagtaactcttgatatacagggttaaataaaacgcatccgatgagaatttatggtttgtagggcatgaactccccagaccccttagataggaatttgggcaagataaaaaaaaatcagatcttagtcctcacctctgccttaattatcaggaatgttgagtgaattgttttgcttctctgaggctcattcaaaaggggaaggtaataaattagccccaccatttgtctctkycatgcctttgttggaactatggaaaaaacaaaacaaaacaaaacaaaaatcaggtctccttcttgaagccatcatactgccatctgctgggaaatggtaataacaagtataaacatttatagctactacaatttaaatagcacctcctggagttgtttgcatacaacctgcagacttctgcattgaagccctggtgataatgccatgcctcctctgtagaattgtgaggaccaaatgggatggtaaatatgaaactrtgtataagtcataacattttataaattattattgtcctggaaactgccatcaggtttcgagatgccaagaaggtccccactatccctgtgtataaacggtcaatacataaattataaaaagtatgggaaaggcaagtggtggtaagcctgtatctaaattagggagagctttttctcagaataaattagagtgaatattttactgaattgtatgccttcctaggttatggaataaaatacaggaatattttaaacttagctaatcatgctaagtttcacataatacagaaacatatacacaaaaaatacagtaagaaaacattttgattcacctcagtctctataaacttgacaatagtccttgatagtgaatagttcaatgagtgtcatcctttattcatgagagaagtttttcagagtattatcggataaattattttggttttttggtgccctcaagacctcattatttcaaataggttgtaattgacattttccagtggcagtcaaataccttaattagttttattagaatgaaaataagtagattctgtctggaaatactaactaaattacttaatcaatttaaaggtgtcctgtatgcttgtgctgaaatttctgtctttgataaatagcctctaactttacatctgcatagagtcaaactaagcaggggaaaactctttggatttttttttttcagtattatgctgggtatataatttcacatgtagtatgagaaaacagtaatgtttctgtaaaactaaaattaatatattctgttgcatcctcatggatgtggaagaaatatattcatattatgttttgatccactctattaaaggcaattttagttttttctataatgattgatgttaagtggtgatggtaatttgctatatgtcccataagagttcaaagcaatttttatatatttgcttaattggttgctgcttataacaactgtatggggtagagagtattattatcttcatattatagatagggaaactgaggcatgactgtgttatgtcattagttcaaggtcaaaaatctagtaagtggagttgctacacagagacagtcgaacaagtgaaatattatctctgcttaaasactcacagaatatttataggatgacattaatgaaaacaagattggttagttcttgggttctgaaacttaaagtgacaagtataattatttcctagtacaaagctgacaaatggctaaactattacagattttatagttagagattacaaactagctgggcgcagtggctcatacctgtaatcccagcacttcggaaggctgaggcaggaggatagcttgaggccaggggtttgagaccagcctgggccacatggcaaaaccccatctctaccaaaaatacccagaaaaaattagctgggcacggtggtgcgtgcctatagtcccagctactagggtcgctgaggtgggaggattgcttgagtctgggaggaggtcaaggctgcagtgagccatgaccatgccactgcactccagcctaggtgaaagagcgtgaccctatcaataaataaataaaataaaaataaatggaatcatacaatgtgtggtcttttgtgactggcttctttcacttagcataacattttaaaggttcgtccatgctgtaatatatcagcacttcattttcatttctttctgttgtcaaataatactccatggtatgcagataccacatttcatgtaaccattcatcagttgatggacactttagttgtttgtttttttagctattatcaataaagctgctatgaacatttgtgtacaagttttcgtgtgcacrtatgttttaattcccgggggagttaatactagaggtggaaatgctgggtcatatggtaattctatgttttaccttctgaggaactgctagttttgaaaacaaatcgagtgtaccattttttatccccaccagcagtgtatgagtgttccgatttctccacattctcactaacacttgttattatgtgccttttcaatcatagccatcctggtggatgtgaagtggtatttcattatcatcttgacttgtatttccttgatggctatgatgttgagcatcttttcatgtgcttatctgctcttttatatcttctgtggaaaaatgtgtattcagattattttttgactgggttgtctttttatttctgagttgaaagtgttctttactgatttggatacaaatccctcatcataaaagtgatttatgatttgcaaatattttctcccattctgtgggttgtcttttcactttcttgatggtgtcctttgatgtacaaaggagtttttttttttttaaaagagatgggtctcactatgttgcccaggctggagtgcagtggctattcataggcacaatcatagcacactgcagcctcaaacccctggactctcctggcctcaagcaatcctcccaccttagccttctgagtagctgggactacaggcgcatgccactatgcccagctaaaaaaactttttaatcttgatgtgtctagtktatttttttcttttgttgtttgtgcttttggtgtcatacaaaactgttgtctaatctaaggtcatgaacattcatggctaggttttcctctaagagttttatagtttatctcttacatttaggtctttgatccattttgacttaatttttgaatatgatatgaggaagagatcaacattactattttacacgtgggcatccagttgtcccagcaccatttgttgaaaagactattctattctttctttcccctattgaattatctttgtacccttgtccaaaatcaactggtcatagatgtatatatgggcttatttctagactttcaattctattccattaatttatatgtctgtttttatgccaatactatagtatcttgattatagtttttttgtagcaatttttgaaataggaaagtttgctagttctttttcaagaagtttcttcaggactgttttggctattctaggtcctttgcctttccatataaattttatgaccatcttgtcaatttctgcaaagaatccagctgaaattctgttggagtttgcattgaatatgtaaatmaatttgggtagtattgccatcttaacattcagttttttgacccagaaacaggggctgtttatccctttatttaggtcttctttcatttctttcaacaatgctttataattttcagagtacagatggtccttgacttgtgawkgttcgtctagacttttttatttaacaatggtgttaaagcaataccatttagtrgaaaccatactttgagtacctatacaactgttctgtttttcattttcagtacagtagtcaataaattacatgagatagtaaacattttattataaaataggctttgagtggggctgggcgtggtggctcatgcttgtaatcctagcactttgggaggctgagatgcgtggatcatctgaggtcgggagttcgagaccagcctgaccaacaaggtgaaaccccgtctctactaaaaatacaaaaattagccgagtgtggtggtgtgcgcctgtaatcccagctacttgggaggctgaggcaggagaattgcttgaacccaggagccagaggttgcagtgatctgagattgtgccactgcactccagcctgggcaacagagtragaccctgtctcaaaaaaaaaaaaaaaaaaggctttgagttagatgatttttgcccaactgtaggctaacgtaagtgttctggacacttttaaggtaggctagactaagctagaatgtttggtaggttatgtgtattaaatgcattttggacatgatattttcttttttttttcttttttgtttgagatggagtctcactctgttgctcaggctggagtacagtggcaygatcttggctccctgcaacctccacctcctgggttcaagcgattcttgtgcctcagcctcctgagtagctgggaatacaggcacgtgccaccacgcccagctaatttttttttattttttattttttagtagagacggagtttcaccatgtcggcctggctggtctcaaactcctgacctcaggcaatccacccgcctcagcctcccaaagtgctggaattacaggcatgagccaatgcgcctggccatacttaggatattttcaatttacaatggttttattgagatgtaaccccatcacaagttgaggagcgtctgtatacattttgcacttcttttttttttctttttttaaaattttattattatactttaagttttggggtacatatgcacaacgtgcaggtttgttacatatgtatacatgtgccatgttggtgtgctgcacccattaacttgtcatttagcattaggtatatctcctaatgctatccctccccactctccccaccccacaacagtccccggtgtgtgatgttccccttcctgtgtccatgtgttctcattgttcaattcccacctatgagtgagaacatgctgtgtttggtttttttgtccttgcggtagtttgctgagaatgatggtttccagtttcatccatgttcctacaaaggacatgaactcatcattttttatggctgcatagtattccatggtgtatatgtgccacattttcttaatccagtctatcattgttggacatttgggttggttccaagtctttgctgttgtgaatagtgccacaataaacatacgtgtgcatgtgtctttatagcagcatgatttataatcctttgggtatatacccagtaatgggatggctgggtcaaatggtatttctagttctagatccctgaggaatcgtcacactgacttccacaatggtcgaactagtttacagtcctaccaacagtgtaaaagtgttcctatttctccacatcctctccagcayctgttgtttcctgactttttaatgatcgccattctaactggtgtgagatggtatctcattgcggttttgatttgcatttctctgacggccagtgatgatgagcattttttcatgtgttttttggctgcataaatgtcttcttttgagaagtgtctgttcatatcctgcrcccactttttgayggggttgtttgtttttttcttgtaaatttgtatgagttcattgtagatyctggatattagatccagatttgtcagatgagtaggttgcaaaaattttctctcattctgtaggttgcctgttcactctgatagtagtttcttttgctgtgcagaagccctttagtttaattagatcccatttgtcaattttggcttttgttgccattgcttttggtgttttagacatgaagtccttgcccgtgcctatgtcctgaatggtattgcctaggttttcttctagggtttttatggttttaggtctaacatgtaagtctttaatccatcttgaattaatttttgtataaggtgtaaggaagggatccagtttcagctttctacttatggctagccagttttcccagcaccatttattaaatagggaatcctttccccattgcttgtttttctcaggtttgtcaaagatcagatagttgtagatatgcagcattatttctgagggctctgttctgttccattggtctatatctctgttttggtaccagtaccatgctgttttggttactgtagccttgtagtatagtttgaagtcaggtagcctgatgcctccagctttgttcttttggcttaggattgacttggcgatgcaggctcttttttggttccatatgaactttaaagtagttttttccaattctgtgaagaaagtcattggtagcttgatggggatggcattgaatctataaattaccttgggcagtatggccattttaacgatattgattcttcctacccatgagcatggaatgttcttccatttgtttgtatcctcttttatttcattgagcagtggtttgtagttctccttgaagaggtccttcacatcccttgtaagttggattcctaggtattttattctctttgaagcaattgtgaatgggagttcactcatgctttggctctctgtttgtctgttattggtgtataagaatggttgcattttgcacttcttttgttaaatttattcctgccgggtgcggtggctcacacctgtaatcccagcactttgggaggcctaggcaggtggatcacctgaggtcgggagtttgagaccagcctgaccaacatggagaaaccccatctctgctaaaaatacaaaattaaccaggcgtagtggcgcatgcctgtaatcccagctacttgggaggctaaggcaggagaatcgcttgatcctgggaggcggaggttgcagtgagctgagatcgtrccatcgcactccagcctgggcaacaagagtgaaactccatctgaaaaaaaaattttattctgaagtatattattttttgatagtgctataaaagcaattgttttattaattttatttttcatttttcactgctagtatatagaaatacaactgatgttcgtatattgattttgtatcctgccaccttgctatacttgcttattagtcctaatagttgtttcttagtgaattccttaagaatttctattaatatwtacaagagcacgtcatctgcaaataaagatcattttacttttttctttccaatctcaataccttttatttgattttctcacctaagttccctggctagaactctagtacaatgatgaataaaaatggcaagagcagccatccttgttttgctctgggtgtttcatagatgccctttatccgggtgagggagttttcttctatgactagattgttgacttttttttattatcacaaatggatattaaattttgtcaaatgctttttcttcatatattgagatgatcatgtggtttttgtcatgtattctattagtatggtatattatatttattgactcttgaatgttaaatcaacattgtgtttctatgattgcatttggttatgttgctggattcagtttgctagtattttgttgaggattttgtgtctatattcataagaggtcttggtctttagttttcttttcttataatatgtttctctgggagggagaggtcgtttgttttttagtttcgtttttttttcttttttgaaacagtcttggtctgttgcccaggctggagtgcagtgacgtgatcttggatcgctgcaacctctgcttcccaggttcaagcaattctcctgcctcagccttccaagtagctaggattacaggtgcccactaccacatcaggctaatttttgtatttttagtagagatggggtttcaccatgttcaggctggtctcaaactcctgacctcaagtgatcctcccgccttggtctcccaaagtgctgtttctctagttttggtatcagagtaatactggtctcataagagttgggaagggcccctctccctccatcttttttagtcttcgtccagttgactgacttttgtgtgttagtgtgcatgaattttcttttcaccacacactctaaagtagacacttttaacaactgatgaattccctcatatagagtttctttgttctatcttgatcttttttcatagaattatcttttgttggggcacagatatgcattatcagagttgtttctcttcaagcagagaagaacaaattatttaggagttccgtttgtgcatatcgatgctatgtatactgttagaagaatcacatgatcatttaagtgtcaaactgagagtcaaaagacttggctgggcagggtggctctcacctgtaatcccagcacttgggaaagccaagttggcaggattgcatgaggccaggaactcaagatcagtctgggctgcatagagagaccccatctctatttataaaaaggttttgaggctgggcacggtggctcacacctgtaatcccaacactttgggaggccgaggcgggcagatcacatgaggtcaggagttcaagaccagcctggccaacatggtgaaaccccatctctactaaaaatacaaaaattagccaggtgtgttggcacgtgcctgtaatcccagctactcgggaggctgaggcaggagaattgcttgaactgggaggcagaggttgcagtgatccaagatcacgccactgcactccagtctgggcgacagagtgagactccgtctcaaaataagtaaataaataaaaaataaaaggtaaacactcagtgaaataaaaaaaaattctatgggatataggaacaacaatgacaatagtaaacatatgttgtatacttacactagactaaacagttcacaaatactgaagtcaggttttctggcaaaacaaccagctctgctgtgaaaaaataaaatctccagttccagacagaaactgaagattgtaggaagagaaataagacaactattctcagtcactacagaagatcataataaactcctcaactctctgttggataaattctttacaaatggaaattaaaatagtaacacttaaaatgtatagtaattttaagctttaaagtgctttgcatgttattcattcagagcactaaatctaaaacaatttaggccaggtacagtggctcacgcctgtaatcccagcactttgggaggccaaggtgggcagatcacctgaggtcaggggtttgagatgagcctggtcaacatggtgaaaccccgtctctgtgaaaaatacaaaaattagccgggcgtggtggmacgtccctgtaagcccaactactcgggaggctgaggcaggagaatcgcttgaaccccggaggcagaggttgcagtgatccaagatcacaccactgcactccagcctgggcgacagagtgagactctgtctcaaaataaataaaaaataaaaggtaaacactcagtgaagtaaaaaataatttctatgggatataggaacaacaataatcatagtaaacatatgttgtatacttacactaaacagtttacaaatactgaagtcaggttttctggcagaacaaccagctcttctgtgaaaaaataaaatctccagttccagacagaaaatgaagattgtaggaagagaaataagacaactattctcagtcactacagaagattataataaacccctcaactctctcttggataaattctttacaaatggaaattaaaatagtaacacttcaaatgtatagtaattttaagctttaaagtgctttgcattttattcattcagagcactaaatctaaaacaatttaggccaggcccggtggctcacgcctgtaatcccagcacttttggaggccaaggcgggtggatcacctgaggtcaagagttcgagaccagcctgaccaacatggtgaaactctgtctctgctaaaaatacaaaaattagccaggcgcagtggcagacgcctgtaatcccagctacttgggagactgaggcaggagaatcacttgaacctagraggcggaggttgcagtgagccgagatcacrccattgcactmcagcctgggcgacagagtgagactccgtctcaaaaaaataaaataaataaataaataaataaaacagtttaagcatctgctctttgaaatccaaataccatttaaggtactctaagccttaatagctgagtgaaaatacagtgttggagttttacaaaattacctgtattttagtaatttttttgtcaggccaaacttaattatctgggagaaatatatatagatagatagatatgatatatttatatgtgtataatatatatttacatatgtgtgtaatatatatgtaatttggatacaatttcctattcaattgatttcagcagaaacgtattaaatatagaaagtagtactgtatagcagcagtccccaactttttttggaccagtgatctgtttcatggaagacaatttttccacagatagggtgcgggtggtctggggccattagatctcataaggagcttgcaacctagatccctcgcatgcgcagttcacaatagggttcgcactcctatggcaatctgatgctgccactcatctgacaggaggcagagctcaggcggtaatgtttgctcgcctgccactcacctcctgctgtgtggcctggttcctaataggccacaaactggtactggtcagaggcctgggagttggggactcctgttgtgtagggaggaaacacacatgcaagagacagtgttctatttgatgttttctggagatgctatcgtgaagacactgtagacttacctttttaggcttagaaaatgtttatattaaatctcaactgtcagagtccagattgaaggctgttctaaaggcatgaccttattcatcataacacttttgctgctaaaacaagcttcagacacattcagtacattttgttttgatccaatatttatttgatccagaggcytttccttttgaagggcgttttggaaacagccttatctgtaatcatgtgtactaattgaataacgtttacactttccagtgcaaatttgcttaattttcaaaggaaaaarggaaaacaaaaacacttctgacataatcagttttcactgagattgtatagaatagagattttccatctcctttatgaaaaattcaaatgacatggctattcatgaaataccatattacataattaccaggtttttcactgaaaactattgcccaaatagtctgggtaagcaaattcatcatcacctctggagatacagtctgttataactaatgaaatccagctaagatttgtattcaaatatttcctgactctaaaatgaaagagttgcttttataaaattttcaaaattgtgagaacagatgtgtttgccatgtaaaaacattttggttgtgggaggtggaccacagctaaccaattgttcacaatagctaacattgtagaaccttcagtattaaattcactaactcacttcatcatcaaaattccctatgaggcgttactgtgctccttgcataggttaccaaactgaagctttctcagagtcacatagctaagtaaatgttggtcccgagatttgactccagtgttctctgatgccacaggcccagttctttacctgcagtactatcatttgggaataatttggtttctgcagccataatatataatttgtgggttgctttcctttcataggtatggacaaacactatgtcataaaatcagagctacaacttaaaagcctctaaataacaccttgagataacaaaactgtatcttaggttctaatatatgtgatcatactatacaggcagtccttggtttgcatagtagtctgggacagtaaaaaatggtcrtgcaaactgaaaccatgcaaaacaaacttaataattaatggggaaatttacaattgttttgtgatctttaaatatttttgtgaaacattaaaaagtctcttactgttggttataaatatatatagaaatgaaaatatagtaaaactacttagtacttcataatttaaaacattaggaayattgagagttaaccttttatttctttgtaaacagcttatcaagagtattttgatcttgccttcccataaagcttagggccgggcrcggtggctcacgcctgtaatcccagcactttgggaggccgaggtgggcagatcacgaggtcaggagttcgagaccagccgccaggctgaaaccccatttctactaaaaaccccatggtgaaaccccatttctactaaaaatacaaaaattagccaggtgtggtggcgtgtgcctgtagtcccagctgcttaggaggctgaggcaggagaatcgcttgaacccgggaggcggaggttgcagtgagcgtaaatcacaccactgcacttcagcctggtgacagagctagactccatctcaaaaaaaaaamaaaaaaaaaaacttaggacactgagcaagaatcttttctatgctttggcaaattgtcatcctcatttctaagtttggatcaccttccaacattttatcctctgcactttaaacatctggaaatatctttgtgagtacctttaatgtgccagcatcacttcctcttcgacattttcatcctttttgcaactactgtactgtacttttctttttctttttctttttcttttgagatgaagatggagtctcactctgtcgcccaggctggagtgcagtggcacaatctcggctcgttgcaacctccatcccccgggttcaggcaattctcctgcctcagcctccccagtagctgggattacaggtgcgtgccaccttgcccggctaattttttaaaatatttttagtagagacggggtttcaccatcttggccaggctggtcttgaactcctgacctcgtgatccacccacctcggcctcccaaagygctgggattacaggcatgagccaccacacccggccatactgtactttttcatttaatagattgaaaaatttgcctccactaaatttctttgggtgmacatctaaagtccctcaaacagcattagtgtcaacatttccatattcagttatttcttctataactccatttaggtagttttggggatttttttagaggcagggtttcactatgttgcctcagctcctgggcccaagcaatgcttctgcctcagcccctggagtagctaggactacaggcacaccccactgcacctggctccatttatgttttttttttcagatttcatttccaacattgtcactctttgttgctgtcctttctttcttgtaattcatttttgtaaaacatcacatggatttatcactaggagacaagacaaggcaactacatccttagctgtctatgagtgaactgaataacagatacstagtaaccaatcactggccgactttgaatgaagtggtgtcattggccgttggtcatgatgttatgtagtgmttttatagactgaagtgctggcagcaaagattgtgcgttatgcattgctcacaatcaatrtatttggtcattgaaatttggaccatggtttgaggagtagctggtgttttaactaaagcatagtaactgaaacttacccatatyagaacctcgccaagagaggactaccatgaaagttaaatgaggggcattaggttccataaaggatcataaaaatactactctactctattatacatttacatatacacatgtgtatcctaaagtaataagctagttttaaaatattaaccatacttaatgattaatatttattatatctaattataataattttacttgccacctagggatttagaagagttcagagggatttaatgtatgatccaggaagtttgaaagtttgaattgggccaggcgcggtggctcacgcctataatctttgggagtgtaatctttgggaggccgaggtgggcrgatcacgaggtcaggagatygagactatcctggctaacacggtgaaaccccagctctactaaaaatacaaaaaaattagctgggcgtggtcgtgggcgcctgtagtcccagctactggggaggctgaggtgggagaatggcgtgaacctgggaggcagagcttgcagtgagccgagatygcgccactgcactccagcctgggagacagagtgagactccatctcaaaaaaaaaaaaaaaaaaaaaagaaagtttgaatagatactttcctttagatatgaagacattcagcatcaattcattgctcttaaagcagatctcatgatggtttattttttaaaaagaagaagaaagaaaagaaaacacaagtgcagaaggatatgaacaccatgatacttcttatagaacrataatgtaaacaatattatttggttattgagaaacatttacattataaatgtaaaaactcataattcataatattyacccatatggaaggagagaaaatggtttaaaatttttccacattgcaatttcttatatacctatgtttaatgagacagtattttatatggacacctgagtgtttttcatcacacggtaatacttacatatcacattattcaaattaattactaatatttaaaattcctattttggactgaaggaattgaattgacttataagttgttcttttagccctaaaattctgtatgtattctttgacttttatattagaaaccatcaaagctgggcgtggtggctcctgcctataatcctagtactttgggaggcrgaggcagggggctgacatgcgcctaggcattcaacaccagcctggacaacatagcaagactctgtctctacacacacacaaaattagccaggtgtggtggtgcatacctgtagtcccagctactcaggacactgaggtggaaggatcacttgagcctgagaggcagagcctgcagtaagccctgattgtgccactgcactccagtgtgggtgacagagygagaccctgtcttaaaaaaagataaaarctatcaaatrtagtgcgtgtttattttggggactaaatgcttatttttaaggggatggttaaagtactcagcattatttagggagttaaagccttaggttttaaacctgatttggggttgagctctgggaaggaaaagatgattgattcataggcaccctgatacagtcacttatratctgaaaagcagatgtactctaaggcactcaaaataaaaataacaccrgtcctatgcttatctcttaaagtcatgttgttttctgcaaggtgttaaaaatcaaaataagattgttctaataacattgaagtttcktcagtatatgtgtatgatacaagcgaaattgatgggtaactacttgcagtataattcttttagaattatgtacttttagattgacttaccagaactgctgaaataaaaaacactccaatttaatttgaaatagtgggaacattggctctgctgcagtgattttaagtgtatacatgcccgactgtgaatggattaagttcatcattggtgctgccttgaggtgattcagaaactttcttttgccattgcaggtagagcgggaaaaggccattcttttggccaacctacaggagtcacagacacagctggaacacaccaagggggcactgacggagcagcatgagcgggtgcaccggctcacagagcacgtcaatgccatgaggggcctgcaaagcagcaaggagctcaaggctgagctggacggggagaagggccgggactcaggggaggaggcccatgactatgaggtggacatcaatggtttagagatccttgaatgcaaatacagggtggcagtaactgaggtgattgatctgaaagctgaaattaaggccttaaaggagaaatataataaatctgtagaaaactacactgatgagaaggccaagtatgagagtaaaatccagatgtatgatgagcaggtgacaagccttgagaagaccaccaaggagagtggtgagaagatggcccacatggagaaggagttgcaaaagatgaccagcatagccaacgaaaatcacagyacccttaatacggcccaggatgagttagtgacattcagtgaggagttagctcagctttaccaccatgtgtgtctatgtaataatgaaactcccaacagggtcatgctggattactataggcagagcagagtcacccgcagtggcagcctgaaagggcccgatgatcccagaggacttttgtccccacgattagccaggcggggtgtstcatccccggtagaaacaaggacctcatctgaaccagttgcaaaagaaagcacagaggccagcaaagaaccaagtccaactaagacccccacaatctctcctgttattactgccccaccgtcatctccagtattggatacaagtgacatccgcaaagagccaatgaatatctacaaccttaatgccataatccgggaccaaatcaagcatctgcagaaagctgtggaccggtccttgcaactgtctcgtcaaagagcagcggctcgggagctagcycccatgattgataaagacaaggaagccttaatggaagagatcctcaagctaaagtccctgctgagcaccaaacgggagcagatcgccacattgagggcggtgttgaaagccaacaagcaggtaatctcattctactggtgaaagcatgccagtcaaagctttcttaactaatttattccctaattttattgagtatcgagtatcgtcragatgagagttcagattcttggtaagtggataaataaaactgtcccagtgccagatcagaatgtcataataattattgtttttaaatgatgaaatacctgtgcccagttaggtggaggcagaggtgaggaacttaaagcaggaacacaggagaagatctagatgcctttctgcagatgtagaaaggcagctcaggcggtgctgggctgaagcctggcagtgagtggctgtggaaacaggagatggagggtggcagaataggctggcaaggcaggttacaccaaccagggcgatacagcaagaaagacaaacacccagcaggcagctagagcaaacagagggaaatctgggtacatatggtgaagaaggtctgatggccaataactggaccccagctttggagctggaggttcagattcaagactcaatttctaggagtatagcaaaattattattattwttwttttttatttttgttttgagacagagtctcgctctgttgtccaggctggagtgcastggcgccatctctgctcactgcaacctccgcctcctgggttcaagcgattctcatgcctcagcctccgaagcagctgagattacaggcatgtgccaccatgcctggctaactttttgtggagacagaatttcaccatattgtctaggstggtctcraactcctgacctcaagtgatccgcccacctcggcctcccaaagtgctgggattacaggcatgaaccaccgcgcccagccaagtatagcaagattaaaaggagtgttttgtccttcatcccaaacttagagaaacaagagcgctaaataaatgaataagtcagggatgaaaggcaagacaactgtgaggacctgagtgagtaacagaaacaaagccagacagattgttaccaacaaattaaatagtttggggccactttagcaaggaaataatagagagtgtgtgtgagagagtataagaatgagctctacctgtgctactgaccacgtatctgaaatttaggttcatttgggatgttaacccacctgggtcagaggttaagtaatagggagcttttcctagctattgatcttgtccttctggacaagtagtaatgttacaacatgaacctgtctaattcccagccctccttaatgactgaaattgttttcaccctgagttttaccttggtgggagtgctgcgaaatataggcaggaaaattattttcacctttatttagtttatctgaaaagatattcttgaaagacacatatttgagaaaggtgctgaataaatgttggtgttgataaagagaagcaacaaagcaccaaataccctcctgcaaacgcaagcagtgccagtgaatagtaggtcaagggagctcttggtctttggagaatgaggattaatttcagattcagagtgtcttctccatttgccatcatctggggaaaaccacgcccttattatctcatctacagtgcagctttcaagtcctcatctctagttcccataaatctatttatataattgacatctataccataagccataatattgtttgcactattaacatgttttatataaacctaagggcaaaatatgactttattttatgttgtcactttagagaaatagaaaagattagagtgaatgaaaccatcattctcagcaaactatcgcaaggacaaaaaaccgaacaccacaagttctcgctcataggtgggaatcgaacaatgagaacacatggacacaggaaggggaacatcacacaccggggcctgttgtggggtggggggaggggagagggatagcattaggagatttacctaatgtaaatgacgagttaatgggtgcagcacaccaacatggcacatgtatacatatgtaacaaacctgtacgttgtgcacatgtaccctagaacttaaagtaaattaaaatatatatatataaaataaataaaataaaaaaagaaaagattagagtgaatgaagaatttgtgagagatctgactctaattttaggtcggaataaaggaatttattattrtaactctgctataatttaaagacccaatgattcagagtggtcataaataaccaataccatattagataaggcttacacaaggacatgctatcctggggcattcttgatcaagccatccagataacttctctgacttcttcctaaaggttgaatattaacaatttaggtctgggcgcaatggctcacgcctgtaatgccagcactttgggaggccaaggccagtggatcacttgaggtcaggagtttgagaccagcctgaccaacatggagaaacaccgtccctactaaaaatacaaaattaaccaggcgtggtggcgggtgcctgtaatcccagctactcgggaggctgaggcaggagaatcacttgaaccccggggggcggaggttgcggtgagcctagattgcatgattgcactccagcctgggcaacaagagcgaaaatctgtcttwaaaaaaaaaaaatcaagatgcttaactgaaacagaggtatagataaggacacttggccaaccaacagagactaatttgtgaacaagcattcattgattacatattttctgggaggcagtaagtagggatgcaaaaataaatgacataatctagtaggaattccgcaattgcctgtagctgtttacaagacaggacttatcaagcactttagagtgatgtaaacagtaccacaggaaatcagaacagaacaaagcattcctagctgaagttttattttcactgtgctttgtggtacaggttgagtatcccttttccgaaatgttttgggggacragaaatgtttcagattttggattttggacatttgcatatatacataatgagttatcttggggatgggatccaggtccaaacatgaaatttacttatgtttcatgtattcctatatacatagcctgaaggtaattttatacaatttttttaatgattcygtggctgaaacaaagttttgactgccactcatgacatgaggtcaggtgtagaattttgtggctcatgtcagcactcaaaaggtttcagattttgaagcrttttggattttggattaaggatgctcaacctgtaccatttgcattacattagagttacagtctatatgggctcagtaaattaaatgaaaacacatttctagcaatgcatttggtctgcacgttcatgatgttggggctgttgctgtgatgcttattgccgtaaatagcttcaagtattaacagatgacattcactatatttatttagacattgtgaaatgtttgtttttaaggttaaggtgagaattctggggtacaggggaaaaaaggaaatctccctgttttaaaatasgcattctactatacagccataagaaagaaaagaatgagatcatgtcatttacagggacatggttggagctggagaccattatccttagcaaactaacacaggaacagaaaaccagataccgcatgttctcacttataagtgggagctaaatgatgagagcaaatagacacatagaggggaacaacacacactggttcctgttggaggctgaaggatgagaggaaggagatgatcaggaaaaataacaaatggatactaggcttacakacctggtgaagaaataattggtacaacaaacccccatgacacacatttacctatgtaacaaacctgcacatcctgcagctgtacccctgaacttaaaagttaaaaataaataaataggcattctgtagtctctatgaatcttctcatttacttaaggattttttcataggcacagtgccttctgatgaagtcagtaaatgcttatgaagcaccgtccatctagcactgtgctagatgctgaagattcaaagaagactaacacatggtccctgccttccagaagactcagcctcctggggatgtcaggatagaaacacaattacagttcaacgttacacatgctgtaatccaagttatgagaacaatgcagaggaagcaactaaggtttcctagaggagcggaaaagacttcacagaagcaattataccttagtttgttattaaaggataagaagttgttttccagaggaggaggaagtaattccagacagaacagtaggtagagaggctttggagtgacaaaatagaataatatattcagggaatgctcacaaaggcctatgtggctggaaataagactttttttatttagaaagtcaactttggaatgtgtggagaaagtggtgaaagcagaaatcagcaaatccagtgagttatggatacttaaaattacttaattctggaaaaactttgcacagtcaatggacaaacaaatctacaaacaaaactgaggctttggggtatttgtcacaaacaataaatgattttgtatttctgtttcagatctagctcttctgttatcccccaytttattccccttagatactgaccatgggattctatgtgcttacaaatttgttacatctacatttcacaacttaaacatacttttctgttttaaatgaatatgtgtctaagctttttaaacactaaacaactgccgtttttccccaggtcaatttctgccttgtggataattttctgaatctgtaatatttctgaagattcctccaagtatttacagaacatacagaagtattttatgagtaaagtctcattttaatctgaatttaaatccaatcaaaactcacaagaaactacttcggaatcaaaacagtaacaaagtaccctatcccaacattgatttaattaagaaagaatttatttctatagatgttggcactttgcatatgaaggtttgaagctgcccatttcaagcaacaaaaagaaatgttaaaaaccaaggtagtsttcctgggaaatcccgttagtaatggatttctctgctagtaatggggttgttcattagtatggggtatttgtatacactttgaaaagttatagtttccagtttgtaaaaatcatgtgttcccagtttggcttcaacatgcaaactgtgtgctatgcatcaaacaggcaatccctaagtatacactgattttatgcattgattcagtcagtgtgtttttttacttgtgtgtgtgccagggtagctcttgatttgaaacactattaattccaagaacttcggacatgcccaaatcccagattcaaacaaatgttttaactcattcaacattttataacccctacttttatggagattttgaaggaattatatttcactatatttcattgtttggacaaattgtatgcaaattagaaagtaattagttctttatcacttcttttccttaaatgtatgataacatggatttatagtttatcatatactcatattataaattacaatggtgtatgtcttttattctatgttttgggcccacagagcacaggtgacaaaatttgagttctaacatattccaatttgattattccwattgaagctgtgcttctttactaaataattggtaaaaaaattttttttghataaagtttcattttggctccctccttgtcctaaaatcgcatactttcagcaatctgcattaaatatttattaaactactgtcattctcttagctcctgatactgactctggctcgcagcgggcttctagggcaatttaaccacattatgaattcacaacacattttgacattaaagaaaaacttccctgtgtccaaagcgcatacctatgtttatataaaatgtaaccaaatcaatttcactttccttttataaaagaacataataggcacagcatgaagcaatctgtatgatggattttcctgatatgaaaattgtaagcagtgtgattttctgctttagacagctgaggtggcgctagctaatctcaagaacaaatatgaaaatgaaaaagcaatggtgactgaaaccatgacgaagcttagaaatgaactgaaggctttgaaagaagatgctgcaaccttctcatccctgagagcaatgtttgcaacaaggtaacagtattttcttcctatgactgggtgtggtaggtggggwaaaggctttaaaattcacagccctgcctttgtgcatgttgagtgtattcggtgagtagtctaggatggctaagtgtgaagaaaatctgtggaagtccactctgacrtatctaaaagcaagccttctgtgctgttttccagagccccctactgaacactctggatccagaaattctattacataaaaatattttttaagtaagctaatattaataggttgtttctagaatttatgcaccccaaagagagtctccctccaaataaaaagctttcaataaggraaaaaaccccacttcctagaatagctaaatattatcacctctgaaatagagttctgtgaaggaagtacatgaaagtatataaaagtgccttacctttagtactgtgcgagaagatactgtcataatgaagattaataatcatcacatcagctaattacttataattttttttttttttgagacggagtcttactctgttgcccaggctagagggcagtggtgcgatctcagctcactgcaacctccgcctcccgggttctagcgattctcctgcctcaccctcccgagtagctgggaatacaggcacctgccaccacgcccggctaattttttgtacttttagcagagacggggtttcaccctgttagccaggatggtctcgatttcctgacctcatgatctgcccgcctcggcctcccaaagtgctgggattacaggcgtgagccaccgcgcccggctgtattttgtgtttaaacatgaagtgattgttaagaatgtatttgatttgaagttttcagaatcttgagattttcaatatactgttgaaatacattttttgctgtcacaatgcagtgtcaaaaaagacctacttttttttttttttttttgagatagggtctcactctgtcacccaggctgaagtgcagtggcgctatctcggttcactgcagcctggacatcctggactcaagcaatcctcccacgtcacctcagcctcccgagtacctaggactgcaggcttgcactaccacacccgctaatttttgtggtttttgtggaggcagggtctcgccatgttgcccaggctggtctcaaactcctgggctcaagagatccgcccacctcggcctccaaaagtcctgagatacgggtatgagccaccatgcccgaccaaatcctaccaattgtgtatcttgtatgatgcaaacttggtgcaaaattcacgaataattactatggctttacttgcagatttagtaaataatttacatttggctgatacatgtaaaagtgttaaaaacaaacaaaaaaagatctcttgagctttataggagtcccccagaaactgagatcacaccactgtactccagcctgggtgacagagcgagactccgtctcaaaaataataataattttttataaaaaggaattgttatccccaaattgtctattttcacagacttttttttggcatgaacagtatttgttattcatattttagcgggtaaataaactcagaaaaaaaacaaaacaaaattcagaatgagctttttctccacgccacctctaccttccaaatgtatatgtgccaggttttgcctttggtaaggaaaaaagatcactaagcttatctttcttcttcggcacaagtatgaaacctgaataaagatgtttcggacagcctgctgtatctgtatgaaaccttgtgaaatcttggtttttgcagggttttctgttttttgttttttgacaactcattgctctgtcatctggttgagaaatcattgaaaatactcagttttctaattcaggcaaatcagtcaaattgacaagaccaacagctgcaatctatactaaactaaaacgtataaatatagataaggaaatgttttctttataaacattattattttggatactataggcatagcctataataaacttgttacattcctccaaagaatacaatgtcatacagtaaaaagagctactgtaagacacttcaggtatagtggacattgtgtgagacttgactgttattcgtctgttacacagcagccccacgataactctgtccctggggtttaagacattgcctattaagactgtctccatatgggctgggtgcagtggctgatacctgtaatcgcagcactttgggagactgaggcaagaagatcacttgaggccaggagttcgagaccagtctgggcaacacagtgagaccctgtctctttaaaaaataataatgactgggcgtggtggctcatgccagtaatcccagcactttgagaggccaaggtgggaggatcacttgaggtctggagttcaagaccagcctggccaacatggtgaaaccccgtctctactaaaaaaaatacaaaaattagcttggcatggtggcacactcctgtaattccagcaactcggcaggctgaggcatgagaatcgcttgaacctgggaggcagaggttacagtgagccaagatcacgccactgcactccagcctgggcgatacagcgagactcagtctcaaaaaacaaataaacaaaacaacaacaacaaaataataataaatttttwaaaaatgtcccatatatctcattgtatggatgaacatatattccarttttctgctattgtgggttatctacattctattgctagacctttaaaccagtcttctaaatttctaaatttcrgtcaaatttattacttttcarcttaastcccaaattcagtttcaccaagattttcctctgaccacttctctgttttggttccagatgtgatgaatatgtcacccagttggatgagatgcagagacagttagcagctgcagaggatgagaaraagactctgaacactttgttacgaatggctatccagcaaaaactcgccctgacccagaggctggaggacttagagtttgaccatgagcagtcccgacgcagcaaaggcaaacttggaaagagcaagatcggcagccctaaagtaagtggggaggcatcagtcaccgtgcccaccatagacacttacctcctgcatagtcagggcccacagacacccaacattcgggtcagcagtggcactcagaggaaaaggtatgcatgcagcratcttcatagtacggtgcagtggccagattttagttaactgcaaaaataaatgtgctcttgttgtggaggatggaggaggggaavsaaaagaaaaaatgggagctggcatataaatggtcttgctaatgtgggtctttccagatcaaaacctttttgataattgtgtttatgtagtcctttctaaccccctgcccaatccctcctcttgattaatcgtaatataattttcaagtgtctgttaatatttttgctactctttgtatgtgtaaatatgcctctcccttacctccaacctgagaattggtagataaaggtggatattaagaatgaagctgtgttctacctgggttataattttaaaagtcattgtacctttggaaatggtgctgtttatcagcttctctttaacggggcaaggatatgaatatgttctcttagggaaacttttgtccatatgaccaaaactgatgacagactgaaaggggatgtctatatctagataaaatgggatggaatacgcacagtccttttcttgaaagcaggtttttgtgctttttcatttggcatgggaatattgcccagagaaaccacttgtaaggtttttaggggcttgattttgtgagtcctggctgttgagttacttaccctgtattttcggttaatggtaacatttttattttaggagctttcattaaagactcaaataatatattttctatttgcggttcaagctgactaactgtaataaatcttttttccagtatccagaacagtttccaaatagggttgtatcctgatgtggaaactaaaaaaaaaaaaagcaaaaagattgatttacatatttaaaaaattaaatgccartataaataatgttgtcactggtgaggcgttaaaaggtaattaaagtraaacttttttgtttcctatatgtatttttcttggatctcctgcaagacaattttcaccttccctttgtgatcagagccgtcccaggacttcaggggcttcctacctacagaatttattaagagttccccctgatcccacctccacagaatcatttcttctgaagggccccccttccatgagtgaattcatccaagggcaccggctcagcaaggaaaaaaggttaaccgtggctccaccaggtaaacattttttccttgggtgcatgtgatgcaaatgattagttgaatagactctycccttccttccggtcactcaggctcacccagctgcagagtatacctttgatgatgtgtaaattcctataagtcaagtaaaaacttccttacacttagcttcccatttcctccttcactcatattccttagaatgacagacttccatttaacagccaaagatggcaaatgagagttggaaggaatgggataggtaaagggaaattagcaacaagcacaacgcacacacacttggatcctatttgcagtttggtagctcatggcgattccatcttggtcagatttggccagttctctcttatcgtttttaatgtaatttccgtaaagggagagccatatgtataacaaggcttttgggctgatttccttttgtggtgactcagaacgtctcctcaatcattatattgagaataaaagtaaaaccttctaagattttgctcctcaagaacatttaggtcttagtataatgttcttgtagattgcaggccccccactggttaatgcttaccaacatgttcacacttagcttcactattttgcatttttctttcttccttccttcctttcattctttttacttgttctatgaagaggcctaacttgaaaatgtgacatatggcaaatagagaaaattattcttgcaaataaaaatcatccttttaaggaatccctgcatgtgagtatagggcagaagtggcaaacaaggagcccataaaccaaagtaagcttaaaggcagctgttatttgactattgccagaaaataaaaaataaaactatttaagttagttattgacagttaaaaattcaagagattttatatgaacatcagtatttctggcctcttttggaagattctgaatatctggcagccctaggtctgcgttcacgcatgtcaacacctgttggagctctgtagtggctgctgctgttagggcaagcttcgcactttgccacagtcaccactcctccttattacttatacccagcctgctatcctcatttctattctctcctggcccctcctgtagtctttgagtttgccaccgttgaaatagaattttttttttcattttaccttaattcctttttgcaaacctcagcctttggatctctaatactttccttatctgattcatgaagtcagcctactgattgggattaaaagatgtggtgtagaaactgatagtgcatttcacgttctaaaggtgtttgaggaaattggtagtgataatgagttggaatggtgtaatagccaaaatatacacctaagaagaaaaaaagtaaaaactgcttggtgtttttaatttcataactgatttcctattgttttagacctccttggaaggtaccttgaagtattctgtgaatcaccaaagtggtaatgatttatcaggatacctaactcggataaaacccacaagtcttctttttagtgttccaaatggatttagtagcactatctactggaacttagaaaagaaattggtatgattaataaataactcctattgctgtttaattaaaaagataacatctcaataaggttaaaaattaataatcaatgttaacaacaataactgttttcatttttgtatgactggtttttgtttacatgratatataytttatattgttatcattacattgtttaagccatgaacattatatcacaagcttttccatgttgctatctagtcttgtttttatttgttaaagttattgtatcatagattttgtttcagatgctgttatcacattaatcactacttctcttcttgtccactgaggtagtttttcattatttgttatattatagagcactgctgggaataccctcatgcattcagcttctcatctattacatttttctcaagagtgagatcactcagttaaaagttgaacatccttatgttttttgctccattctgatgttgctgtcaagaagggtatatcaatgtactaaaagcccataaaacactttccctttttcccacattgggaatctttctgctactttatccacactgtgcacatcttacaactctaaagtcagttagcatacatgaatgagagtaccatatattgtcttaaactctttagttttgaataaccagaaaataccattgaccttagaaatgattactatttatgagattcgaggccggctgcagtggttcacacctgtaatcccagcactttgggaggccaaggcaggtgaatcacttgggctcaggagttttagaccagccttggcaacatggtgaaaacccgtctctacaaaaattagccaggtgtggtagtgggcacctgtagtcccagctactcaggaggctaaagtgggatcccttgagacagggaggcggaagtttcagcgaaccgagatcgcaccactacactccagcctgggtgacagagtgagacactgtctcaaaaaaaaaaaaaaaattagagatataaggaatgtggaattcagaataatcaccagaccagaaggtcatgctaatgacagcttaacatattgataacctttataattctcaccatttatgtaaagttaaaataataaaagaggaaaggaagtaaagctgttattatagccttaggaatttttaattatgtatcgtggaatcaaccagattaacgcttagtaaattattatcaaatcaatcttagcaacattttctaaaaggtcctagttaaatgaattactacagaaagtgackgaccatccacaccaaataaattgtagcttctacaaatatctgcattattaccaatatatgttaytttccctcagctgaactatatagggtaagacatatcaaacattttttatgatgcttttactatataaaatcttttcaataagccaagaaagagaaaakatgacatataataccagtcttatgttctatataagaaatatcataagcccatgggaaatagtagattttatgagtatttttaaattcaggagtttaaccattataaaatttgctagctagtaacaatatctattaatcattttaaaaggaaaattctctattaatgtatcagaatgtttttgataagcattgttttacatatatatgtatatatatatgtgtgtatatatatgtgtgtatatatatgkrtatatatatgtgtgtrtatatatatrtgtgtgtgtgtrtatatatatatatatatatatatatatgtatagttttgggggtttgtttttttttctyttttttttgagacggagttttcctctgtcacccaggctggagtggagcggcgcaaccttggctcactgcaagctctgcctcccaggttcatgtcattctcctgcctcagcctcccgagtagctgggactacaggcgcccgtcaccacacctggctaattttttgtatttttagtagagatggggtttcacagtattagccaggatggtctcaatctcctgatcatgatccgccatctcggcctcccaaagtgctgggattacaggcgtgagccactgtgcccagcctaaaatatatttttagtacatctttttagatgatttttaattattctaataagcagatatgggctttatttttctattgaggaccattgaaacaattacctcaactaaaaatgaaatcagtttaatttgtttttaatccttcagttgaagaattgagagaggtatgtgtcgtttaaaaatttaagacacagaacataaaatgttatttattctgtacaagagttactttcaaatagattttatttctatgagatggtaaacagaaagcctcatctccttaaatgcacaatttctccattctggagaatcaactatagggtgrggcactgattttcaacattagtagaatattgtatagtaattgattaatgcattatactgatcggtttgctgcattagtacaaccttttaagggaaaattctggcgtttccctctggctggctcagcttctgcaacctcagcccttacaattgcagtgcttctggccatggcttgcttgttaactttcttgttcttgactttatccttatcctggcacacaaattccagtgtccttccacatgctcatcttagttttcacagtttcagttaccagctgatctgagaagtgcctatcagccttgatgaccttgactcaaaagggaccctgttgtcatcaaggagtttgtaattrgrcagcagattgtatgtcttcacaaaattgttgcctattttttagccagcattttatcttgactccttaactacctaggcctatatccttctcctcctcctccgtcccctcttcctcytcctcctccgtcccctcttcctcctcctcctcatcatcttaccatttaatcaataattgcaatcagcctgtcagaatacgtaaagggaatccatgtaattcacaggcgggagttgttatttctgtagtaaagacctgactgcagcatttacacatgataaataggaaatggcaaacctggggaagcaagtttgaactcaatctggaagtaatagcctaagcagcttgctcttcacactgtgtttcccatgtcacccttttcctcttaggtatcttgcttctccctctcatttcaatctcctccttccttctgttcctccatccttccatccctccctcctgtctttctctgacacaatgactcagctagtttaagagaatggtattattttgaagtctgaaaatgtttctgtgatattttgctttttactgatctttaaagcaactcacagaagtgtattagccttagatacgtaatcaccccttgagatatatagtcaacagtacacacygacatgttcatagtaaaaactgcctttatgtttcactgcattcaagcaagtagatatttgtttgtttcacgtattgcaaagcctatgttcttaagcatgtaccaaaatcacatttatttcattaatccatttactcattcaccagaatgtaacaaaatttagtgaatatctgctatgtgtcaggcacttttcttggctcttgatatacaatgatattcaaataaaactcatagtctggtaggggaggtaggagacaaatatgtactgatgttaatagatattcctgaaataaataaaggaattaggatggttaggaacgtccttccagaagaaatgcaaggctggccatgaaaggtgactatatcgtaataggcagaaggtggcagcgcaggtatgggtcgtaagaagaaccttataggaaaggaggtcaacttgccccagtgccatgagctcagcactacaacctggtgcaggacttcgaagtaatagaaagcgaggctgcaaaggtggacagggacctgaagacagagggccaggttagtgagagcagacttaccacgggcatagcttagcagttttaagaataggatcagattttcatttgataaaatcaccctgatgacaaggtggagagtggattagatgtgggtaacatcgaagataaagaagcaggtacagagactcataaaatatgcagatgagaggtagtggagaccagaatcaaaactgtgaggaataggaatgtttaaatatgtcccaagttacaattcagttacatatttcatcagccagcatgtcctgtgcacacacgacctgctcttactgctttccatgttctgtatgtggaaggagatcagtcaatcttgaactcatggcctcagtattttgtactttataatttatattttttcctatagaggcttttctatttatgtgtattccacttccccatatcactaaactgtctttttccacaggattcaattcttgaactagtaggagtgaagggcagtctgttgaaacctgtaatctcttaggcttgtattttctttgaacatagtttccacagaattcttccctgtaggggaaggcctgggcacttcttgatgtcagaacatgttgtctttagtttggaatctgccaaaacaaaagttaaatcaaaaatgttaattcctgtcaccccagcacttcgggaggccaaagcaggaggattgcttgagcccaggagtccgagactggcctgggtaacatagcgagacctcgtctctacattaaaatttaaaaattagctggatgtgctggcatgcactcatagtcccagctgctcaggaggctaaggcgggaggattgcttgagtctgggaggtcgaggctgcagtgagccactgcactccagcgagtgatggagtgagaccctgtctcagaaaaaaaaaaaaaaagaagaaaaaatatattaattcacaaaattgtcaaccacatgttgagaaatacatttttatacttgctgtatatttttcaataggtaatggttcaaaaattttaaagtacaaagggtatacagtagatggtagatttctgccacaactgtgcccacccaaccttttgtatttttccagaaacattctatacatatataaggaaatgcatataaatatatacatatataaaaacatatgcattttacatatgtgttaataccattggcacaaccacagacattatgcatgccggtttttttcacttgatgtatctgggttcttctttcctatacatttatctttttgtttcttttgagtcagaagaagttatgaaggggaaggaagacatgcttgagctctttaagaaagcttggaatgtttctatgtgtgcaatagaaatatttcttgccaaatgataaaatgacagctacaagaatgtttctattcagaactattcaatagaaatatgatataaaccatatatgtaaatttaaattctctagtagtctagtagtcatgttagaaaaagtaaaaagaagtcaggcaccatggctcacgcctataatcccagcactttgggaggccaaaatgaaggatcacttgagcccaggagttcaagaccagcctgggcaacatggcgaaaccatgtctctacaaaaaataaaaagattattcgggcatagtggcatgcgcctgtactctcagctactcaggaggctgagatgggaggattgcttgagcccaggagattgaggctgcagtgagccatgatcgtgcaactgcactccaggctgggtgacagagcaagaccctgtttcaaaaaataaataaaaagaaacaagtgaacttaattttagtagtagattttaattgacacactatatccataatgtgatcatttcaacatggaattcataggtggctaacacctataattccactttgggaggccgaggtgggtggatcccttgaggccaagagttcgagaccagcctgggcatcatggtgaaaccctgtctctacaaaaactacaaaaattagccaggcatggtggtgcatgcctgtagttccacctactcaggaggccaaggtgtggggatcgcttgagcccaggaagcagaggttgcagtgagccaggattgtgctagttctttccagcctgggtgacagagtgagaccctgtcaaaaaaaatatatatatacgtgtatatatatatatatatatatatatatatatatatatatatacacacacacacacgcacacacacacatacacatacatacacattctgtttttcttattcagtctttgaaattcagtattatgcacttacagcatatcttgatttgaactagccacatttcaaatgctcaacagcctaatttcgctaagggctactgtgttggacggtgcagttctagaacttcttagttttaactagatagaatttccacacagaaatctaaatttgaataactaatgactgattttaaaataaaatttaagatggcatgtatttcggttttatttcttttcttttctttttttttttttttaagacagaatcttgctcttgttgcccaggctggagtgcaatggcacaatattgcctcaccgcaacctccgcctcccaggttcaagcgattctcctgcctcagcctcccaactagctaggattacaggtatgtgccaccatgcctggctaattttgtatttttagtagagacagggtttctccatgttggtcaggctggtcttgaattcctgacctcagttgatcctcctgcctcagccttccaaagtgctgggattacaggcatgagccactgcgccctgccctcatttttcttttaaactgacatagaccaaagtgctattttgctgattctgctttgtctctgattggtggcagtgctttttaaaatagatacatattaaatgtttgagccaggcgtggtggctcatgcctgtaatcccagcactttgggaggctgaggcgggcagatcacaaggtcaagagatcgagaccatcctggccaacatggtgaaaccccgtctctactaaaaatacaaaaattagctgggcatggtggtgcgtgcctgtaatcccagctacttgggaggctgaggcaggagaatcgcttgaacccaggaggtggaggttgcagtgagctgagatcacgccattgcactccagcctgggcaacaagaacgaaacgccatctcaattaaaaaaaaaaaaaaagtttgtacctatatacccttttcatacatctcttatttgttactagatctccttgtcaatataaaaacttaattacttaggtatatcctaacaaaacatattccttaaacattcttaaaacagtataatgacttagttttttaattaccgtaatgaagttgtaaaagcccatgtttcttattttaagcagagagtgccttaaaaaggtttaaaatgcatcctgccagttttaaatagcagaatttattgataccatatatatagactgaaaacacatcaaagtctttcaaggttgattatttcttgtgccttccttcttcccacagtaagagagaagataaagataatactgagtaaaccattccatgctacaaattggacccattcgacaaaaatgcaatacttagtagaacatctgatgaccatggtcctattcgtgtttttattttgttttatttttgtttttgtttactgttctctcctctgtccagtattcctgtccagaaattacatttccttaaaagatttcatattcaaaacctgagcattgtatgcaaaataagctatgatgaaaggatgaaactttttaattactgaagagatcaacatgaaaaactctgtagcaagaatgtgtattttatattagatcatacttttcaatccatattgactattttagtaccattatgtaattttaaagtcttttagattttgttaaaattttattaaatccatggaaattgaaagttccttattttaatccttaggagaaaaactataatttttctctaatatatccataaagtgaaagaagaagtacttatttgatattcttaattgttacatatttaagagcaagagtaattagttcatacttatgttcacctaagtccacccatacattgctgaggatagcggccttcagaaggtggctgtttccggaggagtaacagggaggaacaggtgggctgagatatacatgaggcccaggacattccaggcaataactgtctgcctctcctgactctgcccaaacccgaaatgatgctttctagctcacacaaaaatrtatatatatatatcagcaggcagatactcaagctgaaagagacattactggggttcgtttctagatcacagatcctgcctcaggctcactgaagtgaccagcctccacccagtaacaacaaactagtctaaatccagaataaaacaattatacattttaatcttaccaccttctacctgtgtgtgctgtccaccctcaagacagagaatagcccgtattccaccaaccagcaatcactagcctacaacaccaaatccacagtttctttggtatcctttgtgccagggagttgggtgctgaacaatctacctgtaacattcccttgccttcatatcccaaagctctgcaagcaaagaagwgttctggtgggcagctagggccatttgttgtagtccagagraagagagccatccgtatcttctgtgctgtactcatacctatttaatccaatctgctggcaccagtctattatattcaactgtttgcccccactgtaactacataacaaccacctctattacaacagtgattataaggcattatctgagagggtatatccaaactgtaccttgcaaagggacttctatctgcaaagaatactaagaaaacatattatgagaaagtcacaataggtacccagagaagccaatctctaggttaaccaactacttccctgtccatttctccttataaatgtgaaaggagagcctacaatgaagaaatcctggaagggcatctcccagctctgagactctctgatgctatgaattcaagttattctgtccatgactgggtctggaggtcactgtgtaaaatctacgcttctaaataaatgttatgatatctcagcatactataccatacttataacatgtatgcttataacagcatactatwccatatagtatagttcccaagaaaagggaatgtttcttcccccctaaaaaaaggaaaattcccattatctaatatataaaacaaacttttttgatgatttaaagtgactgtgtgttgtgaactgagtagacaaggcaggaaggagtagtgatgttcctgagttcttgctgaattctgacaacgtgccaacactttgatttctctgtcaaaatgggtgggatttgatatctaaaaaagtataccattacatatctaaaagtatattgttacatggaatatggaagccactgatttaattctggaatgtccgtcaacatgacagccacctaaactcctctgaggcattgtaaacggttaggaaaattgacctttctacacactaaatctggcttcagtggctctcctgagctctaagggagttgggcaggggcagcctgagctccggctgtgagcatagctcaactgatgtgtagttagaatgttcatggaaggcccaggcttgctacttcccattcctttattttaaatgatgtagtgagccaggcgtggtggctcatgcctgtaatccccgcactttgggaggccgaggtgggtggatcacttgagcccaggagttcaagaccagcctgggcaacatggtgaaaccctgtctctacaaaaaawacaaaaattagccaggcatgatggtgtgtgcctgtagtttcaggggaggctgaggtgggagaattgcttgagcccaggaggtgggggctgcagtgagctgtgattgcaccactgcactctagcctgggtgacagtgcctacataaataaataaaaagaaagaaagaaatgatgtagtgaaaatatagttacatagcacttatacctagactacttaaagtgacctagtaattaaacttatatagctcatcaaccagcaaagattcctagtgcaccacactcgttatagagcagggaagcatcgctgccaccctcagggattcctcttgcatatctctgtgttctgtcctccacacacccatctctttagtcatctattgattttattcaattttcctggcagtttccccagtgtattttacctgaaaggtatgagaggaaaaaggaaaagcacaactcaaaatggttgactattccattctttgttttcttcaaaaagtgtaaagtcataaagatgccatagaaccactaaattcattgtcctttgtcacctctcagccaataatagtcattgatatactctccataccacaaatttaaagttttttgtgaactgtacatgcaatagccaagtttattttaactttagtcattactggatcccagagattttctttctcttttttggcatatagattatttatgtcacttcagtatgcccagtccacagatgagatcttctgagggactgcttctggagccggccctcttgtgtgattgaattagtcagtgatggttctcaggactagattagattgttactcttaaaataattacttaaaaaaaaaaaaaaaacttccataacttgaaaattttgtggccaggtgtggtggctcacgcctgtaatcccagcactttgggaagccgaggtgggcggatcgcttgaggtcaggagttcaagagcagcctggccaacatggtgaaaccctgtctctactaaaaatacaaaaattagccgggcatggtggcgcacgcctgtaatttcagctactcaggaggctgaggcaggagaattcgcttgaacctgggaggtggaggctgcagtgagccaagatggtacccactgcacttcagcctgggcaacagagcaagactctgtctcaaaaaaaaaaaaaaaaawaaaaaagaaaggagaaaaagaaaagaaaaatttgcatttaagacttatatgaaaatacataatttattttgyagaatgatctagagcaggactgtcattttaactaaagttatttttggccaggtgtggtggcttatgtctgtaatcccagcactttgggaggccgaggcaggtggatcacgaggtcaggagttcaagaccagcctggtcaatatggtaaaaccccatctctactaaaaatacaaaaattagctgggcatggtggtgcattcctgtaatcccagctactcaggaggctgaggcaggataattgcttgaaccaggacgcgggaggcagaggttgcagtgagccaagatggcgccactgcactccagcctggactacagagcgagactctgtctcgaaaaaaaaaaaagttggccaggcacagtggctcacacctgtaatcccagcactttgggaggccaaggcgggtggatcacaaggtcaggagtttgagaccagcctggccaagatggtgaaaccccatctctactaaaaatacaaaaattagctgggcacagtggcgggcgcctgtaatcccagctactcaggaggctgaggcaggacaatcacttgaacctgggaggtggaggttgcagtgagccgagatcgtgcctctgcactctagcctgggtgacagagcaagactctgtctcaaaaaaaaaaaagttattcttagtggatataaaaattggtgtttttggccgggcgtggtggctcatgtctgtaatcccagcactttgggaggccgaggcgggtggatcacgaggtcaagagatggagaccattctggccaacatggtgacacgcacctgtaatcccaggtactcgggaggctgaggcaggagaatcacttgaatctaggaagcggaggctgcagtgagatgagattgcgccactgcactctggcctggcgacagagtaagatgccgtctcaaaaaaaaaaaaaaattggtgttttcttggtttgttttgtgttttagtttaaggagacacatttcctcatcttaaggacttttttgctgctctgatgctggtcatctagtccattcttttgctctaaactgagccttgcctcccagttcttcattgcacttcagattgtgtcttactacaaagagaaaattagtctgtgatcagtttggatcagaagaactgaaawtgtacatttagaatagaagccagggatgtgatgcacacccgtgatcccagctactcaggaggctgagatgggaggatcacttgagcctgggagttagaggctgcagtgagccgagatcgtgccactgcattccggcctgggtgacagaacaagaccctgtctctaaaaaataaaaagaagaaaagaaagaaatttaaagtaggaagggctaccgtttgcttctggccaagcttcacctctaaccataggatcttttaaaagactagttctgaggtcctttactctgagtaggtatttatggaataagccattatgtattgacattagaatcagttaaacataaatttttttctctttttatgcactacttgacatcaaaagcaaaaagaggtaagttggctataaacctgtaggtgaacctaatttttcttagtagatttgttcctgagtagctttgcttcaattaaatttctgtgaatcaaatacttttacattaggaagattgtcattggaaattcttattcttttctttgaaaatgaataagcatcttctgtaaacttagattttcaagatatctagtatttaaacattttgcttttcctttaatcaagttatacttacggtttaatttgcttgtgaagacaaggcattttcaaacacttggtttagttttgagataactgaattgtttctcccaccagaaatgtggattacatgttataagtctttcctattttcttaaaaatgaaaaaaaaagccaagaaacaactgacattggtgaaagtctgtaattttcagatccattgatttacagaagaagatgccctgaacctctcagaatattttmtagtgtgattttttttaatgattaaaaaaaatgaagaaaatattaaacaagaagatcaaacacatttcattgagtggtgtctcatatgtttttcttgtttgggatctatttttataattgatctttttagtggattcttgattgtagtttaacttatttctcttttgtttctttttgatgatgcatcaattctgacatttcaaaggtacagctggtcttcattagatatgtgctgttattgactttgcttaacaagaacagaccatcatcgtaccaccttgagttaactctgtgccagctggccttgctcttgagaaggtcatttctaaacagaaggttattttttgaaagatttttaactggtrtaagaatctggcagcagaatgtacttttacctcttggtgccactgtatttaattaccctctccccatttatcctccatgtctttcctaccataagctattgataacacacatgctcatggtttaattgtaagttgttcagaaatagaaagctgactgtactgcagggcgtttttatatttctcttttgcaagatttgaaataaaaatagatttttgcatgaatattactttgttttatcagctagtcatctgatattcatcaggacagcaaatgggaagatgggtgaaaggttttgtcaaatctataaccactgaaaaatctaaaaatgctccctctctacttagcaaggcatgctctcattctacatcgctgaagacgactttcatgcttgtcactgaagtgtgatgaactatatgcagttgtcatttatgtgaaggaggaaccagatgctttttaagatttgtcaccaggtcttatttttgcattgtctatattgaaattttttgatgtgtttcaacaattccttctttttgttctctggaaatttttaacgaagaatgattgtttctatcaagagtatacgctataatggactttgctgtgttaaagactgatgtaaatatgtctgaagtgtttggtgatataaattagcagatttcacccgataagtcagaaattacactatcatctgtgggtacttttagaataactgatgttttaacaggggatgtaatacgtttggtgaaaagggatgagatagccaactctatgtgtttgattataaaatgctgacagtgcttcacagctctccatttttattcatatcagtgtaccattaaattcatcattagatttttgaaaatagttattttcctagctactgttaatatttatgtaaatgtttctatctcatgctcttcttttatatataatatttctttctcagtttttccttattatttctaaattctctactctatatgtgtgtttttcagtttatttgtttaggaattcataggactgtttaaatgttcaagttgttactacaaggagaatgtattttgatgcttctttccattaacctttctgttaattcactaacattattaatcattttgtagatttagtgaggaataatttactggttatgttatttggcacatcttaaatgatggcaatttaaaaattattttcaagacttatatattaaagtcctacagttaccaaagaagaataattgatcatctgataacactaaattaaccttaaaatctttatcagataatatttatccattcttattccttttgttagaaagatgttgttacaatgacagggatgtctaaattgtaaactctcctttcaagtgaattaattaaacagtgacattgatgatactaataaataaatccaaggattttttttaagggaggtggtttgcaccacataaattccctagcaaagtgttgtggggaattraagaattataaggcagggtcctgcctgctctcaaggagctgcatagtgtggctagagagaatagatatactgcaagggaagcaggggtctagaattctgtaagaaatgccaaaggaagctgggcgcagtggctcacacctgtaatctcagcactttgggaggctgaggcaggcggattgcttgaggtcaggagtatgagactagcctgggcaacacggtgaaactctgtctctactaaaaatacaaaaattagctgggcgtggtagcatgcacgtgtaatcccagctactcgggaggctgaggcataagaatcacttgaacctgggaggtgaagattgcagtgagccgagatggagatcacgccactgcactccagcctgggtgacggagcaagactctgtctcaaaaaaaaaaaagaaatgccgaargagatgagagaagtgctaaaggagtttgcaggaagcagacacctccttttgggatggccagaaataatgactgaaatttgactttgcatagtctgatagacaagagcatttccgatgaatataatgatagcttgttgaaatgaatttctcctatgatccattttgacctttcttatttccttgttgttaatagcatttactttgtttctcgaagctgaaaaccttaagggccttcgactcctccctttcctttgtccatcatgtctaattgatggactcagagctgcatgctttcacaaacattctctcacctgatcttcacgtgaaccctgcaagattggtatttaatgttctcacttaaacggatagaaaaactgaggctaagaacagttaagtcacttcttcagtgtccctagctactggttgttggaactggtatctaaaagagagacagagatctttctgatggactctaaatttcatgctgaaatggagaagagctgaagagcacagaggagagagaatagagaataaagagggccaggcgcggtggctcatgcctgtaatcccagcgctttgggaggctgaggcgagcggatcgtttgagtgcaggagttcaagagcagccttggcaacatggcaaaaccctgtctctacaaaagttttaaaaaattagctgggcgtagtggcactggggaggctgaggtgggaggatcgcctgaacccgggaagcagaggttgcaatgagccgagagcacactactgcactccagcctgggtgacagagtgagactccatctcaaaaaaaaaagaaagaagaaagctgagatgccataggaaatggctgcagaagcatcattggcaaatgcaaggaaattattgtgatgtaccctcacttaagactccagtgcatctaagtgtgttagtaactgattatggagagcacctttgtgctattatcagaattcctgggtgtgggaaacttytataactgtgcaacttttctatctccacgtcagtgcacagtatatggacatttatattttctactaacacaactgacattccactcccgtcagtttagtttcccccagtaccactgttttgaccactttcacacttctgtctatagtgcttttgctaagaaggaatctgctaaattcgaatgcagattctcctgcttttttttttttttttttgatggagtttcgctcttgttgcccaagctggagtgtgatggcgcgatctcggctcattgcaacctccaccccccgggttcaagcaattcttctgcctcagcctcctgagtagctgggattacaggcgcacgccaccacgcccggataattttttgtatttttagtagaaatggggtttcaccatgttggccaggctggtctcgaactcctgacctcaggtggtccacccaccttggcctcctaaagtgctgggattacaggcatgagcaaccacacccagccccagattatccttcttaatttgtgcttcttgcctttcgtatatatctttttcattttgagtttccttgaattaaaactttttaattcaactcttggattgcttarttttgaataatttgagagaatttgggctgttcttggtttatttagactgaagaagtactctcggcagagtaagaaggagcactaactgcttctactttggagcaagtatcaaaggctgtgttagtctgctggggcttccatcaygaatgaccacagactggatgccttaaacaacagaagttaattttctcacagttctggaggcccgaagttcaaaatcaaggtgtccgcaggtctgttttctcctgaggtctccgtccttggattgcagaaggccaccttctcactgtcctcgcatctctgtgcactgcatccctggtgtctctctgcatgtattaatcctctcttctttacaaggacaccaatcagattggattagggccaactctaacagtgtcactttaatttagtcacctcttgtaaaggtcctgtcttcaaatacagttgcattctaaggttctgagagttagggcttcaatatatgaatttaggggaacacaattcagtctataacatcatgggccattccactgaaagggcgtgggtggacagtcagaaacctgggcacaagttctcactctgccactctctccatgggccctaagaaaatcacttaacccttctgatcctcagtgttctaatctgtaaaatgggcattatgactaccaatctcagttgagtttggtttgtttgtttgtttttgagacagagtctcgctctgttgctcaggctggagtgcagtggtgtgatctcagctcactgcaacctccacctcccgggttcaagagttctcatggctcagcttcccaagtagctgggactacaggcacgccctaccatgcccagctaatttttgttaatttagtagagatgagttttcaccatgttggccaggctggtcttgaactcctgaactgaagctatctgccagcctcagtttcccaaagtgctgggattacaggcatgagccactgcgcctggactcacttgagttttctaggcactaaaaagcttttgttcattataaaagccatacagaggccaggcacagtggctcacgcctgtaatcccagcactttgggaggctgaggcaggcggatcacgaggtcaagagatggagaccatcctggccaacatggcgaaaccccgtctctactaaaaatacaaaagttaactgggcgtggtggtgcatgcctgtagtcccagctacttaggaggctgaggcaggagaatcacttgaacccgggaggcggaggttgcagtgagccgagattgcaccactgcactccagcctggcgacagagtgagactccacctcagaaaaaaaagtaatacagaaagtgaccttgcataaacttagtttctcatttctaaacaaaaataaaatgtatctcatagagtttttacaaggattcaagagcttttgcatgcaaattgtctgcaaatatatatatatagcactttttataagcattacatattaccattatttctcatccttctttcttctacatttcttctgcccgctcttccttttctgtcattgcctaaaatccctattaatgaatagtttgaaagaacatggccaggtttgcagaaagaagaaagagagatatccttttccctcccataaggactaaaagaggatgtctctgtgctttgatcattaaccatggcgtgttgattttaggacaatctataactctctgtcaatttcctacttaacagctttcaaaattaaatgttcttgcttttctactaactgttaatcatctgttcttattgaaaggtctttaatgaatattgactgtttactccaagtttataagatttttggtctaaagtggttgtcttagtccattttctgttccttataacagaatacttgaaactgggtgatttataaagaaaaggaatttgtcatttgcagttatggaggctgagaagtccaaggtcacggtgagagccttcttgctggtggggactctgcagagtcccaaagtggtgcagggcatcacatggcaagggggctgtacatgctaagtcaggtctgtcttcctcttatagagccaccaatttcactcccatcataacccatgaatccattaacccatgaatccattaatccatgaatggatttatccattcatgagagcagacctttatgatscaatcacctcttaaaaagttccacctttcaatactgccacattggagattaagtatcaacatgaattttggaggggatattcaaaccatagcagtggtatctatttaaatctatttactttcaaatagataatagcagcatgttctatgatagcaattgttcaaagaaatttattaaaccttttttatagacagtcttgggaagaatacagcaagttagcaaagataataactaagagtctcatcaagaggcgtgtgtgttccttatatcatcaacttccatttctcctgcctatttttaaggatatgagtatgtgggctgggcgcaatggctcacacctgtaatcccagcactttgggaggccgaggcaggcagatcacgaggtcaggggatcgagaccatcctggctaacacggtgaaaccccgtctctactaaaaatacaaaaaattagccaggcgtggtggtgggtgcctgtagtcccagctactcgggaggctgaggcaggagaatggtgtgaacccaggagggggagcttgccgagatcacaccactgcactccagcctgtgcgacagagtgagactccatctcaaaaaaaaaaaagaatatatgagttgcccattttcaaaacaggaaaggaaaagaagaaagcacacgtccctttttttctcacttgttgaaggaaagagactgaaaaatcatgaacttatgaaagatagaggaagaggtgcctaaggagaaagagaatatttaagtaagaggattaatacctatatatgtcagaagaagaaatgtagaaatatagtttttacacggtggaaaagaaaagtttctctaaactgtagaccaacaaactttgcctcatcctcggcaaatttctggaaatggatgaattacaaatgctctctatagaatggggattgttaaaagccagtgtgagttcatcaagaatgacttgaactggactacccacattctctatctcataagaccagggaaatggtaaaataatgtgtctgaacttgggcaagcaattaaccaggcatttttttttaatattcttgagacaaatagagaaatcaattctagaggataatataattgtgtagactcataactaattgaatgatatgtgcaaagggtccaaattcattgacttatatttatgaaatatggtcttcacttagcctgaccttattattaattgctaatcttacataaagctatcgaggtcatgattctcatattttctgatttaagagagaaataaatgctaaatgayggaataggatccaaaatattcatcagataggaagaggcgaaatatttcacatgtattttaaacataaagtttaaatggatatgaawtattgtgctggaattccaagcactgtaagatggaggaaaaatgactttatagcactacctgtaaacaaagctcaatggaaatagcagtgtgatgtggctgcccaaaaatgccatgaggtttctgctgttttaataggactgggatgtctcagataagacaagacagtgccactgtactcttcactgggcatatcttaccacacatgatttcctttcttatcacctcrtttttagaaggatgtgcacaaaccggaacaaggtcagagagcaaggagacgagtgagggaaattgacatcaygtcttaaaaggaagaaatggggttgggcctgatggctcacacctataattccagcactttcagaggccggggcgggtagatcatttgaggccaggagttcgagaccagcctggccatggtgaaaccccatctccacyaaacatacaaaaattagccaggcatggcagcacatgcctgtaatcccagctactctggaggctgtaacacaagagtcacttaaacctgggaagtggagtttgcaatgagccaagatcacgtcacttcactccagcctgggcaacagagcgagactccatctcaaaaaaaaaaaaaaaagaaagaaagataagaaaaaaaggaagaacttggatacttggcctgaggagaactcagaggacagagatagttttcatgggaacacgtggagcatccggaggttgtttatggtcatgagggaaagagatgtggtgtggaaaatacgatcttgtgaaaaagtagggatgcattagttctcaagtcaggaaaatgaggaggtggagtcaagcgatgctacaggagactgtttgccacaaagagttgctgctgtgcctgccccagagcacttgggcccaaagaagccacctctgcagcctcactactcatcgtggctgggtttggtctccacagatgggctttcactcacatggtgctcaccagtgcccactgctgccatctgggccaggtgtggagccaaaacatagaagtgttccttgtctcctacatgagctgttccttcccatcccaaacagccaccagtgggctcctggactccctaaggcattgacttttagaaaattgggtagtttggctgggcgcagtggctcacgcctataatcccagcactttgggaggccgaggcaggcagatcacctgaggtcaggagtttgagaccagcctggccaacatggcgataccccatctctactaaaattataaaaattggccgggcrtggtggtgcatgcctgtaatcccagctacttgggaggctgaggcaggagaattgcttgaacccgcgaggcggaggttgcagtgagctgagatcatgccattgcactccagcctgggcaacaagagcgaaactctgtctcaaagaaaaaaaaagaaaattggttagttttctaaattgcattgaaaattttataaataatagaagcccgagagaaagccacacagcaaaactttctctctctgccaatgaaatgtattattttcagccacctctttttaaaaacaatattatcttcattcctgtacccttcattttgctttgtatttttgagagcgctggttgccttaaaatcagtatctcaaatctctggcaaagttccttctgtttctttgactctatgaccctgatattttctagaggtagctggtgtcaatttgagaagcatccagaggagtgaatagaaaagaggccttagcattaaaaagactaaatttaaatccttgttccgccacttcctaactgtgtgaccttgggcaagttaatacacatgctgagcttggattaatcartggaggcttgtaggacacctactgtgatggcaaattctgtgtttgtttctagcaggagagattttaaaaagaagttaaagaaaaaaatatgtgagactatgatattctcccatattatcaaaaacacttattttcctcaatgtaggaatagtgcaagcctgtcgacccagctattttagaggctgaagtgggagcatcacatgagcccaggagttcaagaccaggctttaagagaccctgtctcttaaaacagataacaaatgtaaagtttataggaaagattacatcatgttgattcagcaaatattttcctctcttatttctccctttcttttctatcttcccttctacgtgaggcccttgtttatggaggaatgtcatacaagggtactcttcttgtgcatatcgagacagacctatagatgctttgagctataatattccatattcatccctgccctggaggcattagtaatctcttgagccaggcacagtgtacacacttgtagtcccatctactcaggagattgaggcaggaggattacttgaactcactgcattacagcctgagcgacatagcaagacctggcctctaaaaaaaatacataaataatctcttgagtatgctatgacatttcccaagcctgtggccttatcatataaacgtacagcattttctaattccattctgatcatttcaaataaacactttaattttatgataaaatgtcttattactgttactaaagaccataaaaagtttgtagttacaaagaagttatttgactaactcattatgttagatgtcagcctagatatcacaacctccaggaagcactccctaaccacttagatttagttgtgtttggttagttagatttagttatgtttgattagttagattcagtctaatttaatttaattaacttccgctgtgaggtcctgtaacaccctacactttccctatcataggaggcaatacagtgatacttctgcaagttcagctcagcccttggaccatacaatcctggattcaaattgcacctctacctcctagtggagtttgtcaagttacttaacctaagttcccctttccttatagatgaagtgagattaataaaacagggttatagaagagcatgtatattaagtgcctatacagtgcctgagacatcgtaaacaataaataagtactagatgctgtcatcatcaccatcaccatcaccaccatcatcaccatcaccatcacacttcaatgtagttgcttaytaaatatgcttatcttccttgataaaacagagaccacattttctctgttcacctttttccccctgctgcctaacacagtttctgacacaaaataggagtttagtaacttgactgttgaatggtttagacaaaccctggtggccaaacaacagcaatggctttgtgggttctacaatgcctgctccttcatgcacatagttgtcatcttttattccccccaaagcaacgagatgtggtctagttccttcaagggtgagcctagcagaatagatcctagacggagcaggggagatcactcagagcctgcagcatctcagagctacaagggacttcctcagcctcccaacctacctccttcattttacaaagtacatcctaagacacatccgtggctcagccaggctacaattgacacaactggagggctgtagacccgagaagagggatttagaagacaactgagtcagagcaatgtagctacattttagtttaattttttaagtccatcaccattttatctatgaaatttgttttttattctttaaggataacacgtagctaagtgcttataaataataaatgaaaaataatcatcattagcttggctaggagcagtggctcacacctacaatccccacatcttgggaggccgaggcaggaagactgcttgaggcccggagttcaagaccagcctaggcaaaatagctagaacctgtctctacaaaaatttaaaaaattagcagggtgtggtggtgtgtgcctgtggtcccagctactcaagaggctgargcaggaggatcacttgagcccaggcgttggatgctgaagtgagctatgatagscacctaggcaacagcatgacatcctgtctcaaaaactaaataaataggccgagtgcagtggctcacacctgtaatcccagcactctgagaggccaaggtgggtggatcacccraagtcaggagttagagaccagcctggttaacayggtgaaaccccgtctctactaaaaatacaaacaattagctgggcgtggtggcgcacgcttgtaatcccaactactcgggaggctgaggcaggagaattgcatgaacccaggaggcggagattgcagtgagccgagattgtgccattgcactccagcctgggcaacaagagcaaaactcttgtctcaaaaataaaataaaataaaaaataaatattagccagagatgatgttacttctaatgaaggaaaaagtgatattcactacaaataagaagaatgtctaccacctctctagcatttcattaagggagtacactgtggttctgatcacctgctgtctgaattttaccataaattatattttgaatgaataataatctgtgactgtattggcaaaacaaagtcaaatatatgagatatttttaaaagatgtaagccattttaatactctagttactctaattctaaggatcgctattccacagaggccactactctgctttagaagagtttcattatacctccctggcaatgtaagacataaggaatccagagtggtttttacatccattgcatttacccaaatacaccatcggagggcagcacacacctggttgacttaactgcctgtctggtggccttatcaaaatagttgtcaaattagtctaagacattcctaaattaccactcagataggcaggaaagctgttggagaagacaaaaggagcaaagatttttaaaagacaaaagaatgcattccttaagactctgagtttctacaaaagggaatctggagctaatcaatgctgcaaaatgggaaaacggagttaaaaaaggaatttcctcaatctgagaaaacagatttgttatatttgaaagatttttactgagtatgatcatccgaacaccagctactaaacaaaaatcagatctccttgttcctattaagatgcgctaattaataagatggcaacaaagaccaccatataaaagggttccttcagtaatgttttcttgagtgaacaaaaatcaagcctgccttatattgtattctactttgcatcacaaacagttttagtgtatttctggaaaagcatcagcagttttttcgaattttaaattctggagttatgtaactatataggcaggcttttttataacagaatataacagtgatacttaaatagaagacttcaaatgtaaatatcagtagagcctcgttaaggctataaatccagactttgtgataatgtggattaaatattatttacataacatataaggaggccgggtgcagtggctcacgcctgtaatcccagcactttgggaggccgaggcaggtggatcacctgaggtcaggagttcaagaccagcctgaccaatatggtgaaaccctgtctctactaaaaatacaaaattagccgggtgtggtggcacatgcctgtaatccctgctccttgggaggctgaggcaggagaatcacctcgggaggctgaggcaggagaatcgcctgaacccaggaggcggaggttgcagtgagctgagattgcaccattgcactccagcctgggcaacaagagcaaaactctgtctcaaataaacaaacaaacaaacacatataaggaaagggatttgctaagcaaatacagtctaagcagttggcaagaggaaatgcttcaattatttaagaataatttttaagtttaattccaattttaacttgtttgcaaaaatctttttggagaaatatgacgtatatgcatttctaaccagcttcttgcatgattctaatatagtcacctagtaccagtaaacagactgctctttgatttttttttagaacaccaggcactactttcttggagtagatgattaacccagctaaagcttgatttttactagctagcactttattaacctagtgtgttatattgtgactttaaaatggtaaaaacaattayaaagtggagttctcattcaggttagctttctagtccaagtcactaacaatttactatgtaatagacattctaagatttctgccaacaattctattgtcaatatataaaatcaattttcagaaaactgtaaagattatttccttgtttaattaagattctactaatcatagaaaagattatattgcacacttttctcaagttacctatgggactgacaatatgtccatgtgtcctgatagtaaagtcagttatctgaatgcgttccattttggaataagagatctaagtgctaagcaagtaaccaccaccacattcaggtttagaattggaagatctttcattatattaatagaccctttatttttagatataacaaaataccaaagacaaatggccacatatatcctaatgtacttgagaaatctcgctactaatgctgtgtcactaattttttaatactgtatttaagaaaaaaaaaaagcctgtcttttctattggcatcattcaagaagaaaaaaaaaaagctgaatcaggatatttctgtgtgaatgcacattcctcactaaatctctcaggcagctgctttagtcactgttactaacaccttgctctgtcatctctttgtacacatgtctaatttatcagtttcttgtagattgtcagcagcctgctgcctccgtaccgccacagtgctcacaactagccgggaggcaagactgcccaactgtcaggtaaattcagatgtcctttcccttccacccagctgcatgtcagatccatagaccccagctcccctttccgacacctgaactgcctacgcatcattgtattttgctgtattttatttcaagtgtgggctacatagacacacattggacacctgcagtccctgcgttcccagtaggaatacaagagagctggggtttattttgctggctgccagctggtagactctacaggctgccttcagcccctttgtctgtgtaaatacttggattagtccactgtttcattcctttccaaaaaataaaagctggaattgttatgatgtttgtcctactttttattttcttttgtctttaaaatatatttattttcctgsggaatctgagggataccaatatactaattgacctgatttgattcctgtactttatatgtattaaaacatcactatatactccatgaatatgtacaattattatttgtcaatttaaaaaaataaaatccccgctactcaggaggctgaggtaggaggatcaatcgcttgagcctgggagttcaaggctgcagcgagctatgataccactgcacacctgcctggtgagtaagaacctgttgctaaaaaacaaaacaaaacaaaaaacacagtaaaataaaacttaaagtgtttaaataggccaggcatgatggctcacacccgtaatcccagcactgtggaaggccgaggcagagggattacctgaggtcaggagtttgagaccagcctgggcaacatggtgaaaccccgtctctactaaaaatacaaaaattagctgggtgtggtggcacatgcctctaatcccacctactcaggaggctgaggcaggagaatcacttgaacccaggaggtggaggttgcagtgagctgagctggtgccactgcactccagcctaggtgacagagagagattccatctaaaaaaaaataaaaaattaaaaaatatatatctcaggccaacaaacaggaagaatataaagaattagatataaaggctgggtgcagtggctcatgctggtaatctcagcactttgggaggctgaggcaggaggattgcttgagtccatgaatttgtggttacagtgagtaaaatcacatcamtgcactccagcctgggtaacagagcaagaccctgtctctagataaatagatagatagacagacagatagaacagctgtataaaagtgtttctgtgtttctgttctctgtccactcagtagccttggtaaaactgaatttgaaaggtggagaaaaacattgtagttagcattcaaaagataatatttgctgtgacagtgacctttatgtgagattacttgaaaaattgttaaaacaggtttgcacagtcctgaacactgaactggagagtttgctgacaattccgattccaaaggaaagctttccaaatcagtcatgaattgccctccatcctggtgaacctccacacagcrtctcagcgttccatcaggacctcacctccatcctggaatgcttcatctccagccacctggcctctgatggtgccagacctcagtagtcyggttgtggttttcatcatctgctcagtgttctctccttatcacagctgttgcccttctaccaggggaaggcttcttttgagcaggggcaggcccaaacactttccatgtgtgtctgaggagtagatgtcagtagcaagctacatgtggtcaggggtcagagccaggggacctggggtgccacaagtgtggaaacacagtggcagctgaagcccaagtgtcacatggtctcagaggcggttgtgcagccagctgtatcagtggaacattgagttagcacagaaaggtacattattggccaggtgtggtggcttacgcctgtaatcccagcagtttgggaggctgaggcgggaggatggcttgaacccagaacttcaagaccagcctggggaacacagggagacctccacccccgacctctaccaaatttttttttttttaaattagccaggtataatggcacatggctgtagtcccagctatttgggaagctgaggttggagggtcacttgagctcgggaggtcaagactgyagcaagctgtgattgcatcactgcactccagcctgggtaacagagtgagaccctgtctcaaaaaacaaataaataaataaaaagaaaaatacattataaaataggttgctagccagcagtttccaattggtgtgtgttagttgattgttcccaccaccttcagcaacagggctttaagaaaggtttttcgctaatgccattttacaacagcactaatttcggttagaaataataatgataggtcaggcgtggtggcgcaggcctgtaatcccagcactttgggaggccaaggccggtggatcacraggtcaagagatcgagaccaccttggccaacatggtgaaaccccgtctctactaaaaatacaaaaattagctgggcatggtgatgtgcgcctgtaatctcaggttctcgggaggctgaggcaggagaatcacttgaacctgggaggcggaggttgcagtgagctgagatcacgccactgcattacmgcctggcgacagagcaaaaaagaaaaaaaaaaaagaaataatgtaattatagatttatctcaattatataagtaacaatataaatattcaaactcgtctcagtgggattctgaatttgtagcggttaagaacagggctcttcacctacagtccattctccaccaagcacccccagcccttaccscaaggcctgggtcagtgctgggcacatgacagctgtgcactaaatattgattatacctgagagagtgaatgagctctggaatcagattgcttgggttgaattcccacttctaatacccactggttgtttaactttgraaaatttcttttgctggctaagattccatttcttcacttgtaaagttcagatgacaatagatactgagggaattcagcgaggcacgctcctggcttggagtgtctgctcagtatctgttatcaatacttttttagtatcttaccattcctcaagacaaagatctgcaatctcttaacctctctaatttgctgaagaaagcgtggagcgggctgctgttttgtttgcttcagagattgggtctggctatgttgcccaaactggacttgaaccctgggctcgagcaaccttcctgcctcagaagactactgcttgaagtgtttccattaagtaggaaatggaaaggctggcaggagatttttttaacttttttttttccaccttgcttgttttttgagaaccagtttgactaaacaattatgtagtctagttccatctgttctgagattaataaatttaggttgcttactactaccacagggatgatttactttaaagaaaagcaatttaatgaattacaaacatttccagcttctcaaatgtttccagtttctacccacatgaatacagcctggtctagagcccaattctactactgttccccatcgtggtctacgtaaagaaatgattaaatgcatatagatctgaaaagactcttttccaaaattgctgggatgatgactgactcttttcccacccatacacactgccaaatgggtcaatgttaataccttcattgccctttttactccttcttggcagaaaagttaacacatagccaacattcgaattcttagtataaaccagacaagggttcatttctttacacatattaaacattacagccttccataagggataagcacagttattacacccatttttgttgttgtttttgtttgtttggtttagttttttggcgtttttttgtttgtttttgtttttgtttgagacagagtctccctctgttgcccaggctggagtgcagtggcgtgatcttggctcactggcacctccacctcctgggttcaagcaattcttctgcctcagccacccgagtagctgggattacaggtgtstgccaccacacccagctaatttttgtatttttagtagagacagggtttcaccatgttggccaggctgcccttgaactcctgacctccagtgatctgcctgcctcagcctcctaaagtactggggttacaagcatgagccaccacacctggtcttacacccatttttatgtgacgaaattgaggtttgggaaggtaaaatgacttgttcaaggtcacatatcctgaacacaactgagcctagtgactcctacctaccaccacaggtggctgcactgcagaggagaaatctatttcagttacactgtgaggagcaaagtcagagtatgtaaatcacccaccatgattccttttccctcaaactgaagaggaatgtttgtttaatgagaaacagaagatgtgctaagaatgttgagttatttcacatcaggtgttctgtttctcattttgaaaaatgattttgagtgctgggcccagtggctcatgcctgtaatcccagcactttgggaggccaaggtgggcagatcacctgaggtcaggagttcgagaccagcctggccaatatggtgaaacggcatctctactaaaaatacagaaattagccaggcatggtggcaggcacctgtaatcccagctcctcaggaggctgaggcaggagaatcacttggaacagggaggcggaggttgcagtgaaccaagatcacgcttggacaactccagcttgggcaacagagtgagactccatcttaaaaaaaaaattattttgtacttccctcggtttatacatatattcaaacagcttttaaggtgaatgattttttaataaaagagcattttctcacctttaacaatgtagaacttttcagccggacatggtgactcacctctgtagtcccagcactttggaaggctgaggtgggaagattgcttgagcccaggatttctagatcagcctaggcaacttggtgaaaccctgtcctttaaaacaaaatacaagaattaggcatggtggcctgcatctgtagtcccagctactcaggaggctgcggtgggaggatcgtttcagcctaggagttcaaggcagcagtgagccgagattgtgccactgcgctccggcctgggtggcagaagaggaccctgtctccaaaaacagaaaaaaagtagaacttttccatgtatactttttacaggctaattccattgtagagctaaattatcaaaattgtttatagataataggtattataatatgaaaggaatgcccaaggtatatagccttggatataatattgaaatatatagagttgtttggtatttagcacttcccttctatcaagtagttttctacttgggaaaaaaaaagaaacttcctgaagatgtatccaattttatatcttagtaacagcttcctaaacttgccatttacaacatgatctacctatgtaaagtaaaatcaatggtaaatgttgaataacaagtggactcttgaaaatatttagcaatcacaactgaaactgaattcattctatgccttaaatgattataatttatcaaatatttatatccaagaaatagtatcttaacctgtaagccaagaatgtgtgtcttacaggttaatttacacataatatacaccatgtgattgcagcattttatgcaaattaaaaatattaatactatagataataactttatgtaagaaatctatctaaaggaatgaaaaaaatttaaatcatcacgaatgatgtaatgtcaaggtgttaggcaaagtgagttgtaacccatatttaagctatagctacacacttcagctggtcaggaagaaatatttgtcttcctttwtcaaaaagagtattggggccaggtgcagcggctcacgcctgtaatcccaacactttgggaggcygaggcgggtggatcacaaggtcaggagwtcragactgtcatggctaacacagtgaaaccccgtctctactaaaaaaaaaaaaatacaaaaaattagccaggtgttgtggcatgtgcctgtagtcccagctactcgggaggctgagacaggagaatcacttgaacccggaaggtggaggtggcagtgagccaagatygcgccagtgcactccaggctgggcgacagtttgagactgtctcaaaaaaaaaaaaaagtaytggattacacaaggtcttcaaaaacatatctttcttgggtggacacagtggctcatgcctgtaatccttgcgctttgggaagcagaggcaggctgatcacttgaggtcaggagttcgagaccagcctgggcaacatggtgaaactctgtctctactaaaaatacaaaaattagccaggtgtggtggcgcaggcctgtaatcccagctactcaggaggctgaggcactagaattgcttgaacctgggaggcagaggttgcagtgagctgggatcgtgccactgcactccagcctgggygacaaagtgagattctgctcaaaaaaaaaaagaaaagaaaagaaaagaaaaaaaagccatatctttcttgtgtaatgtgacgattctgcattacttgccataaatcacattgcataatatgtttagttccctaaaaagaaattagttctggtgctgacttccacagcacgtatagtaaaattggagttttttttactatatgtgctgtggaagtcagcagtctaagtcatgcatatttgcagaaaaactgttaggtcgatgggaaagtctggcctataacctgctgtttaccaggccgtcaaactctgtttggagggtcaagtgtgaatcttgccatacattattttctgttttaaatattttcttttctttcttcttttttttttttttttgagacggagttttgctcttgttacccaggctggagtgcaatggcgtgatctcagctcaccgcaacgtctgcctcccgggttcaagcgattctcctgcctcagcctcctgagtagctgggattacaggcatgtgccaccacgcccggctaatttttttttttttttttttttttgtatttttagtagagacagggtttctccatgttggtcaggatggtcttgaactcccaaccacaggtgatccgcctgcctcggcctcccaaagtgctgggattgcaggcgtgagccactatgcttggcctaagattttcttcatttattttcctttttttttttttttttttttttttgagacggagtctcgctctgtcgtccaggctggagtgcaatggcgcgatctcggctcactgcaagctccgcctcccgggttcacgccattctcctacctcagcctccggagtagctgggactacaggcgcccgccaccacgcccagctaatttttttttttaattatttttagtagagacggggtttcaccatgttggccaggatggtctctatctcctgagctcatgatccgcccgccttggcctcctgaagtgctgggattacaggcgtgcgccaccgcgcccaggcttattttccaatttataaatgaggccgggcacggtggctcgtgtgtgtaatctcagcactttgagaggccgaggygggcagatcacttgaagtcaggagttcgagaccagcctggccaaaatggtgaaagtccgtctctactaaaaatacaaaaaattagccggacgcggtggtgggcccttgtaatcccagctactcgggaggctgaagcaggagaattgcttgaacccaggaggcagaggttgcagtgagccgagatcgtgccactgcactcctgcctgggcgacagtgagattccatatcaaaaaaatttacaaatgaaactatgcactattttcttaggctttttgttgaaggtccagttctcccatgtttacataccacattttaaaaataggtaggaaaaacaatttttatcactgcttgtcttaaccagtacagaacagcaaagcttcttttaaactatatttacagcacttcaaagagtttgggaagaaagaataacctcaagccagtcagatattttccataattatgattttgtattaaaatgcaagagatataggtagaggataatttcagtaccaaagataaaaattatttaatactaattttaatgactccattacattttaaactccattaaatttaaagctaattttaattagctttaaaaagctatgcttaaattaatagtaataatgagccttgaattgttctctcaaacatcacttctggtagaaatgaattatatagtactgactttcatagtttaagggaatataacagagttttagaaaaatactcttttctaattaaaaaaacaaatctccatgttgtgattcccccattgctagtcacattttttttttttttttgagacggagtctcgccctgttgccaaactggagtacagtggcgccatcttggctcgctgcaacctctgcctcccatgttcaagtgattctcctgcctcagcctcccgaatagctgggactacaggcacacgccaccatacccagctaattttttttttgtatttttagtagagacagggtttcaccatgttggccaggatggtctcaatctcttgacctcataatcctcctgccttggcctcccaaagtgctgggattacaggtgtgagccaccgcgcccggccgctagtcaaattttaaaaggcccaaacccaaatgtgttttgtcattttaccctaggaaactcaatgattttgcttctttattcttcaagattattcatccagaccctgataggcctgagcacaggttcatttaaactagaggctatcacaggcgtcgtttggaaagttacattatacacttaacaaatgggaaatgttaggctgggctcggtggctcacgcctgtaatcccaacacttggggaggccgaggcaggtggatcaccagaggtcaggagttcgagaccagcctggccaacatagcaaaaccccatcactactgaaaatacaaaaattggcagggcatggtagtgcatgcatgtaatcccagctgctcgggaggctgaggcaggagaatcgcttgaactcgggaggcggaggctgcagtgagctgagatggagccactgcacaccagcctgggcaaaacaacgagactccatctaaaaaaaaaaggggggggggtgaaatataaaactcttccttatacctccaagcccaagcaggtagggggaattcttagagcaaattagacttccacaggcaaattctttatcctagtgaatctggatctaccagataactatagaatcctctaaactccaaagccttggtcaacctgtcagtaccatcagcatcactgggagctcattaaaaatgtagaatctcagatctcaccccacacctaatgaatccgaatctgccctttatactgagctccccaggtaatttgcatgcatattaaagtttgaaaagaactgatctcatgaaatcttacagctaacacagagacctaggagaacaagaccgtgcaaaaattgagaagaacttctgtaaaatgctgggggcaagaaaatagggaaaacaagaaaagagaagagtgactttgagggaagagtkcatatatcatttccttaatacatttcatttttcttttttatgccttgttttgaaaagctaccattatcttggcatgctttagatggaaaccatttactgtgcagatttctgttcttgttctcaaaatstatgcaaaaatatctcgtctaacccctaccattgtgcctggccctttgaaatgtgtttcttgctgacgtgcttgtttctcctttccagtcctgacacagctctccctgaggagcagccacattccagctcccagtgcgcccctctccactgtctctccaagcctcctcacccctagtcttcatctcctgtggacraacatctggggtggaagttttgtagccacacacaggatactgcccaagatccagcgggtgttttcttctcggttgttagatgtacaattggattaatgtccatcgttttggaagacgagagaaagttgagaagaacacgaagcacagaccctgatgtgataaaacattttgtggtttctctgagtcacagataaacttctgccatcaaatggctacagttcatttaaatttaaaaaaaaraaaaaagaaacagaaaacgtgtctcagatggctggctttacctcgatagcataagagagacctaagacatgtaaaatacgtatattgcagtatcatctttcctcacactccaaattcagctagggaagttgattccaatatgtttgtcattgatatttattttgtactttatttgctacatgatttatgtctatacaaataatttctctgaggtgaatttaattcatttattttcaaataagcataatttgctcaattaagtatgagtttgaatttagtttgaaatctggaattggccagactgtggtcatttttcttgcacaaaatgataaatgaggtgcatcagaatgttaacaataactgtattttgctgctacgctggtattgtttakgcacttactttctaatcagtagctcattaactgctgggttttgtttttgtatttttaactagagttcttcactggacattactaagtaaatctaagaaagagactaagttatgatttattgacttattcaagttttgatggcatctttacttttattttttcattgcagttgagtagatgtactggtgctgctcctttgtatgtgtgtatgtgtgtgataacgttaaagaaggctcartaacttgaagggaaaaaaatggtgtgtttatttaatgaccagaattttttttacttctcccaaaatcagggtcctactgagtctttcctgataaaaggtatcaagtacaaatgggaaaatatatacatatatagatgtaagatagcctttaattaattaatttacccagagagtgttcaaagtttgattaaaattgtatgttttgttgttgttagtttttttcataacgaatcttccttgccaaaaaaacaatagataataaaccttagctcattgtctacttttgacaaacactcaggtgcctacaaacattctattatcttgagataatacatgttcctggttaatttacagattctgctgggtaacttttatgacttgatttaaggcagtggattttcatagcaaaatttattttgcacataatctgacaaacaaggaaaacagctaactgagctgaaaggtctaacactctcgggctccttaaccatcaagtgctgcccacacaattgctcctagccctgattccttgtctttgtcaggtagccttaacttatttaaaaccataagggtttgaccttttcatataaagacatctgtaacttctcttcaaaacaaaaatgaccctcactgttaacacaaaggacagttaccagtgtagggcactgagaaaggagatccaggagccactcagcttattgagcggacatgggtggcacagaaatggagtggtccatcagagaccaaatggtaagtcgtaaagcacattgcaggagctttcgttagtcatacgcctattaagtagtggtcgctattaccaaagcaaccaggacgttttgtgttctttatatgagtgctattttccacagtgtcatttattatgcaacgtggagtaaagagttgaaatcttcaccaaaataagggttcaggttaaagtacagaaacagaaacaaaacgattcgacatgaagttcccaaccatagcagcctaaccttctgctcttttctacctgcatggccttgctgttcctaaacattgtcttcatttcactggcgttgtatctgcctagtaccagtattagtgagactgtggattttatcagagttcaatgaaagaaagcttacccctgccctcactttgtgttttttatttttccccctttctcaagcaccacgtatttggacctgagaagtggcatagctgctaagttgacttttaataaaaaactgtttgtgcctgagggaaatatatgcctttttaaaaagtacctcagaacatgttcgtagatcgtctcatcggttttgtttggtgggactgggagttcagcaggaagtattgtctgtgtgtgatgacggggcagtattgccagtcggcaatgttgtatttgcattctttatccctaactctgaatctaggactccatgaaaagccgggtcacccacaaaacatttcttccaatacaaagtgtattattacgtctattataaactagtttcatttcagttatttatcttcatagagtgggaaagtctttttctgaaatactaattctatgaaaataataattttagtgaatctttgccaagaagttatagaaacttggaaataaatttctcattttcagcacaaaattaagtgatagtccctaagcagtaagagagaataccatgtatttacactgtggcatcatttagtatagtttacactgagccatatttatttataggcatttaaagtgaatcagtatgtgtagtgttgataaaaatcagtatctgtaaagataacatcaggaattcaaaaggaaattgaaaaggggcagaactagtgagaaccaaaaagaatgaactccagtaagactaattgaagacatacttggagaggaaaaataaacagcagaaatgcactaaaaaatactggctaattattgcaaacagagtgagcaaagattaatgctaactagtaaaagtagttagcaaagtaaacaggtagttttttaaaagtaagcacaattacaatattgaatagtatggagaaatgcttttctcctgaggattttccttaatcaaaaaataagaagaagcaataaattgtctttggcctgagtgctgagtggcataaataaaggagcttggcttaatctttctggtccacacataatccattagatcccattcatatatccaactctggattctaataaaataatttggagaactttgagaaaaaggaaaactgttaaataagaaaagacctatttagaaattatactttagtctaacgaagaggaggtacaatagtagtcttcaagaaaagaatatttaacaaatgatagatatcagctatagatattgttactaagtctagaataaaaaaggcttcagtgtgaaggatgtatagtaactctaggaaagagatttttaacactgggaaattaacgtggaaattgataatcataaagaatatttgttttgtaaaaattgaatatcattggtggtctagtaagtattaagtggcaagataggagaatgcatttcagttctgggagctcataatcctgtgattcttttattttaagttttaaaatacattaaaattttactggttaatcataaaatattttatatttgaaaataggatggcaatctttatttttccaagatatttgttggaaaaaaatgatcgttggtattattttttctttcagctatattccatggtatctttaaaattgttcagaatataggacttttactaaaaaaattcaattgtcagagtctaaaaaaacaatgtcctcaggaatacttcagaaatagaaggtatgcaatcccttagtggggggcaaacacatttcagatttcgtctttatttaaaaggatcttcagtctacaacatttgcttttttcgtgctttggaaaatatccttgtgcagataagttcttctgtttgaaacaagcatgaaacattggtccaataacctaagaatgtggagatttcttgatattctgtattaattaaagttctctacatgtctcaaatggagatcacaaaacatgaaaaggaagaaatgaaatatcttttcttctgggatgagtgtcaattttaatgtataattgtcataatcaatcagccaaaagttacaatctgtccctcagagacattgggggaagctgatggatttccagtaaggaactgtggtgggttcaaactcaggctgccacaaatacattgatatggtaggtaggaagtaggactaaatttgaaagaaacttatgggataaagttcacaattttaaaaaggttgccctccagtttttttgtttgtttataaactagagtgatttttaagtaacccttatatttaaggctgcaaaaaatgtacaagagtatgttttcaagtaaagggaacataattcttcaaaaagctgttgaactggagttatgataggttatgacagagagcatgatcagtgctgatactgacaagtacttttttaccttaaaatcaacttctatggaactacaagatcaatctagctcccgagtgacattttccattgtctgtaataatgccctcggatgagttgtgtctaaaattaagttcatctttatttatatgcgaacttaactgccatagtccctaatgtattgcgtttgtaacctgatcgtattatgtttacagctgaaagatttcatctagacatgtctttcgtccttattattcaaagtgtaattgaaagagatatttagtattaagacatgttccccaattgagaattttccagaatattctacttaagaagaagaagagcaattaactgcctttagtgtaagggcgagagtgcatagaaatatgcaatgtaaaatgtttgcatgaattatttcacatcatgtaagctttcccatattcataagatgaacactatagaagtctcatttctctgtgatcttctgtccattaggaaagtaaggagattgttatctatatctagtctcctttccatattgaactgcatggctctaatcctcagtgtatttttatcccttctcgagttatttaaaatttgccctatttaagctgaagcctggataaactgctgagccagattattcctgtgattggagtttaattgctgtagaacacttgttgagaacacattttttactttttttctttcagaattattcctcaatcattgttctctaatgaaaacaccgagaagtaaatctggtgcttcttagtgtaaatatgtttttctttttaaaaagtcattttaaaacaaagatgagagaactataaagtaaggggaaatatcattttatttaaaaataattattcaatgatagataatggagatacagaatgaatcattgggttcataggtatgatttgtgcagccagtcttagaggaaatacatcattttaacattattcccacaaaatgttaaagctcaatggtttgactatgagagtcaaacaattactatttgaaaatctcttatgacatttttataatctactctgtttttatttgcatgattatgcttatgtgatgaaccatccatgattctgatattgtatttctttccagtattaacatgtgtattgtgtggccaactctgatttgtacaccgtattattgttgtaatgattcaactgttcctacatttaattgcagtttaattattatgccttttggggttaaatgatgtgaagtgtttccacctactgataaataccatatgaaaacacgactaaaagactgatttaagaaacttgttatttttaaaaatatgaatttcaaaagaaatgttctcaaagacacatgcatttattttaaattcaaaaaattcttatgaatttattattgcttgtactttaactttttttattgtagacaatcctaagtgaataatgtctcatgggagaacacatgatatgtgcttgtatttgtgtaatctgatcatgcactcaatggttggaaaaggcactccagtgctaagaaaataaccagaagccaatatatcgattcttatatctcggtttatgttaccaactgaatatggtgtaatgcataactttttccagtaaataaactggttattttttgttcatttcattaatgctgcctttttatcaatttgagcagtttttctgtatgtcattttgatgtatacttacaaaaaggaaaagactatatgaattcagatgtgatctatatgtttattcaaagtaagaacttatttgaactaaaaactaaatgctttgctttaacaacaattctatacattcctggtaagtaatgtgtatcaactctgctcatttcctccagttatcacctcttctacttgtaatcttttctagaaagctattttggcaggaggatatacttggctgaatttgattagaaatgtaccaacatgaagaaaatgcttgccctaaaacaggaaacattattttgatgaaagaagaatgaagtttctatgcattattttgggagacaattcctctttgttctttttggaacagcagagttccaaaactttgagggaggttaattttctagctcctcctacaaatacatattgtagtaaatcagctgctttgggaaccatccactttgattcgattttatttaaagggtggaggagggggagaggcagatagaacatggtgttctagtgagttaaaacgtctaatgcaatcctcattatagctaatcaaattcgtgcaacacgggcagccaacatcctggcaaaagctgtctgctcacctgttgcataaatacaacactagaaataataatgtaaacttttctacaaatttctcctttttctcttccaaaagcttttgtttttcttggaggttggatctataagtctatttgatacttgactttctcttacatgataaagctgatagtctgccacattcaaaagtgaaaacagctggacgcatcaagaaagtctcttctcatctatacattttgcaggcaacttggacagcctatattgcaacccacaagggatgagaaagagagcagaatcgatgggaacttgtggaagggatttccgtcttcttcttcttcttcttcttcttcttcttcttcttcttcttcttcttcttcttcttcttcttcttttcttcttctttcttcttctccttctccttctcttctcctcttcttcctcttcctcttcttccttcttccttctttcttcttcttcttcttttttaaagag

SEQ ID NO: 7066 - DNA, 12790 bp, Homo sapiens
aaaataagctcaaatcaccctttcaaataactgagcagcacgctaaggaaaacagatgagctgctcagctctggtccccttcctggaatgaaattagcacccatctggaagttggatcagccaataagcaactggaaacacaggaaacaggggaatccctgccgcagctcactcagctaagacactgtcaacctcagtgaagaacctcagttgctttacagctacaaaaagaaggttctcatgccagaaaccttcgtcaaatcatagaaaacaaagaatcgtgaacttggtttcttgtttttggcattctggcttacaagtagaagcaagtagaggttcgtcaacatgaaaactgccttttaaaggaaatgcattactagactcactaacaaccatatgagacgatgtgattttcatgacaaagccgatgaactctccctggttctgctcagcagaaggacggagacagaacattccaccccgtatgagcaggtgagctcaggaatcccattgcattcagccacttcctaacttgggcaagtttaatctctcaaaacctctttcctcttctggaaaataagcacaggaacaaactcataagagcctgcaatgagatcatcagtgtcaagcactcattatagtgcttggcatacaccaaatgttcaggagagatctgtgatgattatttttcctgctacacacggaatacaataacattctactttctctgaaccttatatatatataacaatacatataaatgcttatttatatgtatatatgatatatatataaaaatatatttttttaatataagggcaaggtctccctatgttgcccagattggtttcaaactcctgggctcaaggaatcctcctgcctcagcctcccaaggtgttggaattacaggcgtgagctgctgtgcccaggcgggacttttttcctattactgtaaaaatatagaaacactagtatttcagaatgctccattctaaaattctttttcctaacaactactcccaaatagctatgacccatatggtttttgtctcatggtcactgacgctgacatagtccttaaccatatatgcctagtgttccattattggaacgctaagcttgtgggagttatttatatcccacccctcaaggtcatcgccaaggtccgatttttcacacaaaaagactgcaacctcaggcataaatgggttaatggcaggcactccgagtgttttccatatgttaactcacctaaccctcatcataatcctgtgaggtaagaactgtcttcatcctcattttacagatcaggaaactgagactcagaacagctaaccaacttgcccaggtgttagagacaagtcaggattcaaaccaggcagggtggcccgaatccataattctcaagcatgacactataggacctctgttttgtgtatttatttggggatggggggtgggggagaggagcaaaggcaaggagagaagaggaaggaaaaaagaaaacaatctagaaggtttctccctcctaccccttcacaggcacgcatacatagaaaaggttgcagctatgaagacatcaccaaatacattctcattggctggttcttcaaataaaaaatttaaactttgcgttgaaagggcagtaagttcctagagatgcctggaaaaatgggagagaatagatgcctgagcacccagcaggactaagctgcccctggagagccaggtgggcgccagacctcactgcactccagagccaagccgctgtgtgcatcacaactgcacacacacaagacacctgcaagtgccagccctttccttctcccgaaaaaacgtctttcaaagcaccttcttaaataggaatgccttactcaaatgtgagaaaagccaggatactaatagctactaccaaaacagtggaaaaataatacgtgtttggcctataaaagttccttacccacattaatcaaatcttctttcttcattagatcattatcctcattttagaggcaagcctaaaaaatggagtgttttggcctaagacatagttattgagatagatagatagatacatatatacatacatacatacatacatagatacatagatagatacatagataaaattgcaattccatcttctagatcctatgatgggctaaggagcccagtgtcctctcccatcccatagacagcccccctacccagaattgtaatgaacgaacaaagtcagaagatgtaaacaaagaaaggaataacaaaaattgatattggcagggtagtgctttgggaagccgaggccggaggattgcttgaggttaggagtttgaagcagcctgggcaacagagcaagacactgtgtctaccaaaaaaaaaaaaaaaaaaaatcttttcttaaattagccaggcatggtagcacatgcctatagtccaagctgaagcaggaggatcacttgagcccaggagttggaggctgcagtgagctatgatcacaccactgcactccaacctggatgacagagtacaacctgtctcttaaaaaaataaattgatacagttattgtgagcatggttacattacaagcatttcccaaaatacaattttttttttctgagatcgagttttactctgtcacctgggctggagttcagtggcatgatctcggctcactgcaacctccacctcccgggttcaagtgattctcctgcctcagcctccccagtagctgggattacaggtgtgtgccatcatatccagctaatttttgtattttcagtagagaaaaggttttgctatgttggccgggttggtcccaaactcctaacctcaagtaatccttccacctcggcctcccaaagtgcgtgagccactgggcctggccccaaaatacaatttaacgttctcttaatataaccaaaggggaaaaggaaaactaaggaagaacttggaatttataggaaagctcaaggtgagagattcatacgctataagccgttggacctaaacagcccgagggacagaattataaggaaactgtgaattcctaaggaaaggcagctagaggaagggaggggcctgagttatctctctctgcagggttgagcgctcctccattctgcatgcctcgcacaatgcacggtacttctgagggcagaaattcggcaattctagtgaattggggttccagagccttggagaacaatttctgcttgaggtcaagagagacctccgggtcccaaagcaatgaagacaaactaggaatgaagatgtggcaccaccaacactagggcttctgcagccggaagcagcagccactccagaaagtatggaatgtacgagctgcttatttaaaatactaattgattcccaattagtaattttgaaggttgactcaccttgacgtctcctatgagaaggggtagtgggagtgagggatgaaaaagtacttattgggtacaatgtacactattcagggggcaggtacactaaatgaggggtacactaagtgccctgacttcaccactacacaattcatccatgtaaccaaaaaccatttgtatccctaaagctgttgaaattttaaaaaatttaaaaaatagcccaggcgtggtggctcacgcctgtaatcccagcactttgggaggtcaaggtgggtggatcacctgaggtcaggagtttcagaccagcctgaccaacatggtgaaacccgtctctactaaaatacaaaaattagccaggtgtggtggcatgagcctgcaatcccagctactcaggatgctgaggtgggagaattgcttgaacccagaaggcagaggttgcaatgaaccgagattgcaccactgcactccagcctgggcgacagagcaagactccctctcaaaaaaataaataaaataaaaaataagatgtacaaacagctcccgtctccctctccctctcccgtctccctctcccgtctccctctccctctcccgtctccctctccctctccctctcccgtctccctctccctctcccgtctccctctccctctcccgtctccctctccctctcccgtctccctctccctctccctctccctctccctctcccgtctccctctccctctcctttccacggtttccctctcatgccgggccaaagctggactgtactgctgccatctcggctctctgcagcctccctgcctgattctcctgcctcagcctgccgagtgcctgcgattgcaggcgcgcgccgccacgcctgactggttttcgtgtttttttggtggggacggggtttcgctgtgttggccagactggtctccagctcctagccgcgagtgttccgccagcctcggcctcccgaggtgccaggattgcagacggagtctcattcacttagtgctcaatggtgcccaggctggagtgcagtggcatgatctcggctcgctatggcctccacctcccagccgcctgccttggccccccaaagtgcagagattgcagcccctgcccggccgccaccccgtctgggaagtgaggagcgtctctgcctggctgcccatcgtctgggatgtgaggagcccctctgcctggctgcccagtctggaaagtgaggagcgtctctgcccggctgccatcccacctgggaagtgaggagcgcctcgtcccggccaccatcccatctaggaagtgaggagcatctctgcccggcagcccatcgtctgagatgtggggagcgcctctgccccgccgccccgtctgggatgtgaggagcgcctcggcccggccgcgaccccgtttgggaggtgaggagtgtctctgcccggccgccccgtctgagaagtgaggagaccctcctcctggcaaccgccccgtctgagaagtgaggagcccctccgcctggctgccaccccgtctgggaagtgaggagcatctccgcctggcagccaccccgtccgggagggaggtggggctcagccccccgcccggccaaccgccctgtccgggaggtgaggggcgcctctgcccggccgcccctactgggaagtgaggagtccctctgcccagccaggagcccctctgcccagccagacgccccgtccgggagggaggtgggggggtcagcccctcgcccagccagccgccccgtccgggagggaggtggggggctcagccccccgcccggccagccgccccgtccgggaggtgaggggcgcctctgcccggccacccctactgggaagtgaggagcccctctgcccggccagccgctccgtccgggagggaggtggggggggtcagcgccccctcccggccagccgccccgtccgggagggagatgggggggtcagcgccccgcctggccagccacccggtccgggagctgaggggcgcctctgcccggccgcccctactgggaagtgaggagcccctctgcccggccaccaccccgtctgggaggtgtacccaacagctcattgagaatgggccatgatgacgatggcggttttctggaatagaaaagggggcaaggtggggaaaagattgagaaatcagatggttgccgtgtctgtgtagaaagaagtagacatgggagacttttcattttgttctgtactaagaaaaattcttctgccttgggatcttgttgatctatgaccttacccccaaccctgtgctctctgaaatatgtgctgtgtccactcagggttaaatggattaagggcggtgcaagatgtgctttgttaaacagatgcttgaaggcagcaggctccttaagagtcatcaccactccctaatctcaagtacccagggacacaaacactctgcctaggaaaaccagagacctttgttcacttgtttgtctgctgaccttccctccactagtgtcctatgaccctgccaaatccccctctgtgagaaacacccaagaatgatcaattaaaaaaaaaataaaattaaaaagaaaacaacaacaacaacaaaaaaaagtcctcccataaggaaagatgatcaattcttatgtatcgttctagggatataaatattcaggaggcttttcagaataaaagttaaatcatttatgtcgcacaaacaaatttactattcggacaaatacgatgacaaggagtttgagtatcgacatgtcatgctgcccaaggacatagccaagctggtccctaaaacccatctgatgtctgaatctgaatggaggaatcttggcgttcagcagagtcagggatgggtccattatatgatccatgaaccagaacctcacatcttgctgttccggcgcccactacccaagaaaccaaagaaatgaagctggcaagctacttttcagcctcaagctttacacagctgtccttacttyctaacatctttctgataacattattatgttgccttcttgtttctcactttgatatttaaaagatgttcaatacactgtttgaatgtgctggtaactgctttgcttcttgagtagagccacctccaccatagcccagccagatgagtgctctgtggacccacagcctaagctgagtgtgaccccagaagccacgatgtgctctgtatccagaacacacttggcagatggaggaagcatctgagtttgagaccatggctgttacagggatcatgtaaacttgctgtttttgttttttcctgccgggtgttgtatgtatggtgacttgtggatttatgtttcagtgtactggaaactttccattttattcaagaaatctgttcatgttaaaagccttgattaaagaggaagtttttataatctaaaaaaaataaaaataaaaataaaataaaataaaaccctgctgcatgagtcatattactccaggaaaaaaaaaaaaagaagcaaattttgaaggaaaataaatcacacattttgtatctaaaaagaagtctaggcgctaggtatagaccttaggaagcagatgcatacaaacaaagtaacaattgcttaaagttgtctttaagctcttttcagaatcaagatgaatggaaaaactacacaactggtgactctgcagtgaatctccctccggctgtgactacacctgtttccagcaaaaaggagccggcgggctgcataaagcaccctcatcgaatgacactataaaactgtatttcagtgtgctcagagacaaattggaacaactggtccacaggctggatctaactcggtccttgtctttgtctaatagctgaatacatgaacagattttaataactgaactgctgtttggttgctgtatgttattttttattttttttagagacagggtcttgctctgttgcccaggctagagtgcagtgtgtgatcatagctcactgaagcctccaactcctgggttcaagcaatcctcttgcctcagcctctcaagtagctggaactactggcatgcatcaccatgaccacctctttttgtttgcttgtgttttgtttttttgagatggagtctcgctctgtcacccaggctgaaatgcagtggtgcgatcttggctcactgcaacctctgcctccctgggttcaagcaattctctcacctcagcctcctgagtagctgggattacaggcgtgcaccaccacaccaggctaatttttgtattttttagtagagatggggtttcgccatgttggccaggctggtcttcaactcctgacctcagatgatccaccctccttggcctccaaaagtgctgggattacaggtgtgagccgccatgcccagcccaagttgctctatttttaaagatagctcaggacacactgaagccataaaaactcacaaagacgttttgctttttcagtaagttctgctcaattctttactgagtgttactgacgagttaggaggcactgaaggtgaagccagatggagccacatctccagccaagagtgtggaaggccagttcaggcccaggcctccgggcacctgaaggcaccagcgggagaatgtctgctatgcagtgtcctcagggcattgatgggctggtaacacagttggctactgaacagtgatttgtattctaaactctccctttcaacaaatgtggaaggaactgtaaagtgatttgaaaagcttactctacacaaatgggccctggcttaccaaggaaaggtttccaaactcaggacagaattggtttttttcttcaagaagtgaaaaagtaagatatgacacactagagagtaaaaacatagacgaaataaatgatttcacctaaaataaggatgggttcaaagtgtaggcttctacagcaaacgctttgctgagacagaagcttgggagttggctgaaggtgctagtgggaatgttgagaccctaactttgtttacatatgatggaatgcacgtaaaataaagatcatcctaagtcacattcttcacagagcaagccctttgatgaacatttccctgcaaacactccaacctaccagcagattcagaggacaccctctcaccaagaagatacatttacaaaatctttccacccactacagcctgaaaatgtcacacaggaaaaattttgggcacactgctcggtgactcccctcccatagcttataacacagagaagaaattcttactatttcctttttttttttttttttttggagatggagatgtgctctgtcgcccagcctggagtgcagtagtgcgatctcagctcactgcaagctccgcctcccgggttcacaccattctcctgcctcagcctcctgagtagctgggactacaggcgcccgccaccacacccgactagttttttgtatttttagtagagacggggtttcaccactgtgttagccaggatggtctcaatctcctgacctcatgatccgcctgcctcggcctcccaaagtgctgggattacaggcgtgagtcactgcgcctggccactatttccattctttatgtgagccaggagttacctgtggcacccctacccccacctgcaatcacgatttcagtcctcttggttatttgagtattaacaaaaacaagcttgagaagcactgcaccttagcccatcgcttcaaggctcacctgactgttctcagaaggaaggagacaagctgtagacccagctggtagggccaccttcctctccacgctccagccctgccgcctgtgtttgagctgatgcagggctgaagtgtgcacacaggtatggatcatatttgcgtgttacagtggacatgtatggcttttgcctgcattatacccctctattcatctggaaattcttcctctctccttataaccataccccacccacccctcactgcaaaaatagaccatgcacagacccactcctctgtccacagccaaagagattccttccacaagacctgatttagtagcactagaagaaagatggtctctcttttttctttttgggttgaagctggaaaagcttccaggggccacctctcaggcccctgtactccaagagagaataaggccaatacccaaaaaactcttgagttccatctgcagccagcttcatcattggattttcctattattcatgtcaacaaattccatgttttgcttaagctagtttgagtttgggagaagagagagatgtataacgcccaagtttcctcaagagacttagagttgcctatgatttcattcattgaaatagggaaataaaataaggaagtaacagggaaaattttaattttccctattgaaactgaaaatagggaaataaaaaaaattgtatctagtaatatatccagttaccattttctattaaaatagattcttcatttgtgtaggaaatcattcatcacaaatacatattcataaaatagttacttatgttttgcagaaaattattgcaacttgacacttgaaatcttataagtaaatggttcaattataaggccccaagctatcttttgtggctgacattctaatgtatttggaagaccaaataaaatgtttctaaatgaataatctcatgtcagacaagatatggtggcatgttaaaaagtaaagagctataggctgggcgcggtggctcacgcctgtaatcccagcactttgggaggccgaggcagatggatcacctgaggtcaggagttcgagaccagcctggccaaaacggtgaaaccccatttctactaaaataaacaaaaattagccgggcgtggtggcgggtgcctgtaatcccaggtactcgggaggctgaggcaggagaatcacttgaacccgggaggtggagattgcagtgagctgaggtcacaccactgcactccagcctgggtaatagagcgagactccatctccaaaaaaaaaaaaaaaaaaaaaagtaaagagctttaaaagtgtgtcacaatgaactgtcccatactataacttcataaaggacagaggaggtgctacattttgaataaatgttccatcaaaataagaaaaaaatattcaaagaaaaaaaaatccacattcaacagtgcaaccagagtcttcttacagcatttatatgtctcactggatctaagacaaaaaccatccacactgacctccccgctgggttctgcgtgagattaacaactgcatggacccacagagcagccacgggctctgtgtttctgagctcactcagctactccctggatactgagcaaagctgcagccagtatcaggaagttagctcagatcacacgttcacgaggtttatcagatgtagaaattatcaataaaattattccatttcataaagaaggcaaggttctgtcctttggaaaccctaacagccatcagttcaaaacttattacagagacactgaaaatgaatccctaaacaagcacagctcacagacctttgacctttgatgactttgaattatctgtggacaatctgctcacccagatagttcctgtccccacgcagctgttctctgagctgtccctggtgcaaactctcaacactcagcccatcatagataccttcatttattttgaagttgcctcctttgacttcagactttaggagaaaaagggtagaatcgtactgatctcactacctggcccagattctaaggcaacttcacaggctgcctcacaaatattcgttaaatgaatgagtcttatttcctttcactttgctgtaaaaaaaaagaacgcatcttggatcttaggctctcgtccaagacagttcaaaaatgtgaaggggccccatgtaagcgagggtgcaatgtgaaaggatctaggcatttatttttaatagagaaaaaagagagagcttagtttctgtaaaagcaaaaacaaaattctaaccttgaaacagatgcaggattattcctccattttcataatttttctctgctgtttttaaagtttctctgggttcattatttaacgttccctcttaacactggatttgagggtaacctggatcaccgtgagggtgaaacgccagatgctgagcatttctgcgcttccccttccccagaccagccccccactgctccagagatgtcaggcctttctccttctccaccacctggtgccagaaaccctgctcttgacaatcgcatcttccaccccaaatgcatcactcttttccactcatgttctgctcattcatggcaagtgaagcagagaaggggaggggaatagaacacaggccttctgtcagctggttctccagatgcacgccagcagcccctgtggcgggggctccgacaaagggcctggcctggggccagcagactcgtggaaccagcaggcaggcatcagaaggatccagacaccaacgtccagggggattctcaggattgccttcaggtagccgtgccctgcaatgtggggtgtttctcatcccaaatgggattcctcagtggccctgacaaacagttggggaaagttaatagtaaaggccaagtctctcctccaaagtccctgtcaggtgggctcttgtttttttgggggaaggagcccagggtctagatcagtcgcccaggctggggtgcactggtgtgatcacagctcacttcagcctcaaactcctgggctcaagtgatcctccaaccccagcctcctgagtagctaggaccacagccacatgacaccaccccagctaattttttaattttttgtagagatggggtctctccctatgttggccaggctgatctcgaattccgggcatcaaataattctcccgcctcggcctctcaaagtgctaggattacaggcatgagccactgtgcctagcctcaggtgggttcttgaactgttcattaatatcctagttcactggtacttcctgctccagtgggctgggcgcctcagcctaccatgctcaaaatcgtaaccactcctccctcagccacgtctgtgctttctcataagttttccaagttgtagagctcacgccactccctaaacttgcagtgtcgtgtgtgtgtgtatgtgtgttcaccgaggaactgagcatgcaccaaactgtgccacaaaatatgttgtcttacaaataattttgaaatgtttataccatgtctctctcactagcagaaatgactttctcacgctttctctctctctctctttttttctgtagagataggctctcactacattgcccaggctggtctggaactcctggcctcaagtgattctcccacttcagcctcccaaagtgctggcctcttcttttttaatcctccaaagcatctaacatgggttctcatgtagagtaggtctcaataatttcttcaccaaattctgcttaaaatttaatttctcagtttattgatcat

SEQ ID NO: 7067 - DNA, 20574 bp, Homo sapiens
aaatggcagtgtcagaacacaaggtaggtgacatttcaggagaggcaaggagatggctactatagctgtcctttcctccctggagatccccttttctctgctcagaccttgggaagttattgtttggtttcatgactcccttatttggagaccaggctccctccagaagggtactataatccaagtggccatttccacaccttaccaagttctcacccatgttgggcaatatcccagtagcctcctcagggcctcccttgaaagcagtgctttcctaacccctccttaccttgtgtccccaccagtgccaaggccaggcctcctcgtccctccccgcgaagggaactcagctgcccatggagacggctcacagcctggaaactgttctcatcctccaggctgaagacgaagatcacagcatctgcccagcctgagaacttgcggggagtgagggagcaaatggaaagtcagacaggtctactcctctggacccaatccagatgaagacctgggaaaccagagccctctcctttggccagtgctgaccccagccagcctgtcccccaccacctccaccctcaccttggcatcaggtgccccagcttcctctcggattagcaccagatgtgtctgtccatccaccaacatttctttcttgtactgctcacctgtccagaagagttggaaggggtaacaggtcagaggtgacaggtcaccaaacctccccatgctcccagtgcttttgctattatggcctcatccttcccccctggtctccacacctgcctaatcattgatctcactcctggatccctgaccccaatggttagcttactatggctcttcagaactcactctctgtcttctccagcacctggtatgagccagtcaggaatcggtggatgagcgatgacttcccactcctggcatcgcccagcacaccctgagggcaaggttgtggagcagaaattgtgggatataagagaaggcaggatgcatgggtctggacactccagaaaacccagagagataagtcatccaagcaggaccctacagggcctggatgacagtcattccagagagagcagttgggaggatcagagcagctggggggatcagagcagttgggaggatcagggcatgagtgtggtaagaaatgatcccaagctcaaagtggagcacgagctgaagaatgtcagcaattcagtaccagcttttttgtgtgttgggttgtttagaaaacatactagatatgttgtgtgtgtgtgtctctgtgtgtgtgtgtttgtagcatgtcacagctctaggcactagttggaaaactttacccaattctaggcagtacaacatgaaggccaaagggcagataccagaaatgagaagcctggaggaggaccatgaacaaacaggaaaaaggggatggctgcataaagactagataggaaaaacttgtgaggaggctgtagcaaaccccatgttggtgctatgaaggcagactctcaggagaactggaaaacgattccctattcccaaagagagagagagagagaaggagaggtgaagggagagagctgagagtgcagtgggtgggaggtcagccttccctataggcaaggggactgggttacctaccaggcgcagttcaggaatggagcggctcaaagtccattcctggctattgatcacagcctctgtaacgggagaagggcagtaagaggggaggctcctggctcagaaggacccccaacactgagccacccctcctccctctgcagctttccaacccccccccaaccctgcctgcactggagaggtgtgtgcaacagacaggtttgagggtggtccccaggcctcccatcccagccactctcccccagctgttgctgccgctcagtggttgcttagcaacggagctagcaagacaaaaatacttcagttggcatctcccttaaagcacatccccaaacgcgggtcctggccccagacagggagaccagggctctgacagtggcaggttcttccctctggaaaaagaatagaagaggagctcctccctaacccactggttcccagggcagaccctgggaggaggtgctgaaacacagaagagagtgtgtcttccccaacctccattccacagtagagaaactgaggtgaggggtttccctccccttcttcaaggtcaacggcactgtagccctggacccctccccacagcccaagggaaagagctaggattttcctatgcctccatctcccacaccctccccacaaacgccctccaaaagaactgtggggaagggctccatcgcctggccgagagaagccacaggcccgggggaaaggatgctccttccgccagccaggtccagcccccgcgcctgacaccggccggacgttcccggggcgccgcagctgcggcgggaactctgggatccggagccatctgctcccacccgctccggagccaaaccccgggggccgcctccgctcccggacccgcctcctctcccgggagtgtgagccgaaccaagagtctcctgcctatctcctccagtaggaaaatagtaataataatagacaccctgcccccgtaaaaaacactaccttccccgtaccgcctcccaagtctcccggggtacggattgcctttgcagcagttccgccccacctgactcactccagggtcagccccgggtgggtttcaatgcggctctggggagggggtgggcagtgggggaagtgaggcttcctatccgccccctctcacttcacatttaaatattctgcacgttccagcccccgcggactcgcgtaccgcccaatccgccttcaccgcacgaaaaacatcactagcctgctctcagcccaggggacgactagtccctggcgagaagctgcctgcaaggtcactgtcatgccacctgccccaagtgctcaggggaaactgaggcttcctcatccccttcaccttcaacgtcgctctaaacacggcaaagccccgtttccatgctcccagagttcagctgaggctggaagtggggtcctgggcttctctgggagcaattttctagtcactctgatcaaggacgttactttcccagaaagctctgaggctgagtccctctgaaatcaagtcctttctcctgtcgcacaatgtagctactcgccccgcttcaggactcctattctttgccccaatccttgacagaggggtgagcttggttcatccgcccaccccagagaaaagcttccctagtttcctggacctcgctcctccaccccaagctgagcattccaggtacccttccctccctgttctcaagccctgactcaactcactaggggaagcgcggagctcggcgcccagcagctccctggacccgctgccagaagacaggctggggggtccgggaaggggcccggagccaggaggccctcctgtgctcttggtgaagatgccgctgataaacttgagcatcttgcggtcacgagtggatgctcggcccccctcccggccccgtttcagccccggagctggaggctccagagtgattggaggtgcaggcccggggggctgcgcggaagcagcggtgacagcagtggctggactcggagttggtgggagggttagcggaggaggagagccggcaggcggtcccggatgcaagtcactgttgtccaaggtcttactcttgcctttccgaggggacaacttccctcgggctccagccccagccccgaccccaccagaggtcgaagctgtagagccccctcccccggcggcggcggcggtggcggcggcagagaccgaagctccagtcccggcgctgctctttgaccccttgaccctgggcttgccctcgctttcgggccatgacaggcggctacccgcgcccttgcccccgccggctttggctccactcgtggtcacggtcttgcaaggcttgggagccggcggaggaggcgccaccttgagcctccggctgccggtgccagggtgcggagaggatgagccagggatgccgccgcccgcccggccttcgggctccgggccgccccagctcgggctgctgagcagggggcgccgggaggaggtgggggcgcccccaggcttggggtcggggctcagtcccccggagagcgggggtcccggagggacggcccagagggagaggcggcggccgggagcgggggagactgggcgggccggactggccggagccggggacagggctgggggctccgcgcccccggtgcccgcgctgctcgtgctgatccacagcgcatcctgccggtggaagagacgttcgtgccgcttcttgcccggctcctccgcgcctcgggggctgccaggatccccagtctcggagcctctggcaccggcggcgccggccgcggccgcagacggagaaggcggcggcggaggcaccgactcgagcttaaccagggtcagcgagatgaggtaggtcgttgtccggcgctgaagcgcgcccgcgccccggctcatggggcccggagacccccgagctggggaggggaggggactcccccggactgcctcaggggggcccggccatggggccgccctgctcgctgcccccagcccccggaccccgctgagcccccggcccggctccgctgtcgccgccgcctccgccgcctccgcttgcgcccccctcccatcacatggggcgccccctccccatgctccccgccctgcgcccccaccctcttggagccccgggaccttggtgctgctccagggaggcgcgccggaccgtccaccccggcctgggtgggggcgctgagatgggtgggggagggcggggaggacagtagtgggggcaaatgggggagagagaggaaaagggagcagaaaaggggaccggaggctaggggaaacgaacctgtgcgggggaggcaggggcggggaattgggactcaagggacaggggccgcggatgcggtcggaaagagggtctagaggagggtgggaagctagtggggctggccgtgcgggggattcgcaggggcgcggggaggatgctggggatggagatacaggaggcggcgggggaggaaagagggaacgggaggtgggtgggaacccacgggtctggggtctgggaggggaggggcgtgagatccgggcgaagagtccgggggcctcgcctgggctcggcttggtccggatgcgcgctgtgtccgggcgctcccctcacattgaggaggaggcggcccccaggcccccccaccctatctcccccccaccttttctccaccagcaccgatgtctgcgagggcggtgcaaaatccagggctggatttctctcccaaatcctgggctggatttcctgggacttggactcacctcctccaacaacctagccccctcctctcgcgcaccaaggttaggaagcgcgattgtgaggtatggcatttagggataagggtgaaaatcgatctattgggtggacaggggccgcggtaaacagagcaaacccagggtcactgccaattctggggaagatgaagtgggaaagtgggggccctgaaatcccttcccccaggatctcttgtctcccccaggtacctggacggttcccgttctcatgacccagctccctttcccactcacaccaccacatttaatactttgacggggccaagacttgagctcgactgtcccaaagtgaacttggaaaatgttccccagggatggggacaaacatggaacttagcagggtaggagagaagggagagatctgagtgctggaggagcccaggccacagggtaagtcaaaggctccagctctaggaggagggagaaggatgtgtcttagactgatacccccccatgccaaaatgcatccagtctccatagcaaccgtagctccaagagtgcctcagaaacagcgggcagaagcagagaggaatccgtgtgtatggtgggtaggggaccaaccgcgggatgctgaattagtggaggcactgccctgacacctggctacccacaggtggaggatttcactccccaagtataaggacccttcagttgaggcagtgagagccggcctcttcagggttccctttcagtctcctgaggtttgctgagtgggattctttcagaagattaaagaggaggcaggcagagtgaatggaaaccgtctgctccgtgtcccccacccctctaggggtcttggagttcaaggctctctatcctccagccaggtgagaatcctgaagtggttaggccaaagtggaaaagaggttgagaccccttgggggtggggtaagatgggcgaaggaaggtctctctgcagccttggagaccccttcccgggacttggggagtcacagcagtcccctgatttggcgtcccaccctcctgacgcagctgagactataataagtgctgccgtgggcggctcttggaggcaggagcccgcagcgtgcttggcctggtggggggctgagggtgggggggctgagccaggatgccaggagccctttgttctcccagaggcctgtatccaatccctccaatgttctgtcctggggctcagcagtttctccctccctccctacagaaccaagatgacaccatccccaggacaggagacccttcagtagtgttttttgatggagagggtgaaggagaattgttggctctggcttaaacttccctcctttgatggcctcggttttcctttatgttcaatgggaacagaatactaattcttagagaaggagtaaaacaaatcacttatgaggagtgaagccttctcagggatttccacctccacccctcctcaccctcctccctctccagagctaagcacagcttttctgcctggcctaaaccgctcttctcctttattattattatcattattatttttgagaggggtggggcttagagtttctccctaggaggccccatggcccactcccccttggtctgcctttccaaacactaaggctgtcaggggaagcttcaggtgtagttcctggcaaagggtatgggacaggaggtgagaggggcactagcctccgaagaacaatgggaaggggatcatcagactgtcccactaggcatccaaagcaagctgttccttccccaagttatactctggtgtactagcagagaggtctggcaggaggtgtccttgagggaaagaatgatctcttgacaaccacccaggtaggcaggtaacaatggagaagactgaaatggctggaagagatcaggatatgatggargaagtgtttccacyagayacctttcatgagcaaagaaggctgcttttgttagctctttgctgcatcagaggtgaatggaatgacagcgagctggaacaacctccagttccaycagttcctcagtggtagggccttgtggatggagagaagctgttcctgccagggctccaccacaggactgaagcctggggtgggcaggaggatgtggcggatggtgttgccatggcagcatttcctccctgtgttgtcatcacttgctctaatggcactaaggaggtagagcggaaggtgtgtggggggaagacaggracaggagcaaggggaggagaggggaccaagragagttctggggacctatctgcactttggctctgcagagcatagtgtgtgagagttagtatgcgcttgggagcctgagattctctgcatggtgtacttcaatgtgcatgcgtgtgtgtgtgtgtgtatgtgtgtgcatgtgtttctctctacagctggagaacaagaggtcactgatcctttgtgggtcctgggaatgaactcattatccagtcccagaacctgctgccccagactgcttcctgctctggactccccaggcagggaacaagtctaccatgagtctgtcacagccyatcttccccatgctcacacatttcttcattgccaagaaggtcagctcaacagggacctgtattttgatctcctgggagaaggatcagagcagggaaagagaaagaatgatacctcccatgtctttttccatcctccctaaatgtattctttcccagagtcccatcttggggactaggaagtagctgactgggaattgatatatgatacagctaaaccttctatgcacctgctagtcccygatacacccaagttgagggctgacctttctcttacctcgaatgctgtccaatgaggcctggatgctgtcctggagttcggggtcgtccaccctctctgccagcttcctgaggcggtttagagcctgcttggccacctcatgtcgtctgacttctgctctcactgcagctacaacgaactgcctctgggcatgcatgttgcccagacctgtcttgccaggctaacaaccacctctggccctgaggcccatggccctacagcccccaaacctcagaaggccccttctgctgtgcccagaactccccgcccctgcccgcccttccgtctgtcgacctcacttcctgactggtgagtttcaaacccacagcctgggacagcactacctcctgcacctcccaccccctctagtgttggcccatcaaccctgccagccagtccctgctatgatttcccagccaggtggatggagaaatcttaacagtgtcccagggcctcctgtgggaggtggctaattaagatgggtgttggttcygggagaatatggcaagctaggtccgaggtgcaatcctaaactcttgatgacctgcggatttcaaactctcacaggaattcatgcacatttggtctgttaccctcacagccctgcattctagtatacacttgtacccattgccctctctacacatcccaatgagccctgtatccttatgtcttacgatgtaaccctttttcaggcagctacccactgaggccacctcctgtttaaaagggccaagtgaggccaggcgtggtggctcatgcctgtaatcccagcaccttgggaggctgaggcaggagaatcacttgaacccaggaggtggaggttgcagtgagccaagatcacgccactgcactccagcctgggtgactaagcgaaactccacgtcaaaaataaataaaataaataaataggccaagtgattatggggaaaatcagttatgaaggaggaaagtaacctataaaaagacaaaaactaccatgttccatgtccaatcgctyycataataattaacatgactataacacttaatagtttacaacatactttcatatatatattatcctcatgacagccctgaggagtaggattatttatccctatttgcataaaaggaaactaaggctcagagaagccattaagaggtgaaacaaagacatggatttaggtcttctgattttatttttacatttttatttttattttttaccaagcacataaagcccagattggttataattttgatacccttttcactacaccacacaaccaaaatgcttgtcaaccagttccccttctaatatcattgtcttgcccttgatttaggacctcaaagaaaagaaggtagatgaggaactgaaggagacaatgaagatgggacttggggtaggaaggggatggaggtggggagtgagggggtgggaggtaggaggtagcgggtagtttgacctaattactttgtttccaccggacgcctgtaatcgtagcactttgggaggccgaggcgggcagatcacctaaggtcaggagttcgccaccagcctggccaacatggcaaaaccccatctctactaaaaatacaaaaaaattagctgggtgtggtggcgggcacctgtaatccagctactcgggaggctgagccaggcaggagaattgtttgaacccgggaggtgaaggttgcagtgaactgagatcgcgccactacactccagcctgggcgacagagggagactctgtctcaaaataataataatgataatarcttaattaccttgtttcaagacccaaacacctctctcgccctgtcaaacatctattctcctgcatacctttttggtattaatttctgtaagagtttatataaatrctgtgtagttaaagataagggaattgaggttggaattgcccacaggaacctgtaaaatgacctgaaaagtaataactaacattgagtgtttactatatgccaggtactgttctaagtattctacatatattaactcatttaattcttacaacccaagaggtagggtgtgttgttatttatccccattttacagatgaggaaacacgcacagacagtttctaagtgcctggccaaaggttacgcagctaggaagtggcaatctgactgtggcagtaagtctatagaatctaagtacacacaaacttaaatcattctgttgagttgattggagggttttcttttttgttcctactgtttctttctcctggggaagagaaggattatgcctttccctacccccgtgagaaggacggtttgtcaaagcacttactagataataaagttgttgatcagcctacccccaagtgaaaaggtggaggctccttccacttatatttatgtaaatgagactcttcctcttgcctgccgtttttttgcaagccctagatcaggcgtgtactctgaaaatgctgagcacacccctctgtgcacttgtggcaatgccacatacaggaatgcgctggcctgaggccgctatttccacactgaatttctggtatattcacacccctttaggaggagatatggaacaggacatgggtactagaggacacacaaacgtgtgatgatttgctgggtgttgctgtgtccaacccgcggactctgcggccgggctaaataagctcaatatgtggctcctttgggtgttcccgagcgtgacgcaataacaaaacaatggcgtcatcgtgaggtcactgcagaacagggggaagggggtggggaagggccctccttctacgggcggagccctttttgcccagctctcagagcggccccctacccgcccctcccgscgtctccccttcacctaagttcctccagagccgtctccctgggaattagccctctcctaactccgaccacagaaagctcagctttcaacctaagcttttggagtttaggctgtagyccctaagagagtctctagaaaccctgcccctagttttaagtttcgcccaatgaaaaaacaaaaggagagggacagaaggcgggtcggtgacgtaatgcgggttgattggcatgcaggccttggacgtccaggattagccacgcatttcgccaatccagaggcaggggagggacggtgcaggcgcagagtattgggtttggctggcctcgatttaaagagacagaagctgtcggggtcctggaagacggtccccaataccctccccccaagtccttgggaccacttgggtccccagagctggggagatggtttgtggcggctttgcctgctccaagaatgcgctttgcgctctcaacgtggtctacatggtgaggttttggaggtgggggaagcttcaaggcggaaaggccccgtggggagaatctctagggtacttccggtggggagaggggtgtatgggggttccgggaagattcccaggaacttccggcgacgagggaattcctggggacttccgtgggagagaggagacttccggttgattaagggggtttgtctgagggtgggggaatgaactgaaggccgtgggcgtaagttccatacctccttcctgtgaacctcagtttcttccaaactggaagtgataggatgawcctgagggttcatcttttgcattcatactaccatccctgccaccccctccccgccatcctagccattctaacctttgggagtgcctagggatgctcccggtgcggatagcaccatccccagctcccattcacacactattccattattccttccccctgccccgctcccaagtcctcttgtatggccttgggctgtgccgcatgctagaattgttgagatgtatcctgctctttcttcgtagctggtgagcttgttgctcattggagtggctgcttggggcaagggyctgggtctggtgtccagcatccacatcatcggcggagtcattgctgtgggagtcttccttctccttattgcagtggctggactggtgggtgctgtcaaccaccaccaagtcctgctgktctttgtatcctgacctgaagtgatgggggcaaccgggrgcttgggagggctrtcatctaaggaagatgttagaagggtaggggacctcagggatcttggacacgtctccttgccctgccctgtcccataatctacgaaacaagagctgattttattgctttcaatttgacatggtggtgtaagttctatgaacagatgagaccagacagttattatagatgaaacataaaggaatctaggacttttttccataacctttcctctcagtacatgatcatccttggtttggtcttcatcttccaatttgtaatctcttgctcatgtctggctattaaccgaagcaaacaggtaagacagtaccctttcaagtacttacttgctttttaaaattttcctcttaacctcgaactccttccttagtctggccccaactacccaaagatcatccttaggtgcactgcttctggcctcttgggctatttgcttcctctgggatgtctggttaattttccatgaggatgatctagagaacctcaaaaggtagatatttatcgtgtctataattgttgcacaccgttatgcttctgtttgacttcctttgctgggctagggaaattgaggcacttgaactgataacaggatgtagggagacttaatttccctctacccatatctttcagacagatgtcatcaatgcttcttggtgggtcatgagcaacaagactcgggatgaactggaaagaagttttgattgttgtggcttattcaacctcacaaccctgtatcaacaagattatgatttctgcactgcagtgagtgtgttgggggtggtgcagcagccaggggaggtaggaaactgggtaaggacaatgcccaagttggcaaatttagtttgaatgtcattgtttctctctctacaagccctcttgtattggggctgtgttggtgggaggtgggggtggatagaggctggggaattagccaagtaggattttagtttgtaggacactggtcagataacagtaaagtttctagggacattcggcataggtattagtcactagcaactttacattcacaactttgcattcttcacgttttatcctcagatctgcaagagccagagccccacatgccagatgtgtggagaaaagtttcttaagcattcagacgaagccctgaaaatcctagggggtgttggactcttctttagctttacagaggtaacattctccagttccctcacacacatcctttttgagactgagaattaattgatacttatctctctccctttgttcctacagatccttggtgtttggctagcaatgagatttcggaatcagaaggatcctagagccaaccccagtgcctttctatgagactttggatccttctgacttttcttctgctctctctaagctttctcttcctcccttagggaatatctagggtctgtaaccgttttggtttgagaaaaaggaaaggccccttgtcacatcctctaaaattgatggaatagcaagactttatgccttgacatattttagtgggagccagactataaggaataaaaggaaaaactttcttcctctctctccaagaggatatgggaagcttctgtgagtgcataggatgggggctggagtcattcttagctgtttcccttcctctgtccatatactggatcacctcaacataccctggtgtggctctaagggtaaatcasggatagggccaaggagaaaacaaccaagaactctttcctgtaatargcaggatccagtttgagaaagtttagcgaatataaaagtaaaagccatttaaaaatctatattctttttttttttttgacacagagtcttgctctgttgcccaggctggagtgcaatggcatgatctcggctcacygcaacctctgcctcccgggttcaagcgatcctcctgcctcagtctcccaagtagctgggattacaggtgtgcaccaccacgcctgactaattttgtatttttagtagagacagggtttcaccatgttagtcaggctggtctcgaactcctgacctcaggtgatccacccgcgttggcctcccaacgtgctgggattataggcgtgagccaccacgccccgcctaaaatccatattcaaagaagcaatttcagttcctttytaagctttstcagtcaaggggctccactgacttcctaggccctgtaatttaaccagtctttaaggttttgcaggamagtcccttcttccaagtggtttttccaaatcgcacaatggcaaagccaaacagaggaagaaacattaaaaaaaaaaaaaagaccattatttctttgttttgtttttcctgtataaaaaaggacmccaaatataaaggtagggaaagggacaagagggaacataccccttagtgtagagaaatgggaaggagaaggagaagcctcaaaaggagaggtgggaggggaatgtcattaaggcagcaaagtaatctctgtagaaagatggaggaggaccctccatagcctcagagataaaggcaaagattgccctctcagtgtccagaagggaaatggcagcttttcttccttccatggcagccactccattgctcactccggattaccttcatccttatgtagataagagtgctgcagagctcgaaaggcagagattcgcttgtgtgggttaaaagtcagcatttcctgaggggagaggcaaaggtcagaaaaccatgaagaaaacagacttctgcccacccacaacaatacctgggatgagctttcttcttttttctttttttttttttttgagacggagtctcgctctatcacccaggctggagtgcaatggtatgatctcagctcactgcaacctccgcctcctgagttgaagtgattctcctatctcagcctcccaagtagctgagattacaggcgtgtgccaccacccccggcttatttttgtacttttagtagagacgaggtttcaccatgttggccaggctggtctcgaactcctgacctcaggtgatacgcccaccttggcctcccaaagtgctgggattacaggcgtgagccaccgtgcccagccaggatgggttctcttctatatccttctctgtgggtggctatttgcagctgtaataaaaactacagcccatctaccaaccaagtttcattaaccacagtggccagggccctgcatactgctctatttctttccccagtctctatttctttccctgtgcccacagccatctccagtaccagcagcagctgtgctcccgactcctccatctcaggtaccaccgactgcactgggcggggccctctggggggaaaggctccacggggcagggatacatctcgaggccagtcatcctctggaggcagcccaatcaggctgtgggggacaggagaactctggtcaggagggtcctccagttcccatccccatgggcagagccagttgccatcctgggttcagcagaaagaggactcagaatagaaaatctttttctcccatgttggtcacttactcaaagattttgcccaactggtcggcttcagagtttccacagaagagaggcctaaggtgagaagggatataaggtagcagtcattttcaaagatatcttagttgaatggttactgcttagtggctcaaaataggaagtatagggaataaaggccaacaattccagcactttgggatgctgaggtgagaggactgcttgagcccaggagttctagatcagcctgggcaagcaagaccttgtctctttttttaaaaaaaaagaaatgccaggtgcagcggctcacgcctgtaatcctagcactttgggagtctgatgtgggtggatcatgaggtcaagagatcgagaccatcctggccaacatggtgaaaccctgtcattactaaaagtacaaaaattagctgagcatggtggcgtgcacctgtggtcccagctacttgggaggctgagtcaagagaattgcttgaatctgggaggtggaggttgcagtgagcagagatcgcactactgcactccagcctggcgacagagcaagactccatctaaaaaaaaaaaaagccagtcatggtggcgtgcacctgtagtctcagctactcaagaggctgagatgggaggattgctttagcccaggaggtagaggctacagtgagctgtaattgggccactgcactccagcctgggtgacagagtgaaaccttatctcaataaataaataaataaataaataaataaataaataaataaataaaaaataaagagaataaagggatatgaagttcctaattccagaacatttcagagctttctgctatgggcaagttagtagtacgcaagtaaaagaatggggccagatgcagtagcttatgctactttgggaggtaggggtgggaggattgcttgagtgcaagagttcaagaccagcctgggcaatatactgagaccccatctctataaaaatattaacaaactagccaagcatggaggtgcgtgcctgtagtgtcagctagttgggaagctgagatgggaggatcacttgagcccaggaggttgaagctgcagtgagctgtgatcatgccattgcaatccagcctgggcaacacagcaagccctggtctcaaaaaaaaagaatgggcaaggtatggatgtggtttatgaacaagcgatttggggaattcaaggtagtccagggtatgtgggtcccatactttcgacgaaacatctctgcaaagatacagccaacactccacatgtccacaggtgttgcatatgtggactgcagaagaacttcgggagctcggtaccagagtgtaacaacctaaagggaataggaagaatggatggggaccccatgggttaccatgaaacacaacttgcttgactgaacacatgaagcacatgacttctcaattgctacgggcaatcactctcctactcccaaccagaacccattttggtaccatctttctactgaccacgggtgtaagtgccatctggtagctgtagattctggccaggccaaagtcagccagcttgactgttccaccacttgtcaccagaatgttctctggcttcagatctcggtgaacgatgcaattggcatgaaggaaatctaggcctcttagaaactggcgcatcagatcctagtttcaaaggggaggtacagatgcactggaaactaggcaccatacctgaaatcccagaaggttctactacaaaggtcccaatccacctctcaatgcctaccaaccccactcaccttgatcgtttcggctggcaagcctggtgggggtgccttgtccagatatgtccttaggtcctggtctacatgctcaaacaccagggttaccttgatctcccggtcagttcgggatgtggcacagacgtccatcagcctgaccagagtaaatgctcacttttcaatcccctttaacccaacatggcctctcattatttcctcagggtccccacttctctacagatcatcacaccccacctataggctgtcttttccctttactccccacgcccaaccctccaccaccttctcaccggacaacattgggatgctcaaaagcctccagtcgcctcagtaaagccacctcacgaactgtgctgatgggaaggcctcctccacctcctcctccattggggactctcacactcttgagggccacaaagtggccactgtggggatcacgggccttgtacactgtcccataggcaccgacaccaatttcagccactggctcatatcgagaggtagccattctcagatcaagggagaccctacaatcacagactcctatcaccaaaagtcgcttacagagttaggatggtatgagcctgcagcaacaaagggactcccaaaaaaaaagcgcaaagaacaccaccagcatcccatcccccgctcccagtcttccttggggccggccccagagataacacaatgactcaataccaacccctccagccacgtgaggccctgcaatagaaaacgctttttcctttgggacaatcgcgccccgcacaaagatcacacatgacacatgccttgcatcgaagatcctacacctcagtccctaaaattatactttcccatgaccacaaaggccccacttcccgcccttgagcgacccttccataaccagctcgcgaaacgaacgcgtggaaagctgtgaggggggcgggcactggttctcattcctgggaagggactgcacttacctcacgccagcccggggtgctgtgggggcggcccgttatcggggccccggagccggttcctacggccccatacacccgagctcggtccggagcagctggacgcagagggcccgaccatagacacaggccgcaagctagagaggccccctcacccccaccctcaccatgtgaccagctgccaaagaggcgcgcggaaactgggagggcggggcgaacgccggacgttctgggcacgtgaccgccacccatgcgctgaggggcggacaggaggtgcttcgactgggaggagggcgaagagtgtaagggggcggaggggcgatggcagccacgtgatctgttgctatcacacgtgaccgcttgacattgctctgaggagcagaggtgtggctacgcggcgggcacgtgactggctgccacaacccccgctgcagggggggagcggtgagggggacaagagagggtggagcccgaggcggtgccatggcaacctaggccacccagagcccaactcccggctgaaggattgtctcactaccggtctgaaggctgaactccagtctcactaccggtctttcagcctgtctgcattggggagggggtgggagttggggtaccagaggtgatgctgtcaccttttcgctccaccatgagaaaacatactctcatttgtgtcattgtttcattcattaattctacaacattttactgagtgcttgcttccagtgtgtatgtgggtttttattttgtttttggtgtctgtcactggccctttaaagtagtggtacgactatctataaagatgtagccaacaatggggtcttctacaatagggagtaaacaatgcccatttgagggcaaaactacgattaaaggatgacggaaggcagattaatacagtaatccaacaggctcagtgacaaggtaatcctctcacttttccaacttccaaacctccctgggagtgttaatgcaaagacctgaggccatctggcagagaagttattgatgagcaggagacaggaatacttgaccttttaagttttttttttttttccagtaggaaggttctatgattatgtgatatttgtatgtgtgcatatatgcttctatgtatatatgtatgtatatgatattatttatcacatcatatataagacggatacaggattgcacatgtgcaagaaagttaccaccacaccccctgcaccctccagaccaccacaatgaatgaaaatgacatgcccccttctgcaaaccttgtgactactcatttggagttattgtgcttccctctttttccctagtgccgctttcttagcacttagcactgtccagaacacacttgttcccaaatggcctctgcccagacacctaggtagacacaagtagatttctcctactttgttttattggctccaaggtctttatctcccagccctttgggggtatgggagtaaaggaggaaagcggttagtgtctcatttgtgagaatttgtctaaaatctaaagccattttattaccctatttgccactccttccactctaacttctgttttccttaaccatctggctgagaatataagagttcaaactagaagatgaatataaaccatgacttagagcaaaatagaatacatattaatacagatgcctcctctttccatcctgatacttgtagccctgggcccctcctggcaagggcagctggaacactagtaagaaaaacctcaaggactgaactgactaaggggctcaagaggtgaatgttttattggctaccttgctaggggtgggtgctttgtaagccttctggaaggctaagataattgtctgtgagtttttcaaactcccttcccacaccagcattccccacttcagcctcaccttccacataagaccttcacagcttactgtctttgcaacagaagacgtcctctctgtctgcttgggtcccagcccctttttctgattcattcattagtccatccaaaacatttgaatacttcatgggaacattactgtctctccatcactttctattgaggaaccttaatttggcagtctgtcccaggctctgtcccctcccttcttctgttaattactctttcactaattaaattttttcccagtatgtt

SEQ ID NO: 7068 - DNA, 20311 bp, Homo sapiens
agaggttgctgactctggtaaggaaagtgcttttggactgccaggattgaaggaagtcctagattggtcactttgccctctctggaaaagttgttccaagataatttccttcagaggaagggatacaagcagagaagtggaatcagacagacagaatgaaagctgagtgtgggggtggccagaagccctggggcactgaggcaggataagggcggtgggcagagggagactgtttccctaagtcagcattctctggccccccagaggctgggcacagctctcctcttgtgatgtatacagattaactcatcttccatccaaataaatctctcagcacactgcacagttccttctgcatcccagattacccttcccatgtcaggacttgccccccttcccctaccgctcaccctattccaattagctgggtgtagatggagatttcacttcacacttcttcctcctccacaccttggcctcctggcctagacatggctccctgaccgcagaaactccagtagccaccaggccttttgcaggggcatctaattatgcaagatctacagaggggcagggcagacccaaagcctcgtacaaagatcaaggtttctgtgcattttctgcccttctcaactccttccctactgtatactcagtctccacccctattcctctatcactgaactcaatttgaacctaaatgaccaaattttcagcagatttgatctttgagggagaataaagcccagcttgtcagaccctttaccctggaatcagtgatgagaattctgcccatccgtactccctattttccactgggcaagtaggaatgcccacttgaagagggcagcagttcccatgaccctttcctggacaatgatctttttaagttggaaaaaggaagaagaggagaccatactgattgctggccccaactcccataccaagacttccattagtgctgaaggagaggggaaagtgtcccacttggcctcattttaggacccagagtgtaaatggatacagtgtgtttgtgtgtgagtatgtctattttctttggtatgtctaaccttccctgcagagccatcacagaggacagctcaggcttggcacaggaagctccacatgtgtcctatctacctgagccctatctgctggtatagatattagtagtcactctgatttgcaatcccccatttggtccccaccagctcttctgagaatggcaaatcagtaaagtctggcctttctgtctcccaagatgggggatatagagggttctctctctggggaaacagtttcctactgagcagacggagggttcagtctcagttccctatccactctactccctcaaaaattggaagttatatacttccacactttgaaattacttgaaccgcagtccagcttttgttcctacatcccaaggctggtctggatgccagcaccatggacagcaaccaagaccccctttgggagaggggaggggacaaggtttcctgggcaaggatgtgtgtgggcctttgcaagggaagcattttctccaaaacatccccagggaggaaggaggcaaagcagaaccttccctgatagaaggatcaataataagaaaggcctccagatctgactttagccgtgaatgaaggaattatttaattgctgttgaatggtttacttaaaaacagcatcattcatataatacacaaccccaaggtcacagaagaaagtgcccaggcttcaggctgacccacattgtaaacagtccttcccaaatcttttctctataaacaacagtcctctatgctgctgcctccaaacataatgccatccattaataccactggctgggcacaccgggatcaaacctgtgaccctaaactgccatggaaatagcttaaactggggttggagactcataacactgagtggggggattccctccatctcactccaaatgagtccaaattcacttcacactgcttttctgggtgagcacagtacttgagaaggactgatagaacccagatgatctccagaacaaggcagatggctccagccttccccagcccacaggcccaaatatttagagtcagaggagttctcattcttaacaaataaccaccatgcttcacatttgcaatgtctatttcccctcatatttccatacctattatgtcactcaacacaaaattccatgattctgtgcaactccagatgaaaaacacattttagaatttgttacaccagctactatttgaaataaatggaccatcaactattctagaaatctctttatgtcattgctgattttctctgcaacggcatccaacctgtccctcatttatccttattccaaccctatgaagtagacaggaaaaccagagctaagagatttttttctatatcacacaactcataggtggcaggtccaggtctaccctttagatacctcggagtgctgccacctagcagccaacatgaattattcaccagcaagtgggagtcacacctacaactcagaacccactgctgcatttgggatttgcaacctgtgcagagaaacctccccacatctcccaaccctccagaaaagccccagatgagaaaggagtctccacgtgcatataaatgattctttatgcccttcccccatgcaatgggggatggagcagggggaactccccgccctcatgcagggaacgggaggtcaatgtatactagtcttattgccagatgccctgtggccatggggtggggaataggggtctacagcccctttcttctggcattggtcccccttcaccaagtcaccgtggtggagctggggggctggaggccctaggagctgaggtaaagacggttctctccagggaaggaaagctgctctccccgcctgcccaccggccgtctctggatgagtgggaggagctgccagcgggtactgaaatgtcatccaggtgtctctacccagtgggcagtgaggccagacaatgtctccagcttgaggctacccacacagatcctcggtgacgggggcagcatgccccaaacaccttgtccagctggtacctccagcagccatgagagttcttctctgactgatgcattgactcaagatccctgctcctggagtccagttcagactgtagtgaccctcatgacaacctctcggccagaatgggagctggaacgggcatctggtggccgcagctgcccaaggaggtgcaagattgtataaccgcagcgctgaggcaagagcgtccgcatgcgctgggcagctggggggcggctcgtggccccagaggtggggcccgtccgtgagttcctggggcctgacttccctgccgtccctccccctgcatctcctcctatgtccttggtcttgtcataatttaggaccttccactgctggttcactgcctgccagcgcttgaagatgcggtagacagaggagccttcatggatgatgaggcctgagcaataggaataagaaatccagggttaactgtggcctagatctaggccagaggtacttaagcaagcatttcttcagagtgagaagatacagttgcaaagggccctggagaagcagggaagtgggttgagggggcaccaggatagcactaaaggctacagtggcagaaaataaagccaggaaactgaggggatgggcaggggagttaggtgtgtaagaggaagatacagagcaggtaaaggagagagaggtgccctcacctatgcagacgacatccatgaagccatacatgccgtagcagatctgaaagagcagatcctgtcgttgccacttggctgaagggctgagtgaggaccagatgagccaggagatgctggcaaccaggaagagcgagcccagaactatggcagcaatctggaccttctcgatgaccgtcagggagatggcctgccactgtgtgggagaaagggctccaaagagtcccagaaagggatggagggccaggtgatgggtggccctgaagagcagggtgctccaggaaccttccctaaaaccttcaggcaggatcaacatctgtcttctctgtgccttgattaaatctagaatgtggcacttgtctgacaccatttgtcttactttagaaaggcaggattgggcaagtgctctgaaaccaaaacatctagatttgaatcctaaatcttgactccatcacttactggctaagtaaccttgggtaagttttcaaatctttgtgcatcagtgtcctcgtttgtaaaaggggataataatagtatctaataagattattgtgaagattaagagttaatacacaccaaaacttgacacagaaaacactacatatttgctatcatcatcaacatcattttttcttttcttttttttttttttccttcgagacggagtcttgctctgttgcccaggctggagtgcagtggctgtgatctcggctcactgcaacctctgcctcccgggttcaaggattctcccgcctcagcttcgcgagtagcttacaggcacgagccaccacgcctggctaatttttgtattcttagtagagacggggtttcaccatgttggccaggctggtctcaaactcttgacctcgtgatccgcccgcctcggcctcccaaagtgctgggattacaggcgtgagccaccgcgcccagcattttttttttcttttctttcttttttctttttttttgtggcgggtggggagtggtgattgtcccagtgcctagaacagtgcctggaatataagtggcacccaataaatatctctgtgaataaattaagggcttaggaaggatatacagacacacgggagactgtggtaactggcggggaagggtggctttgggaaaagagtaaatgaaataggcttcctggagggtccctgagtccaatagctaaaaggtcctcgcccaatctccgagtcctctccttgcacctcacctgcagtgggttcttggtgctgatcgccaggacctggtacttgaagtagcagagctcacagctccaggagcccctctcgctgatccagcggatgaggcagggctgatgcgtgcagcgcactgagccgtcgcagcggcaggggcttaagagctccccctggaggaagagtgaggaggggccctgtcagccatcaccaccccgaccccactcagccgcgctccccgacagggaaacctcctcttcaggtcactttcccaccttaaataactcaggcctttcacccaagacagggcaagaggctaagtaaggctgcaacagaaaagaagcttcccttggagatcaagggaaacttcccataccaaagagatgaaagatggaaagggatggggggattagaggggagaagggctgggtcttctcttttcctagaatttgggatgggtagtctttaagacttctcaaaagaaaggcttcctcttaggatctggagggaggggagtgttagagcttctgagccatgctttccttcccccaccccatcattgtaaagttacttcacagatctggcgcaaactgggatgggttatggtcctcggtttccacgtactaaaaaggggagaaatcgcggaggtgggagtgaagggtgtttccctttaatcatggaatcaattctcactacacagagacaccccctggcactattctgggacaactttgcccataaaattttaacaaagaatactctttagaatgagatagaaagttgcagaatgggaagtgaaaaaaagtgccccacggggagaaatactgagctaagcaagggcgctggctgggcccctcccttcaaggggggcacagaagcactctcctttctgcccacctgcaagagaacaggtccccttagcttacggagaccctggggcgagggaaataggagagaacagcagtccctgttaatgggtgagagggattttgcgctctccggggagaaagccccaccccttcctggggacccttgaccctccgacacaaacaagcgctccaggagtcccctgccagcccctcggcctcaccccattcccactccgtgtcctggggcccgcccagcctccttaggcgccgcgcctgctcgcggtctccgctgacaccccaggtgcgcgcctccaccctccgcgcccggccaggtgcccaggcctgacctgctccgggccctggaagcagatccggcactgaggggttcggagtccgctgtccaggctactgctgagcgacagggcgtccagcgcgcccgggggcggcagcggcggcgcgggcggcggcaggggtccggcccgcggctccttgtcgccggccaggccccgggcccgcggctccgacccgtagtactcctcctcgtcgccgtcgccgtcccgggtggagcaaccagcgaagggcgcccagccgcagccgcctccccggcccccccggggttgcggctcggcccggggccgccccccgcctgtcagcaccagcagcttcagctcgttcagaaacatgcggagccgagacttgagcatcgtccggacaccgggggcggggggcagcgtgcaaggggggctcgctagcggcggggggaggggagaggacaaggccgggaagggggcgcgcgctagagagccgagccgggccggggtcttcggggcctgcgacagccgttcactgctgccaccgccggggctccggtgcttgcggggccgagcgggctggcggcccgggggcggcggggtgggcggccatggccagggcagggggcggggaggggggctcagggtgccgcaccccgcgggtctgggtctggagcgggccgggcccccggggttacgcgcccgggtcctcctgcggcggggccgccccccatcgccgttctctcggtcccagtccccctccggctccgggatcaggcttggctcggcccgtgcgctcggcggtggcaaatggcggctccttccggcggcggcggcggcggagacccccccggagtggcgggcgggcggggcgggcgccggggagcgggtgaaggatggagggaggggcggggcggggagggggagaggagaaggggccgcggctgcgcatccccgccctgccccgcacgagcaggtgtccccaggggcgggggcaagtgtgggatcccgaggagggtggaggaaggggagtggccaaggaaggggagtgtgcacacaagttgactaggtgtgtgtctgggagtgggggatgagcgggtgagcatggaaggtgagtggttaaatgacgcaggtgtaccagggagggtgaggcttgtgcaaaatgggaatgtgcaaagaaagagctgtgcaagtgtcggaggtgtgagggaggtacatgggcaggggtgggactcaagcaatatacactttacccaaagggctgaaaagtgtgatcgatggggactgggaaagagaggtgtgtaaggaatggaatcggattgtctgagaaacagaagcctgtgattgtaatgtgtgaaggaggtgagggagggagcaggggaggtaggcgtgctaaagggatgggagtgtctttcctggtactctcctgccctcacctccactacactgaagtgaacaatacacacacttacccctttccttttatggagacttccctctgaggccaagttctacccccatcacatttttttctttcttacacttacattctccctctcctcccctttgcaaagctgagggaaaagggattccaggggagctcattgggtcaaacatactgggaaaaaatttaattagtgaaagagtaattaacagaagaagggaggggacagagcctgggacagactgccaaattaaggttcctcaatagaaagtgatggagagacagtaatgttcccatgaagtattcaaatgttttggatggactaatgaatgaatcagaaaaaggggctgggacccaagcagacagagaggacgtcttctgttgcaaagacagtaagctgtgaaggtcttatgtggaaggtgaggctgaagtggggaatgctggtgtgggaagggagtttgaaaaactcacagacaattatcttagccttccagaaggcttacaaagcacccacccctagcaaggtagccaataaaacattcacctcttgagccccttagtcagttcagtccttgaggtttttcttactagtgttccagctgcccttgccaggaggggcccagggctacaagtatcaggatggaaagaggaggcatctgtattaatatgtattctattttgctctaagtcatggtttatattcatcttctagtttgaactcttatattctcagccagatggttaaggaaaacagaagttagagtggaaggagtggcaaatagggtaataaaatggctttagattttagacaaattctcacaaatgagacactaaccgctttcctcctttactcccatacccccaaagggctgggagataaagaccttggagccaataaaacaaagtaggagaaatctacttgtgtctacctaggtgtctgggcagaggccatttgggaacaagtgtgttctggacagtgctaagtgctaagaaagcggcactagggaaaaagagggaagcacaataactccaaatgagtagtcacaaggtttgcagaagggggcatgtcattttcattcattgtggtggtctggagggtgcagggggtgtggtggtaactttcttgcacatgtgcaatcctgtatccgtcttatatatgatgtgataaataatatcatatacatacatatatacatagaagcatatatgcacacatacaaatatcacataatcatagaaccttcctactggaaaaaaaaaaaaaacttaaaaggtcaagtattcctgtctcctgctcatcaataacttctctgccagatggcctcaggtctttgcattaacactcccagggaggtttggaagttggaaaagtgagaggattaccttgtcactgagcctgttggattactgtattaatctgccttccgtcatcctttaatcgtagttttgccctcaaatgggcattgtttactccctattgtagaagaccccattgttggctacatctttatagatagtcgtaccactactttaaagggccagtgacagacaccaaaaacaaaataaaaacccacatacacactggaagcaagcactcagtaaaatgttgtagaattaatgaatgaaacaatgacacaaatgagagtatgttttctcatggtggagcgaaaaggtgacagcatcacctctggtaccccaactcccaccccctccccaatgcagacaggctgaaagaccggtagtgagactggagttcagccttcagaccggtagtgagacaatccttcagccgggagttgggctctgggtggcctaggttgccatggcaccgcctcgggctccaccctctcttgtccccctcaccgctccccccctgcagcgggggttgtggcagccagtcacgtgcccgccgcgtagccacacctctgctcctcagagcaatgtcaagcggtcacgtgtgatagcaacagatcacgtggctgccatcgcccctccgcccccttacactcttcgccctcctcccagtcgaagcacctcctgtccgcccctcagcgcatgggtggcrgtcacgtgcccagaacgtccggcgttcgccccgccctcccagtttccgcgcgcctctttggcagctggtcacatggtgagggtgggggtgagggggcctctctagcttgcggcctgtgtctatggtcgggcccyctgcgtccagctgctccggaccgagctcgggtgtatggggccgtaggaaccggctccggggccccgataacgggccgcccccacagcaccccgggctggcgtgaggtaagtgcagtcccttcccaggaatgagaaccagtgcccgcccccctcacagctttccacgcgttcgtttcgcgagctggttatggaagggtcgctcaagggcgggaagtggggcctttgtggtcatgggaaagtataattttagggactgaggtgtaggatcttcgatgcaaggcatgtgtcatgtgtgatctttgtgcggggcgcgattgtcccaaaggaaaaagcgttttctattgcagggcctcacgtggctggaggggttggtattgagtcattgtgttatctctggggccggccccaaggaagactgggagcgggggatgggatgctggtggtgttctttgcgctttttttttgggagtccctttgttgctgcaggctcataccatcctaactctgtaagcgacttttggtgataggagtctgtgattgtagggtctcccttgatctgagaatggctacctctcgatatgagccagtggctgaaattggtgtcggtgcctatgggacagtgtacaaggccyrtgatccccacagtggccactttgtggccctcaagagtgtgagagtccccartggaggaggaggtggaggaggccttcccatcarcacagttcgtgaggtggctttactgaggcgactggaggcttttgagcatcccaatgttgtccggtgagaaggtggtggagggttgggcgtggggagtaaagggaaaagacagcctataggtggggtgtgatgatctgtagagaagtggggaccctgaggaaataatgagaggccatgttgggttaaaggrgattgaaaagtgagcatttactctggtcaggctgatggacgtctgtgccacatcccgaactgaccgggagatcaaggtaaccctggtgtttgagcatgtagaccaggacctaaggacatatctggacaaggcacccccaccaggcttgccagccgaaacgatcaaggtgagtggggttggtaggcattgagaggtggattgggacctttgtagyagaaccttctgggatttcaggtatggtgcctagtttccagtgcatctgtacctcccctttgaaactaggatctgatgcgccagtttctwagaggcctagatttccttcatgccaattgcatcgttcaccgagatctgaagccagagaacattctggtgacragtggtggaacagtcaagctggctgactttggcctggccagaatctacagctaccagatggcacttacacccgtggtcagtagaaagatggtaccaaaatgggttctggttgggartaggagagtgattgcccgtagcaattgagaagtcatgtgcttcatgtgttcagtcaagcaagttgtgtttcatggtaacccatggggtccccatccattcttcctattccctttaggttgttacactctggtaccgagctcccgaagttcttctgcagtccacatatgcaacacctgtggacatgtggagtgttggctgtatctttgcagagatgtttcgtcgaaagtatgggacccacataccctggactaccttgaattccccaaatcgcttgttcataaaccacatccataccttgcccattctttttttttgagaccagggcttgctgtgttgcccaggctggattgcaatggcatgatcacagctcactgcagcttcaacctcctgggctcaagtgatcctcccatctcagcttcccaactagctgacactacaggcacgcacctccatgcttggctagtttgttaatatttttatagagatggggtctcagtatattgcccaggctggtcttgaactcttgcactcaagcaatcctcccacccctacctcccaaagtagcataagctactgcatctggccccattcttttacttgcgtactactaacttgcccatagcagaaagctctgaaatgttctggaattaggaacttcatatccctttattctctttattttttattkatttatttatttatttatttatttatttatttatttattgagataaggtttcactctgtcacccaggctggagtgcagtggcccaattacagctcactgtagcctctacctcctgggctaaagcaatcctcccatctcagcctcttgagtagctgagactacaggtgcacgccaccatgactggctttttttttttttagatggagtcttgctctgtcgccaggctggagtgcagtagtgcgatctctgctcactgcaacctccacctcccagattcaagcaattctcttgactcagcctcccaagtagctgggaccacaggtgcacgccaccatgctcagctaatttttgtacttttagtaatgacagggtttcaccatgttggccaggatggtctcgatctcttgacctcatgatccacccacatcagactcccaaagtgctaggattacaggcgtgagccgctgcacctggcatttctttttttttaaaaaaagagacaaggtcttgcttgcccaggctgatctagaactcctgggctcaagcagtcctctcacctcagcatcccaaagtgctggaattgttggcctttattccctatacttcctattttgagccactaagcagtaaccattcaactaagatatctttgaaaatgactgctaccttatatcccttctcaccttaggcctctcttctgtggaaactctgaagccgaccagttgggcaaaatctttgagtaagtgaccaacatgggagaaaaagattttctattctgagtcctctttctgctgaacccaggatggcaactggctctgcccatggggatgggaactggaggaccctcctgaccagagttctcctgtcccccacagcctgattgggctgcctccagaggatgactggcctcgagatgtatccctgccccgtggagcctttccccccagagggccccgcccagtgcagtcggtggtacctgagatggaggagtcgggagcacagctgctgctggtactggagatggctgtgggcacagggaaagaaatagagactggggaaagaaatagagcagtatgcagggccctggccactgtggttaatgaaacttggttggtagatggkctgyagtttttattacagctgcaaatagccacccacagagaaggatatagaagagaacccatcctggctgggcacggtggctcacgcctgtaatcccagcactttgggaggccaaggtgggcgtatcacctgaggtcaggagttcgagaccagcctggccaacatggtgaaacctcgtctctactaaaagtacaaaaataagccrggggtggtggcacacgcctgtaatctcagctacttgggaggctgagataggagaatcacttcaactcaggaggcggaggttgcagtgagctgagatcataccattgcactccagcctgggtgatagagcgagactccgtctcaaaaaaaaaaaaraagaaaaaagaagaaagctcatcccaggtattgttgtgggtgggcagaagtctgttttcttcatggttttctgacctttgcctctcccctcaggaaatgctgacttttaacccacacaagcgaatctctgcctttcgagctctgcagcactcttatctacataaggatgaaggtaatccggagtgagcaatggagtggctgccatggaaggaagaaaagctgccatttcscttctggacactgagagggcaatctttgcctttatctctgaggctatggagggtcctcctccatctttctacagagattactttgctgccttaatgacattcccctcccacctctccttttgaggcttctccttctccttcccatttctctacactaaggggtatrttccctcttgtccctttccctacctttatatttggkgtccttttttatacaggaaaaacaaaacaaagaaataatggtcttttttttttttttaatgtttcttcctctgtttggctttgccattgtgcgatttggaaaaaccacttggaagaagggactktcctgcaaaaccttaaagactggttaaattacagggcctaggaagtcagtggagccccttgactgasaaagcttaraaaggaactgaaattgcttctttgaatatggattttaggcggggcgtggtggctcacgcctataatcccagcacgttgggaggccaacgcgggtggatcacctgaggtcaggagttcgagaccagcctgactaacatggtgaaaccctgtctctactaaaaatacaaaattagtcaggcgtggtggtgcacacctgtaatcccagctacttgggagactgaggcaggaggatcgcttgaacccgggaggcagaggttgcrgtgagccgagatcatgccattgcactccagcctgggcaacagagcaagactctgtgtcaaaaaaaaaaaaagaatatagatttttaaatggcttttacttttatattcgctaaactttctcaaactggatcctgcttattacaggaaagagttcttggttgttttctccttggccctatccctgatttacccttagagccacaccagggtatgttgaggtgatccagtatatggacagaggaagggaaacagctaagaatgactccagcccccatcctatgcactcacagaagcttcccatatcctcttggagagagaggaagaaagtttttccttttattccttatagtctggctcccactaaaatatgtcaaggcataaagtcttgctattccatcaattttagaggatgtgacaaggggcctttcctttttctcaaaccaaaacggttacagaccctagatattccctaagggaggaagagaaagcttagagagagcagaagaaaagtcagaaggatccaaagtctcatagaaaggcactggggttggctctaggatccttctgattccgaaatctcattgctagccaaacaccaaggatctgtaggaacaaagggagagagataagtatcaattaattctcagtctcaaaaaggatgtgtgtgagggaactggagaatgttacctctgtaaagctaaagaagagtccaacaccccctaggattttcagggcttcgtctgaatgcttaagaaacttttctccacacatctggcatgtggggctctggctcttgcagatctgaggataaaacgtgaagaatgcaaagttgtgaatgtaaagttgctagtgactaatacctatgccgaatgtccctagaaactttactgttatctgaccagtgtcctacaaactaaaatcctacttggctaattccccagcctctatccacccccacctcccaccaacacagccccaatacaagagggcttgtagagagagaaacaatgacattcaaactaaatttgccaacttgggcattgtccttacccagtttcctacctcccctggctgctgcaccacccccaacacactcactgcagtgcagaaatcataatcttgttgatacagggttgtgaggttgaataagccacaacaatcaaaacttctttccagttcatcccgagtcttgttgctcatgacccaccaagaagcattgatgacatctgtctgaaagatatgggtagagggaaattaagtctccctacatcctgttatcagttcaagtgcctcaatttccctagcccagcaaaggaagtcaaacagaagcataacggtgtgcaacaattatagacacgataaatatctaccttttgaggttctctagatcatcctcatggaaaattaaccagacatcccagaggaagcaaatagcccaagaggccagaagcagtgcacctaaggatgatctttgggtagttggggccagactaaggaaggagttcgaggttaagaggaaaattttaaaaagcaagtaagtacttgaaagggtactgtcttacctgtttgcttcggttaatagccagacatgagcaagagattacaaattggaagatgaagaccaaaccaaggatgatcatgtactgagaggaaaggttatggaaaaaagtcctagattcctttatgtttcatctataataactgtctggtctcatctgttcatagaacttacaccaccatgtcaaattgaaagcaataaaatcagctcttgtttcgtagattatgggacagggcagggcaaggagacgtgtccaagatccctgaggtcccctacccttctaacatcttccttagatgacagccctcccaagcccccggttgcccccatcacttcaggtcaggatacaaagaacagcaggacttggtggtggttgacagcacccaccagtccagccactgcaataaggagaaggaagactcccacagcaatgactccgccgatgatgtggatgctggacaccagacccaggcccttgccccaagcagccactccaatgagcaacaagctcaccagctacgaagaaagagcaggatacatctcaacaattctagcatgcggcacagcccaaggccatacaagaggacttgggagcggggcagggggaaggaataatggaatagtgtgtgaatgggagctggggatggtgctatccgcaccgggagcatccctaggcactcccaaaggttagaatggctaggatggcggggagggggtggcagggatggtagtatgaatgcaaaagatgaaccctcaggatcatcctatcacttccagtttggaagaaactgaggttcacaggaaggaggtatggaacttacgcccacggccttcagttcattcccccaccctcagacaaacccccttaatcaaccggaagtctcctctctcccacggaagtccccaggaattccctcgtcgccggaagttcctgggaatcttcccggaacccccatacacccctctccccaccggaagtaccctagagattctccccacggggcctttccgccttgaagcttcccccacctccaaaacctcaccatgtagaccacgttgagagcgcaaagcgcattcttggagcaggcaaagccgccacaaaccatctccccagctctggggacccaagtggtcccaaggacttggggggagggtattggggaccgtcttccaggaccccgacagcttctgtctctttaaatcgaggccagccaaacccaatactctgcgcctgcaccgtccctcccctgcctctggattggcgaaatgcgtggctaatcctggacgtccaaggcctgcatgccaatcaacccgcattacgtcaccgacccgccttctgtccctctccttttgttttttcattgggcgaaacttaaaactaggggcagggtttctagagactctcttagggactacagcctaaactccaaaagcttaggttgaaagctgagctttctgtggtcggagttaggagagggctaattcccagggagacggctctggaggaacttaggtgaaggggagacggcgggaggggcgggtagggggccgctctgagagctgggcaaaaagggctccgcccgtagaaggagggcccttccccacccccttccccctgttctgcagtgacctcacgatgacgccattgttttgttattgcgtcacgctcgggaacacccaaaggagccacatattgagcttatttagcccggccgcagagtccgcgggttggacacagcaacacccagcaaatcatcacacgtttgtgtgtcctctagtacccatgtcctgttccatatctcctcctaaaggggtgtgaatataccagaaattcagtgtggaaatagcggcctcaggccagcgcattcctgtatgtggcattgccacaagtgcacagaggggtgtgctcagcattttcagagtacacgcctgatctagggcttgcaaaaaaacggcaggcaagaggaagagtctcatttacataaatataagtggaaggagcctccaccttttcacttgggggtaggctgatcaacaactttattatctagtaagtgctttgacaaaccgtccttctcacgggggtagggaaaggcataatccttctcttccccaggagaaagaaacagtaggaacaaaaaagaaaaccctccaatcaactcaacagaatgatttaagtttgtgtgtacttagattctatagacttactgccacagtcagattgccacttcctagctgcgtaacctttggccaggcacttagaaactgtctgtgcgtgtttcctcatctgtaaaatggggataaataacaacacaccctacctcttgggttgtaagaattaaatgagttaatatatgtagaatacttagaacagtacctggcatatagtaaacactcaatgttagttattacttttcaggtcattttacaggttcctgtgggcaattccaacctcaattcccttatctttaactacacagtatttatataaactcttacagaaattaataccaaaaaggtatgcaggagaatagatgtttgacagggcgagagaggtgtttgggtcttgaaacaaggtaattaagttattatcattattattattttgagacagagtctccctctgtcgcccaggctggagtgtagtggcgcgatctcagttcactgcaaccttcacctcccgggttcaaacaattctcctgcctggctcagcctcccgagtagctggattacaggtgcccgccaccacacccagctaatttttttgtatttttagtagagatggggttttgccatgttggccaggctggtggcgaactcctgaccttaggtgatctgcccgcctcggcctcccaaagtgctacgattacaggcgtccggtggaaacaaagtaattaggtcaaactacccgctacctcctacctcccaccccctcactccccacctccatccccttcctaccccaagtcccatcttcattgtctccttcagttcctcatctaccttcttttctttgaggtcctaaatcaagggcaagacaatgatattagaaggggaactggttgacaagcattttggttgtgtggtgtagtgaaaagggtatcaaaattataaccaatctgggctttatgtgcttggtaaaaaataaaaataaaaatgtaaaaataaaatcagaagacctaaatccatgtctttgtttcacctcttaatggcttctctgagccttagtttccttttatgcaaatagggataaataatcctactcctcagggctgtcatgaggataatatatatatgaaagtatgttgtaaactattaagtgttatagtcatgttaattattatgaaagcgattggacatggaacatggtagtttttgtctttttataggttactttcctccttcataactgattttccccataatcacttggcctatttatttattttatttatttttgacgtggagtttcgcttagtcacccaggctggagtgcagtggcgtgatcttggctcactgcaacctccacctcctgggttcaagtgattctcctgcctcagcctcccaaggtgctgggattacaggcatgagccaccacgcctggcctcacttggcccttttaaacaggaggtggcctcagtgggtagctgcctgaaaaagggttacatcgtaagacataaggatacagggctcattgggatgtgtagagagggcaatgggtacaagtgtatactagaatgcagggctgtgagggtaacagaccaaatgtgcatgaattcctgtgagagtttgaaatccgcaggtcatcaagagtttaggattgcacctcggacctagcttgccatattctcccagaaccaacacccatcttaattagccacctcccacaggaggccctgggacactgttaagatttctccatccacctggctgggaaatcatagcagggactggctggcagggttgatgggccaacactagagggggtgggaggtgcaggaggtagtgctgtcccaggctgtgggtttgaaactcaccagtcaggaagtgaggtcgacagacggaagggcgggcaggggcggggagttctgggcacagcagaaggggccttctgaggtttgggggctgtagggccatgggcctcagggccagaggtggttgttagcctggcaagacaggtctgggcaacatgcatgcccagaggcagttcgttgtagctgcagtgagagcagaagtcagacgacatgaggtggccaagcaggctctaaaccgcctcaggaagctggcagagagggtggacgaccccgaactccaggacagcatccaggcctcattggacagcattcgaggtaagagaaaggtcagccctcaacttgggtgtatcggggactagcaggtgcatagaaggtttagctgtatcatatatcaattcccagtcagctacttcctagtccccaagatgggactctgggaaagaatacatttagggaggatggaaaaagacatgggaggtatcattctttctctttccc

SEQ ID NO: 7069 - DNA, 39428 bp, Homo sapiens
  misc_feature (1)...(39428): n = A,T,C or G, or insertion/deletion polymorphism (see Tables 1-2)
ctgggcgacaatgcgagaccctgtctcaaaaaatcaataaatacacacaggcacacacacaagggaaagaatatccttttcaacaaatggtataaacagtgctggggaaattggattgccatgtgcagaagaacgaaactggacccctatcttttactacatgcgaaaatcaactcaaggtggactaaagacttaaatgtaagatgtgaaactataaaaatactagccaaaaacctagggaaaactcttctggacattggcttagcaaaataattcataactaagacctcaaaagcacaggcaacaaaaaacaaaaataggcaagtgggacttaattaaactacaaagcttctgactagtaaaagaaatagtcaacagaatgaacagacaacgtgcagaatgggagaaactatttgcaaaatacacatccaacaagggtctaatatcagaatataaaaggaactaaaattcgacaaaaatctcagataaccccattaaaagtgagcaaaggatatgaatagacatttttttccaaaaatacatacaaatggccaagaaacatatgaaaaaatgctcaacatcactaatcatcagagaaatgcaaattaaaaccacaatgagacaccgtcttacaacagtcagaatggctattactgaaaagtcaaaaaataacagatgttggtgaggacatgaagaaaagagaacacttaaacactgttggtgggaatgtaaattagtacaacttctatggaaaacagtatggagatttctcaaagaactaaaaaataaaactaccacttgattccacaatcccattactgggtatctacccaaggaaaagaaattactacatcaaaaagatactggcatttgtacgtttactgcaatactattcacaatagcaaagatatggaatcaacctaagtgtatatcaatggacgactggttaaagaaaatgtggtctatatatacaatgaaatactattcagccataaaaaagaatgaaatctgtcttttgcataaacatggatggaatgggagaccattatcttaagtgaaacaagtcagaaacagaaagacaaatgttgcatgttctaacttataagtgggagctaaacaatgtgtacacatggacatagagtgtggaataatagacaatggagactcagaaggatgatggagtttgagggggctggatgatgagaaattacttaatgggtacaatgcatattgtttgggtaatggataccctaaaagccctgacttcaccactgcacaatctatgcatctaacaaaattgcacttgcattccacaaatttatacaaaaataatgttgaatcaaaaaacattatagtttggtggaacatagaattataggttggaaataatttccctaaaaaatttgaagatattttatattattttctagctcccaatgtattttttcttttttaagagacagggtctcactctgtcacccaggctggtgtgcagtggcgtgatcatggctgactgcagccttgacctcctgggctcaagcaatactcccacctcagcctcccaagaagctgggatcacaggcactcgctaccatgccctactattttttttaaatttttttttgtaaagatgcagtctccctatgttgccctggctggtctcaaactcttgggctcaagtgatcctcccatcttggcctcccaaagtgctgggattagaggagtgagccaccacactcattcctcccaatgttgatgagtttgtaagcccaatgctgttctgataaggaatcaattaaatacaattaaaaattttatttttgtgtgggcacacagtggtgtatatatgtatatatttatggggtacatgagatactctgatacagacatgcaataagtaataatcacatcatgaaaaatggagtatccatcccctcaagaatttatcctttgtgttacaaacaatccgattatacccttttagttattttaaaatgtacaattaaattattattgactatagtcaccctgttatgctatcacatactaggtctttttcattatttctatgttttatacccattagccatccccacttctcctcaaccccacactactcttcccagcctttggtaaccatccttctactctctatctccgtgagttcaactgctttggtttttagctctcacaaataagtgagaacatgctaagtttgtctttctgtgcctggcttatttcatatgacataatgacctccagtttcatccacgttgttgcgagttacaggatctcattctttttcatggctgaatagtaagtactcctatgtgtatacgtactacatttttttaaatccatctgttgatggacacttagtttgcttccaaattttagctattgtgaatggtgctgcaacaaaaatgggagtacagatatcatttcgatatactgatttcctttcttttgggtatatacccatcagtgggattgctggattgtatggtagctctatttttagttttttgaagaaattccaaactgttctccatagtggttgtactaatttacattcacaccaacagtgtacgagggttccattttctccacatcctctccaacatttgttattgcctgtcttttggataaaagccatttaaactggggtaagatgatatctcattgtagttttgatttgcatttctctgatgatcaattatgttgagtaccttttcatacacttgtttgccatttgtatgtcttcttttgagaaatgtctattcagatattttgcccatttttaaatcagattattagatttttttttcttttgtttgtgctccttatatattctggttattactcccttgtcagacaagtagtttgcaaatattttctcccattctgtggcttgtctcttcactttgttgttttctttgctgtgcagaagctttttaacttgatgtgatcctgcttgtccatttttgctttggttacctgtgcttgtggggtatctcaagaaattttgcccaggccaatgtcctggagaggctcctcaatgttttcttgtagtagtttaatagtttcaggtcatagatttaagtctttctttctttttttttttttttttttttttttttgagacagagtctcgctctgtcacccaggctggagtgcagtggcgcgatctcggctcactgcaagctcggcctcccaggttcatgccattctcctgcctcagcctcccggatagctgggactacaggtgcctgccaccacacccggctaatgttttgtatttttagtagcgacagggtttcaccgtgttagccaggatggtctcaatctcctgacctcgtgatccacccacctcggcctcccaaagtgctgggattacaggcatgagccattgcgcccagccagatttaagtctttaagccattttgatttgatttttatatatggtaagagataggggtcaagttttattcttctgcatagggatatccagttttccctgtatcatttattgaagaaactgtctttcccccagtgtctgttcttggcacctttgtcaaaaatcagttcaatacagatatatggatttgtttctggattctggattccattccattggtctgtgtctgtttttatgccagtaccatgctgttttgattattatagctctgcagtataatttgaagtcaggtaatgtgattcctccagttttgttctttttgctcaggatagctttggctattctaggtcttttgtggttccattctaggtctcttagggttgttttttctatttctgttaagaatgtcattggtattttgatagggattgcattgaatctatagattgctttgggtagcaatggtgttctgattcttaatcctaatgttatactgatttttaaaaaatgtattaacaaagcaacaacatgaagtcacatgttctgattttttttgtctgtatatgcaacttgttctttctctctggaagcttttagaatttttttctctgtgtccagtactctgagattctataatgatgtgtcttggtgtgggtttgatttgttgttctggatacttagggtgcctgttcaatttggagactgttcttcagtttgggatagtccttttaaatagtttttttgatgatctcttctgattctctgttctctttctggaactctaatttagaactcttatttagtccagaccttctggactgatcctttatttttatgttttctcctaaagcagaacaaatttgatcttcttcaactttatcccccagcctttttatagaatttttatttctgtaacatggttttagtttccaagagctctttttgcttatccgaatagtagttactctcaagtagtttcctgttgttattttatgaatgctctataatatctctttgagaagtctgatgatggattatttttaaatgctttgttgtttcagacggagtctagctctgtggcccaggctggaatgcagtgccgcaatctcagctcactgcaacttccgcctcccaggttcaatgaattcttctgcctcagcctcctgagtagctggaactataggcgcgtgccaccatgcccagctaattttcgtatttttagtagatacggggtttcaccacgttagccaggctggtcttgagctcctgacctcaagtgatccgcccgtctcggactcccacagttttgggattacaggcgtaagccaccgtgcccggcctatttttaaattttttatttttagtgttttttcccctcccttgcaatttatgtttcctctcatttgcttttcccttcttgtttgtttcttacttgtatattaaagtccttccttaaatgtctaatgatctctggctatttattttgaagagtaagaacactaaaaagctgattggaaagtggaatgagggctggggcacgtaggccaaagtgttacatgtggaattcattctagttatctatatcattaagagaactctgataagggtatctttgggatttttcgttttggctggtgagattccccagagagggttttccaaaggtataatcagcctcttgtttacctttgtttcgtaataaatattctcaagtttgctaaaccagttaacattcttctgtttgatttccagcttccaaaatgttgctgttgttgtctcctttccctttcttacggcctggagagtaatacataatttcaccttaactggaagcccatgtatgcatgtatgtatgtatgtatgtatgtatgtatgtatgtatgtatgtacgtacttatttgagacggggtttcgctgtgttgcgcaggctgcacttgaactcctgggctcaggagatcctcctgcctcagcctccggagtagctgataccacaggtgcgtgccaccacgtctggctgcccgcattatttctctaggatttttactggaggtcattttactggaggtcaactgcaggatcgtataggaaggttttgacacaaattttctgattgcctcaaagcaatatgtatatatgaaaagaggtaagcgtctgtataataattgtttgttttgcaacaagcatttaataactttcaccggcactgcgcacgctacctatctgcctcaatactccgcccggcggtgggcaggatataatgcaagagacgtctgaaaaagcaatgagatgcgcatgacagctgggcgaagacagagggcaaacttaaaaggaccaagcgcatagaccacgcctctgaaattggggaacgaggaggggtttgatcttgtcgatgattggctggtcgctgaccaatcacggacagcgattgatatttctaatcgtcgtgatccacctccccaggaccttggagccacgtttacaaataggaatagggtacgtgggagggatagaacgtacagccaataaaatcatgtggcgccgatgggcgtgttgaggccgctgcctggcttagggcggaaacagattctctgcataagaaggggaacgaaagatggcggcggaaacgctgctgtccagtttgttaggactgctgcttctgggactcctgttacccgcaagtctgaccggcggtgtcgggagcctgaacctggaggagctgagtgagatgcgttatgggatcgagatcctgccrttgcctgtcatgggagggcaggtgagaggcgtataaggggcgagggtctgggcagaagaggaagcgggtaagagatagaggaagaagggcagctccggagtctggggctggagcctacggggaatcgggaagagtaggtattgcttttacggtgacccctgggggtcgcagactgagaccaattctctgggggccaggaattgggagaggtggggcttcccgctgtcaaccttcaggtctcagtttatgatcgaaacacccggactccgcccccgtggagaaatgggagcgccctctcctctcacccactaaatacagcyggagggcttatggcttattctgtcttcgactgatctcttccccagggtttgaagagggatttcgttgttctccctgatcccagcctttctttgcttccttgccccccgaccctcccttctttcccagagccaatcttcggacgtggtgattgtctcctctaagtacaaacagcgctatgagtgtcgcctgccagctggagctattcacttccagcgtgaaagggaggaggaaacacctgcttaccaagggcctgggatccctgagttgttgagcccaatgagagatgctccctgcttgctgaaggtgaaagggactgggttagatagaatgagggcttggaaactagcagttcatccaagaactggagtccactgaatgaggcaggatctaggggacctgtagtggttaagaagaccactggaggagtagacagattacacggacaggaaagaagcaaagaatcctgcaaccactgatgacactttgctgaacgtaggagcaggttaggatagaagatctcagaaaagggctaaagcaagattgagggtctgcgtggggtaggaggagtacttccttaagcctacttgctaaagtcaccccctgccctatcactctgctccagtatcctgttttattttcatcgtagcacttttcatgatctgaaatcatatttactgaatcagtttgtttattttcggtctgattccccgcattagagtgtaaactccatgaggtcaaagaattaatcttgttcacagttgtattcccagtggccagaacagtgccaggaatgttcaagaagttcaattaatatttaattttgggttcttctatgtttccctaatataattgcttcagggataccataatttcttatctttatggagggcaaataaggatttaaaaaatcttttaaaagggaggaatggaaagaccacaagtggaaaacagactttagagatatctctccaagtcacagaaggaaagcagccctccctccttactgwaagtctggagaattgagagtggaagtgaagggaagagaattgagtgtgtaagtagatgagaggttatgtgtcttggagccaggagactctggttccaagaaaagatgtctgcactccatccccctgattgtttattttttaattgtcagacaaaggactggtggacatatgaattctgttatggacgccacatccagcaataccacatggaaggtaactcactcctatattttccttaagcccttagtgtcatatcatggaagttccccagttccytcctcctcctcctcctcttaagagtaacagtgcttcactgtggcttcccttgcagattcagagatcaaaggtgaagtcctctatctcggctactaccaatcagccttcgactgggatgatgaaacagccaaggtggcaagagtgtgggattcaggaagaaagggttctggccaccggctgagagccctgacaagaaggggagggtcaagattagctgatctgtttcttggggcttggtggccattaggacaaagtttcctggggcctgggggcacaggccattcttttgtctctttggggacgcagtgccatccttcctctttgctatctttctcatgtcccccattcctgcctcatgtcttctccaggcctccaagcagcatcgtcttaaacgctaccacagccagacctatggcaatgggtccaagtgcgaccttaatgggaggccccgggaggccgaggttcgggtgagtcttgagagagggaagttgacactcccacagggacagttcagattctaagggaagagggttgcatcttatagtcggggcgggggcggggggggtcccctcccagaccctaaatccaaagtttaaaacatatttccagccrggcgcagtggcttatgcctgtaatcccagcactttgggaggccgaggcgggcagatcacctgaggtcaggagttcaagaccagcctgaccaatatggtgaaaccccatctctactaaaaatacaaaaattagccgggcgtggtagcgggtgcctataggcccagctactcgggaggctgagacaggagaattgcttgaacctgggaggcggacgttgcagtgagccgaggtcgtgccactgtgctccaacctgggtgacagagtgagactctgtctcaaaaaagaaaagaaaaaaaaaaacccacattatttccaggccgggcacggtggctcacgcctgtaatcccagcactagatatctctcaaaactctcctatgctttcttgtggtcggtaccttcactctcgcctgcatccctgcaaacagcttctttacaagtgcttctcatctagtggtccttagctgagtggaggcaggcaaatatagaatgcaaaaagttccttgggtgattctcatgtattcacaaatatacacacctgtaaagaattacatgacacctgccagagttatctttccataatgcagatttgtacctgcagttgtgtgctggtaagtgttggacccccagatctctatgggtgtgggagggaagccctgatctgtaatgtttgccaatgcctgtggtataaatactcccatgatgcgcaagtcaaatgatgtcaactgtcttgcaacattctccaaaacttaccagttggctccaacacacctgtaagtctgcatcacttctctgttcagtcctgaaaaaccttcaatgtttctgccttgcacaaaggctaagagccaaatgtttcagcacagaccagggtggtggcagtggaggtgatgggaagtagttggattctggatatattttgaaggtagagccaatgagatttgttgatggtttggatgtgggatagaatcatggattacttcaagatttttggcttgagcaactggaatgatggaattgtaatttactgaagtgtgaaggaacaggtttaggggaggaaattaggttggttttggatattgaaggttgaggtgcctttagacatcctagtggtgatgtccagttgacagttggctctgtggttctggaattcagggacaaggtctgggatagagatataagtactcattgtatttctgccacactggcctttttctgtccttcgaaccagtgggtctcattgttccctctgcctggtgcagtctcctgcagatctttaaatgattggccccatcccctcattcaggttatattcaagtgacaactcccagggaacctaacataagcaaacacacacacacacacacacacacacacggaacctaacataagcaaacacacacacacacatacacacacacacacacacacacacacacacacacacacacaccctattgctcctgtcctggtaagcatccacagtgttttgcattcttcaaagcatgtatcattacttgaaattattgtatttgtttaattctgtcttccctcactaagataagctctgggaaggcagggatgatgtctatcttgttttcttatgtatccacagctcctggaacagtgcttcactcaaataggtacctagaaattattcattgaatgaatgaaatgactgacaagccagttctaatatcacctttcttgattaacccagaaaattagttagttgtgttccttcaccacttaataatacaagcatccacacacgtatataatccgttatagcacttcattgtattctagttattcgtttgggtgtttgtatcttcagtaggccaagaactgaggtcaagactgcatagcttcctcatatctggtgaacatatgccctgtgccaagcactaatagaaactaggaacaaaaaggtggatgagacctagtcctgctctcaggagatatgttaaatgaacagccacaacaagcaggataaatgccatgagcagtgaagtgcagcccgcaggggagcacacagtcgggacagagtccagggtgaaaaggaggcctcttgggaaaagtgacctttgaactgacattggaggatgaggagttagactagcagatggagaggatggtggggggaatgagagggcattccaaatggaaggtgcgctaagtgcaaaaggcctggagacaagaggcaatggcctatcccaggaactgacagatactcacagggactgaggggataatcrtgggaagaggagtgtaggagatgagtctgggtggttggtaggggacaggtcatgaagggctctgtagctatgatgaggaatttagacaatccaagagacaatggttaggggaggcaatgaggtatttgaagcagaatgatgacatattcaggtttggaattgaaggcccactctagctggagtatagcaaagattgagagctcacttaggcagctgtggtaatccaggtgtgaaataaaagtggcctggggatgaagaaatgtgaatatttagagacagatttagggggtaaaatcaacagagtaagaaggagtcaagaatgatttccaggcttttggcttgtgcagttagatagagggtgattcgtgttcctgagataggtataatgagaagaggagtaggtatggtgaaggaaaatggtgagtttggctttgaatatgattttagtggctgctaggcattcaagtagagatttccaagggggctgtggatctctgggtctggagttcagcagagagatctgaattgaacccagaggtggggagttgtccttgtatcagccataactgaagccaaggtatggatgaaatcccccaaagaaaacagtatctaatgagaaaagtgggatggaacttcaaggaagccatcactaagagcatgggaagaagagggttttgccagaagaaagggccagagaggaggctatggtgacatggaaacgaggaaggacacatttgaaggggaaattggtccatggtgttggctgtgcctgaaccttcaaggaagaggaggattaaaaactgcttataggcaatcatagtcattattattttaataaaggcaaaacatgtacatggaaataaaaaattcagacagtagagaagagagccagatggaaagtataaattctctacttccaggcacccctgaccagtcctttggttggacttaatgatagagatcattggtgatctttgctggggcaatttgagcagagttgtgaagatgaggtgttgagaaaagtggtgaaaaagtggaactctgctgggcgcggtggctcatgcctataatcccagcactttgggaggccaaggcaggcaaatcacttgaggtcaggagttcaagaacagcctggccaatatggtgaaaccccatgtctactaaaaatacaaaattagccgggtgtggtggtgggcgcctgtaatcccagctactcgggaggctgaggcaggagaattgcttgaacccgggaggcggaggtcgcagtgagctgatatcgcaccattgcactccagcctgggtgacagagtgagactgtctcaaaaaagaaaaaaaagaaaagaaaaaaagaaaaagaaactggaaatctttgaagaagtttggatatgaaagggagataaaaggtaagcattagtgagaggtgctggggggttgagagagggggcattctgtggttggtgtgtgttttaagatggaacagactagaacatgttgaagacttgggtgaatgttagtggagaggaggagagggaagtcaaggtacagtagagagaatgtgaaaagaatgtggacagggatgggatgcagaaccctgggagagcaatttgcctcaaaaggaaggtctagggtcgtaactggaatggtgtatttgctagtgagtctggaggttttggtggcagaaagttgaggccattcctgtctggttgcttctagttttcagttcttatgccacttgcctaggtgatcaggtaaagcccctactccagggcaggcactgtgatgtgttgctggcctgatgcctcctcaataggaacagcgtgcatgttgtttaaagtgcagtctctgtggggctagggaacaactggttagctatatggaattaaataaattcctatttattggtgtgtgttttaagatgcaacagactagaacatgttgaaggctgttgggtggatgttagcggaaaggaggagagggagatcaaggtacagtagaaaaagtgagaaaaaaatgcggacagggctgggatgcagaaccctgggagagcaatttgcctctaaaggaaggtctagggtagtagaccaactcaattcttataaagtaagattctagagatatcaaagatttttttaagttataaaacatacaattatacaaaaaaaaatgtcatagagacccataaattcactgccaagttaaacagatgttaatgttttgcctgatttgtttcagatctctggtttaaaaaaaggaataaaatgcttgtgctaatagctaaagcccaccttcatatttagtcactctccctcctcgccagaaacaaccacaaccctcactatgtttgttttgtatttttattactgatatatatattacagacaatagatagtgttttgtgttttaaaattatacatcaggagtatcaacttgtttttttcactgatcagtgtgtttgccattcaatggcatgacatggaactctggttgagtgatttttttttttttttttttttttgagacagagtctcgctctgtcacccaggctggaatacagtagtgcaatctaggctcactgcaacctcggcctcctgggttcaagcgattctgctgcctcagcctcctgagtagctgggactataggtgcccaccaccacgcccagttaatttttatatttttagtagggaaggggtttcaccatgttggccaggctggtcttgaactcctgacctcaagtgatccacccaccttggcctcccaaagtgctgggattacaggtgtgagccaccgtgcctggcctggttgagtgattttaatgtctgtattgtgtttcattgcttacttacccattcctctgttgataaacagttgggtttcaactctaatgcccttatacacagtgctgcaatgtaggtcttattgtgagtgtacaagaatttctccagggaaatacctagaaagtagaatcactgggttacaggagtgtatgttattggtgaattcaattttttgtttgttttgttttgttttgttttgttttgagatagagtttcactcttgttgcccaggctggagtgcaatggcgtgatcttggctcactgcaacctccgcctcccaggatcaagcgattgtcctgcctcagcctcctgagtagctgggactacaggcgcctgccaccatgcccagctaatttttgtatttttagtggagacggggtttcaccatgttggccaggctggtcttgaactccttacattgtgatccgtccaccttggcctcccaaagtgctgggattacaggtgtgagccaccatgcctggccctcaatttttttaatgattgaaaaaatatataacctaaaagttatcattctaacagtctttaagtgtacaattcagtggaaacattcagtgttctatcaccatcactactayttccaaaacttttttcatcatcccaaacaaaaataactcctatttctccctctcccagactctgttctactttctgtctgtatgagtttcctgttctaggtacttcacatgagtgaaatcatacaagatttgtccttttgtgtctggcttatttcacttagcatggtgttttcaaggttcatccatgttgtagcatatatcagaattttatttctttttatggcttaatcatgttccattgtctgtatatacattttgtttacctatttatcaatggatggacaaataggttttcatcttttggttactgtgaataatgctgcgatgaacattggtgtacaagtatctgtttgagtcctgttttcaattcttttgggtctgtacctaggagtagaatgtgccttatggtaattctaggtttagttttttgaggaactgccaaactgttttccatagcagttgcatcattttacattcctagtagcagtgcacagggttccagtttctccacactacctccatcacttattttcctttgttttctttttcttttttttcagtaatagccatcttaatgggtgtgaagtagtatctcatagtggtttttgatttgcatttacctagtgattaatgatgttgaacatcttttcatatgcttggtgaccatttgtatatcttttttggagaaatgtctattcaaatcctctgcccatttttgaattgagttggtttttgttggtgagttgtgagagttctttatgtaataaattctgaatattaatcccttatcagatctatgatttgtaagtattttctcccatcctgtggttgcctttttactatcttttgttttgctttgttttttggagacagagtttcactcttgttgcccaggctggagtgtaatggcgcgatctcagctcactgcaacctccgcctcccaggttcaagcgattctcctgcatcagcagtgtcctttggtgcacaaaagcttttaattttgatttccaagagttttatagttttagctcttaaatttaggtctttgattcatttgaggttaatttttttttcttagagatgggggtctcgttatgttgcccaggctagcctcaaactcctgggctcaggtaagcttcctacttcagcttctgagtaggtgggattataggggtgtgccattgtgcccagctgctgattttgagttaatttttgtatgtggtgtaatttttgcatatggtccaacttcattgttttgaatatggatatccagttttcctggcatcgtttgttgaaaagactgtcctttccccatggaatattcttggtatccttaccaaaaatcagttgaccatatatgtgagggtttatttctggcctttctatactattccattggtaaatatgtctgtctttttgccagtatcacactgttttgattatagtagctttgtattaagatttaagtcaggaaatgtgagtcctctaactttgttctttttttaatattgttatggatatttgggatccctggacattccatgtgaattttaagattttttttttctataaaaaacaccattggatgcctttcatttctttttcattcctaatcactctaaaacttccagtattatgttgaatagaaatgaaaagaatggctgtccttgtcttgttcctaatcttaagggagaagctttcaatgtttcaccattgagtatgacgttaactgtgggtttttcttatatggactttatcaataactgaagacattccctcctattcctagttgattgtttttttacatgaaaaggttattgaatttatcaagtccattttctgcatcagttgagatgatcatttgggtttttyccccttcattctattaatgtatatgacattgatttacctatgttgaaccatccttgcattcttggagtgaatccaacataaatcatgatgtataatgcttttaatatgctgctgaatttggtttgctaccatttagttgaggaattttgcatctatatgtataaaagatattagtcgccgggagtggtggctcacacctgtaatcccagcactttgggaggccaaggcaggtggatcatctgaggtcaggagttcgagaccagcctggccaacatggtgaagcctcatctctactgaaaatacaaaaattagctgggcgtggtggcgcacacctgtaatcccagctactcgggaaactgagacaggagaatcgcttgaacctgggagacggaggttgcagcaaaccaagattgcaccactgctctccaacctgggtgacagagcaagactccatctccaaaaaaaaaaagatattagtctattgttttcttgtagtattttgtagtagtattgtctagctttgatattatggtaatgccagcctcacagaataagttaggaacgcattctttataaatttcagatttaattatttgtcacctacattctttctatctatactttgtcttcttgttttgtttatagtgtcttaaatgaattttaatttaaaaaatttaaattccaatatagtcaaacttatcagtctttttctttataccttatacatcttatgtcttttatttaatcctttcctatttactattcatctgtttttttcaggtttctaaaaaagtagaaaagtgtgaatagagtttctcatactttggactacaattcagtaaaaatttatcttaatgtatgttataaggttaggacctagatayacctattttccacagttgccccagcactgtttattgaatagtccatacattcctctctgatttgtaatgcctcctcagttatttaccaagttctcaaatatatgtgcattttcttcttggcttctcttttgttccaatagtctatctattcctatgtcattaccacgttgttttaattactatagctttttcataaatcttggtatctggtaggatatactccccttttttcttcaaaactgttggggctatcattggccaagttctgttaaaactccttttggggattttggctggaatttaattttagactgatttgaagagaattgatactttataatatgaagtcttcatacactatgaacgtgtttgtttccatttacttgttgtcctatattttagtaaagctttaattttctctaaaagttcttctacatcttatgtgagattagtctagataccttatagtttttatttttgtcttgtttgtgtatgcatatatttcaaacatacaggaccttatagttttagatgctattttaagtagcatcttttacaaatttcattttctttattattattattttttgagatggggtcttgctctgtcatcaaggctggggtgcgatcttggctcactgcagcctctgcctcccaggttcaagtgattctctgcctcaacctcccgagtagctgggattacaggtgcgtaccaccacgcccagctaattattgtaatttttttagagcgggggttttgtcatattggccaggctagtctcaaactcctggcctcatgtgatccaccgtcggcctactaaagtgctgggattacaggcaatgagccactgtgcctggccaaaaattccgttttctgattgttgctggtacatggtcacattattggttttacatattgatcttacactcagcaactcttttttgaactctttcatttttagtagttcacaaattcttgtggattttctrtatagataattatgtcatctgcaagagaaacagttttggtttcttcctttctaagttgtatacatttcatttttcttatacctcgagtgcaacagaagtggcaatgatgggcatccttgacttgtttctgactttaaaggggatgctcctgaagtttcactgttagcgtgatgttttcctgcaggctttttgcagataccttttatcaggtatgtgaagttccattctgtacctagactgctggatattttcaccatgtataggtgtggaagtttaacacatgcttattctgtgtctattgagatagtcatatggttttttwaatattaaaaatgttaatttattttctagtttttttttattctttcacttctgggataatccatggtcatgaagttttttttttgtacattgctatattcagtatcctgatagtataattaacttttataactattttcgtaagtgaattggtctataattttctcttcttgtacttaccttgtttttgtataaagttgcattcacttcataaaatatcttgaggagcttccctctttttctgctctgtggagcagtttgctaagatagagattattcttcaaaggttaggtagggtcgggtgtggtggctcatgcctgtaatcccaacactttgggaggccaaggcaggaagatttcttgagcctaggagcccagcctgagcaacatagtgagactcctgtctctcaaaaaaaaagttttaaattagcctgatgtggtggtgtacacctgtagtcccagttacttgggaggctgaagcaggaggattgcttgagttggagaggttgaggctgttaggagctgttatcacgccactggactccagcctgggtgacagagcatgactctctgaaaaaaaaaaaaaaaaaaaaaaaagtttagataaaataaatcctccccatccccacaatatgctacaaaaccggtatattgtggggatcgttgttgctactgatttaatttatttaaagattataagacttttttggtttgctgcatcatgaagctttaataaagtataatttcataggccattattcatttgtctaaattttcaaatgtattagtataaaattacaggtttttttgttttttaataatctctttttgtaaatatatcctcttttgcattcctaatattgactttgccttttctcttttttcttgatctatgttgccagaggcttgtctagtttattagtccaataaccaccttttggttttgtttatcctctctgttgttcatttagtatttcactaacattgtattagtccattctcacattgttataaagaaatacctgtgactgggcaatttataaagaaaagaggtttaattgtctcacagttgtgctggccatacaggaagcatagcagcctctacttctgaggaggatttaggaagcttccaatcatggtgaaaggcaagtggggagccagagtctcacatggtggaagcaggagcaaaagagagaggggggacatgccacaaccagatctcttgagaactcactcactgtcacgagaaagcaccaaggggatggtgctttatgctccactatgcccagctaatttttttatttttagtagagacggggtttcttcatgttggtcaggctggtctcgaactcctgacctcaggtgatccacctgccttggcttcctaaagtgctgggattacaggcgtgagccaccgtgtcccgccacatgttcgttattttatctttgttatttccttccttctcctttctttgtgttattctgatttcttttttttctaacaacttgaattttttttaacattaaaaaattctggccaggcatggtagctcatgccctataatcctagcattttgggaggccaaggtgggaggatcacttgaggctaggagtttgagaccagcctaggcaacacagtgagaccctgtctctatggaaaaaaaaaaaaaattagccaggtgtggtggcacgtgcctgtggtcccagctacttgggaggctgagttgggaggatctcttcaacccaggaggtcaaggctacagtgagctatgaacacaccactgcactccagcttggtgacagagcaagacatcatctcaaattttttaaataaaaaattctatattaaattttctgaataggcataatcacattcacataactcaactatagaaatgcttaaaaggtatacagagaaaagtattaacacatcttgtccctcattagcctctttccatccttaaagaaaggtaaccattgttaatttctttatatactctgagattttttttaaatgcacatataagcatatatctttgcactctttccaaatcaatatatatataaaaccttacttgggccaggtgtggtggctcatgcctgtaatcctagcactttgggaagtggaggcaggaggatcgcttgaggccagtagtttgagaccagcctagccaacgtagtgagatcccatctctacaaaaaaatatttagccaggtgtggtagtgtgtgcctgtggtcccagctgctcaggaggctgataagggaggatcttttcagcccaggaggtcaaggttgcagtgagctattgtcataccattgcactccagcctgagcaaaagagtgacactgtctcaaaaaaaaaaaaaaagtcatccttattcctgcatatagtttctgttattctgttatatagttgtatcattttttatctaaatggttccctgttgatggacatttagcttgctttaaatcttttattaacacacaagtgctgcactgaataatcttgtacttacagaggatatgtaaattgagttcctggaagtaagtttgtgtagttttgctatgtgctgcagtaagtttgtgtaattttgctacgtgctgcgaaatcactctgcttaggtaaattactttccctccaacaacgtatgggaatgctgatttccctatagccgtgccaacctggtatatttttaaacttttggattttggccaatcatcaggtaggcatcagagaaagaatgatttcttagtgtggttttaatttgcatttctcttaagaaaaaaatgtctaattttcctcatttaagggttttctctactcccttctttactcttttctttcagctgtccaaattctttgctcgttttcctaatggcttgctggtctttttcttgtcaatttataagaactctatatagtagagatattgtccttttgtctgtgatgtgagttgcaaatatttttataacttcttcagcgaaatgcttttcaatctgtcttctctcttaattatacacttaaagctctacatttcactctgagtactattttggttgcatccctcaaattttagtatgtggtgtttccattttcattatggtttctacgtgcttctgaacttatttagaattatgcttaatatatttctaaacaaatgtgttttgctttgttgtttttatatgattgctattggtttctaattttatgccattgtgtcagtgattcttttggtgattgctgagactttctttttgatgaatttttaaaaaattgtatgtttgcgcttgaaagcatgtcttttctccaattaagcagttcaagatgctcaccgtattgttcagattttctacaattttatgttgagttgactagtgatcatttaaagaactctgttaatattcccactgtgatggtggatttggcaattttgttaattttttatttatatgttttaaggctatgtttaattttgaaattaaataatttataggttttctaatgttgcaccaactttgcattcctgaaatgaaccraatgtggtcatatatattatccctgacgatccctttttttttttgttattactttttttttgagacagagtctcactatgtcacccaggctggagtgcagtggcatgatctcggctcactgcaacctctgcctcccaggttcaagagattctcgtgcgtcagcctcccaggtagctggaattataggcgtgtgccaccatgcccagctaatttttgtatttctagtagagatggggtttcgccatgttggccaggctggtctcaaactcctgacctcaagtgatccgctcaccttggcctcctgaagtgctgggattacaggcgtgagccacccgcacctggctgtgggtagatttttaactactgattcattttctgaagtagttttaggaatattcaaagttttctgtttctacttgggacagtttaagttttcttttcaggagttcatttcatctaacttttaagatttattggcataaagttcattgtattcttctatctttttaatmtctgtggcatctgtaattaggttcctcttttcattcctcatgggttatttttgcatcactaatttgttactggtcagtcacatcagaggttagtcagttttactagttttttcaaagaaacaatttttggctctgttgagcttctctgttgtatttgttttctattaatttctactctaatctttattttccttccttctacttttctgggtttattttactgtttgttcaacttcttgaaatgaatgcctagctcattcattttcagcttttcctcttttatatctcataaatttgtctccaaccatctatatatctctgacaagtttttaatggctattttaaattccttatctaattattaaatagataatactttcccatgatacaaaacccagaaagtattatttaaaaggtatgtaatgaaatatttcccacctggtcatggtggctcatgcctgtaatcccagcactttgggaggccgaggcaggcggaccacctgaggtcaggagttcaagaccagcttggcccatatggtgaaaccctgtctctactaaaaatacaaaaattacagggtgtggtgaggcatgtctgtagtcccagctactcaggaggctgaggcaggagaatcgcttgaacccaggaggcagaggttgcagagaaccgagatcacaccactatgctccagcctgggtgactgagcaagactccgtctcaaaaaaaaaaaaaaaaaaaaagagaaaaatatttcctcccatacttgtctctcatctgctcatttcccattctctccccgccatccctgctccagccccacaggttaaccctggtcttagttttgcatgtatccttccagcctttttgtgtgattacaaacaattatgaatggagattcttatttcctttcccctttatttataaacaatatatagtaaattaaacacactgttctataccttgcttttatttccctggacaataaaccttagagagatctttcaatggcagtatatcttttttttttttttttttttttttttgagacggagtcttgctctgttacccaggctggagtgcagtggcgcgatctctgctcactgcaacctccacctcccgggttcaagggattcacctgcctcagcctcccgagtagctgggactacaggtgtgcgccaccacacccagctaatttttgtattgttagtagagatggagtttcaccatgttgaccaggatggccttgatctcttgacctcgtgatctgccckccttggcctcccaaagtgctgggattataggcatgagccaccatgcctggcccttttttgtttttatagctgcataaaattccattgtgtgttccatcattttgtcaccattattctactggttgaaatagttccacccccaattcttttgttgtcacaaatgattattacattgtacatatatgcatgtgtaaatatatcttacatataattgggctgggcacagtggctaatgccaatattcccaacactttgggaggctgaggagagaggatcacttgagcccaggagtttgagaccagcctgggcaacagagcaagaccctgcatctattaaaaaagaagaaaaagaaagtaagcrmaaaaagcataattgccaggtgcaagttatggatatttaaagattgtcttttttaaactttttattacagaaacttaaaaacatatataaactccctacaaaggtgtatctgtggttccctgtctttggacacataggatggtattcctgttctctatttcatttatttttgtcctagtctgtagtctttccctctgctggctcttggtttagtgtgttcttctttttctagtttcttaagatagaagggtagattatggagtcaagattttgtttttaaaaaattgatgtttatagctatgaatttccctctaagcactacttcagctgcatcctgtaagtttggatatgttatgtcttcattttcgttcatttttgaggtattttatagttttcttttgatttttttcctttaactcactggttacttaatgagtatattgtttaatttctacatatttctgaatttccaaatttttttcctcattcatttctaattttattccattatggtcagagaacacactttgtgtgacttaaattttaattctttgaatatatttattaatataatggctacttttaactctttgtgagatccaacatctgggccctctcacaggtggtttctgttgcctgcatattttcctatatatgtttcatactttactgtttctgcatgtttcataattgttgaaaatcagacattttagatagtatgttgtagtaactccagatagaaattcctgccctccaccccatggcttttgtttgttcatttgttcagtgacttggctgcactacttgcattcagtctccccctcacaacatgaagcctctagtgtctcttctcagagtgcacggtcttggccctgcacacagccacactagatgacagtggtttcagcaggctttttgactgtttctttcatgaatttgttaagccatctgcctctgctggtatcacccccagctgttaggctccattcattgccaactaattgctttattgtttttgacatgtggggcataagttgttccatagtttagtccagttaattgtgggcccctttgtcgggctagtttttgagggcaatatntaggtttgttctgagtccaggacggctctcagttgccctttccctggttctctctgttaaactagctgtcccaaggtttagcctgttgctatcatggagcaatcagcctccttttaattgcctcctgccaaaatctctacatttttgaagtgcctataggcttgaatttccccatactctgtttcatattaagtcaggtcctttggagaatgttttggagccctgtattcttacggactgcctctccccctgggcaaaatccccgaggccctgctctggagttggggtcaggaataatggcttgcttcactyggaaggacattcctgctttatgagcagggagctaggcagggatgacaacctctgctctctcggtttgcatctccttttgtgaraccwccactctctgagcaagcttccgtgagggcaatcagggccccgatacttttgtcccactgcacttgaggtaaagcctctgccctgtgggtggggctgagtggaggaagggagcccttgatctttttcaggaatttagttgctgtatcttggagctggtggccctcctggtraaataccatatatcatatctcatgactggatgttgagagaataggaagtccctccccctccaccgccccaccccactttttttttttttttttttaactacgcttacctgctggagtggagctttagtctaactgagctgtggggtaggggtttggggcatagattgagggagcatgtcatggttcaagtgctgcaaattctcactattcaagatttagtagctgggcatggtggctcacacctgtaataccagcactttgggtgggaggattgcttgagccctggaaagcctggacaacatagcgggaccctgtctctacaaaaaaatttgtaaaaattagttggatatggtggcacacacctgtagtcctaccttgggaggttgaagtgggaagattgcttggacctaggaggttgaggcttcagtgagctgtgatcatgccaytgcactccagcctggrtgacasagtgagaccctgtctgaaaaaaaaaaaaagatttagtagattttcttgagtaaacatttcttcatttgttatatgtccttaggaaaatttccaaagagtttaaatgctttatgtttgtttgtttgtttgtattgagacagagtttcactcttgttgcccaggctggagtgcaatggtgcgatctcggctcaccgcaaccttggcctcccaggttcaagcaattctcctgcctcagcctcccgagtagctgggattacaggcatgtgccacaaggctggctaattttgtatttttagtagagatggggtttctccatgttggtcaggcttgtctcgaattcctgacctcaggtgatccacctgcctcggcctcccaaagtgctgggattacaggtgtgagccaccgcgcccagccatgctttgtgtttttaaattttcatcagtaatggagtttccctgtggagtgtgcgaaatccctcatgctgccatttcagaagtaggaccgctcccacttttkgtttttgagacaaggtcttgctttccacacgggttggaatgcagtgtggcatgatcatagctcactgtaactttgaactcctgggcttaagggatcttcctgcctcagtctcccaagttgctaagactacaggtgcacaccaccacacctcgctaatttttaaaaattttttgtggagatgagtctcactatgttgccaaggctggtcttgaatttttggcatcaagccatcctcctgccttggcctcccaaagtgttgggattacaggtgtgaaccaccagcctctcttacttttaatagttattttagaaattagaatattgcatgcttaatttatcaaaggccaatcaatctctttaccctctttctgaatgatataagaatcttagaattgtttgaagttttttaccatatgcacatatataaaaattacatatttatatacaaatatatatacactttaaaaaaaatacaggccaggccttgtggctcatgcctgtaaccccagcactttgggaggccaaggtgggtggatcacctgaggtcaggagttcaagaccagctgggctaacatggtgaaaccctgtctctacaaaaatacaaaaattagccaggcatgatggcaggtgcctgtaatcccagctcctcgggaggctgaggccggagaatcgcttgaacccaggaggcggaggttgcagtgagctgagatcatgccattgcactccagcctggatgacagagtgagactccatctcaaaaataataataataataataatacatatatgaagcaaataaaagtatatatatacacacacacaatatttatacaaaacaagaatatgaaacataaattggttacctacagttaagctgcctgaattcagttcctgtttttaccacttaaaggctggtcaacctgaacaagtgccttaactgcaccacacctgtttcttgaggcacgaagttgagaaaccaatatcgcctcactgggtctttgtgataagtgagccaatttatgtaaagtgccatatgcacagtgtatgcacaatgcttgacagataatcagtgcttagtaaaagacacctgctctaataactaaagcaaattattgttggtgattaagtgtattcatcctttctgtcctggcagttcctctgtgacgagggtgcaggtatctctggggactacatcgatcgcgtggacgagcccttgtcctgctcttatgtgctgaccattcgcactcctcggctctgcccccaccctctcctccggcccccacccagtgctgcaccrcaggccatcctctgtcacccttccctacagcctgaggagtacatggcctacgttcagaggcaagccggtgagtaattagagaaggaggagaagacggggagatacgggggcaggggktggcaaaagatcaagtattgaatagctggaggaatgtgttcctggcctgcttgcatgctgtttctcagtagactcaaagcagtatggagataaaatcatagaggagctgcaagatctaggcccccaagtgtggagtgagaccaagtctggggtggcaccccaaaagatggcaggtaggaccttgtttcacctgttccgtgaaactcacttccatttcttcccttcccctgatcttactgtcctgactgactggtggggtgggggggggtggaaaagtaccatgggccctcctcccttggtgatagaggaggggaagggaccccatcctatttgctcccttctgtctcacccctcctgtcagatcagtctctccctgttctctgtaccctaggtgcgagcccgaccaaggatgacagtaaggactcagatttctggaagatgcttaatgagccagaggaccaggccccaggaggggaggaggtgccggctgaggtgagaccagctgcctcagaggagcaggatggggatggggagggycactgcagctggggccattgtgaggtgacctacatctacctagggatgcaaggatatccccagaacctttgccytcatagtatggagggcatgaacaggctttcatacttgactctctccttttctcctcgtcaggagcaggacccaagccctgaggcagcagattcagcttctggtgctcccaatggtgagtgaaccttccatgtctcctttactgaatatattttaggattggcaggggtagggatggaggggagagctaagcctgggagggaggttgggtagccaggccggcagaaaattcatttttataggagttaatactctttgtagacagcactgctattttagcaaggtggcagaacacagtggctccaccacttggtgactttgtaattcacttaacctcaattttcttacccataaaatgagggtaataacccctaccttagagggttgcatgggattaaatgagaatgcatccataattcacagtagaaggcctggaactgaataaactaaatggttaatatttgtggaaagaggagaagggttccagggaagacaagcccttagccccaggatctcctctgtagtcctaaaagctagagtgactgccagaagggcctcagaagtgcatggaagagtggggacttagcagcttgttagcatccatctctcctaccagagtgtccaccttaggatggtgctctctgcaggcgaatatttgcccttgtctcactgtcaaacaggtaaatcctagaggcagggaccatgtccttccttggtctctcattacctgtccttaggaatccagagagaatttaggagcgcagtagcgcacacctgtaatcctagttacttggaaggctgatgcaggaagattgcttgagcccaggagttcaagatcatcttgggcaacatagtaacacaccatgttgaaaaagaaaaagagccgggcgtggtggctcatgcctgtaatcccagcactttgggaggctgaggcaggtggatcacctgaggtcaagagttcaagacaaacctggccaacatggtgaaaccccatctctactaaaaatacaaaaattagctgggtgtggtggcaggcgcctgtaatcccagctacttgggaggctgaggcaggagaatctcttgaacccgggaggcagaggttgcagtgagcagagattgcaccactgtgctccagcttgggtgacagtgcaagactctgtctcaaaaaaaaaaaaaaaaaaaaaaaaaagaatttaaacacaacagaacaggttcatgattattattctttcatctcagattttcagaacaacgtgcaggtcaaagtcattcgaagccctgcggatttgattcgattcatagaggagctgaaaggtggaacaaaaaaggtataggccgtgcttagggaatgggtagaacccacctcccaactgcgagcatttgaaaaactaccctgacctgggactcaactcctgggtcccccagtaccacacacctgctactgtttgtctgcccccgaccatgtgtctctgttgaaaccccaactgtctttctccccactccctacccacccaggggaagccaaatataggccaagagcagcctgtggatgatgctgcagaagtccctcagwgggaaccagagaaggaaaggggtgatccagaacggcagagagagatggaagaagaggaggatgaggatgaggatgaggatgaagatgaggatgaacggcagttactgggagaatttgagaaggaactggaagggatcctgcttccgtcagaccgagaccggctccgttyggaggtgaaggctggcatggagcgggaactggaraacatcatccaggaggcaagcccagctcttcctcctgttgcttccacagccgcctggtcccgtggagcaggacaggctgacgggctaaaagaaacagagggcacagcacagggcaaggayggggcacttggaagtggtagctgtttccctaattaatcggggctgttggggaagggggaccagagagagggacaagacttaaatatcagactctctggccaggcgcggtggctcacgcctgtaatcccagcactttgggaggccgaggtgagcggatcacctgaggtcaggagttcaagaccagcctggccaacatggcgaaaccctctctactaaaaatgcaaacaaattggccaggcatggcagtgggtacctgtaatcccagctctttggaaggctgaggcaagagaatcgctcgaacccgggaggcggaggttgcagtgagccgagacggcaccactgtactccagcctgggtgataagcaaaactccatttcaaaatatcagactctcctacagagcccagcccgctggctgcctccacaccccagacccttgactcactctcttctcttgggtattccagacagagaaagagctggacccagatgggctgaagaaggagtcagagcgggatcgggcaatgctggctctcacatccactctcaacaaactcatcaaaagactggaggaaaaacagagtccagagctggtgaagaagcacaagaaaaagagggttgtccccaaaaagcctcccccatcaccccaacctacaggtgagagcagtcagacaagaaagagtagcccagtctgttgttttcatccctcagctggttctgttcccagaggggaccctgttccttcccttctgagggtgctcattctctccccactttctggaacactgtcctcacttgcgcctgcttcccaacaccrtcatccctttgcgtgtttacctcctattcatcyctctgggaagcagcttttagagcatatctgctggttttctggtttgctcctgtacacccagtgcctagcactctgcctggcacacaatggatgatcagtagctagtaattgaatgcttgtgagtctatatgctgaaaaccactttaggactttgcaccaagagaggccccagctgtcagggcatgaataggagagcccagctgcacatgagccaatagcttggatagactttaaattatttcttcttcttgtatcccmttgtgtccatttcatagtgtcctatgggtgtggacatcagatattctaaatggaatgttccagtttcaaaccttccattcccactctctctataaacattgaaatgtctttaaagtcccaacatatggaggaggagaccacacttttccaacctgcttcttcaaacagaactttgttggtgcaggtggcctgattttggctttagaaaacatttgttttcctataggtgacgggcagaattattgggtagggcgggaagatggaaggctgcaattggtggagggagctctacaggctgaactgggaggggcggggcacacatttttttgagccctggctcatatacatgttgagatggaagagctgccaaagccaactgatgttttagggggagatgacccccacacccctaaccctggagtcacgcctctgctttgtgtttccctgtgtgtctccccctctaagaggaggatcctgagcacagagtccgggtccgggtcaccaagctccgtctcggaggccctaatcaggatctgactgtcctcgagatgaaacgggaaaacccacagctgaaacaaatcgaggggctggtgaaggagctgctggagagggagggactcacagctgcaggtgggccctggagggcggctggacccagtgctgtcggaagggcaagctgccggaagtggaggggctgggaccagtggggcagggggcctgccctgaggctcccaaccatcctctcctctcactgcatactgctcctttccagggaaaattgagatcaaaattgtccgcccatgggctgaagggactgaagagggtgcacgttggctgactgatgaggacacgagaaacctcaaggagatcttcttcaatatcttggtaagaggcttctacccccgagtcctggcccccagccctcctggagtggaggtgcgggcttgccccagccacgccattgctgagcttccatttcctgatctgtaagacaaggctggggttccagtggctcagagtgctgccatgcaggaagagcccctcaggacatgggtgtcctcattccctgccttcccccagctgcctggcccaggacttccctgggctcaacggccagtagctccagcccacctctaccctctcccaccaggtgccgggagctgaagaggcccagaaggaacgccagcggcagaaagagctggagagcaattaccgccgggtgtggggctctccaggtggggagggcacaggggacctggacgaatttgacttctgagaccaacactacacttgacccttcacggaatccagactcttcctggactggcttgcctcctccccacctccccaccctggaacccctgagggccaaacagcagagtggagctgagctgtggacctctcgggcaactctgtgggtgtgggggccctgggtgaatgctgctgcccctgctggcagccaccttgagacctcaccgggcctgtgatatttgctctcctgaactctcactcaatcctcttcctctcctctgtggcttttcctgttattgtcccctaatgataggatattccctgctgcctacctggagattcagtaggatcttttgagtggaggtgggtagagagagcwaggagggcaggacacttagcaggcactgagcaagcaggcccccmcctgcccttagtgatrtttggagtcgttttaccctcttctattgaattgccttgggawttccttctccctttccctgcccaccctgtcccctacaatttgtgcttytgagttgaggagccttcacctctgttgctgaggaaatggtagaatgctgcctatcmcctccagcmcaatcccagygaaaaaggtgtgaagcacccmccatgttyttgaacaatcaggtytctaaataaacaactggaccatcaatccatcaaccttttttgtggggtgggggttccagcagggagaaggctcagtgttcttttcagatcatgctctgatcctgttctttgctccccattccccaggtactataaacgggggctggggtatgcaggaagagaccagggtagctaaacaaagcctggcctggcaaggattgaaagaaacacttgcaatgctgtcatcttccttttctcatctgtctgtttctgttccttcccttttgcaccaagtctttccctattgtttccccctttataccctgaaagccaaaatgcacaccatggagctccccccggcggggatcttccttctgctgtggtctctcccatatcatgctccagattccatttgtcatccacacccctacccacctgtcctttcaacattttccaaaaagacctccacctttgggcatgcgcagagagagggctgctgcccacacatgccagtttcttagtatgcccaagggtacatgggcctggtgtctccctttcttcttcactaccaagtgcaggcatgggtccccccacatgcctcctcccagtgcagaggactctgattttgtttgttttgtttcgagacaagagtctcactctgttgcccaggctggagtgcagtggcctgatctcagctcactgcaacttctgcctcccaggttcaagcaattctgcctcagcctcccagtgactggaattacaggcacacaccaccatgctctgctaattttgagtgcagaggactcaggtagagtcctctgctctggtctctgaggtgaacggcctttctgctgaaggctgcccccgggctcacaggataagaaaagggatagaggggccgggagcagtggctcacccctgtaatcccagtactttgggaggctgaggcgggcggatcacttgaggccaggagttcgagaccagcctggccaacatcgtgaaaccccatctctactaaaaatacaaaaaattagccgagtgtggtggcgcacgcccataatcccagctacacgggaggctgagcaggagaatcgcttgaacccgggaggcggaggttgtggtgagctgagatcacaccactgcactccaacctgggcgacagagtgagactgtctcaaataaagaaaaaaaaaaaaaaaaaaaaggatagagggcccagaactcccatgtgtctataaatggagagtgaaggattcaactgttgaaggaagctcttgctgaacgtggactagtgcttactgtgcatgctatgcttacgttgttttgttttgaagtgtaaataggtagactcagaaaaccctgcttcctctggtccatctgcgccccctgagggagggatgctccagctggacaagagcttagacactgccttgagggcagcagtagtcagaatgcagctcccagaccgcacccctcatctcccaccagcggacccttgaacaagtcacttaactttctaaatgctgtttcctcattggtaaattgtggacaacagtactggctttttaagatggttgcgaggattgaatgagatagagtgtatgtcgtgcttttagcacagaacctggccccaagtaagtgctcactagctttctattataagccaactcctgagttctgaaaagactgggttacttggaggcaagagtctcagaaggagtccccaaagctgatcagaagctcagaatgggaaggggctggggcaggagggctgtgctttgatttgctggggatggagtctcagcatcaccagaaagcagagttctggaaatctcactctgttaatcattttgtactttcaatcgaaattcctttttcctttcctttggcttttggcggcagcactcccatggtgaaggtcggtctgccccagctgtgctaagacaaacaaaaggaggggagcagggtgtggcagatggcagccagcagggctgcagggagggctggcggatggcaatagggcatcctgcatggcagggcatccaagcaaggcagcccagggcgagctgtgaagggggcatgggcacaaaggggcagcagctctccttcacccacccagggagtccccttctgggctcctattttgtcataacctggagggcttgatattttgtcattccatccactaccaccctttacatctcccccgcaagaccaaagacactccccattaagacaagaggcaagtggattacttggtgttgggatttgttgtgaggtttgctgacaccttgaccatttttcactggctggaaatgaaaggaacttcccacttgctctttgaaggcaatttcattctctccagggtccttatttccttcccatattctctcacactcccaaacttctgaagaagggagcaaactttggccacgaggaaggagtggagctgaaataagagagtccagggtcttggaggtgaagggggaacggccaggtcctctagtccaatcttctttgctacctcccccctcttctcgctttgcccagaccacacacctgcctctgtacttgtcactgcacctgcactgttgaatccacctttcctgggtcacgccgctgtgctgggtggtcacagcctaggaccctgtagagccgcagcctccatgtgaactggattcaggtctggtgctgtgtcctcagttcagtggcacacttgcagctgaacctcttggggctggtgggcaccaagggtcagaagcaattctacccaaagatgctggtgctaccaactaactcctcaaggtagataacaacatatggctgtgcccaacctgcactggctgctgacccaaccctaccctgtccagcccctctacctgagtaaacactttcagctgccctcgagaaatggtaggattggctatgtgctgagcctagtggcactgcagctcatggaggcagcaccggcttcaggccgctgtggccttggtggtccctttgatggcacggaggtggataaatgcctgcatcagctgacactgagtttgtggacaccagggacctctgcagctagctgggaaatctttcccaggaggtctcccaccccttccctctggaacaccccctgacgaggccaggggaggaacccctactctatgttctactctggtacctagtgctcacggtgagcaggctggctcggggcagccctcctcagagctggagcgcctttcaggtgccctctgaacagatactgttcagaatacagataaacagatgccaccaaggtcccctagctgtgcagtggaggggcaggtttcaaaatcagatctgtctccaaagttcctgctcttaaacaaagctgtcccatcttcccacccctctccatgggcctgtcctctcctctaagtaccatatcccaactctcccaggactggcatcatcttaagagtcagtgccttctctgttcccagggtccccactgactccaacctgcccacgtcctccactacatgaacccagaactgttgtacatgatggaaccacctccatgcccatgggtactgtcctgccaccagccccagtgggaggcacctctgcctgtccctgtccaaccccagtaccccatcttgaccaaggccatgccctgacctgcctccaagaacagaccagcagctcaccccctagacaaaatcacttcctctttaattgctgttgaagaagattcacaccactgcctccaaggagatgggggggcatttcccccttgcccccacctctctcccctccccaattacctggtcctttgcaaactattttagccagaaaaaaaaaaaaaaaaaaaagaccggaaaccactgacacagacagcccaagggctgggttggctgagggaggcagggctgggccaggtaagtccgccctatcacccagtttgtggggaaggggcagggggcctggaaaccctcccagccacctcgaatcctctcagccctggctgggagaggtcacgggggtgaggaatggctctggagctgctccagtgggagggaggggctggacagaaagaataatgggggaggggtcccactgtaggggtgccccctaccccagatcaccacgggcgctgcacagtcacaggtacgcagtcacggtcacagacacaacccgagagcacccccaccccaacccaccccctgcccaccctgggcttcccctaccccaaaacgccctccccacgcccctgcccgcccccatccccatgttggggaacaaagcaataaattacaaggcccccgcagccctcttagcccgctcctgctccatcccttctccctcccaagatagtagtgggagggacccaggctcttggttccccccggactctttagcttccacccatgggtaggtgtaggggacgtcctggtttccactactcacggtccctttcacggaaagggttgggaacccccacccccatgagcagcaggggtcctgcccctcgctgcccttgcccccttcactgggcagtgagatgagcatggaaggggtagggtttccgtattggccccaagtcccggggctagccctcccatgtactaaaccctccctctggcgtggcgtcgccccaggagccagcctgggtatgggctcccgccctgggattgttgagctcgggcaggaccgggtcttctttccgcccctagggggcacaagcgggcatgtccaagcgcctaggagcccgtaccgctggggacctccccttccgcgaaccccgagcgggtagacccagagcaatccgagtgtggaaacaatggagagggggcgtgttgagctggggtctccatgcctcgttggggagagggaggtgagtttgtgtcttctggaaggcgtgggggctgtgccctcgtgggggtaggaagtgctcccgtggggcggggtgcggatcggagaggtgagtgggtgcgtctgtccagcggtccgcccggtgtggtcgtgcccggcccgcgtggggatgggggtgtctctcccgctgggcaactataccagcgcaaccggggcgtcggcgcggcccacgctagcggcgctgctccggcggcgggggctgggcgtggcggtgatgctgggcgtggtggccgcgctgggcgtggtggccgcgctgccgccctcacccgggcagccgtgctggagaaggatgtcggcgcacagctggcttccagcctggcgggcgtagaacagcgccgtgcggccctgggcgtcacgggccgccacgtccgcgccgtactagagggcggaaacggccgcgtgaccgcgcgtccccagggcgcccacacccggcgccgcctcccccacatggccaagcctacttccggggtccctctgggaatttcgggctttcccgcgccaggcgttttccgagatgaagcctcaaagaccccctttcctccccccagctcacgtacccacagcagcagttgcgtgatgacgacgtgggcgagctcggccgccaggtggagtggggagcgcagctgtgggtcctctacgctggtgtcgagcggcccgtgtcgcgcatgggccaaaagcaggagaacggtagccacgtcctgggcctgcacggcggcccacagctggcggcccagcggctcctccgaggtgctcagcggcgccaggaacagtagctgctcgtacttggcgcgaatccacgactcgcgctcctccctgcaagaccagggatcaacggaaaaggctctagggacccccagccaggacttctgcccctacccacgggaccgtctcaggttcgcacaccctcagcaaccctccccccgctctgttccctcacgcttaccgcgaagagtcccgcgagggcttggcacggcctcgcgtgtcgctttcccacacgcggttggccgtgtcgttgccaatagccgtcagcaccagggtcagctcccgtggccagtcgtccaagtccagcgagcgaacgcgggacaggtgtgtgcccaggttgcggtggatgccagaacactcgatgcagatgagggcgcccaggttca

SEQ ID NO: 7070 - DNA, 31575 bp, Homo sapiens
aggtcagaaatgctcaatagctttaattagcgtaattatccctgcttattaaacaaatgagaccacatacttagggtcaagaagaacagaaaaatgaaactactcagaattcggtataagaaatcatttaaaattcatttaatcacagtgtcaagtttgcgttttgtagagaaagtactgatggagctgtaggattttgagagtactttcacccctgatcccaagatgcaaaatttggttcttagagcaaagaaaacattggcaagtatgtgcattacagttatatagaaaccgcccccacctttttttttttggagatggagttttgctcttgttgcccaggctggagtgcaatggcacaatctcagctcactgcaacctccgcctcccaggttcaagcgattctcctgcctcagcctcccaagtagctgggattacaggcatccaccaccacactcagctcatttttgtattttcagtagagacagggtttcaccatgttggccagctggtctcgaactcctgacctctggtgatccacttgccttggcctcccaaagtgctgggattacaggcctgagccaccgcgcctggcctcaggcctcatcttagtctctcttcaaagagattttcttgaccaggccatctaaagtcaatgactcctctctgctccattattctttatctctgaagcccacttgtgcccttcctccatatccttacatttaccccaagcagaagatgtagacacagatacagatagatagttgattactgcccggcagtaacacacactcattacatatttggtagatgaatgactgggtaaataaataaaagaatacacgaatgattctctgggaggtttcaggaacagaataagttatttgccttggatgttttagaccagtaatgagatccctaaacttgatctgaggaggagcaatttttagttcttcagcctgatgattgccagtgggggtgaggagggagaggggaagacagataagggaggggctgatgggaccataagagatgtgactgtgggtccccctcttctgagggaaaggtcaaggcattgcttagaaattagccagaaaagattccaagatctcctggaggggccagtttatctgcctggagcaatgtgggtttctgaagctgatagcttcagggtcagctgagagatgggggaggcagggtgtcttactcttaattcctgatgcactattaccagtggatcttttctcacttctcagttctccttttccatcactttctctggggaattgttaattcctggggagtagtgtgaggtttgagccattgaagcctgcagggaaacacccactcatttgcaaattggcaaacagagccgcccacaaagtagaagaaggcttgattcagagctataaggaaacaatggagttcatttaacatttaatgaactcaaaatagagtactctaaaaaataagtcaataaagcagttttttaatctttaatgcacgcttgctagcattatgtctgaagtattatctgttacctcagtatgggtttactggtgttgtttatcaaatgattcattgcctgtatgatttctgggctgtgaatgaaaatattgattggaattttgcaaatggaaatgcttttgtttctggccgcagctttcccaaatcattcagggccttcaaatagaataggtaccttctattgctaggcaattcacaaaagaaaggtacaggtcagacaagctcatcttttagataagtctgccataaaattccctttcttgggctcactcgaggtcctgtgaatgttaagatcttccattcagtttgtgtgtttttgaagaaacagcaaaattcagtgtgcttctcagtgagagactttgcttttgcattccatctcccagtggcaccccctccccctccaccttcatgtgagggagagagagtgttgcaaagcagagaggggatgggctggggcattggtatgggggcgggggtacttaccaggaaaaatagaagcctcctgacttttatcagagcaagtatcaaatactgtttggcccaagtacattttgtcccattctctttcgtatgcaaattaaacatctagagaccagcctgccacaaaagttaaatctacttcccaatttcattcagctcgtccttgaaaggagtatcatgtacctgatggttagctggattcccaccctaagaaattgtaggcgacatctctttctctgtcccaggatcttatcgctatcagacttctctagaaatcaaaagcacctgctcttttgttaaggtggacttctaaagagagaaatattaccattagcaaacacccagagttcacatgagaacgccactgacaggtccttccagcctgaggataccaacctcagatgaacacacttcagggcagcgagtcttcatagagtgcttactgtgtccaggcactgtgctaagcaatttatatgccttatttcattctatctttgcaaaagccataggcaatgagaagccccattttacagatttgaacactgtaggcttagaaaggtcaagttatgaacccaagataacaccattggaaatgtgacagtgccatgacctctaatttcagaacctgtgatcttagttacatatgatgtaatccagggctgatgacaataatgtgtgttatctaggggtgacccactcctactaggcttccctctttgaatttcccaagcagagctaagcacagacacaaaaggctttcctggtgccttgccctgatcgggaaaaataagccatgtctgtgctagcagacatatatctcatttaatagtctgagtaacactgtgtcatagatattagcatatcctttcaggagaggaggaaattaaaattcccagaagccaagtaatctgcccaagaacacacagttagtaatgactgaggtggactttggatttcaggcaaacagcagagtccaactgcccaggcttctcctatcacatctcgcagcatcttgcaagcacccatcagacatttctgctgggaaagaggaaaggtgtctatatccactgcagccctgtccatgagtgacccctgccctgctaagtcagaggtaagatgacactgttgacttgcctgggccaaagttggttgaaaagagatacatatctgtagaatcctcttgaaatgtgaacaagtactccaaaccatgtaaaaaaacaatactgaggccggatatggtggctcacacctataatcccagcactttgggaggccgaggcaggtggatcccttgagctcaggagttcgagaccagcctggccaacatggtgaaaccccatctctcctaaaaaaaatacaaaacattagccaagtgtggtggtgtgtgcctgtaatcccagctactcgggagactgagccaggagaatcgcttgaacccaggaagcagaggttgctgtgaactgagatcacaccactgcactccagcctgggtgacagagtgagactcagtctcaattaaaaacaaaaaacaaaaacaaaaaacaatactgaattgccagtgatgaataatcgtttatgtcacatcagaagcctttccttatgcagttgggctgttgtactcttctgtggcttgacttacctgccaagcattctgatggtccctttttcctcctctccatcccatagtcctatctctgtgtcctctcctcccctagttcctcagggaaagaagccacatgaagtgcatgcatcttcccagggcctggtccagtataccacaggggctcaataaatgcttactaaaaaagaggggaaaagatacacagagagttagtgctaagccccaggaaagaggaactcagagaattcacacatattttcgagattcaagtgtcttttttctgctcaggaatgaactatggagaacagtagaaatatgccaatgtcactgttcacaatagcaaagacttggaaccaatccaaatgcccatcaatgatagagcagataaagaaaatgtgacacatatacaccatggaatactatgcagccataaaaaaggatgagttcatgtcctttgcagggacatggatgacgctggaaaccatcattctcagcaaactaacacaagaacagaaaaccaaacactgcatgttttcactcataagtgggagttgaacaatgagaacacatggacacagggaggggaacatcacacaccagggcctgttggggggtggggggctaggggagggatagcattaggagaaacacctaatgtagatgatgggttgatgggtgcagcaaaccaccatggcacgtgtatacctatgtaacaaacctgcacgttctgcacatgtaccccacaacttaaagtataataataataaaaaagaaatacggcaatgtttccaggccacaataaacttgatcctactgtttaaaaaatttttttaatatattctttctcttctccctctcagctcatttgttcatcatccataaaatattttgcatacgtgtcatacaatacagatatgcctcctgttacgtgaatcataaatctacaatgagtcactttgtgttgcatgtaaagaaaggaaaagcaactcatgggacacatacatgctactggaaattgtcagttgtcttttcatgtaatctacttatttatgtactacttacagtttacaagagcctttacatcattgctctcctactctgtaagttcagcccagaatcacagccaccattttacacagaaggaaactgagttacagaactttttaatggcttgccacatggctatttccttcattctttgataccatcattataaaacatcccatcaatttaacaataggttttgaggaaataaggaaactgtactgtattacttatgcatgttgcttataagatacctcccaatgttttgaaacattaaatgatgtgcattatcaataatatatctggaaccttcatgggagtagcatgttatctgttgttttcagtgggatcttgtcgggtgactaagaattgaattataagagagactttctaagtttcttcttccaatgtcattgctctgggagactaataaagctttagaaatctcaagggtgtacaattaaaagttgttcttcaggatgaagttcaagacactagagtttatttattgttttttaattagagggaaaatcctttaaaatgtttacgttcacacacacacacacacatatatttatagttatcaggtgcaacaatgttaaacctgagttttcttatcaaagtttagtttacctacatacaaaaataagaaagcaggaaataaagcaaagaaagcaagacaaaagaattaaaactgtcacctggaattgtacagaaatagtttgcctccattcagagttattttctgtacaaaaggggaaaaaatcaacttttcctcccaatcttggttgaagcagttaaaaaaaagtttttccaactctgtaaagcaaaagaaattagattcaagtaactgagcttcccatcggattactgtgctagcccccctttttattccccacacagtggataatgcatgctcattgtgacttatctggagctggtttcttttacatcctcgggctatataaagtcaaactaggactggggcagcagatttggggagcatccagcagccagcctctacagtccggagaggatgaaacagtcgggaacatgaacaactccatgtgtcattgacgcttccaacggtatgagccccactttttgcctctcagcgctaacaggaaacaattagaaacgacacaacatcgtttatctcccttgaaaatttccccaagactgtatgtgcggctttgttcttcccttgattttaacttttcattcatgtttctgacttagaatgatcgaggctcaggccctggaaggaccgtaaacatttggccagcttggtttggatacctggcagagaccaggttctgagaagcaatggtgacgaaggcctttgtcttgttggccatctttgcagaagcctctgcaaaatcgtgtgctccaaataaagcaggtatgtcctcgccaagtccattttcctrggacgaaaagtttcctgaagtttccttttacaatgctcagcrcttctgtgcttaacttgttataaaaatgtaatgatgtagccaagcaggaaagtacttaagcaccccctccaataccaatcagacttttcccaaatggagcaaagatgtattggataaactcggactttttttttaattagagaatgcttgctctatttcactctcttacttacacactctctccccacatcccattatatatatatataaaacatctccacttttttttccattcaactactgaatttctatcttgtgccctaaatcagtatttcacaatattatgcatgaaattgacatttaaaatgtttaaattatgtgctcattgttatggagattttaatatatatttatgtatgtctaatacatcctacctgtggtttcacagatacattccttgttccaaatggactaattttaattccatgttaaacgtggtgcagtcattaaataaatgcagcaaaaactgtragagtgactcttcaatgactgaagtttggggaaaacttttgtcacagctggtgaggaatagcagggaaggtgtttttaaccaactgcttttgcatgctcaggtgtagctggaatccactgttcgttacgtaggttagcatgattaccctaactgattttaaactatatgtgtgctctttccagatgtcattcttgtgttttgctatcccaaaaccatcatcaccaaaatccccgagtgtccctatggatgggaagttcatcagctggccctcggagggctgtgttacaatggggtccacgaaggaggttactaccaatttgtgatcccagatttatcacctaaaaacaagtcctattgtggaacccagtctgaggtaagaccaggccacacagtgcagagttgtttaaggtaaggcaactggacccaagaatgagatgtctgccatctgtccttgaaaggattcagaatttacccatttccttttaaaggtcagtcctgattcccaaatatcctggaatgttggtgttatttaaaatattctcttctgcctagtttagataactcttttggcttgactcttatcctcctaatttgttgccaaagccagtgaagctaccttctagtagaacaaagtacatttcccaccttcaagttctgagcctgtgctcacaagccgccatccttcctagattggatgggtggatggatgagccattctctgcctgagacttcaaagtggtgacaaagagcatttggaagagcagtttagggagtgaccaatgtataatacaacttctaacgcagtcttgtgaagtgcccaggatgggatatcataagataattattaggaaacagacgccctcttaccaagtatcatatgacagacgagaagtctgagacttcccaataaagtcactcattcagggccacagagcctgtagggatggaatcaggaagggaggctaggtctcccaacctccccaccaagatctagcattcctactgccctacctgccagaaggctgtgcatctatccatctcagagcatgagagcaaagagcttccagggccagctcctctttctaaargcctcacaaggattcagtgatttaatgggaagagtcatgagcatgattaacaagacatcatgtctttgagtatatcctggtgaactagaaatcagctgtgtggtctcaggtcagtcacttttcaagtggatgttyaagatcccctccagctctaatattctgtgattttagagcccaacaagtcaggcgaaagagtctcagaaatcgtgcttatagtcagaagaaggaaagagcaaagaaccagaagggaacactctagaaattggagatgggtgaagcattcatttagaatatttggacaggagaaatggatgaagagttgactttgggaaacagagattcttgagccagttctttttggtcagaagcccaatgggtacatggagatttttaagcatacgacatcaacctagatcatttttaaacactcttagttgaataaactaaggaaccctttacaaaattatcagctcacccgcagacaagaagagtggatgccaccgtcagtggcagacatttctgtctccccactggacttgtttttgagccatcttcttgcacttttcccagaaccctcattcccatcgcggggaaacagattcatcctgactgtctcctttctttgtccagtacaagccacctatctatcacttctacagtcacatcgtttccaatgacaccacagtgattgtaaaaaaccagcctgtcaactactccttctcctgcacctaccactccacctacttggtgaaccaggctgcctttgaccagaggtaagttgctgtgcggcatggagggctggctgcctcatgtgtgtactgcaggtcctatcaatcagcgtgtttcagtccttatgcaaaattctctccccttttcagagtggccactgttcacgtgaagaacgggagcatgggcacatttgagagccaactgtctctcaacttctacactgtaagtggtctccaggttcccattacttccctgtggcctttcctttctaggagatggtgggatgcttcctcgggattcagtcttccccaagctctgtgcagagccccattcttaaattcaagttgaaacatgaactttggtttagctttaaacctctttaaaaactaagtgtcacagaaagtcagattcatagactggatagaagagctgaaaggtataagatataagctataataccaaccttctggccaggcgtggtagttcacacctgtaatcccagcactttgggagaccgaggcaggcagatcatctgaggtcaggagtttgagaccagcctagctaacatggtgaaatctcgtctccactaaaaaaatacaaaaattagccagatgtggtggcacatgcctgtagtcccagctacttgggaggctgcagcagaagaattgcttgaatctgggaggcggaggttgcagtgagccaagatcacaccactgcactccagcctgagaaacaagagtgaaactccatctcaaaaaacaaaaataaaaacaaaaaaaccaatcttccgcaaagatataagaccaaccttcccattttacagatgagaaaactgaggcaaggtcaacagacaataagacagccaatgtctgactcttagwcaagattagttttcactacaaccccctccagagatttatatttaagatctagctcttaaaatatttggcccaatgtattgaggttcctgactgggacagggctaaagagaaggattggggtcggcctccactgcctaattctttggtctctaaagcctttcaagtagcatttcctccttgcttaatttgggcaggctgcccatgttgacatagaagttaaaggcacactttggtctctctcaaaataaagtgctccagagaaactaaatatgcaatggccatttgcccagctgctctcctctttagaaggggtgctttgtttcttcaaacctgcagcttgcattgaggacccatacacacagagactgtcccagcaggctaaaggaagatgtgggcagaaatacaaacctttgcatagaacattagagccagaggacctgttggaaaggcatcaygtccaacccattcacttctcaaaggagaaacatcgtactacctctaactccattaactttgaactctttaagcttgcttaacctgctgcctggaagctatcagccctgctgaactcagaaggcgagagctgyaagggatcctagaataacctagtctgttgtacagatgaggaccagaagcccagagggaggaaggattagcctgagagcccacaggtagttcagagcggtggccagtctggaacacagatctcctagatatggtcactttacttactgcgaagggaatgaaactcatttcaaggccctttcaaggccttgtgtctaattctgtattgaaaaatgtgattcttttcattaaagagggctctccacattgtaaaagtttcaagatcccacaaaatctagatctgcccctagccacacaccactagtcgttaagtaccgagaaagggaatccacgtagcccttgacctataatcgggggctaaatacagcatgggccaccagggtgatgataaggtggtgaaaccactacagtcagtgatgaaagccgtccggagaggaaaattggcttctgcgcactgacaacagtctcaggggactccctgatgacaggctgcctttgctattgaatccctgtctggaagtgaataattgttattttaaccagataaaattatagatatgatcccatgaaggttttacaatagttggcaacacggagacaccaggattgtcaaaaatcattgcccaccatcagctgygtagagctgagcttcaggcataaacaaaacatcaagtcttagaactggaatgagcttattttcttaaaaaaaaataataataataagagacatgtcctcagcatcccccaggccatcctctgggctggacagacagataacgggacactcccttcaacaagtatagaattaagggtcaagcgtcccctgaggcccaccaagacctttccaggacaaacgggcctcagcaaagaagggactctgccatcctgacactttcgtactgattaatattcccgccatgggctcagttccctatgcctgacccatgtggttggtatttttttctcctcccttcttccactttcagagcattcttatgtgtttctgaagcaacaactgctccctgcatatatttccatcaaattaccagaaagagagctctgccctagataacacaatggaatcaatgcactgctaattgcttaggatcctgagagcttcaaatgctgggctctaaaagcaccagttctactcagcaggcttcctcttttcttttctctccatccccctcccactcactcttgacaatatcccatggttggtattcctagtgaaaagttattttgaccctcaatacaaaataaggaaggtagttggcttacggaaataccctagtgctgtggttaagaaaatgggccttctcaacagaccactagtttgaagccttgttccatcatttactagttgtgtgactttgggcaagttagttaaccaacctcyctgggcttctatctctgcatttgttagcagggataataatagcacttaccccataggtttgttatagaattaaatgaaataatctttaggaagcacttagcacagtgcctggtacaagttaagtacccaagaaagtagccattctcatcattgtagactttgactctatttaaagtggaaactctgagggcttctagcattgttaactttataaggctgaacatcgatgtcagtgttggattatattgacttttattcaatcaaaacagtactgatcattccttttagacagatagaaatgaaaaagcttaagacggaaaaaatgcaagcaatagaggccaaaatcatagactccaggagtcaaaacaagcctccgaggtggtaaaccttgactttccacccaaagcccaaaacccttctgcaatattgctgtggggtggcctccctgcctcttccaaagacaatgatatttgggccttcccattttagatcagctctgatatctgacaccctgaactctcgcacatgtgtcccagttctgtcttctgaaataatatcatataattatctggctgacagtacttcaaatatgtccaccttctccaagctaaacatcttgtctctgttggtggttcattcaccatcctagtcactcttctctgaatatgatccagttgctcagtatccctattaaaaaatgaagcccaaagttgaagtgttatattctagactttatcagacccgtgcaggccatcacgggtcagaggtgaccttctaggttctggaagactctaggaatgtgtcctaggaaaataactttagggcagtttttttcaccgctacttcacatggagcaactccgagatgtttccacatgaactattgttaagccaggtgtactcatccttaacttgtgacactggctagttgtgactcaaccgttcacaactgtgggtcccctcttacccacagttttgctttccatggtttcagttacccttggtaaactgtggtccaaaaatattaaatggaaaattctagaaataaacaattcttaagttttaaattgcacacctgttctgagtagcatgatgaaatcttgcaccgctcactctgtacttcctgggatataaatcatccccttgtccagaatatccacactgtagacactacctgtctgtcagtcactcagtagccatccatgttatcggatcaaaataaaagtaatatatatagggtttggtactatctgcagtttcaggcatccactgggggtcttgaaacatatctcctgtggataaaggaagattactggatctggaataggtttctaattttcacattatagagaaagtaggggaaaaattattccaagccttccctgagctgttgggtgagaatatagagaactcaatcattagtgttctatttcagaaactgaattaacggtgtcagctctgttcttcactttgtaacagaatcaggcaggttcttccatgaggagaggtattattccaatattctaacattctgctggctggtccctggcagaaagagttgggagcgatacctctgacaggtttggggactacatcggggtccccaggtaagttcctatatttgaaaatggcctctcaaaatatgacaaatctcagaacataacaaggaacattaaaaatcactgtaaatctgccacttcaacctgcattttaagccagtagatcccttatgattaagaacattattatccaattattgcagtcatttaaatggtgcaggggctgacaaatgggaggaagcaactgacttctaggtgactgaatcaggcagcccttgctggacttgccatcagtaaaataatgtcagaggtactaggaaacaaaagagattctgagtcgtctcaacaaagtccctgtgtgtttgacatgtgaggggtaaagtccactttattttatctttatttgttatttttattttaagttctggggtacatgtgcaggatgtgcaagtttgttacactggtaaacatatgtcatggtggtttgctacacctagcaacccatcacccaggtattgagcccagcatgcattagctatttttccaaatgctctccctcccccaccccacccaccaacaggccccagtgtgtgttgttcccctccctgtgtccatatgttctcattgttcagctcccacttataagtgagaccatgcactgttcctctgttagtgtgctgaggataatggcttccaactccatccatctttgcaaacgaccagaaagaccatttgacccagcaatcccattactgggtatatacccaaaagaatgtatatcattctattacaaagatacatgcaacccaaaggaatataaatcattctattacaaagacacatgcatgcatatgttcattgcaacactattcacaatagcaaagccatggaatcaacccaaatgcccatcagtgacagactggataaagaaaatgtggtacatatacaccatggaatactataaagtccattttaactagacatccttgctgaaatccgttcctcctgccactgtctacctattgcagttctgcaaatctccaggtctatgaaactcaatctttcaaacagtaacctggtctaagctttattctcctattacataaagtcacaaaggttatgtccattttgcataggaagaagctgaggcctgaaaggctgacttgcctatagtgtgtcccaagttagcggtggaagctcgggttagcccaggatccttgcccttccatggtaatgcttttgtctctgaaatctaatccacaggctgggcgcagtggctcacgcctgtaatcccagcactttgggaggccgaggcgggcagatcacgaggtcaggagatcgagaccatcctggctaacacggtgaaaccctgtctctactaaaaatacaaaaaattagccgggcgtggtggcaggcacctgtagtcgcagctactcgggatgctgaggcagaagaatggcgtgaacccgggaggcagagttcacaatgagccgagatcgcgccactgcactccagcctgggtgacagagcaagactccatctcaaaaaaaaaaaaaaagaaagaaagaaagctaatccacagagcagttcaagattgttactagggttgaatgaactcaagactcagagaatggagaaatcagcctcctttgagtaagtcaaacagaaacactgctgttattcctaacagctcacccagcatgtcctgatgagaatggcagggaaatatcccacatgccaggccagtgatcagaacctgctgttactgtgctcacatcgtggtgttgactccttgctgccccactgcactcagagagtaagacccagtgtttagtttttgaggttttttgttttttgtttttgacagagtctcactctgtcacccaggctggagtgcaatggtgtaatcttggctcatggcaacctccacctcccaggttcaagagatcttcctgcctcagcctccagagtagctgggattacagggactacagatgcctgccaccacacccagctaatttttgtatttttaacagggacagggtttcgtcatgttggccaggctagtctcgaacttgtggcctcaagtgatctgcctgcctcagcctcccaaagcgctgagactacaagtgtgagccacagcgcccagccagccccagtcttcttgatcagcccccacaacttatctaacctcacccccaccccgctccccactctccaccctcctgcctcacttacttgctccagccacactggcctccttgctgtgctgccagccacagtcctgccccagggcctttatcctgactcaagcattcttccctggatagctacatggcccccctcctcacttcctccaaatcttgctcaaatgtcacatcctcagtgaggcctccccaaccactgtatttaaaactgcaacctgcccttcctcacactcctgatcttccttatcccactctgcatgttttatagcttttctagataatgtcctatggtctatagttacatattayatcatttacttacttactgtttgtctcccctgctagaatatgccagatcaytgaaggcagatatctttgctttgttcgctaacaaaatcctgacagagtccatcgtcagtgcccaacacatagtagttgatcaatacattgtggtagtggttgttattgttgttgatgattgtactgggaatctgggaatctgatcctacacttcccaamccacgctgaaatctgctcaggcaaaaagtagcaacgagygagggcagaggcgggtgttgtatgtgctcagtccctgtgtccttgggcgattcagtataacacagtgccttaatatccctgaatttcacttgttttccattagtgaaatctcattggcataaatgagacatacagtgtgtgtctcactataatgagcaaatctagaatacgtgattatatgatgtcctcatcccttctaagatggcatagtgtcttaagacttagaatttctctggtcttggaggatcactctatggtctcacctgcttatgtctttgggttgattctcatccccaccccatcccaattcatctgctcctggtagacctagctgctcaatctgagagttcataatgcccagtgtcaatttccttccaaagaatgccaagttctccatcaagaaagaagctccctttgtcctggaggcatcsgaaatcggttcagatctgtttgcaggagtggaagccaaagggttaagcattaggtaagtacatttcctccaagtttatatgtttaaatgcaaagaaaaaaaagactagctgacatactttttaatcatcagatgtttgtagrcataagattctctgtttcaaagtgatgccattttgttttatttccaggtttaaagtggtcttgaacagctgttgggccaccccctcggctgacttcatgtatcccttgcagtggcagctgatcaacaaggggtaggtacactatctagagacagggctgaacagtggaaccaggcatttatygggctactttgctctggcttgggaaagcttgggaggaagaggtgaagcctgctggagttacagcagtgacaccatctgtggttccaggcaaagaacaaatactaagaaacaggacatagtgcattctaggggccagatactgttctgagagctttaccttatattaactcctttaagccgtacaacaagaaagttagttttactatcatccccattttacagatgtgaatactgaggcacaagagagggtaaggtctcatattaaatgtgtgtgtgcgcatgcgtgtgtgtgcatgtgtgtatgtgtgcaagaggaagtgtgcaggctgaattcaaatccaattagtctgacaacagaaccacggtgatgatgactaaattaaataatcgatatcaaaagcttagcagatggtacttgctagatagtccaaccattttaaataagatcattgtttttattactaattaagtagataaccgggagcttttacaatttggagtaaagcactaaagtagtactagaagtgcgccctagaaaggcaatgctggaagtcatacacaggatggtttagaaacgtgcatggaagggagaaaaaccagattagaggccctggcagctattgtgcaagggtgataagacatgaactgctattgtagccaagtgaatggaacaaggtaataaaaagtagggagatgcttctrcaggaatgagaaaatgtaggaactaatcagataggaggtggaggaaaggacagcgcaagaaatctggggagtaatggaaaaagatggctttgtgttcttaaatctgtggactacaaagctgaggaagagtgtctggatttggctgttggagaaggaggtttttggataaggaaatatggattctcgctgagttcactaacagacatgttaagcttcaaatgatgattgtccagaagtacttagaattgtactattggaaattagaggagagacagggctagacaagagatgtggacatcatacacataattagcagtaaacaaagaagagatcattctctaaacaaagcatgtaacagaccaatgtgcctgtgttattctcagaacccatcaggccaaggaaaaattaatgtcaaggataaacataattggataacaaaagtggagctattttggacctctatttttatttagcaaacacttayacagctcttacaatataycaaacattgttctagataggtgttttacaaatattaatttatctaaatgtcattaaaccctctctaaagtagacagtataataatcattattttatagaggagaaaactgaggcacaggtccagaaatgtgcccaagatatggagctagtaaggagaaggcctgggattcagactcagtcagtgttacctcctgagtggcctggacaggacaggctggccgaggcacacctgtgcagcccagcaaagcctcctgtagagatggcagcttaatctgggtgtttacctcacatctgccattgaatgattcaattcattcagcctctgttagcaatggtgcaatcaaatgactccaggaattctgaaataacgtattgacctgcagggaccagaaattgctatcaggcactgggaacctctctcaggcaatggtcacactaggcaaaggcttctgctacccctggaatcatctctctgcagggagttctagtgccgttgttcccatctggcagatgtgcaacatggctgaaaaagggatgcctgtggctttgggtggtctgcacaattgtcctcaagctctagtgtacacacaaactgtgtagggtgcctattacgtatgcaggtgtactgtaaacctaccagatcagaaggactctggggaaacccacggaatctgcatttcaacacagccagatgtaagacatcccgacccatttctacattcttcctagttgacatggcacctcaaagttggagatacatgcacaaagttcagtgccaaaggggagaatggaaaagtccactcccacaatctccagatgatttttgctcacaacactgggcccctttggaaaaaaaaaacccagtttgcaaaagttcctggagagatggcaggagatatatcataaggaatttccctgtacacatggatgccccaaaagcagcatacttatctcaaagagcaatctgacatgggaaaggaggctcatgcagagagggcataaaagcctcctgtgggcttccaccatctagaggcagctgccactgaagtgtgggtgctgcagctggtgccaagaagcagcagtgccaaggcatctagatctgcctattttttgcctcctccccaccccctgacaaagctctgcttacattattttccactggctgaccatgcctggggcactctggctgcaaagagctattttaagaactcccatcttgagttcatacgaggatctcgtgtttattgacaaaatgatcctacagaagtcttgtttcacaacttggaaaatgccacagtttcatcactgttcagagcccaccacacacagacccggctctgacccctggtccagatacaaaggtacagcattccctcacttcactccctcactctcacacttgacttccttagtgcctgcctttagcttggccccccgttgtctgtttctgagggaaaaggggtggggtagagaacatcatgaaggttccctggggtaactggaccgctctctggcgtgtgtgccgagtttaccatacaagaagaaagatgcttcagagttgcattaatctggggcctgctatggtgctattcagtggtctgacgctttcgaaacatagaccttttcctgcagagcgacagaccctgctaccccgtgctacctgcagataacaaacccccacaatagtgtgggcttctctgtacagtcccaagaatggttgcgtctgtttccaacacctagttaaaggaayggcacttaggtcatcagtctttgttaaatgaaaaagtatgtttgctgaaactagggtttctcaatgttggcaccttgacatttggggtgggaccattctccactgtgggggctgtgctgtgcrctgtaggacgttcagcagcagccctggtctccgcccactcactagataccagcagcacttcccccagcctggacaatcacagtgccaaatgtcccctggggcacaaagtggaccaagcgagaaccactagcttaaataaatgcccatctgtgtcattttttaaactgaattattacctttgagacgttggaatatcatacaaatattgtattctcattatagagaatttggaagaatacataaaaatacaaagaagaaaaccaaaaatgcccataattttatccctttgtatcagcctgygttaacatttagacggtatccttcagtcattatttctgtgcttatattaaaaatgtgaccacatttttacaaaagtaactatgtagatatatatartttaaataatataccataaatacaaattttcaatgcaaaacctcacagttcacacacagaaatgtgttgggtgtgacttgagcttaggcagctgtggcagcaggggcaatgctgcacctggtgccattgtccttactttgtatgtccctcaagggctggacatattccagtcctcggagggccttatctcctagggattttctttctttgggacacaggtgtaacttactaaaagtgtgactcttataagtcactcccctcccatcgtaccttgtctatagaatgaggacagtaatacccatctcctagctcatcaacttgacctcacagttgtgaagatcaagtgaggtgctgctaatcaaaatgcctgggaaggttagaggtcatataaccacctcgggarccttgtgtgtaaatcgctcagcagctcttgctggagttcaaggagatgacagttcactcttctttccccatctgcctcagctgccccacggatgaaaccgtcctcgtgcatgagaatgggagagatcacagggcaaycttccaattcaatgctttccggttccagaacatccccaaactctccaaggtgtggttacactgtgagacgttcatctgcgacagtgagaaactctcctgcccagtggtgagctgcctctctccagaaggacaatgttacctaaagggtgccagtattggaggagctggagtttgagtggggagatcataaccaggccagggcagctgtgtgctgaggacatctggaggaaatggcactgagtataagggcagatgctcgtgagggcagatgctcagggccctatctgccctgcctccaacaacccacatggtctggcatgtgtcgcctaacctgctgggacctgctttctcatccttaagcaaagtgtgttaagtaatgatggcccttccctcatcagagggcagtgtaggtaaatgaaagtgataacagacttggaaatacttggaagaagtgaaaagggcaagggaaattcaaggtctaggtggcagggacaggccgtggaaataactcaaaaggtgggtgtttttagtcttgactgaacagcccgagggttcacctctgtgacttcagagagatgctgcagaaattcccgacactggatcatggctgatttgaccacgtgagaggaaggcctgggcaggctgtgctttaacaagccagcagtcatgccggtgctcactcaagcctgagaaccaccacttagacacttagacatgccaaatctcaaactgttctcctttctggtctctttcaactggagacctcggtgtttccaaagaggctgctatccacatagcctatagtaaccaacaaaaataaggtcataatctctattgctgttgtttcatttggccagaaaatggttctttatgagcacaaacagcaaaagggaaagaaaccagagagtgcagagccagggagaggaggggagagacactgtacagttgatcaaaggataagtatcaatgccatatttttaaaaagaaagaaaagaaaatgaaccagaatacaattgcaagtgtccacttctctaattattgtggtgagagtggtaagtagaagccttatcaaaggaaatgggatcaatcccttccacactcaatgacctcttccagaaggattccctctggcttgaagagttaacaaagtaaagctttctctttgtattcaagttggagaagggatgaacagtgtgtcttctgggttattttttaaaaaggtaactcatctctgttgactggggaattgtgactccaccccatttgtgacctttttaaaatatcttttctttctcttttctcccctttgctcacgcatcatcccaccttccccgcttctctcctgtctgcctctctgggtcttcagacctgcgataaacggaagcgcctcctgcgagaccagaccgggggagtcctggtcgtggagctctccctgcggagtaagcgtctctgttttcctctgttttccaaacggttgagttcacgctgggctgcgtccacaggcacagccggtttgagcatttttactgaattgccaaaccagtcgtgcctgtgggcacaaccttcacctgctcctggagtcttccagccaggggtggggaacagctcaagccaaacgaaggagttgaggtttgttatctactctgaaagttctaactgcaccctaaattcaaatacccccaaagaatcaggaagtgctgagcttccaaacagagcatgcagtgaacaataataatagaaaatgagatgtcatggggccgggctcggtggctcacgcctgtaatcccagcactttgggaggccgaggtgggcagatcacttgaggtcaggagtttgagaccagcctgaccaacatggtgaaaccccacctctactaaaaatacaaaattacctgggcttggtggggcacgcctgtaatcccaactactcgggaggctaaggcaggagaatcacttgaatctgggaggcagaggttgcagtgagctgagatcgcgccattgtactccagcctgggcaacaagagcgaaactccgtctcaaaaaaaaaaaaaagaaagaaagaaaaagaagaaagaaagagagacagacagacagacagaaagaaataaagaaagaaagaaagaaagaaagaaagaaagaaagaaagaaagaaagaaaagaaagaaagaaagaaagaaagaaagaaagaaagaagaaagaaaaaagaaaagaaaagaaagaaggaaggaaggaaggaaggaaaaatgagatgtcatgagaatgtcatgtgcaagtcaaaaaacctttactgagtatccagcactgcctggcctggcagggcactaggatttcagaaataaatgtgacccaagcaggccctgtcctcaagggatttactgtctagcaaggagagagatgttagacactaagggaaagagaaattactgttaaggagggtgacagtgggctggtgccatggttgcacagttgatcatcactaatgtgaaaatccaaaatccgaatgctcccaaatctgaaactttttgagcacccacatgatgctcaaaggtcatgctcacaggaaatgctcattgtagcattttagatttcagattccaggttttccagttagggatgctcaactagtataatgcaaagattccaaaatccaaaaaaaaatctgaaatctgaaacacttctggtcccaagcattttggataagggatattcatcctgaatggagcaaagggattcaacctagtacagggcttgcagaagagctctgctgacaatctccaagtgagacctgaaggatagtgtgacatgaagggtgggcaaaacctgtgggaaggcgggaagctgtagcggctctatcttagaggacagtcaccaagctatggccaagggccaaggcccaggtgccacctggttttgtggcctgsgaattaagaacagttttcacgtttttatgtggttcaaaaaaagaatcaaaacaacaatatttcgtgacatgtagaaattacgtgaaattcagggccaggcatggtggctcatgcctctaattccagcactttgggaggccaaggcgggcagatcacctgaggtcaggagttcgagaccagcctggccctgtccctactagaatacaaaaattatccgggagtggtggtgcacacttgtagtcccagtacttgggaggctgaggccagagaatcacttgaacctgggaggcagaggttgcagtgagcagagatcacgctactacactctagcctgggcaacaagagtgaaactctgtctcaaaaaaaaaaaaaaaattatatgaaattcaaatttcagtgcctttaaagaaagttttattagaacacagcaacactcgttcatgtagatattgtctacagcagtgcactgcaactacaggtggatttgtggtagcagagatgggatggcctgcaaagctgacaaaatgtactatttacttttttcttttcagaaagcttaccaacccctgctttggagagaaagcgttgtgagatgaaactttgtaaacccccagtataaactgtctgaaaggcaatggagcacctgatggtttaatcaggggaggaytgtggtcaggttttgtgttttatttatttatttatatttatttttttgagamcgtgtcgcccaggttggagtgcaatgacgtgatctcagcttcaagcaattctcctgactcagcctcctgagtagctgggattacaggcacgtgccaccacatctggttcatttttgtatttttggtagagacagggtttcatcatgttgcccaagctggtttcgagctcccaacctcaagtgacccgcccacctgggcctcccaaagtgctgggattacaagtgtgagccgcagcccccagccaggttttgtgttgtagaaacatcactctgagacttctcctttccatgatcttttcttaaactttctgcattctctctttactcactacaggcaggggattttccagtctctatagcttctcaggtaaggaaaagagacacttctgggatttcgtggggctatgctgttaaaaggcagagagtgttttaagagaagcttaactttggccccrgcaaaacttttaaggattgaaaattatactttaaagcacacctgagtggcgcagagggggcgagatcaagaggtctccctctgaccagcccctgaactctgaagagagggaggaaccgaaggtaaatcggatgaagcagaactggacctcacttccccaagtcttagtaaagccatccccagatggcttcccttggattccaacatttacagaacaagattttcagtgatctgttcattcaacaaatatttgaattcttgttatggctctgtcttttattaactgagtgaccttgggcaatgacctcacccctcctccataccctagtttcctctgtgaaattgggctaataattgcccctatctacatggctgtggtatagatatttaattacagctaagggcactgaacaatgcccagcaaacagcaaacacccagtcagggtcagccatgattatgatgactgtactgggaactggtcttgtggctactgccgtgaacaagacagacaaggccccttcccttgccaatatgtgtagagtatttggggttcaatgggggacgtgatttagagagcagccagggaagccccttagaggaagaaacatttcagctaagacccaagatctcacctgaatgataagaaggaagcaactacatgaggagatggggtaagacagttcacttattaataatctcacagacagattttgctctcatcattacaggagaatcatgtaaatcaacttttaaaattccaatcctagattctcatcgtttttaagttctacactgaaagccmtagagtaccatgcaccatcactgatttctatttgtcagaggtccacaacctaggtttatctgtcaggttctttgtactgataaatgtgagctacagaatccccaagggatgaacaaaatcgactttgtctaaaatgtgtggaattttatgaagacccctgagttaactcttctgttgagttggctttacccttgtagaactgtctctgagtgccatctccctccccttctggtccacagatgttctccaccacctcatcatgatgttggggatttgtgccgtgttataggagttagccaggcagctgccgctcctccacccacaatagtcctcagcgaatgacaaacacatttattgtgctgccaaaaagaacaaacagaagaccacattgttggggggcagagaatagcactttgccaaatatgcactccaataatttctgtgaatttggtgatgcctttttctttctaagaaaaacttaggctacttcccgtggcccttagatctcacagtccttctacagctgggggaggagcctcctttctccatactcaagtcagggctgcagtaaattcctttgaaagctattttaactttaaaaggttagcagacccaaccaagtactgctgagcattttgaagagaatgtagggtgcaactacaaagtcaacactaaatgcacaacgcacattaatagctgactttgccaaaaaggagctttgtcattgaggcagtgtcattctacttaaggaccagagctgagcccccacgcagggagttccaatctttcaactgatgacatgggagatgatgtgggattcagagtggaatacaatagttttgctcaaacctaatgatataaaggaaatagattcttgaaagcccctagtactgacctaatttgtttttattataccatttgttaaatatataaacatgatataggtagaaactccttgtttttatagcagatgtatacttctaaagtcaaaagaaaattacaaattaaataggaatatttacaaaaagaataatcacaagaagaatacaactcacattaatttaacctaataacacggcattgccccagtgaaactgctgctggaaacatgactataaagtgactccaatgacacaagtgctgtgagtttggtgacccaatcctacagataaatgccttgtgacactcaatgctattttttctctatttgctctactaagaagttttcatttataagaaatggtctgatctcatttagcttttacttaaacatcgaagcttacatctgtttttgtctcattcacttacaatcattagaatgaagctaacacaaaatcagaaacacaaatgcaaatgcagccaatgaaagcatgcagtagcacatcttggtaactggccaccccagtgatccagaatatgcccatataaatgatttacattgtcaacaaaatacaaactgaatgaaccaattctggtagagaattggctggattgtgataggaaaaggcagagttctaagtccttagttatgtaaagacttaattagtaggcttataatttgaaaacaacacatgggtttgtctctctgtatttaaggtatttgagaagttttgcaatttgcagtttgatgattcttttacaacttgtgttagtgaactcagagattaaactagttatgaaatctccggatacatgaagtgtatgtttgtttagtaataggctaaagtaaaatgactcaatttggtctagacttggtctctaagctggagttccaacgagtttaggatctcttctttctgtaaattcagagtttttatagtcaggaaaaacagaagacatattttattggttctagtagaaaactcttaaatagcatactcatagccatgttcaaatcctttgctgtcagaataaaccaatgttgtattagttttgctgtatttcatcattgtgttttatgatcttgtatctctacctggcgctatggaataaataaaatgccttaaaataaataacctatgactacagtttacagtgttaatatatcatgttgacagctaattccccaattctcccaggggtttctacaactagagcttcgtagactcgcatatatgccacagactttttttttttttttttttttttgagatggagtctcgctctgtcaccacccaggctggagtgcagtggcgtgatctcagctcactgcaagctctgcctcccaggttcacaccattctcctgtctcagcctcccaagtagctgggactacaggtgcccgccaccacacccagctaattttttgtatttttagtagagatggggtttcaccatgttagccaggatggtctcaatctcctgatctcgtgatctacctgcctcagcctcccaaagtgctggaattacaggcatgagccactgcacccggcttgccacagacttctaattattctatcctacctttacatttaaaaaactcccagtattgggtttctgatgcaaggaggtaaagccaatctgtatgattaacattttggggaaaaggtcttttgggtcatccctgcctatagagcccgaatgtctctcaccagtgactggatgtgttttgacttgacattaactaacaacctcatgatgtttgattacccttcttgtctcataacttcttctttgagaaaataagacaaggtactctcaaaacaatctcttgtaaattctcagtagttctaaacacaattagaaacattaagaaaaagaagaaaactaattctcccccaggtatccttagctgacatagaacaaatactgaatatagatttagaaaagtgttcttatcaaaattcttagttgtgatccataaagacagtctcgctctctctttctccatgtgcatatgtgtgtgtatgtatgcacgtgtgtgtgtatatatatgagggtgtgcatacatatatatgtgcatgtgtgcacacgtggatgtctgcatatgcacacgtgtgtttttgtgtgtatgtgtgtctagatgccaaatgcttatgatgttcaataagaaaggcagaactaaatctatattacatgaacataacttacataagcacatgggctagggctggaagaaaaacagacacacacacacaatacaaagacaggataataataggcaattgccctacctggccccattccttcatctgtgtattattttctaatgttcttttaatgtcacagtgatggactgcttagttactgctacgcttttgtatatagctctattagtccttaatattgctttatgcaatgaaattatgctttcttctccctaactagactgcaagccaaagatcaagggaaagttcatattctcttgtgtaccccagaatggcacagagtaagtgcttaacaaatgctccttggattaaagaaatgttcacatgaataggtggacgggtgggtggatggatggatggatggatggatagatggatggatggatggatggatagatggatggatggatggatggatggggactatcctagctctctaggaggactcatagcagaggtggccttgtttcctttcatggttgagcaaggtgtttgggatccagagccattatctcaagaaaaggagttatggggaatgagaagataaatttggcttactgtctccatgctaaagtagcaggagaaagccctcctctcctcttcacataaatgccttctgccttctctccttttaagtatcagtctaaagccttcagtccccaatgcttaaggcctctggggaggagcgaagcctaccacaatgaaaacagaattttcatatagaaaacagagtgtgtgatggatgtagaattcagtcttccctctctgggcagaagcaaaatactggtaatggaaatgcttaggatcccaatgaagactggattatttgggaagtgaaagtgcttttgtgtccctcttcctaaagaaaggcaagaattccaccaaatcttttatataatttggtgttaaaagccttcaataagccaaaaagtagtttatttcccatacaggtctcaaaagtatctcagcaaaggcagctcagagacccagcaagaaagaaactatttctggtctcattgattttcgctccttctgtcatgggaagttcaacaggaaaaggtctcaaacacaatatttcattcaaattgctctgccagattcaggagcaaccacatgaaagatatctggatgtgaggagttgcaagagatgaagaaagaagtactataaatgcattagtggttcagtaaatctattaaaacatccactcaataaaacaacatggaatcctattcattatgtagaagagaaaaccatcgtagcaggaatggatgggttcgtctttgtctactggaaccttttttaaattaaactcttcataaatgactgagaaattctacttaacattcaagccttgactgcaggagtttttgctcggtgaataggagagaaattaggcaatacatcaggaagagggcattatgcatttgggagctgctcggctcacagtaactcagggctcagaaccaggctttccaataactgcagagggcctgactgcttgaaatagcctcggccctgttggatttcagtggctgctcatgccttagagctttttttcctgaacacattctcaagatgctgtcagatatgagctcctatctccttgcaagctgattagctgataaggaaaatcagcaccaaaggttagagagcaggcatcttgcacaagaaagacaggcttcatcctctccactttcccctcctgcagaatgaaactgggttcaacacaaattctcaagttaatgggctgtaaatatctggcagctagggcagttgcacagggctgagagccacaagtcagccctggcaccccaggaaatgagttcaccatcttcagctcctccaaatctgcatttgctggaggcacaggctgggagcaaacacctggaggtggaagagggggccagctagacggctccccctagtgggagactggatcaatgccccagaaccacacctcttaaatgggatatcgactgcatcttgaagaagggtccccaaagactttcatgtgactccacaaacatcttgaaagaaaatactcacctcacaatatctctgggactttggctttttcctcagtaaattcgggagtggaagagtgaagccttctttatctttcaaccagaaagttgtttgctctcctttgccctgtgggaggcaaaggaaggccctggggaatcgctggcagggttggggtggggctggcgggctgcctgtaatgcatggcctctgggcagatgtctgaggtctgtcttacttgctgggacagtgggagctccctccctccacaagcaaaaggcctccttacagataaaatcttactgattttcttgggctttgctgataagcctgcatggccaggcagcaatgtcctagggggtgacagtccacggagactaaagcttgttgcaaagaaaatcttttaaaaataataataaaatctactgcactcttagtatgagtgggacacccagtgaagcgcctcacatccatgtccacatttactcctcacatccacccttcaaggacggtattatcaccacccccattttgcagatgacaaaaacaagccctcaaactcagacagctggtcagtagcaggaatgggttccaagctatggctaaatgccgccttctagaaaagtcttcctcttactgaagtcagttgattgaatacagaatgctaaggccaggctaagcaaaactggggagttgatgccactgccttcccttctacttctttttctggactggggtgttcaagaggaagctaggggaccatttgtagccaaaaaaaaaaaaacgagagagagaaaagaaaaaaagaaagcattccctaaggggttggtttagctgggagttaaggtgttctctgttgaagattccacgtttgatcatttgagggaacttcttctcctctgaaggaagaagatctggcagtcatgagtgcctccaggggaaccttagaggtctccctgcatcactccatggagatgcatccatcccgctaagttcctcgatgtctctatcagagacccaaacagggcaggcagggcatggttggcctggtcttaccttgactggaatggtgcctctctttagcaaatcgtaccctcccaatgccaccagggtgcttgcagtgctctgagagacatgaatccggagagctgccataaac

SEQ ID NO: 7071 - DNA, 40000 bp, Homo sapiens
gaaatgcttgatgatatttgggctgggcaaggatttttaaagtaagccctcaaaagcacaggcaacaaaagcaaaaatgacaaacgggattataccaaataaaaagcttttgtgcagtgaaggaaagagctgacagagtgacaagacaacctacagaatgggataaaagatttgcaaactatctgacaaggagttaatacccagaatatataagcaacttaaacaactcaacagcacaactagttatttaacccaactaaaaaatgggctaaagaccttaatagccatttctcaaaagaagacatacaaatggccaacatgaaaaatttcaacatcactaatcattagggaaaatgcaaatcaaaaccacaatgagataccacctcactacagttagaatggctattcaaaaagacaaaacaagtgttggtgaggatgtgaagaaaaggcaacatttacacacttttggtgggaatgtaaattagtacagccattatggaaaacagtatagaagttcctcaaaaaaattgaaactagaactaccatataatccagcaacccccagtatgggtatttatccaaagaaaatgaaatcagtatatcaaagargtatttgcactcccatgtttactgcagcactattcacaatagccaaggtacagaatcaacccatgtgttcaacaacawatgaatggataaagaaattgtggtgcatacacagtggaatactattgagccataaaaaagaatgcaatcctatcatttgcaacaacatgcacgagcccrgaggacattatgttaagtgaaataagccagacacagaaagacaaataccaaatgatcttactcakatgcagaatcttttaaaaaggtgatacagaagtagaacagtagttaccaraaaccagggagggaatgggagaaggaagaatggggagaagttggtgaatgggtatgaagtgataattaaataagattaataaattctggtgttctattgcacagtagggtaactctagctaacagtaaggtattgtatactacaaaatagctgaagcagaggtttttartgttctcaacataaataaatgataaatgtgtaagacaataggtatactaactatccagatttgatcattgtacagcacatgcataaaccaaaacatcaaattgtgttccrtaaatatgtagaattacaatgtgtcaattaaatttttattttaaaggataaatacaatgagggtcaatctgaagagtgacatacacctacatgctgcatctagaacacagttatctatattcctccctccattctccaacatgtgccactgatcgtctttgccggcaggggcggggtggcgtctcccacatccttctgctttttttggtcctaacatgatcactctgtagtagtaagttaaacctatgatagtagytttcactgattggtgtcactttattgtgtccctatgtcccaggtactctgctattttatattacctaactcaacctttactagaatcttacgaggtaggttgtatcagcccctttttaaaatgaggaactgaagccaggcgaggtgtgatgatttacccaggaggaagcaagtgtgggagtcaggctccccttcacgtccccttcctctgtcccagtccttggctcactcaggtggcttcttggagctccagagtttcctggctttccaggctgtggccaactcacctctcacctcagagaccagtccagtgcctgccaaacaggctcagggaatggtgattaattccatgggactctctgccagggaactgaggcccagrgagcagagatcagaagcatcagctgcccaggacttttgaggtccctcattgtgctcattgagcagggcgctgaccaccttgtgggcacagaagaaacggttcccacttctcagtgcagagtgggttagggaaggaggaaggggtgtgtgcagagtgcgtgtgagtgtgcatccatgtgatgccttctgcaatgcagccatgtgtactttgggatgtctgattctgcaccagccctgccctgcctttgtgaatcccatgaatcccctagttcattccccagaatcctgccttggaggtctgaggtagatgtagaggtgstgaggctggcttgtgccaaattggaagaaccaattgtcatgctctaaggaattctgcaagccagttgtgaagcaccaccattgtttttaaaaattaaattatataaacctataattaaataagttatactaaaaacaaagataaaaaaagactcaaaactcatctcttcaagctgggcacagtggtgggcaccgatagtcccagatactcgggaggctgaggcaggacgatttcttgagcccaggagtttgacaccagcctgggcaacacagtgagaccctgtctctaaacaacaaaacgcatcacttccctattgttttgctaccttttactatcatctatgctcttgggattatttacatctattgcatctgtatcatgtaaacactgttatgatgtgctgttgtgcatcgctttccaactccatattcagtgacatcacctcgcttgacatcagccatggtgggagcgtttatatcatggcaataggcaaacactacaaaatcagggcttgatttattgttttgtagattgcctgtaaagtgacagagaaaatgttaataatgcagatttaaaaacatgtttgtagctattacagagtgcatagcagaaataattgagaaaatattcttccagaattcaaaaacgtttaccccactcagcaaagtagctcctgacaatcaacaaacaagtcctgacttacatctagtctttgttgtttcccatttgtcttactccttaacataaataaaaatatcaaccaataatcatgtcgaaactatgtttactcakcaattgcaatcatagcttggctacagatgaattcagcagaaattaaggaaagcactctatgagaattaattggctgaatggaatttgcaataaagatattgtacatgttttatttgtcaattatgtaaaatgtattatatcagtataatttataataagcttatatatacatatgcatactttttcaagagccagttctgatacatttcccagcataccactgggcacaagtgacctcggctctggcatttcctaaaataatgaagatgtcagagtttctaggaccaaggtcaacattaactatgctttagaggaaagacaacaagggtaaataaaagaactcaagagaaagccagtgccccaccctatgctcttctctctatgctctgcattgcacaaatcctttttccctactttgtaaaatgaggacattggaccagacaaaattttttaactaccagtcacaattgtatgtgttacatatataacacaygactcatagttacaattatgacccagttgagatgcgtgtgtgcacacatgcatgtttaacaaatttctgtgcatgcatgtttaatgacttttcacaaaacaatacccttatcatgctcagtgccctttggtagtcctaatttggttcaagtcatttgtactctgtcccactcattttgtacaatgctggtcataaacactaaattgattttacaacccacaaatgggttgcaaccaagtgtttggaaaaagaaaacacaaacaaacttgactatcagatgatgctagggggccgtctgtccatgaaggcctctgacgcattctgcaaatatgtgtcttcacactgcaggatcctgaacacccgcgacctgctcagatgtgtaaacagcaaatgaggtcaggtggaaactttagctcagaccttatcgcctctctgggccctcctcctcgctcctccctgacccaaagtcattccctcctcyctcccacttctcctctcccagccccactgaacttggctgagggtcctctctagcactcatcacatcttcttcatgctatagggacgcytttcacatctcatctctcgctttccagttgtgaggttttcaaaagctagaaacacgttttattcaactgtgaattccagccgtcccttacccaacccctaccctgagcttctggacttcagacaaggtacataataaatccaagtaagtgcttgctgaatgaatgagtgagtraaggaaggaaggaaggaaggagagaatgcaggaagggcrggtgccagggagacatacactctgcactgtgtgtacttggcctgcatatggctgagctgtctcctggcccctcatccactcgaagtagtgraatcacagactagcacccacccacgggaagtgtgaatgcctctgcactctctgtcactctccctccccacagggcagccctgaagctccatttgggcactgtcaggggtaggaaccctgtacctcccaggccgaccctgccatcttgctaagtgagccaggctcagtggaaaagcgtgggctttggagccaggaagaccatgagagtgagtcccagctccaccacgygccagctgtgtgactgtgggcaagctgtgcccctctctgggtcttactcttctcatcctgaaaatggatccagtgtcccccttccagggctctgtgtggatgagatactatgagagtcgagtgcctggcctcatgcccaaagagcagtgcttcttttctcaatcttttccccgcttttggacagctctgacaaaagaaaggtgtttttcctttcacagaactgaaaggggactgccagtggttgcgtttctaccccctcggagcctggaccctgtctgctcctctgtccccagagcatctggtaaacagtggcgacctctcccattccccacaggctctgccttccatcccccagccccagtccagtgccatgcatggctgtgctcagccgagctggcatccctggccttctgctagggctgaaagtgccaaggactccactacctttgggcccctgaccgtgcagtgaattgcagtccccacctggttaaccaggagccagagcggctgcccaygcctggccccatgaccaatcttacccttccctactgcagraagactgacccaaagcccagcacctttgcctagcatgggccaggtgccctcctgagccaccgacctcctttgaagccctcatgtgaagaggcccagtcaggaaaatccactttgagtccatcccagctctgctgctaagcactgtggctccttaggctcaggggccccataggtctctgtttgctcacttctgaattgaggggatgggatggactgcttgggacacggcccagtttcacagccacctgtctactgtttggagctaacttttcataggcctgtgtaccccactggatggggagctcttcgagggcagaggcccttctcatttagctccctgtacccagctcctgcccatacctctggcaacagttggcactcactcatgtttcctaaacgggtggatggaaagctaacatccctcgagggtctactatgtgccaagctttgttttaaacatttagtatgtttaccacctcgtttcatcctcacaacagccctatgggaaaggtacattatcaccccatttcacagatgaggaaactgaggcactgaaagatctagaatgttgtccaaacttacacagctagcaagttggggagccaggcattgaatgctaacaatctggatgatcgtaaaagaactctctgactgccgagttttgatttcaatataattttcagctcctatggccagggcagtctgggctctctcagaatcaagatgagagaatggcaggggcttgtgtaggtttgagaacaaacttctgtatcagatcacttgtacaccactttaagaattccctggagaaagcagaattcttttcaaaaatgaaatccaggcagggtggtggctcgagcctataatcccagcactttgggaggctgacgggggaggatcgcttgagcctaggagttcgagaccaaccaaggaaacacaaggagacccccatctctacaaaaaataaaaggcttagctgggcttagaggtgcatgtctatggtcccagctattcaggaggctgaggtggggggatcacctgggccagggagaccaaggctgcagtgagctgtgattgcaccactgcactccagcctgggtgacgagtgaggctctgtctcaaacaaaaacacaaaaatgaaaactgtgatgaaataataggctgcctaggagaggaggaggggatgggggagtatcaatgaaacaagattggccatgtgttgacagttgttgaagctggcrgttcatgatactattcccttttcttttgcatgggtttgcatatttccataataaaaagcttaaatttttaaaataaaataagaggaagtccatgactaccataaacccacataagtttgctgactgtctttctggttgtttcccggtttctccttttcccctgcaggcctgcctctgacagcmcctcagagtgtcacatgcggccccgctgcctttctctctttgtgtgttggcttgtctctatgtctgccactttctgtgaccttctgagaatcaaggaaaagttctgcaatcaagcccacacataaacatcccrtttttatttcattttctcccagagcctctctctttcttctctgtatgtccaaatctctgttctcgttgtgtttgccttgacttctccattcattttgaccttgctgtatggctggctaggaatggtcagctccggctggtaccccgctttagaaaatgtgcatggagggtattttcatgcatgtctgaaaagttcagagagtgctaccacaaaaaaaaattggttgttgaagaagacaaaaacttttcttttctacctcctttctttcttgtctaataaagccatactctttttcatttcttttcacttaataaaaataacaataataatagccattgtttattgaatgtgtgctgtgtgctgggcatttggataaggttcttatagttattgtctcatttaacccttcacaacctgtgtaacatgtattcccacttcacggatgagaaaactgaggcttcagagaggttaagtaaaagcccaaagtcacttagctagaggctggcagagctggagtttgaacccttcttatattttccaaagaggaaacatattcaggcactacaatgacattaagacattgataaaggtttcatgtctggggtccttagtggggacagtgacacccctcccccacccctcactggtagacaaatctgaactacatgctcaggctgggccctgccctgtgagaaggaccctgaccagctgaaccatacccaggaagaggaccgtgatggagagggggccctgagaaggatgggtagaagctctcaggggcatggtgctgacttcaaaggaacatcaagggtccaaggggcacagctggcaccaaaaggtaagccacatgctctgggtccatcctggactttccctctaattccagaccacaaggccaattgtcagcctcctggttatctgtctctggatgtcccatgggcaccccagtcgaacatgccccatctgracaccccaacttcctgctcctcccctggcatcctcatctcaggagtggcaccacccccracccattcatccaagtcagggacccaaagtcatcctccactccttcctctccaatccctgccaaatccagacacatctctccamcctgacagccaccaccttcgtctaggccactgtcccctttgtctggactatctcagtagcctcctgcttgggytcctacctcctaaccattttccatcctgtgaccagagggatcttcctaaaaatcctcctcttagyctttcccttctcccagcccaaggggccagctggagacagggaggaaaggaaaaatgctctcagaccttccagttccagtctttgcccacctctggctgcctcctgtgctccctgtccactggtcttgcaagccgtccctctggtctgtttccagcctcaggtcttttccatccactgcactcaggctccctccttcttcccgtgggtgggattctgggaatctcctttcccaagtgactcttattatycctgttggtgttttcttttttttttaaattttattattattattatactttaagttttagggtacatgtgcacaacatgcaggtttgttacatatgtatacatgtgccacgttggtgtgctgcacccattaactcatcatttacattaggtatatctcctaatgctattcctccccactccccgcaccccacaacagtccccagagtgtgatattccccttcctgtgtccatgtgttctcattgttcagttcccacctatgagtgagaacatgcggtgtttggttttttgtccttgtgatagtttgctgagaatgatggtttccagtttcatccatgtccctacaaaggacatgaactcatcattttttatggctgcacagtattccgtggtgtatatgtgccacattttcttaatccagtctatcattgttggacatttaggttggttccaagtctttgctattgtgaatagtgccgctgtaaacatacgtgtacatgtgtctttatagcagcatgatttataatcctttgggtctatacccagtaatgggatggctgggtcaaatggtatttctagttctagatccctgaggaatcgccacactgacttccacaatggttgaactagtttacagtcccacccctgttggtgttttcttggctcatttccctctttgatcccccacagttcaaaacagatattgtgacgccagaagtgatggttggattttttgttatattttggagtaggctttcagttcttggatctaaaacatttgaaggttagaataagaattcttaattcctgccatcggggcaagactttacagatctcgaatcctttcacattcttgttctcatatgatcttcacaaagctgtggtttaggtaaggcagggggtatcacccctgattcagagatgaggaaactccaggatttgaacccaggccccctaacaacacatctgggctctgcccactccactctgtctctgaactgaagatgaaaggaaatctattcgctgaccaagtaacctatctatgtcatttcctccatgccagcctgtctacaaattagctaaaacatgcctttctcctggttttcattaaacaccagcatcaaagaagacagttgctaggaacatgccgctatccagcatgacttgtctcagatctgcctcttaaagcttacctggtgtttttgggaagcatcttggagcaagggtaccacgtgcagccctggtgggcaacgcgttggcaaaggaggcttctctcaattgttcttcaggctcctctgggctcttggatgtcactgcttctgatgagctgatgttctgcccagttctcgtcacagcactgaaaaactcagagaaaaggcaaacttccagcaaatatttacctaagaaatgaaagcaagcaggcagcccacttcctcattccagaacactgctgactattcagctcttcctccccttctcatgctgcaaatgtaggacttacactcctatttcctctctcctgggctcttgtggaccctttcaagctcctgctgtgggcaccatccccctgagctgtcagagcttcgcccagcagccatggcccctttggttagctgtaaaaattattaccggaaataaactaggactctgccttaaggcaacacactaggaccacgggcttccagattctcttggaaacaaagcagcccattcgcgaggagaacaggccggagacaagttcagaactgaattccaaccacatggcaggacacgctagctgtccaccaggtgttcctgctccctttctataaagtaaggatcttttcatcccaggccatacttcccagccaccccagcatctagggacagacatggactaggtctcacccatggagtgtgagccaaagtgatgtgtgtcacttctaggccaagatggccaaggaacaagcgtgtctttcccaccttctccttccccatctgttggttggactctaaggctctgaaggatatagaatcacaggatggaaggcatctgggtccatgaatcaccmtgcagacaaaactgtcctctacacaggctgtcctctcacagactagtgcatgagcaagaagcaaagttctattgtaataagcgggtgaagagtggggcttatttgttttagcagctggtgttaccatagcagacacagcacagaatgtagaggacttgcaagcaccacatggtccatcctttattttaaggataaagcttcattttgatgtaattacctctttaaatgtcctatctccaaatacagttacattctaaggtactgagagttagggcttcaacacargaattcgggagggagatacagttcagtccataacacccctgattgaatcagccatggcggagtaggagacagtcatggaggcagtaaatagacaccataactgacaaacccaggccatttgtgtttgccaaccctgacctcttcactcctgcctggagtggctcctcccacctctactgatcggcatcactcttgttcattaaatcctgcctcaagcagaatctgcatgaagtatcttctgatctgccgtgatgcaatattctgtctggacttggcctacatccttttatgtcataagtttatttgttcatttaacacatacttacggagaaatagtcaggtgcagtggttccaagtgtggacttgagggccaactccatcatttaccagctgtgtaacttcaagcaagtttcattgttaacctccctgagcctcagttttatctaagataagctatgaccaccttatggacagtggggctgaaatgagctagtagatataaaatacttagcagggtacctgacagacagtaagcactcagtgaacattggctatcattgggagccgactatgtgccaggtactgagcacacagtcacaaagtcacagcccccttctaggccagagtggcttggaagccacagctagatctgattcagcatgatatctgggatacaggggaggccccatacatacttattctcaaaatgaaaatgatgaaagaaaaaagagaatgagaaatacaaagattgagtacaacatacctcttttgctgaatgtctaaaagcaaagaatcactgtaaatgcatttcctctgaaaccaggctgtctccttcactgatagaagcagttcttggtacatcttcgtcacatggttcataamaaagaattgcaaagctcttctccttctaggcacacrgagatgctctcttccaggagtgcccatccamaacgtgcttcctggctccacttcccagacttcaaatggatattttaaattcttggatgattgtggcaagtttcctcataatcttacaattcctctcttcataccattaaggaagagtcattattgagttgtcaccaaccactctggggacactgggaaggcagccatcttaaagtgggggaaaataaaaagctaagacattggctttaaaatgcttaaattctggacattggttttaaaatgcttaaattccggaaaatttggttcatagtagtaaagatttacttctgaggggctgtcatgctccaggcttggacccttttgaaaccagcatgatagatttcatttcccttctcttgggctttctcatttttgtgctgaactcaaacatagaacttgacatgtatctccagaacatttcaacatttgatttctcttcaccatgctaagctatgcaagcctttttgaatattgcttttcctatccaacgtatattaatttctttgggggcatttgaatactctgagttcatctaggttaccgataaaaacattgacgagaacagagccctatagcactccactaccgacttttttccaggagttaatgcaatggtgctgcagttggcagagagtgaggaaagagattactgactgcaycagacccaggttaggaagagttactgtactggggccctgtatgtagcagggttcacagcctgggtgatgtcacagaaggaaattcaacagtgtatcacaaaggttgtgcttgtttcctgagtgttgtaagcttatcacaggccagcttctagttattctctagagatatggtttaattactaactttagaaacaaaaaaactcagatatctagaagacctagtgcaatttcttcattaagttgtgaaaggaaaatctgtctcagaccctcactaagctaaagggaaaagtcaagctgggaactaagtcaggcaaatctacttcccattttatttctaaataagatagcyacaaagcttcaatttaaaaaaaaagctacatacctttctcataatttacccacaaggaaattctctgtgggcctcagggtctttaccctaaaacasttctgttgaatttcaccttggctatgtaaattgatggcttatcttcacacgtgcagtacaaaggacagacagaaytcaaagttatccctttgttcaccccagacaaatgcatatctgattgcttcctctaccctattgtttatgtaaaagtgcagattcactgagccagactaagggataagtgactattcctctaccctcctctcacatgtaaactgtgtattcggggaaaggctaatcagacactcaaaagaatgcaaccatttgtctcttatctacctatgaccgagaagcccccactttggcttgtcccaccacaccagacagaaccaatgtacttcttacacatgttgattgatgtctcatctcttcctaaaatrtataaaaccaagctgtgccccgaccaccttgggcacatgtcgtcagcacctcctcaggctgtatcacgagtgtgtccttaaccctggcaaaacaaactttctaaactgattgaaacctgtctccgatatttttgggttcacaaagtaatatcaatggctttctgggacagatagagttttgacttgggactatttttctctctttgacaaggaatgaaaccaacctatattctgatcctgctccttccctgttctctaacaggtttgcttcccctctgctagtagaagaaagacaatctttttagctgggcattcagcgacctttgtaatctatccccaactaatctttccagactattctagagaaaactcaactctggataagcccacaggagagctgggactaacctctcaggcctatccacctcccctgtcttcactcattcattcacatcacaaaaatttcaaagtacttatgtaccaaggactatgctagtccctgaggataaatgctcttgggacacaccttgtttcttcttcccagggaggacaagatcctggcttcagcacagtattcaccctagggagagttttagtgttttgcaatttcacacagacagaattcagatcacaaaggaagagattactgcatcagaaagctggctgtgaccagttaccatgatwgggcctgtgaacaggcaggagcggaagatcagattctgcaaaggccatttctagagcaccaggagtgggacccatttaaactgaaggccaaccatgtataagaaagagctctgggctgacataccsagaaacttgggtgcttgccccagctctgccctgaagagctgtgtgaccttgagtgagtcctctcctattctgygctgcaggatggaaagtgaatatggcccccaaagacccctttttacctgactcagtgcagktgtcatctctgwagctttccatgacctccctcaccaacctattgcttcaggcatacctctgaacattcactgacttctgtatgcatttctgttctctccacctgatagactccttattccagcactgtggcttgtaattattagcaaatacatactkaattcagaaataaggaacatcatsatttctagatckgtaattccagcattacccacaaggtggcaatttcctacacgtggtcccagcacaaaccttacatttggatagaagccccaggaagggccaggtgcagtggctcatgcctgtaatcccaacactttgggaggccaaggtgggaggattgcttgagtccagaagttcaagrctccagtgagctatgattgcaccactgcactccagcctgtgagacacaggaaaggagaaccagaaggactttccaaaaggctcatcctgtggcccctggtgggtacgtgctgtccccttcccctccacttgtgaagtstctgtctgtcagaaagcaatacaggcctgctctactgtggccaagcctaggttgcactatttccaagcttctcagctggccaggaaagactgatggtctggctcttactgacgtctcaggtttcccctcctatgtctccacaccccacacaacaccrcagctgtgctgagcttgctcctgctcttgactgtgctgtcctctctctggtcctcatgccttcccatacactgttccctccatgtggattccccttctgtatcatccttccaggccaaaacctactggctctctgaaatttaatttaggaagtgctctgtccaggagctttccttgactctcttttccccgaatactcttcagtagtaacattcattgagctgaaattgcttccctatccaccctacctgggccaccttcttgagcacacagagcatggcttcctcagctactccccagtgtccagcacaggccaggtgtacagcgagccttctgagagcttgctggatgaagaacaaatgagtcaatgcatcagtgaatctacagattagggatgtgatgtggcaagatgaactgagacctgtacccctccccrgtatggaagaaatttgagaataagtgggggaagaagctacagcaggtccttgaataaagttgtcacattcaacgcgatttttttacaacattgatgagaaaaaaggaaaccacctccagccaggaccactgtctgtgtggagtttgcacgttatcctcatgtctgtgtgggttttctccaggagatgcctgaagatgtgcaccactgaggggaactggcgtgtctgcatggtcccagtgtgagtgactgtgggtgtgtgtgagcgtgccctgcgatggtcagggtcagttcctgccttgtgctctgagctgctcagatagggttcagctcttgcaaccctgagtaataattatcttgttcttattaatttttcttaaatgtacctatagttcacattcattttaatgtttatgattagaagtatttggggtttttatttagaagtttggtaacgtttttataaccagaaatatgccataggaacttaacctcttgtctgtatcaatgagcctacgtaaaattggttttgttatacgttgtctcacttaaagtcagtttccaagaacctatccacggtgttaaagaaggacttgctgtgtaattttttgttgatctggatcagaaagcaatcaagtgctcttagcacaataatggtacattattattttgaaaggaaaaaggccaaagacatgaaaaagggggcaggtgctttcctcctatgagactaggctgtgctgccttctaagaaagtgaattctcccattggcaagatgaattctctttcaattatttgtgaggaaactggcagcagatattttaccctcctggtcagaaaggaagttccagggccttccactttgtgtcacagagctgatgctgggattttgctggttgccaagtgcatctattctatttaggaagtggggaagtaaccacaggatgtgtgctctgtgatctgaacttgggccctgagtgctgtattccccgactttgactgtgggctatggtggttcactctcgtaaacggtcagaggtccctctggggagggcttacaggatggtttataggatacatttgtaaagagtccttctttaaggggacccagccgtcctttcaaagaagaggctctgggttaatactaggtctgaaaatggacaagaaattctggctgtccactgtggtgattgaaatcagcttctagacaccagatatggagttttccctgttacataaagcacacagcattttagtaagatgcccatctctttcagtcctagggacactgtgacaactagccaatgacaagattcctgtgagtcaagacacagtgatgtccaccattttactccattttactgcccattacagtgtatgtgccctgctctgcccttggcagttggatgctaccacttggcctctgctattctgggatcccatgattcccagtggattaaggagcccatcacagtggtgtcatctcttatcttcatatgtggccaatagaggagagccaccaccaagtcttcaaggatagtagtggtcccctcgctaatgaatttcccaatgtcatagtgaagggaatgtcctctgggcccccttggagaatgtagtggttggttgggtgggtgagtgtgcgagttgtctataacaaatctattccaacatctccctaagccttcttatcccatcccctacaacacaccaaggatgttctggcacctcaatgtctttaaatataggtcaccattgagtcccagttccactcaaacagctaagtaaactatagagccccttccccctgcacaaatcaacacattgaatccagaatctctgatcagtgtacctgtatcaataaatttgacttgatgctaagttctattctgccttccttggtctaacaccctaagaatctattcatgcacatattctccaggtttctacaatgtaatgtatcaaaatcttgccatttttttggtgtagaagctaaatcttcccagggtaaaccttgtatgtgccctactcaagtacatagagttctgatgtcagttgaaagtctagtggccacaagccctaggttttgaggagaaaaggtatctcttgcaaggcaactgccttgggtgatcttaacacrgggtccttaagcaagggaaagagagtcttctcagacatgacaggcaagctgcttccattggcaaaggaagctcagaatgactcaagggttcaggattctcagcttcatctgagtccacccagatttctccattccaagtctcaggttctcattccctaactttcacataagagactggaaagcctgtgaattcaacttataattatgcaacacacacaattacattttttgtgtcattttcagcaatactgaccctgtagctgcaagaaatgtattcttatttatcatttaaataaataatttgtatgattattgaagcatatttatagttaagctttctagttctctgattgtgacccatctttgacagttgtttcctgggaccactcctggttctattagctagatcactcaggcctacctagtcagatgacaaatagaattcatttctctttttttctttttcaggcatgcaacagctctgttccccaggctggagtgcagtggcttgatcacagctcactgcagtcttgaacttcaaggctcaagtgatccccctacctcagcctcctgggtagctggaggcatgtaccaccatgcccagcaaactttacatgtttttgctagtagaaaagaggtctcactatgttgcccaggctgttgaagtcctgacacaatcctccccacaaaccttgggaggtacagggattacaggcatgagccactgtgccaagcctacaaatggaatgtaatataaagaattattgggccaggcatggtggctcacgcctctaatcccagcactttgggaggccgaggcacgtggatcacctgaggtcaggagttcgagaccagcctgaccaacatggcgaaaccctgtctctactaaaaatacaaaaattagctgggcgtgacagcatgcacctgtagtcccagctactcgagaggctgaggcaggagaatcgcttgaactcaggaggtggaggtcgcagtgagccaagataatgccactgcactccatcctgggtgacagagtgagactccgtctcaaaaaataataattaaaaaaaaaaaaagaattattggctgggcacagtggctcatgcctgtaatctgagcactttgggaggctgaggtgggcggatcacttgagttcaggagttcaagactgggatcgacaacatggcaaaaccctgtctctacaaaaaaaatacaaaaattagccaggcatagtggcaaatgcctgtagtcccagctactcaggaggctgaggcaggaggatggtttgagcacaagaggcagaagttgcagtaaaccaatatcgtgctactgcattccagcctgggcgacagagccagaccctgtctcaaaaaaaagaagaagaagaggaattattaactaggcaacttggaggtagcaactgtgaagcagctaccaccatgagggctaggagaacaatggaaatggctggaatgactaaaacttagatgcatataagaggggtccttggagctcaaactgagacctctgcagggtgtgccactaggctgatgctagtgtcactgagcttggagaaagaaccccaggggggctggggcagttcattctgggtgggcctgaactctaaaatcttatcagcactgtgtgagccccaaatctctgctcagctctcacctcccagcagcctccctcaagtcttgccctgtacttgtgcagtacagggtcagccaaaggtctaagacttgtgggattccctctctgtggttcctcattttctgtcctagatccccaaatctctgccttactcctgaattctgatgtctacctcttctgtccagtgagaccacttggcctccacctccctgcagagtggcctggaaagtgtccccagggagaatgcttgggtagatgtggggctcacattgtgtaccccctgacgctctcaaggatcacagccctgtattagaacactgtccagtgcctgtccatagctgttttctttaatttgtccaagttatatagtggtttacagcagaacagcaaatcctctaccattctttttcgtctgctcagtatctgaattcccatctttgcagagttctacatcttgctacatccccttgcatgcaatattgaagtgaaatctgtctccctaaaaatcccatctgtcatttatggaacttccctctagaaattcaccttgccttctgctctgtaatcgcccaccagaggtctggagaaagggctttcaccttcctttagcttggagaagactatctatgattgccctgactattaaagcttgaggttcaaatccatggcctatttatggagtggcctttgctcaactgagcttctattctcttcctctgtgctggaagctccccaaggacagagaatatctgccatttatctctacgttcaagggaggaattaatggatgggacaytcatacccacttcagcagytgccgggtgggcacacatctgctctgaatgggggattggctagtctyccctgtgttgtgtttgttttcaggctggaggctgaagaggaagaaaatcacacccattcttgttgcctaattacttacccaggtgcatgggatctctccacctgccagacaacagaggcacctcaaccccccttcccgactgggagaatttgtccctactttctcctatcatcttagggggcccacaggtgtggcccacagtgttaactggtactctgggaaccagagagatgaaagagcacaaatgcctctgctgggctatgggcttgcaggcaattttaaaaggaaatagacatgactgatcaccttcaaagcttgggaatgttttctccacccagatacaggggctttgatgccacaggctcagtgttggaaaatgagtcttctgatttaattctcaaagagtcgttatgcatacatartactctccctaccatttaaaaggaatgtagatcatatgtaaatgcgcctctgtgagattgtgtatcctaacctgcattaagcacacattaatttcattatgacaccgttcacttamtcctcctttaatgtctgcataaaaagcaggcaaatcatttctgtacacatttatttctcaatcatgaccatgttttgtccagtccaggtctcarggtcgggcactgtactacaggaatggtggctcagtttgaggtaatcaaacgtcaactcccctgacccctacttctgaccccctccatgctccttgccaagactcattcttaaactccttctttgacaaggacctcactatctctggagcagcctgatctctctttggacaactatgaaccattagaaagtctgaacttaccagcaaagttgtccctgaaaagcagcatggagttcgcttatctcttttgtttgcaaatcctgctttgttcatttaacattataagtgtttccttctcatagtgagaccccatctctgaaaaaaaaaaattgtttaaattagccaggcgtggtggtgctcacctatagtcctagatactcaggaggctgagtgggggaggacggcttgaggctcaggagtttgaggctgcagtgagctatgatcatgacattgcactccaacctgggcagcagaatgaggtaccatctctttttttttttttttwaaaaaaaagggtttccttcacatcattaaaaacaatcttaaatttttgcatgtttacacattcacatatttacaaatatgccattacattagatgtgcactttttaaccgctattttactaaacaatgtattataaacatgttttcatttctattaacccatattttctttctaattgttaatgcctgcataatcctctattgttagatgtaccataatttatttaacgattgcctctcggtgggcatttgtggttaactttttttatttttattttatttatttatttattttttgctatagtaaccaactccaggatgaaatcttcacacatagtgatcatttttttaggagagattcctggaagagcacagaggggtcaagcggtgagagcactttaaaaggccactcctggtaaagacagcagcctccaggttgaaagtcactgttgataggttctgagagctgcgctgagtgcattaccaacattgttatatttattccttaccaccaccccttcatggtgcctaaccgcccctgctctgtgtggctgattgtaaggtaaggcctggcgtggaccaggcagatggccctcctctgaccaccacataaagtggcctcagaagaggctcctttctggggataagaagactgcaaactgggaaggaactgggcttgaaaagcaaaatgaaccccacccaagaacggtgtagctggtcttcccaggctgcaagaggctttctccatctccaggagttcagcaaagaaaaaacaatagagcacaagacacatgaggggtggccagtaaaggcaggaaaagtctcctataaaacctgctcagcgagtccctccctccatccagtgcatttacccagcaacacatcaaatcccagcagccaagactctcttaggtttctcgtctgggtgccctgccagaactcaggcaggatggtgtgcacagagcctggcccagagaaggcgcaacggcggcatgaataactgactacaagaaactgcatctttccaacatgcattccccagtaagccacaggtacactgacccttgtgcaccaagacttcatcaaagcattattcgtattaaccaaaggatggaaaataagtggttaaataactgcaactaaaccctgtggaaaggccactctgtatgaactccaaaatatatcaccatatctcatcacaacaaagtcactgtggacggagatgtaccatgactttatgcagcattaagaaacacactcacagagccaatgaactatgctcccattgattgtataagaaacccagtttcacagatgacaagaggtggggaaactgtgaaacactgtaagtgcaaaaaccaagtgcagactaatgtgtatggcacgctactctgtgtgtgtgagagagaaacagagtgtgtgtgttttaaaggaaggggcttttttaggcacatgtacttttataggcatagagaaaatttctgaaaagatatacaaaaacccgatagcaagagtggcctctggaagccgagttggaggatggggatacaaggtggtagggtaaccctcttttcatccttagatgtatatgtaaaatctacattttaaaccatatattctctttataaaataaaactttgaaaactactgaatgcaaaataaaattaaataaaatagcgcatccttctgggaggatttacgggcatactatctggagccagccttggatccggagaccgtacggttatccaatcctgactctgccatagcgacctcgggcaagttgtcgccccgactgggtctcggttccctcaagagtccaatcggaggtcggagagctgctctcggggcgaccctccagctcggagacccgggccgcgggcaccgcgcgggtcccgggctggagcagcggtctgcgggcgccccgcggtgcaggcccggccaatcagcggccgcggggcgggagcggtgactgctcggcgggcgcggagcggagcgcgaagcagaggcgccgccgctgtcccggagcaagccatgccgcgcttgtctctgctcttgccgctgctgcttctgctgctgctgccgctgctgccgccgctgtccccgagccttgggatccgcgacgtgggcggccggcgccccaagtgtggtccgtgccggccagagggctgcccggcgcctgcgccctgcccggcgcccgggatctcggcgctcgacgagtgcggctgctgcgcccgctgcctgggagccgagggcgcgagctgcgggggccgcgccggcgggcgctgtggccccggcctggtatgcgcgagccaggccgctggggcagcgcccgagggcaccgggctctgcgtgtgcgcgcagcgcggcaccgtctgcggctccgacggtcgctcgtaccccagcgtctgcgcgctgcgcctgcgcgctcggcacacgccccgcgcgcaccccggtcacctgcacaaggcgcgcgacggcccttgcgagttcggtgagtcagggtcggggattgggtgggtagagaaggagggattccaaccctctggggtgtggagcgaaggatccccctgcccagtggtggacggcgctgcctggcactcagtttccccttagggagcagtatttcwtatctctcctcgtgctcagagagactggggcgagaatccttggagacgccactcactgtgctagtcgaatttttggtgagcctgctaccccttttggtacttaagtacctgctgatgcagtcacttatttgtaggcatggtatgtttgcccagcaggagactgggagttaaggagggggatccgagttcccaggtatccagcgctaggtggattgtttgaatggggaggaagggaagttgaggttgggggaggaagggaagtagaggataggggaggaagggaagttgaggatgcaggaggaggatgagttccagactggggaatcagtagtcaccaggccacagcaccagagcaccagggcccccggtgtgggaaggggctgagctgggatgctgagggagctccatccaggaaaagtaagacctttggagacgtaaggtctgaaaagattgtggtgctattaggggcagactcaggtttcgtgcttctaaaacatatataatttggagagtcctgccttaagtaaaggaatagaactgctagggacttagaaacttattatgaaatgctagggacttagaaacttaagcttcattaacatcacagtaaaataatctctgagtgctatagttgcccaccctctttatgtaccttttgaaaaccaaacaaaaagaaaccaaaacgttagcactgctttaccggcttcctaagcatgagtgtattccacccactaggttttgaagtgccgctgtgtactttgcctggagtgggcagtgctgagtttagggtgagtgagaaggtggccagtgagtcccaaggagcctgggtttcggcctggagttcaggcttctgggaaataattctggcctgagcccagagaccaagtccagactttagtgcctaagtcagtgtaatgacttagcttcaagaaagaagcctggggtggggtgagacctttccaagccttaagaagtatctagtagtctttcctctcaagtagttcaggtagatgtacccaagtccaggagacgcaatgggttgttggagatggggcaggaagcctccagtcctgggaaatgtaaaaccagtgtgtggccagttgagcacaggaaagtcaccattggctgttcctagctgaagctccccatggaggacagagctggctgggggtgcatctgtgctgccgctggctccctgagtggccctggacgggtcccttcccctctctggccatatcagccccagtggagtcattgttgaggtccctttcactcggaacagttggtttccgccctgtggcacttaaacagtcctgtctctttccttttgctagttcctatcactcgtttttataactgctttcctcagccgttaattcacaggcaattctctttgtctccagacaggtaacacttttaactccacatgcaggagacagaagaaatgctgaccaggtcctcagactataaatgctgctgatgatctcagataatttctccccagagtggcattctcttcctaagagaaaggcaccttaaagacattcagaccaaatctgctgttatacagagaaagagactgagacacagcaaggtcagagcccttgtccagggtgaccagtaaaggatgaccagctccctggtcccaacaccctgtccagtgctcttttggcacaggacttaatagtattaagtcaggcagatggtggttaccatggttaccagagtgaggccagatggcagatggaaactccatacccctaattcactgaaaattaccraatgacaagtaaatgtgacagccccttcactctgatctatgggatctgaggcccaccccaggcacagacycagggaataaagatattcgtggggccacatggaagcaactcagaactggttttcatgatctcattactgacaggcgtcaggcctccccggggttcagcccttcttccgcaccagcctttgtgtcatccaccacagaaccgggcactgtttgcctgtcactctctgtcctgaagtgctagtgtggcctctgcccttgtgtccagataaagcatgaaggtttggacaggggatgtttcctagcccaggcagcagctcattctgtgctgccctaaagccatcttttattcacaagacacagcgggagcgttttttaacaatgcctctggggatcccggttgaaggaaaacagactgtgagtcagagcagggctgttctgcttcaatattcatgataaaatcacccctcctgactccttgggtacccaagcacctagatttcatggaatgaggcctcgggaagtatttattatgttgttcacagtgtgtgaagggcccttatacatgcctctgaggagcctggggaagcagttttcaggcttaaattctgccctttcctcctatgccctgaaatgccccaaactgccacataatgagagtgatcctttgatccgcacacatgtatggaagactcacatatgaataattcttactgttggaaattgcttttgcatcctttttttttttttttttttttgagacagggtctcactgtatctcccaggtggaatacaatggcttgatcacagcccactgtgatcctgggctcaaggaatcctcctgcctcagcctcccaagtagctgggactataggcacataccatcatgcccagctgatttttagaattttttgtagagacaggatcttactgtgtttcccaggctgttcttgaactcctggcctcaagcactcctcccacctcagcctcccaaagtgctgaaattacagacatgagataccatccctgggctgcacccatctttttacatgatttttacaagtgtcctggggaggtctccttcccatttgatagaagggaaagctgaggcacatggaaggaaattccctggagccacctggctggtcccagctgtgaaagggctccagtgtaggtttgcctggctgttttgttttgttttgttttgagacagagtctcactctgtcacccaggctggagtgcagtggtgtgatcttggctcactgcaagctccacctcctgggttcacgccattctcctgcctcagcctccagagtagctgggactacaggcgcccrccaccacgcctggctaattttgttttttgtacttttagtagagacggggtttcactgtgttagtcaggatggtcttgatctcctacctcatgatctgcccgcctcggcctcccaaagtgctgggattacaggcgtgcrccaccatgcctggcctgcctcgctattttcagatgggcgctgcacagctagccgctagcaacctgatcagtaaggtgctgtgcacccgccagccttgaatcttgggggtttctcaatctgggtccaccttcctgtttttcccaaggtttgtcacttgtccctctatttagcactgggctatagctcctgagagaagccttgaaggatggggagagaatcccaatgctagcaagggggaggcacagcatgaactgaggctcagaggtgggagccctttggtgggtgtgcaagtgggcccatagggccgaggcctggtaggatggttgggaaaggagatgacaccccagagtagtttggggtaggccactgcaagccttgggtgcaaggccgaagggggaagcttcattctgcactttgggaggctgaggtggaaggattgcttgaggccaggagttcaaggatagcctgggcaacgcagcaagatcccatctctacaaaaaattctaaaaactagctggacatgatggcatgtgcctgtagtcccagctacttgggaggctgaggcaggaggatttcttgagcccaggagttcgaggctacagtgagctatgatcatgccactgtactccgcctaggagacagagtgagaccctgtctaaaaagaagaagaagaagaagaaggaggaggaggaggaggaggaggagggggaggaggagaaggaagaagaaggatgcaaaagcaatttccaacagtaagaattattcatacgtgggtcttcgatacattctgaattattggttcagcttctcactggtaaggtggtatggccttagtattatgatgattattattgctctcattactttaaaggctggatagttcagtgtgtgcaccctatttgttagcattgggagagggttggggtcctacggacagcaagttaatgtcatgtttcaaatgataaattagataggaacagggtcccggccagcacccgccagggcattgagccctggcagcttcggtgagctcctgagaccctgaatcttagaaaattcaccttggttgaaattccagctccacttagaaacctaggtctgtgctagtgtgtgttaccaggtaaccaggagaggcagcgcatgccacttcgtgagagggacaaagaagggggtttgtgctcaaaaccctttcatgctgagggaggagatctgaggcagaggctgcagggagcaggattaagctgtttcttgttccacatcataacgtgactattagcataaattatcagggctgttcagtgtgttgattattaaaatctttggttatgtgctttttaatacaagcagatgggrtcctggggaatgacttgatatcctttctttccctagcaccattaactttaaagaaatctcagagggatttgggaagattttttcattccagccatcaatgatcgatataattgacgaggtagggggacaaatcaccacacactataataataatattgatccctttcatttgtacagatccacacagttaataacacagtcacatccattttctcccttcaccccaaggatgcgaggctgcggtcatcatcttcatttgcagataaaaaggaaatgattagcaacttgcccaagctcaagtggttggcagcgagacccctgggcatttgagtctccctctggtactgtttttgctcaccccacagtactgcctcctgtgaccatgtgcatctgggtgactgtcttacctgctggttagcccttggatggttggatttgtgcaattctagggctattgctggcacaagcagaaggaaacaagtatcagcaaggaagagctatagggggatgaagcttccacattcacagactgggctagctagaagccatcctccctcctgcaagccacatcattcttgtgaaaggcaggcagaaaggaaagccctggttcctctggcagtgtggcggctctggcaacagtaagagtatgtgcttggctctccagagtgagggctgtagtcatggtccctggtgcctctcacccaaggccagaggaggctctcatgcatgcagggagctttagaggagatgcctaaggacagcacaccctgcctgagtcctcaagtccctctgcagaggtcttttacagtttgtaaggggtcttgcaattgttcctcacaacagcctttgaggagtgggctgggaagggaatagattcctgtgcccattttaaagaagaagacactgaggccaagactgggacgtggcagagaaaggatttgaacctggactcttccacccctgcctgccacgctgtccttcctgcctgtggtggcagccatgacgttgagcactccagtgccatgctggaatgagcccttggggatagtagggactagaaatgtcctgctggtgtcaaggacacattgctcatgttatgggttatcttcataagagctgttccctgggggtgatgtttggggtgtttcattgttgtatagaaaacagctaacacggcaggcctgcgaccatatcctcagaaaggcctgctggcaaggttggccytgggctggtatctggggacttagatttcaggggggttccactcttctcagaattgatgagagtggctcactgtgcctgaactgtacaaacaatgtggtttatgctgaacccctgctttccttctcggagtgtggaatttgggtattcagttaggcagagagtgcctctgtggccagctcccagtaaaaaccctgggcgccaagtccctcttgagcttctctggtagacagcatttcacatgcttgtgactccatggggagggctcttggcatcttgggcctgcttccccaaccctgactttttcccttggctgattttgccagatgggaaaatcctttcactgtactaaatcacagcctgagtaccactaaatgctgagtcctgtgagtcctcctagtcctcctaggaaatcattgaaccagagagttgtcttggggatcccccaacacaatccctaagcaactcatctcttattctggatcggagaccacacagataacaaatgttccactttagaaaccagtgtgggagtgaatggaatcatggtgcctgggtttgagtccctgttcctctgggcactttacctttctgagtcttggttttctcatctgtgaaatggggatggaagcagctacctcacagggctgccatgaggatgaaagggtggtgtacrtggaagggtcctctagggaaaaggcaggatggtgttagcacagtggttcagaagagcttgggatctggagccacatcactgggctcacagcctcctcactacaccctttaatgctcggtaacccagggcagcgccaccatctggcagctggtgagattgctggagagataaacaagttaatacctgtaggcagaggagtgcttagcacacagcgagcgctgtgctagctgatagcataataacagtgttattattattgattataaagagctactgtggataaaaatattttaaatttaaaatcagatatgttaaaatatgttaaaattaaaaacagggctgggaatacagtgactcatgcctgtattcccagagctttggaaggccaagatgggaggattgttagaggccaggagtttaagaccagcctgagcaacatagcaagacccatctctacaaaaaaaaaaattttttttaattatctgggcgtggtagtgcatgcctgtagtcccagctactcaagaggctgaggcaggaggattgcttgagccctggagttcaagactacagtgagctatgattgtgccacttcattccagtctgaggataacatgagactctgcctcaaaaaaaaaaaaaaattagaaccggattattatggcatgagcaacatgacattttttgaggtcacagaacaactgttctgtatcttggctatagtggtaattacatgactgtatccatttgtcaaaacctagaactgcacaccagaaggaacgaattgtgctttgtgtaaatttaaaaataaataaataaataaatacaaatttaaatgtccctttaatgtgctttgacgtccctttaaaaagcagggcttcttttgtaaaggaatttgtattttttgccacaaaatcagttacaaagtcagtatttccaagacagtctttcttaattgtagttgttagagagacagactgaaacatgaggagagagagatgaattgtgatttattggtttactcatttaggcctgaaagggattgatgaaatcacatttaaaatgtatgactttacatgaacaaaagtaaaccaggctgattgagagtccccttggtatccaggtctttctgactgtcaccacagcgagccactggagcactggtttgggctyccctggaggcggcatcccagcgcttgtgtggttggggaggcgctggcgggacaatgtgaataaattagactgtctttgtcatcacagatggggctcctgccggagagctcagtgttgtggctctctgtggctgtcaggcaacgttagacatctaggatcttggttcccggggctttggctacattcaggcacatgggttgggcaccacccttcagagggccctcagatgggtacagctgaatgagtgggtggatcagatagagggggaggaaagcagcctgggatggggagggcagtctgtattcaactcactggtgggctgctgggacacccaggggctatggggctccagagggcagccccaggatcaacaggtgggagttacaggctttagctctaggtgaggatgcaccttcttaccagtggagccctccaaagacagaatggcctggctccgtaggtggtgagttctccatccctgaaggcatgcaaatggaggctgtgcgagcatgtcatacgtggtcaggcacagaatcacagagaatcaggatgctaaagagcctctctagtttgagactgtggctctaaggcgattttccagagattttttggcactggcttgacagggtctgcttcccagtctgtctggaggggccaaactagtctcctttctgcaccctgatcctcctgagcattggggtgtgatgcgacgctgtccgtcacctccttcctcctgccttctgtctcctccctttgctctccttttgtattgcagccttatccaggtgcagtcttgtggagaacaacagggctgtccttgagtcaccaggcaaagccctaggagttctagactctgcagtttgatggcctggaaatgaacatgtttgttccttgatttctcatgtgtttgttcatccagtcatccttttgctcctggccctcacttgcatatcacattaacttacacttttcactcattccatggttagatcagcctgaccgccctaggaagcaggggtgtgatccccaccttatagatgacagctgggtgggagcattccctggccaggcctctacactgcacgttgcccaacacgctgtggtgctggatgccagggtggctgagttgctgtccartgcaggtgagagcaggtagaaacgcctggccttgattattccagcccagtgtgagcagagcagatgccaggcatggggaggaaggcagagtgtggagtaggagtttgaaacatctaacactgggtcctgtccagggagcccataccctccctctcctctccgtcatgttctggcagtctagaaccacatttccctgattccctgatttgcccaggcttgggtcggcttcyggggatggggaggcagagggagtgggggagccctggggagtctttaccctgtgcatgcaaatgggcatcttgaatggaccgcaggggattgagctccagggtgtgtgcagctgttcttcctggcattcttcttcctaacaccctccacgtggaaggagaaaagcccatctgttagaagactctgccgttggtggcgtgacaccagcccctctaggagtcggctgccgtttttcctggttgagctatagcagatggcagccggagcctggaacggaccctgggagggwgcactgaggcccaagctctgccacagatggtgctgggggaatttgggaagttgcccttcccctctggacccctgctttcccattggtaaaacaatcattggatcaggagatcggtcggcagctttccaggtctgaggaaatctctcttttaggattcctgcccaagcgtgatgtgccgctcccctcatgtcaggacatcacagcgggctctccrcggcaggggaatttagaggtgggttgcttggaaccctgcagggtaaaggctgcgtctccttgtctcctcctcctagctcctgtggtcgtcgttcctccccgaagtgttcacaacgtcaccggggcgcaggtgggcctgtcctgtgaagtgagggctgtgcctaccccagtcatcacgtggagaaaggtatttctgtccaagaactcatgcatctcgtgtgtgtgtgtgtgtgtgtgtgtgtgtgtgtgtgagaaagagggagaaacagacgtgagtggtaaaaatgtttttcttttaagtgtgtttatatatatatgcctttataggtgggccaraggatgaagaaaagatatcatctgtaccactcctctgcctcgaaacttctaccccaaacctctccccttggaagggaacattgcaacccttcctgtgccacttacacccttggccacttagggacccagaaagctgtgcttttacccagtctgcttcagctgcggtggccatgtgtgtgtgtatcctgcttcacttcggggctgtgtttcagacagacctggctggtggcagaagactcagtcctattccaaaaccaaatcttctaaagaccagtttttgagagaccggcaaggatcacagtgaatgttgtccccttaatgtcaatagccctgagacaggcgttgaaattctgaatctttctgtgggatggtggtgatgttcgggtctttgctgtctggcagagcgtgctgtctatatgtacaagtaggtttaaaaaatgactgatgtcatttgcataggcatgagcagtgctagggtttccgtttttgagtcagtgggaggaggaggaaggaggagggcaaggaagcctatgggatggtctttatccagaattgctttttctaagccccctcctggcattcctgtcccctgtaggtcacgaagtcccctgagggcacccragcactggaggagctgcctggggaccatgtcaatatagctgtccaagtgcgagggggcckttctgaccatgaggccacggcctggattttggtgagtgtttaggattattggatattattgactgaccattataaaccatcctttatatttctacaacacattacmtgtttcaaagctgttcttacccatttctcactggcccctccagtaactgtgaggcaggcagggcaggtttcagatctgctgggaacatacgtgttctgctgccaggggcagagtgatggccccacagtgatgtccaccacgtcctcacccccagaaccgtacgatgttacatggcaaggtggtgggagggaggttgtggttgctaaacagctgagataaggagatttaagataaggagattagcctggattatccggktgggccaatttaaaggtgggtctttaagtgtggaagagggaaacagaagagtcagaggcagactgaagtgattcgatgtgaggaggacttgacccaccatttctggctttgatgatgttggaaagggccacagccaaggagtgccagcatccactaggaactgragaaggcaagaaaatgagtctcctgagagccttcagaaagaatgcagccctgccggcaccttgatcttagccccctttgggcctctgacctccaaaactgtagaaaagaaatgtgtttgttttaaggcactcagcttgtggcgatttgttacagcagcccaaggaactagtacacctgcctaaggtcacccgctggtaaaggtagaaggtggcacattcgagtcctcctccagagctctttcctgccactcgcagcacttttaccaagatgaagaatgccacatgtttgaaagagtgatggaatgaggagataggggtccatgttgggtcgtcactgtacccttctgagcctccatttccactgttgttgaaagagggcttcaaactgaaagacctctgagggcctttgtggccctggcagtctgtgatttacctgtgagtctcctgtaaaaagaagaccataatgctcacccttcccccacgactggcatgagtttaaaacgagctgatgtgcgtacaccagcgcgtggtcggtaggatgatttgtaattgatggaagcggttggttgtaacgagaaagcaaaaaagacgcgagctggttatggacctggctgtgaacatccttggggtgctccctaaggacaacctcctcattccacccacagctctgggaggcttggtgactcttctccacccagctgagagattgggaatgcaattggctgtgcggttttttcaaatcaagcacattcctctattttcttaggagaaaagacagggaaaagaggttatctctggtggtattttgtagaggctgcccctatagggaatactttctggatcattctttggtcagtagatttttgttcttcttttaacttgaggtgttttccaaataacctataccttgcacctttaatacaaaagaccaggtagctcacagtaaaaggcaggtgtgcggaggaatcattcagatgagagccacaatagggagcgtgcctttcaagagggtycctgggaaggaaatttacctgcgtgctccttggcagccaatgcaaggagagaaatagagcaagttttaccttattctgaaaaggaggaagtgtgcagacttatcattaagaactaactaaggaagtcattttgctgttccttatataactgtataaacttgcctgttgtatttctagatcaaccccctgcgaaaggaggatgagggtgtgtaccagtgccatgcagccaacatggtgggagaggctgagtcccacagcacagtgacgyttctagatctgagtaaatacaggagcttccacttcccagctcccgatgaccgcatgtgatggagaaatgtacatgttctaagtcattttcagtattttacacccatgttatgagatatttgaggtggcttataagacctgtaaaaaaaagaagaaaaatacgtaaatggaggaaaccagggaaagagcaaaagaagagtagggacatacttagatgagcagtagaatccctggtatattctgcacacatctccctctgagcttcttagcatgcaaagacaagagctgtgaacatgatgtgtgtccatgagatgaaaagaccagttgtgttttggggctggagggaatatttcctctgtattcttctagaaagagcactgagagaggtagcagacagtgtcattgtgacagcgtccatgtgaaaatgttcccacaaagaagatgcctgagcttcctttgtgtgttcctggagctcttccttgttcaggacacctgagcttccttcctggggctcaggccttgccttcctgtcctcagcactgtgtgctgctttgcaacacatctccttgtgggtaggggcagagagaatctctgcatcccctctggtcaaggcctcctagtctgtagtcacacaggtgacagctggggttgcatctgttccttgcctacaggtgaactgggaattcgggaaagggatcactttataagccagcttttgctcataaaaatcccaaaatcttgctggttcacagccacagacgttgatcacttgctcatgttccatgttatagctgtgagctggctgtggccctgccccatgtgtcccctcattcaggacccagctggaggaacagctccagtgtggaacatgtccgttctgtggccaggctgcacacaccattgcatttaaagtttctgctcggatgtgatgtgtgccccgcccatttacagaccaatcwtttttttttttttttgagacagagtctcactctgtcacccaggctggagtgcagtggtgygatctcggctcactgcaagctctgcctcctgggttcacgccactctcctgcctcagcctcccgagtagctgggactacaggcacccgccaccacacctggctaatttttttgtatttttagtagagacggggtttcaccgtgttagccaggatggtcttgatctcccgacttcatgatccgcccgccttggcatcccaaagtactgggattacaggcgtgagccaccgtgcctggcctgcacgatcctcttacaggaatgggggagcagtggtgaacaggcaccattaccaaggctgatcaacaggtgcttaatagaacaggaaaaattagaaacaagtctgatagggtttctcmaaagcagggggattttgccatggttttagttatattattctttcagccactactgttgcacaccttctgtgtgcaaggccttacttctggtctgtaggggatcacagaaaaacaaaaagtggacataattataatacaaggagtgcgatgtaagggaatgggaggagatattaaggcatgaaaagcagcttagaactggggaaaatgaaggaagaatcatcgaggaggtggcatgaggattgaaggatgggtgtacgtgagtagttagaggccctagaaatggggagaaaaatatgaaaatgtaaaactgtgaaataggaattcaacaaagagttaggagattgggtcttaaaattgtcttcctgatgatatgtgacttgttttatatagatatgtttccagttttaaatatatatrtctataattttcaaatacacgtatattttgaggcagaaatgattctgggttgtgaatacatcaaaaggataccatgaaaaattgtggaattttaagagcatcactgctgcctaggtcttgagttccttctgtgacacacagtattgccagctctggcttacatacctccagggatacagagctcactascactgagagccatctgtggattttccaatggttgaaaagatcttattaagctggagtctgctgctttgaaacgtccaccttttggtcttaaaagtacttcttgggactccacagggcccttcactctccactggcaccatttcctgctggggagagattcgaagtgaaggatcatttcccccaccttccatgtaacacatagttgattgtaacggagcaggcttacgttctctaattctttytctccttttcttcctagggtcttagaaacattgatcatgggatgatggaaaagtcaaataacggatctttgtgcttcatgaagagttggaaaacctgtgtgtgtagatgaccccttttgtgtgtttttaaaaattagatgcaaactagatttgtatgcagatgtagtttttagcagggcaaacagtgagaaacgkatttgcatgtggcttttttatacttttgaaatgaattgttccatgagaagtctttttgtaattactctcttccagggagatcacagaayggcatgtttgcaatttcgaaagggctcgtgtcagctgtgactctttacctcatttgtctatgacctattagtggtgctctgtgacttagtgtgtgttgtagaaggagggatgagggtcccagctgtcctctgcctgactgtaacttgctgtgtgacctgaacagrtcccttcccctctctgggccctggtcccttcatctgtgagtatggcattttaactggatgttatcaatgtcccttttagccctgccatcctagagtaagatggccttttgggaaaataacaggaagtgtggtcttagtgttctttctaaaatggtattccctcagaaacaaattccattgctttaccccarcgtgtggacagctggctgtagctcttctattcctaactttttccctttgaaggagatttagttttakgtgggatgctttaccagactcaggagcgccttggctgggtctttggagaccagagcatccatttgttagcctagcattctcttttttaaaattttattttgagacagggtctcgctctatcacccaggctggagtgcagtggcgtgatcatggctcactgcaacctccactttctgggctcragtgatccttccacctcagcctcctgagtagctgggaccacaggcatgccccaccacacccagctattttttttttttttttttttttttttgtagagacagggtctccctatgttgccgcccaggctggtctcaaattcctatgctcaagtgatcctcctgccttggcctcccaaagtgctgggattataggcatcagccactgtgcttggcctagcctagcattctctaaacaggtggttagaagcggtggataccaggcttctgacgatcaaattgtaaaaaaaggggtcaggtgttatctccagactgtggaattagattgtagtagaatatattttacctacaaacattttgacctcacccaagagtaaggctctcttttttttcttttttaatgaaaaaagaaaggagaatatttgctatcttatcttaaaaaaatagatccttaggtgattacaattttaaaataagaattgagakcccttactatgcacagtcctttaagttcataaagcttgatcccaactctgggagatggggcaggacaggtgttaatgtccctgcctttagcagatgaagaaaccaggctctgagaggagaagctacttgcccaaggcctgaaggcctctgaaagaggagcagagctcagggcacctggccctccttggtcccctctctactccacggtgctgctactcagggtcatctcaaaactatgtaaaggcagatgttgccaatccacaggcttcagggactcttatcaagactcatcccaacttttaaggcacactttcacaccgctcacattgtgcattacattttggagtccttgttggaagtgaactttccgcctgtaagcctgccattccatgtctaaaatattgggatggcatcaccttctgtactatgcagcagaaggagactggcctgggattctggaaacatgagatccatttgcatattaatccccggctcgctgtgtgaccctgagcaagtctccttcactttctgtgcctcagtgtccttatttgagtaaaaagggaataaaactagatgagtggttttcaaactttaaaacactggaagctctctttgaaaacaaaagatgagaattgaaatggatggcactggaagctgttcttgtctactggggtttggagctgccagggg

SEQ ID NO: 7072 - DNA, 201 bp, Homo sapiens
acttaggtcactgtctctatcattgagatgtggttggaatgccttccacagtctgcaccctgagcctcgtgatcttctcaatcaaacagagcaggcagttytgtttcaggatctggcagtccatcattcttctttcttttacattttaattgagatataattcacccaccagacaattcattaatttaaattattcactta

SEQ ID NO: 7073 - DNA, 201 bp, Homo sapiens
ggtgcacatgcctataattccagcactttgggaggctgaggcagcaggattgcttgaactcaagagttcaagaccagcctgggcaacatagtgaaaccccrtctctgcaaaaaaatacaaaaattagctgggcatggtggtgcatgcctgcagtcccagacacttgggaggctgagggggtaggatcacttgagcctggga

SEQ ID NO: 7074 - DNA, 201 bp, Homo sapiens
tatcattcccaaatgctttgttaaaattaagcatttgacgtttttaccctctgtgattaggcatcaagggagtttatgttaaaatgtgaatagaagcgggytaactttcactttttcagtctctcaagaaggaaagactttatgcttcaatatagtttgaaccagaaattggtctctatttttatttttttctgttctact

SEQ ID NO: 7075 - DNA, 201 bp, Homo sapiens
tacaaagggtgggaggcagattgtttccaaaaccaaaatgataaatcataatatgtagattaaaaggcagttttgggggtatgaagggcagatcacctgastggtggtgttagcaaaaggaatgtttctaatgacaaattaccgattaccaaattctatttgtgttttccttatagttatgacacaatagcttcctgggca

SEQ ID NO: 7076 - DNA, 201 bp, Homo sapiens
tgttcataaatacctgtctgagcagctaagaaaaaggaaatgaatctattttgctcttacctagaggccaaggtgggcggatcacttgaggtcaggagctsaagaacaacctggccaatatggtgaaaccccatctttactaaaaatacaaaaattaggtggcgggcacctatactcccagctacttggaaggctgaggca

SEQ ID NO: 7077 - DNA, 201 bp, Homo sapiens
aaattagtaggcttagttttggatgaaggacattaaaattgagaaaccatggaaaagaatcacgttattttttaccgtgataaaatatgtaacataaaatktatcatcttgaacatcttcaagtgcacagttcaatgtaagtttatttacattgttgcaaaacagatcttgaaactctgtacctgttaatttcccttttcc

SEQ ID NO: 7078 - DNA, 201 bp, Homo sapiens
caagactctatctcaaaaaaaaaaaaaaaaaaaaggacagtttcagaaggtaacatagtagcataagagtaatctttctataggcatattttagtagactrgtctctcattcctggtggaggagcttctctcattgatggctgatattttacagaagattttcagctcccaaaagtgttcctactttaaataacacctgga

SEQ ID NO: 7079 - DNA, 201 bp, Homo sapiens
ttctaagcattgtcattggtaataattacagggaattagagtaaaatataagatataaattattttaaaaacataatatatgtttatcatcccagtggacmccccagacgatgggtgttttcttaactccttgtctctaaatgatggattctgtcaatctctacagccttataacaaacaacttgacctggtattggagtc

SEQ ID NO: 7080 - DNA, 201 bp, Homo sapiens
agccctgtttgggacattcttgaggaagaaagaacttctttattcacccaataaattagtttatttgggatattctggtgtagttaggaaagaaggaaacaaattatttccagtccttatcttttggagattcattctgaaatatttacggataaaaatgttatgatgtctgccatttgcttcaaaacaaggtttagaggg

SEQ ID NO: 7081 - DNA, 201 bp, Homo sapiens
gccctgtttgggacattcttgaggaagaaagaacttctttattcacccaataaattagtttatttgggatattctggtgtagttaggaaagaaggaaacaaattatttccagtccttatcttttggagattcattctgaaatatttacggataaaaatgttatgatgtctgccatttgcttcaaaacaaggtttagagggt

SEQ ID NO: 7082 - DNA, 201 bp, Homo sapiens
ttcatgggttaattacagaatgtctttatactccaccttatgtctaataagtaaatcttttaattaaaaatacaccaaggttccatttgttacctatcatrtagacaaagaggcacaaatttgattacactctgttggtaaagttgtaagaacaaaagaaaagtgctgtagggaatgtaactttttgtaaatatagtagtc

SEQ ID NO: 7083 - DNA, 201 bp, Homo sapiens; identical to SEQ ID NO: 871

SEQ ID NO: 7084 - DNA, 201 bp, Homo sapiens
gagcctgggaggcggaggttgcagtgagctgagactgcgccactgccctccagcctgggtggcagagtgagaccctgtctcaaaaaaaaaaccaaaaaacaaaaacaaacaaaacaaaacaaaacaaaaaacctaaaataaaattttcataaggaaaaaattgtatagctgtgaagaaattgcttaccattttgttcttat

SEQ ID NO: 7085 - DNA, 201 bp, Homo sapiens; identical to SEQ ID NO: 872

SEQ ID NO: 7086 - DNA, 201 bp, Homo sapiens
gggaggcggaggttgcagtgagctgagactgcgccactgccctccagcctgggtggcagagtgagaccctgtctcaaaaaaaaaaccaaaaaacaaaaacaaacaaaacaaaacaaaacaaaaaacctaaaataaaattttcataaggaaaaaattgtatagctgtgaagaaattgcttaccattttgttcttatttccat

SEQ ID NO: 7087 - DNA, 201 bp, Homo sapiens
tgttccagatagactgcaaacaaatgtcaatgactgcagttatcacacaaacacgtccacgcacatcccgccatgaccactgccaccccatgctgtttgakttctgagtcagacatctgattctgagtcagaaaacaaaacatatttatatctatttagcttttctgaaactctctggctagtttaataaattcacaaagt

SEQ ID NO: 7088 - DNA, 201 bp, Homo sapiens
ttaataatcattaaagagtaactacaggtctaatttcatgattcttcaagggtcttgcttatgtcttgcttatgtcttgctatgttgtatgcatggaggggtgtgtgtgtgtgtgtgtgtgtgtgtgtgtattattgtttttttcttctcaatatacaagcattgttctagttaagcatttggttgcaagaaacagagacc

SEQ ID NO: 7089 - DNA, 201 bp, Homo sapiens
gagttcaagaccagcctgggcaacatagtgaaaccccgtctctgcaaaaaaatacaaaaattagctgggcatggtggtgcatgcctgcagtcccagacacytgggaggctgagggggtaggatcacttgagcctgggaggcggaggttgcagtgagctgagactgcgccactgccctccagcctgggtggcagagtgagac

SEQ ID NO: 7090 - DNA, 201 bp, Homo sapiens
aaagaaaaaatgcttgagatggcaggccagaaaacatgtcacggaggaagtaccatgttaatggcattgaaagttttacagttgcatggtaaagctctataaacataaggagagctggaaatgattagagaaaagagttaaattccttccttaaagagaaaattcattaggcccagagtggtggctcatgcctgtaatccc

SEQ ID NO: 7091 - DNA, 201 bp, Homo sapiens
taataatcattaaagagtaactacaggtctaatttcatgattcttcaagggtcttgcttatgtcttgcttatgtcttgctatgttgtatgcatggaggggtgtgtgtgtgtgtgtgtgtgtgtgtgtgtattattgtttttttcttctcaatatacaagcattgttctagttaagcatttggttgcaagaaacagagaccc

SEQ ID NO: 7092 - DNA, 201 bp, Homo sapiens
tgtgtgtgtgtgtgtgtgtgtgtgtgtattattgtttttttcttctcaatatacaagcattgttctagttaagcatttggttgcaagaaacagagacccaygcaagctaactcaagttaagaggaggccatggcacagacttggggcaaaaaagtagatgaaaatttttcagcatttcattctaaagatagtgaaatgatt

SEQ ID NO: 7093 - DNA, 201 bp, Homo sapiens
atctatccagtcctacctcttcatcaaacttcagcatgtttcttgtctgcagaaattccatgctactcaagtcatggtgtcatggtgccactctccttcctttttttttttttttttttttttttttttgttgagacagagccttgcactgctgcctagcttggagtgcagtggcatgatctcggttcactgcaacctctg

SEQ ID NO: 7094 - DNA, 201 bp, Homo sapiens
tcatggtgtcatggtgccactctccttcctttttttttttttttttttttttttttttgttgagacagagccttgcactgctgcctagcttggagtgcagkggcatgatctcggttcactgcaacctctgcctccccagttcaagtgattctcctgcctcagccttcagagtagcttggattataggcctgcaccaccacc

SEQ ID NO: 7095 - DNA, 201 bp, Homo sapiens
tttttttttttttttttttttttttgttgagacagagccttgcactgctgcctagcttggagtgcagtggcatgatctcggttcactgcaacctctgcctscccagttcaagtgattctcctgcctcagccttcagagtagcttggattataggcctgcaccaccacccctggctaatttttgtatttttagtagagacgg

SEQ ID NO: 7096 - DNA, 201 bp, Homo sapiens
gcgtgagccacagcgccctgccatttccttcctattaagagcacttgtttatctatctcatttatttggcaattaatcctagtttgcattgttgtaattcrcatcatgtttgcatcttttcatgtatttacgccctttttgcttcaactagattggaagcgcccttgcagccaattttatttccttcttaacagcattaaa

SEQ ID NO: 7097 - DNA, 201 bp, Homo sapiens
cttttgttctctgctgatatttttgtgggtgaaatctgtctgaataaagctatgtcacttacaaattctgcatctctggataaggtcagtcaataggaccrattattgattccatttgtgtcattttcaaaaagccacatttgcattgtgttgactgtgcgatcccagaaaacctgtaataactggtgctctattgtgaac

SEQ ID NO: 7098 - DNA, 201 bp, Homo sapiens
ctctggataaggtcagtcaataggaccgattattgattccatttgtgtcattttcaaaaagccacatttgcattgtgttgactgtgcgatcccagaaaacytgtaataactggtgctctattgtgaactaagaaccaagcgaatgttggtagcaaatgctatgctctactgttagttcttttttagtatcccatctaaaag

SEQ ID NO: 7099 - DNA, 201 bp, Homo sapiens
attattattactactactgttcctgctactgctaataaagccttgatccaaagaagaaccaggataccagtaggaggtttaggcttttagccatgggatcragtatagcaaacatgcaaatgcaaagagaacaaattgggctgttgcttgattctgagacatctttaagtatgaaagactattcacatgctgaggtataaa

SEQ ID NO: 7100 - DNA, 201 bp, Homo sapiens
ccattgttgtgtatggttgtgcctgtacgtcagccaaaccaggtagcctatattgtcagaatatatcacgcaaacgtgtttgtgctgttttctttgcccaraacaatgtatgcttttccatttatcaaaattctattagactgtcaagccccatttcaaaaaccaataaaaactttttttgtggtagcataaaatgttgac

SEQ ID NO: 7101 - DNA, 201 bp, Homo sapiens
tttttcaatatctggactttttaagcattttgttgagttcttctttactagtacaataaaatttattgatgtgtttcttacaaattttagattctattcartgtttatactggacgaggtttttctcaaatgcaggcaaaacaatattcaattccatgatgtcgttggttttccttccttccagacaccaaatatgcacaa

SEQ ID NO: 7102 - DNA, 201 bp, Homo sapiens
ttttctgttgactgggtcctttgatgtataaagacttttaagtctgatgtagttccatttgtctattttcacttttgttgtctgtgctctcggtgttatakccaagaaaccattgccaaaacccatgtcctgaagcttttcccttatgttttcttctaggagttttctagtttggggtcttacttttaggtatttaatcca

SEQ ID NO: 7103 - DNA, 201 bp, Homo sapiens
ctgatctccatgtgcacgcaatccccctgtgatcccttgcagtcacctgaggactctcaaattcatatgtttagcctaacccactcccctgagctccagascagagtatgctactgctgactcaacagttccacttggatgtttgataaactcaaacctaccattcaaaactgactgttcatggtccccccaccaaaccta

SEQ ID NO: 7104 - DNA, 201 bp, Homo sapiens
agttacttaaccttaagtctcaattttctcatttgcaagaggaaaatgaaaagaagaaaagtacacttaattgagaatatattctatgctgagaactaggytaatttcatgtgcatagttttatttagtcctccaaatactatgtgaggtggtaaattgtgattcagttgcctagcctataaaatgtggacaataaaagta

SEQ ID NO: 7105 - DNA, 201 bp, Homo sapiens
acaatgagagaattacctttaagaatcacaaatttttccttgaaaagagatcctgggaaactctgatatagcataatttcttatttgaacgtagtatctgyacatgaacttcctagtttagaggagactttcacctagatgatatcactgcaaacactcttttagcttgctattcttagcatggagggcgggaggtatggc

SEQ ID NO: 7106 - DNA, 201 bp, Homo sapiens
tgaaaagagatcctgggaaactctgatatagcataatttcttatttgaacgtagtatctgcacatgaacttcctagtttagaggagactttcacctagatratatcactgcaaacactcttttagcttgctattcttagcatggagggcgggaggtatggcagaggtaaaacccttagggcttggagcatggattcaagat

SEQ ID NO: 7107 - DNA, 201 bp, Homo sapiens
ccctcattacctcgatttattagcacctattcctgggcagatgctgaagaagaaaaatgtgaactaaagtaggtgaagctcagtgtgtttattaacctgayatgaactggggcataaacaatgggaatcacttttattccatggagatgaaataatgctgtataattaaaaagataattcattgtaaaacacttttataaa

SEQ ID NO: 7108 - DNA, 201 bp, Homo sapiens
tggattcaagatgaaagccgtgtcctaagcagtcagtaaacaggagggaaatgagccaaagaaggcgggtgaagggatccaggtgattgagatacttaaasatagaaggttttggggtgacggccaaggagaaaaccaaagccaaatacagcttgctcaacaactctgataggatagggacccaagttttcccaaatgaaa

SEQ ID NO: 7109 - DNA, 201 bp, Homo sapiens
tgccatgttggccaggctggtcttgaactcctgacctcaggtgatccacccacctcagcctcccaaagtgttgagattacaggcgtgagccacagcgcccwgccatttccttcctattaagagcacttgtttatctatctcatttatttggcaattaatcctagtttgcattgttgtaattcacatcatgtttgcatcttt

SEQ ID NO: 7110 - DNA, 201 bp, Homo sapiens
ggattgaataaattaatatgtatgaagcacttagaaaagtggcaccaaagttctcataaaagttagttactattataaaaaaatcaatcttatcttagatgataagatatctttatcttatcaatcttatcttagatggcttaatgactttgtgacttgttcaagctcacataactgtaagattcaaacaaagctcagact

SEQ ID NO: 7111 - DNA, 201 bp, Homo sapiens
gattgaataaattaatatgtatgaagcacttagaaaagtggcaccaaagttctcataaaagttagttactattataaaaaaatcaatcttatcttagatgataagatatctttatcttatcaatcttatcttagatggcttaatgactttgtgacttgttcaagctcacataactgtaagattcaaacaaagctcagactt

SEQ ID NO: 7112 - DNA, 201 bp, Homo sapiens
attgaataaattaatatgtatgaagcacttagaaaagtggcaccaaagttctcataaaagttagttactattataaaaaaatcaatcttatcttagatgataagatatctttatcttatcaatcttatcttagatggcttaatgactttgtgacttgttcaagctcacataactgtaagattcaaacaaagctcagactta

SEQ ID NO: 7113 - DNA, 201 bp, Homo sapiens
ttcattcacgattttcttggcacttggatctggattggtaggaatagaactctcaccttcctcaggaaaggaaaaagtccttagcttggctgctgaacagrcaacaggaaccctttcagctttattttgagaaaattaaaataagtgtctgcacctgggcctccctccccagagtcactctgggttctacagggctctgga

SEQ ID NO: 7114 - DNA, 201 bp, Homo sapiens
ttgaataaattaatatgtatgaagcacttagaaaagtggcaccaaagttctcataaaagttagttactattataaaaaaatcaatcttatcttagatgataagatatctttatcttatcaatcttatcttagatggcttaatgactttgtgacttgttcaagctcacataactgtaagattcaaacaaagctcagacttaa

SEQ ID NO: 7115 - DNA, 201 bp, Homo sapiens
ggaaccctttcagctttattttgagaaaattaaaataagtgtctgcacctgggcctccctccccagagtcactctgggttctacagggctctggactttayagggctctaccccagccttgtagagccctggtctgtgtccaatcatactccctcctgtgttcaccttgttagcctcgctgcctctatctacatttgcctt

SEQ ID NO: 7116 - DNA, 201 bp, Homo sapiens
tgaataaattaatatgtatgaagcacttagaaaagtggcaccaaagttctcataaaagttagttactattataaaaaaatcaatcttatcttagatgataagatatctttatcttatcaatcttatcttagatggcttaatgactttgtgacttgttcaagctcacataactgtaagattcaaacaaagctcagacttaaa

SEQ ID NO: 7117 - DNA, 201 bp, Homo sapiens
ttttagccatgggatcaagtatagcaaacatgcaaatgcaaagagaacaaattgggctgttgcttgattctgagacatctttaagtatgaaagactattcacatgctgaggtataaacaaatgattgtaatggcattgtgatcccaatagcttagcataacattataatttaagtgcatacattattagctggcgatcatc

SEQ ID NO: 7118 - DNA, 201 bp, Homo sapiens
gtgatgcatgtgatcttcttagtactaataataagtgtgtttgttagtactctggttacagtgttgcacatacatacagataggtaggtaggtaggtagayaggtagacagattttttttttttttttttttttttttgagacaggatctcattctgtcacccaggctggactatggtggtgggatcatggctcactgtag

SEQ ID NO: 7119 - DNA, 201 bp, Homo sapiens
ctcctgtaatcccaacactttggaaggctgaggcaggcagatacctgaggtcaggagtttgagaccagctggccaacatggcgaaacaccatctctactamaaatacaaaaattagccaggtgtggtggcgggcgtctgtagtcccagctacttgggaggctgaggcaggcagatcacctaaagtcaggagtttgagacca

SEQ ID NO: 7120 - DNA, 201 bp, Homo sapiens
ggcagatcacctaaagtcaggagtttgagaccagcctggccaacatggtgaaacaccatctctactaaaaatacaaaaattagccaggtgtggtggtgggygcctgtagtcccagctacttgggaggctgaggcaggagaatcgcttgaacccgggaggcagaggttgcagtcagccaagatcacaccactgcactccagc

SEQ ID NO: 7121 - DNA, 201 bp, Homo sapiens
acagctttcagcctgatgttctgtgacctgctggggtgtgagcaaatgagaagaacataggcaaatactccttttgcatagtatagttaaatacactatayataatattatgtgcatagtattcgcaccatttgtttctcctgttgacagatcctggattagaaattctgaatatggcttcttgtgaccttgacagaaact

SEQ ID NO: 7122 - DNA, 201 bp, Homo sapiens
gaggcaggcagatacctgaggtcaggagtttgagaccagctggccaacatggcgaaacaccatctctactacaaatacaaaaattagccaggtgtggtggygggcgtctgtagtcccagctacttgggaggctgaggcaggcagatcacctaaagtcaggagtttgagaccagcctggccaacatggtgaaacaccatctc

SEQ ID NO: 7123 - DNA, 201 bp, Homo sapiens
tcgcttgaactcaggaggtggagggagcagtgaggcgaaatcatgccattgcactccagcctgggtgacagagcaagactctatctcaaaaaaaaaaaaaraaaaaaggacagtttcagaaggtaacatagtagcataagagtaatctttctataggcatattttagtagactggtctctcattcctggtggaggagcttc

SEQ ID NO: 7124 - DNA, 201 bp, Homo sapiens
cccttgaatctgtgtatcactttgggtactatagagagcttaacaaaatcaggtctaccaacccatgaacacagggtgtctttccatttatttgtgtcttstcttctttaatttttttcagaaatgttttgtggtttttggtgtacatctcttttatctcctttgttaggtttattcctcagtattttattcattttgatg

SEQ ID NO: 7125 - DNA, 201 bp, Homo sapiens
ttagtatctgctaagatttgcagttttttcacctgtagtaaataactctacttcctactgccaggtgcccaggccccacaagtggccccagcccaggaacraatctctcaggctgcatcaggatgaatgatgacccaagtatggaagtgagtgttggactggattttggtttcattttcagtattaccatatcctgttctt

SEQ ID NO: 7126 - DNA, 201 bp, Homo sapiens
cttgaatctgtgtatcactttgggtactatagagagcttaacaaaatcaggtctaccaacccatgaacacagggtgtctttccatttatttgtgtcttgtyttctttaatttttttcagaaatgttttgtggtttttggtgtacatctcttttatctcctttgttaggtttattcctcagtattttattcattttgatgct

SEQ ID NO: 7127 - DNA, 201 bp, Homo sapiens
tcacctgcgtatatctacccagtacccaaaaaagataataatatatcagtatcattcattattgatctttgctgcttcttttcatcttccaccgaaataaytgagattagaatgtcatccacatttgcaacttagtcagtgtcagaatcactcgctgaatgcttgtgttagatatcttttaatatgctgttttctatacag

SEQ ID NO: 7128 - DNA, 201 bp, Homo sapiens
aattaagtgatatagtaatgtttgatttgtacaaagtgtaaacagaataattatataaattggtatctaattatgaagttttttatcataaagtaggagawctgtgaatgtgccaagaaaaaataattaggacatataattttgtatttacttaagcagtaggaaataaattgataatggctacagatgtatttgatttga

SEQ ID NO: 7129 - DNA, 201 bp, Homo sapiens
ctgctacttgactctgaaaacaatgtagttattctcgaccattcccagtgagacaccactttagttgacattcatgggaggaataggctctaattcccatwaaaaaaaatcaatcaaggaaaattcattctttttcttttatcttttttttttttttgagacggagtctcgttgtgtcgcccaggctgcagtgcagtggca

SEQ ID NO: 7130 - DNA, 201 bp, Homo sapiens
gggtaacccgacaatggcacagcagcttcacaagatcctgagggatcagcctcctcctttcgtgctgcctcactaccctcagcccttggcttctgcctcaragtctaagatggctactttagatccaggcaccaagccctcatcattacatcatctcattccaagaaaaaaaaagaagcaatgacaagtattccctctccc

SEQ ID NO: 7131 - DNA, 201 bp, Homo sapiens
aataagtgactttaaaatcattccatacaaatccctctttttcagatgagggaagagaaacacagaagttaagtgatcagttatgatcatgtattggtagragcatgattagaaaccaagtttcttgggccgcagtttcatattcttgatgctcaactaacctatgaaattaaattagggatgatggtttaagaaaacgat

SEQ ID NO: 7132 - DNA, 201 bp, Homo sapiens
tgggtcttgttttctttaaaaactaaagtctatcatatttatttcccatagatgtttgaatgaaaaaaaagtctttgagacacatttccctttggcaattytgagggtattatgagcttgagatttcaaaattcaaatccaactaggaactcatcagcaaatatagtggaacaattatgttttgcttaggtggaggaacac

SEQ ID NO: 7133 - DNA, 201 bp, Homo sapiens
ccgccaccacgcccatctaatttttttgtatttttagtagagacggagtttcaccgtgttagccaggatggtctcgatctcctgacctcgtgatccaccckccttggcctcccaaaatgttgggattacaggtgtgagccaccgcgcctggccaaggaaaatacattctatcgttttaactcgacgtttaagtttgagata

SEQ ID NO: 7134 - DNA, 201 bp, Homo sapiens
cctcgtgatccaccctccttggcctcccaaaatgttgggattacaggtgtgagccaccgcgcctggccaaggaaaatacattctatcgttttaactcgacrtttaagtttgagatagaggtgctaaaatagaatagccacaaaattgcagaaatggaatccatttcatgggttaattacagaatgtctttatactccacct

SEQ ID NO: 7135 - DNA, 201 bp, Homo sapiens
gttataatgacaagaaaggaaatctgcgtgtgttcagtacagatacaaccattgtaggcctaactacattttttttagttaaatccatagatgcaaacccmcaaatacagagggccagctgtataggtaggatatagtgttggctagcacatatgctgaaaatggttgctcctagtaaaaaatgaacagaagaaaactcaa

SEQ ID NO: 7136 - DNA, 201 bp, Homo sapiens
aacctctctctgatggaggtgggaactctctttcattatgtgttacttaaaccatgaacttaattagaaatttgataaaattaggactgggcgtaggggartgagaaccatgttatagtttagtatctgctaagatttgcagttttttcacctgtagtaaataactctacttcctactgccaggtgcccaggccccacaag

SEQ ID NO: 7137 - DNA, 201 bp, Homo sapiens
aatctgtgtatcactttgggtactatagagagcttaacaaaatcaggtctaccaacccatgaacacagggtgtctttccatttatttgtgtcttgtcttctttaatttttttcagaaatgttttgtggtttttggtgtacatctcttttatctcctttgttaggtttattcctcagtattttattcattttgatgctattg

SEQ ID NO: 7138 - DNA, 201 bp, Homo sapiens
aatccagcactaactatccatgtccagggtaaggatcgagatcgagaagcccacactgccagtgaaaaagctacgtctttactgcataaattagaggaagyaatttcggaacaacggaaccttcaaactataaatactgaattatcgaacacttgccaggcacttcagcagaagacaaggaaactgaagagtgagtagcaa

SEQ ID NO: 7139 - DNA, 201 bp, Homo sapiens
tcctatatggtctccctgcttccatccaattccaatccctcctcccaacatagtctgttcttaataaaggagccagagtaatccttttaaaattagattgygttactttttggttcagcgtcctaaagctcctcagtttacttggggtaaaacccaatgtcttactgtggtttgaaaggatgtgtggccgggcgcggtgac

SEQ ID NO: 7140 - DNA, 201 bp, Homo sapiens
atgtttgatttgtacaaagtgtaaacagaataattatataaattggtatctaattatgaagttttttatcataaagtaggagatctgtgaatgtgccaagaaaaaataattaggacatataattttgtatttacttaagcagtaggaaataaattgataatggctacagatgtatttgatttgacaagtggctataatcat

SEQ ID NO: 7141 - DNA, 201 bp, Homo sapiens
tcaaaacacggaatttctatcaccccagaaacttcccttgtgcaacttcccagtcaatgccccgcctccacctctagcaccctaaggaacaaccactggtytgataggttagcttagcctgttctagaactcagttacacagtatgtacttttttgtgtgtttgtcttttttctgtcagcatgatgggattatgttgtgtt

SEQ ID NO: 7142 - DNA, 201 bp, Homo sapiens
gcaattctgagggtattatgagcttgagatttcaaaattcaaatccaactaggaactcatcagcaaatatagtggaacaattatgttttgcttaggtggargaacacctctttaaataatatgatttgatttaaaatgcagtcaatcaattgctatttcccagttcactgaatactaatttattttaaccagttttatact

SEQ ID NO: 7143 - DNA, 201 bp, Homo sapiens
atatataaatatgtgtatatatagtatatatttatatatactgcactccagcctaggcaacagagtttcttctccagcctaggcagagtttctctgcatayatatatgcagagaaagaattcatagtaataacattggttaatgatgagactaacttctgaaagttctttttaaattttccctttttgtatatacttggct

SEQ ID NO: 7144 - DNA, 201 bp, Homo sapiens; identical to SEQ ID NO: 873

SEQ ID NO: 7145 - DNA, 201 bp, Homo sapiens
cttaacaaatgtctagcaaatactataagacggttttaaaatgttatttgaagtttcaggcctttatatgtaaataacaaaatagtgattttaattcatayagatgtatttgtttatctaagtatgcttttatactctctgctatatttttgtatcaattaagtgtgcctggcagcatgaagaaagtcagtacaacaatgg

SEQ ID NO: 7146 - DNA, 201 bp, Homo sapiens
gaaacacacgatggccacttcttattgctttggttgctattgtttagatgtagatcagaaggagcacagggccttccttcttaatacagttaagacagaattttttaaaaatttcatctttaccagggtcctaagtattaataagaaataaattttaaattacttttgtaggttagaaatacttatttttttttcccctga

SEQ ID NO: 7147 - DNA, 201 bp, Homo sapiens
acacacatgtagtgcctaccctgtgctagctaggcattatggacatcacagtgacacagaggactgtattccattggttaagatggtaattgttatgaagmatgaaatgaatgataaacagatatttatattgctcggtagtctctaaagtcttaatatcttctgaattttgctttacctttaaagaattaagacgttgct

SEQ ID NO: 7148 - DNA, 201 bp, Homo sapiens
taattccaatatgtttggttacgtttcttaaaattccaacctatgctccttatatgatacattcacctcttttgtaagcataatctctttaccattaccarttaattgcagcccatcctattagctgtagaagaaagatgtggcaaatttgggaagtaaagaaaaaagggatcaagaatagacataaaagatttgtgatca

SEQ ID NO: 7149 - DNA, 201 bp, Homo sapiens
cccagaaacttcccttgtgcaacttcccagtcaatgccccgcctccacctctagcaccctaaggaacaaccactggtctgataggttagcttagcctgttytagaactcagttacacagtatgtacttttttgtgtgtttgtcttttttctgtcagcatgatgggattatgttgtgtttcttagtagtagttttttattat

SEQ ID NO: 7150 - DNA, 201 bp, Homo sapiens
aagatcagtttgagacaagtcaaatttcaggctgatctgagacattgatagtcggtaaggagattttatatacggctgcatacccatattcataaactcayctgtgcggtttttgaaagctgacatatatttgtgaattatcagcaaaaatccaagtgtgtggatgagatttcccaaggactgtggcaggaaggaagggag

SEQ ID NO: 7151 - DNA, 201 bp, Homo sapiens
tgtgcacatatgtttttatttcacctagaataaatatctaggagtagaactgttaggacatagcatagctgtgactgtcactttttaagaaactgtcaaayggttttcggtagtttttatagcatttcacgctcccaccagcagtgtgggtggttttagtgttccacatcttcagtatttggtagtgttaatctttgtcat

SEQ ID NO: 7152 - DNA, 201 bp, Homo sapiens
gagtgctgtgtaaaggggtagagtagttaattgatcacgaatgggagaggaagagctagaaacagcagccacacacaactccttatgtgaccttaaaacayatctatatgcggtaaaagcctaacataacactgtcttagcagccatctttgtcacaatttctccaaaaacctatctagaaaactccatgtgatagcccta

SEQ ID NO: 7153 - DNA, 201 bp, Homo sapiens
acaaaacatctgttgaaataaggctttcaatttgaatgcttcaagatagactgtttctaaaacccaagattgcctggtgagcaagcagatgggcaatttaracaatcttatactagctcatcatcgcttctgaaacacggcttcattggcaattgtaagatagtattctgaatttgtattttggagatacacgaccttcag

SEQ ID NO: 7154 - DNA, 201 bp, Homo sapiens
aggaagagctagaaacagcagccacacacaactccttatgtgaccttaaaacatatctatatgcggtaaaagcctaacataacactgtcttagcagccatytttgtcacaatttctccaaaaacctatctagaaaactccatgtgatagccctatatcacccacaccttaccttttcatctatccagtcctacctcttcat

SEQ ID NO: 7155 - DNA, 201 bp, Homo sapiens
gacaatcttatactagctcatcatcgcttctgaaacacggcttcattggcaattgtaagatagtattctgaatttgtattttggagatacacgaccttcaraaacacacgatggccacttcttattgctttggttgctattgtttagatgtagatcagaaggagcacagggccttccttcttaatacagttaagacagaat

SEQ ID NO: 7156 - DNA, 201 bp, Homo sapiens
aggactgcttaaataaatgaatgcattaataaatgaagttgaataaaacggtggtatctatcctaacgatatgttctaatcaggtgaagaaacagataatyactgaataattagagtgtgcttagtgctttgaaagaaaaaatgcttgagatggcaggccagaaaacatgtcacggaggaagtaccatgttaatggcattg

SEQ ID NO: 7157 - DNA, 201 bp, Homo sapiens
ggatttaagtgtgactggtttaccttggagaagagagtgaagcttgaagagaggtcccgtgacttggcagaagaaaatttgaagaaagaaatcactaactstttaaaactattagaggtgagaatcagaacatttgggatataaacatttggtctagccaggcacagtggctcacacctataatccctgcactttgggagg

SEQ ID NO: 7158 - DNA, 201 bp, Homo sapiens
aattttaagcttcaaagaagagaatcgagtctatttccatttatgattaactgaggaaagagaatggtaactgattcagtcttgcagatgatgggcaagcytgctgtagggtactgagagaagaatgggggtgcagaggagtgtaacaactactattatccttccatatggtgaagttaccatacatttagagatgagctg

SEQ ID NO: 7159 - DNA, 201 bp, Homo sapiens
acatttgcattgtgttgactgtgcgatcccagaaaacctgtaataactggtgctctattgtgaactaagaaccaagcgaatgttggtagcaaatgctatgytctactgttagttcttttttagtatcccatctaaaagtaaagcccctatttacagaataagtgctaatatgcttttccccttagcctacctccattggga

SEQ ID NO: 7160 - DNA, 201 bp, Homo sapiens
agttactggtcagcccatattgccactctcactgtttcctcctcttttacttgctcctgcccccctaactgctttgtgtgtttcctgtttctcacaggcayaagtccagctcatgataatattgcattccaagactctacgagtaaggataaaaccatattaaatctggtaaggaaatacgtatgttcacaacaaaggtgg

SEQ ID NO: 7161 - DNA, 201 bp, Homo sapiens
aggactgtattccattggttaagatggtaattgttatgaagcatgaaatgaatgataaacagatatttatattgctcggtagtctctaaagtcttaatatyttctgaattttgctttacctttaaagaattaagacgttgctttaacataaatggcatgtgtaatagctaaaatgtgtcaatgtgtttttcctttcagatg

SEQ ID NO: 7162 - DNA, 201 bp, Homo sapiens
actggtccctggtaccaaaaaggttggggactgctgttatagagtgtttttgtcagagtaggcttaggagaggacaggaagtaggaaaatgactggttatkaagtatttccactctatgtacagtggtaaaatcttatgattttaggaagccaaagaggaaccagaaacaatagaagaacataaaaaagaacatgcttcag

SEQ ID NO: 7163 - DNA, 201 bp, Homo sapiens
tattatttttctaaatagaagaacttatttttaattaaatttctataaaaggtttaaattataaatctggtgatttgatttttagagttagatatttatcractttccctaaaacagaacaaatatttgtgagcctcttgagttacagtaagattcagcaatattttatgaataattatagcatattatccttagtttcaa

SEQ ID NO: 7164 - DNA, 201 bp, Homo sapiens
agtcacttcatgttttggcacaagctctcatatgctcggtgtctgtttggcttggctgtgactcagtgcaggtgaaccctgtgcatgtcagcattatgttrctggggggagaaagaaatgcctcagtataaaacagtattaaactgaaacatctgaccacatccggttttctctcctcttcctcaccctcacattattttg

SEQ ID NO: 7165 - DNA, 201 bp, Homo sapiens
tctacttgtaggattctgggatcctagggctgtaatttgagggctcaagcagaggcttattggagataggatttctttatcagtaggaggtcagactgaaygacctctaaaatgtattttctttttttttttttttttttttgagagggagtctcgccctggagtgcagtggcatgatcttggctcactgcaaccttcacc

SEQ ID NO: 7166 - DNA, 201 bp, Homo sapiens
aagtagctaggattacaggcatgcgccaccacacccagctaatttttgtattttttttttttagtagagatggggttttgtcctgttggccaggctagtcycaaagtactggcctaaaatgatccacccaccttggtctctcaaagagctgaaattagaggtgtgagccactgcaccaggcctaagatgtattcttagctt

SEQ ID NO: 7167 - DNA, 201 bp, Homo sapiens
cttttacaggtcaagcctttttaaccaaataatattttattatattttaatagactctgtggtttcccctcttcctgtaaccactgtgaaatcggttaacsttagacaaagtgagaagtaagtgcttcttcatgtagcatgttaacatgttttatttttctgttggattatgtttaaatatgttttttgtcttatcctaca

SEQ ID NO: 7168 - DNA, 201 bp, Homo sapiens
tttttttttttagtagagatggggttttgtcctgttggccaggctagtcccaaagtactggcctaaaatgatccacccaccttggtctctcaaagagctgraattagaggtgtgagccactgcaccaggcctaagatgtattcttagcttaagattagacaattctgtgactcacttctagaagacaattcacatgtatct

SEQ ID NO: 7169 - DNA, 201 bp, Homo sapiens
  misc_feature (1)...(201): n = A,T,C or G, or insertion/deletion polymorphism (see Tables 1-2)
ttgtagcaacaattgagtcacttcaaaaggagttcattgaaggggaacaccatggcttgctgtttcaggtaaaatatctctgatatgtgttcagttactgnggaggaagttgttcaattcatgtaaggttttgaagctaatttataacagacaatgactttaatcattaaattaaataaccagtttagaagaaaatgtttt

SEQ ID NO: 7170 - DNA, 201 bp, Homo sapiens
aaggagttcattgaaggggaacaccatggcttgctgtttcaggtaaaatatctctgatatgtgttcagttactgtggaggaagttgttcaattcatgtaargttttgaagctaatttataacagacaatgactttaatcattaaattaaataaccagtttagaagaaaatgttttggtggactttgttctcttctgcactt

SEQ ID NO: 7171 - DNA, 201 bp, Homo sapiens
gttttttgtcttatcctacagcacttctgctaatgagaaggaggtggaggtgagtttaaagcaaattttttttccttttaaaaaagtgttccagactcacytgctacagtcacttcatgttttggcacaagctctcatatgctcggtgtctgtttggcttggctgtgactcagtgcaggtgaaccctgtgcatgtcagcat

SEQ ID NO: 7172 - DNA, 201 bp, Homo sapiens
aaatgcctcactctcttccttgatcttcagtctttgtgctctgtcaccactaaacattaaaagggcccaattaggattctcagtacattcttcagtaaggkgttccctcacctaaaaaaaaaaaaaaaaaaaaaaaaaaaaaaaaaaattcaagcaagttgttaataattcctcttctattcagtattttggtagcagatt

SEQ ID NO: 7173 - DNA, 201 bp, Homo sapiens
gtctagcaaatactataagacggttttaaaatgttatttgaagtttcaggcctttatatgtaaataacaaaatagtgattttaattcatatagatgtattwgtttatctaagtatgcttttatactctctgctatatttttgtatcaattaagtgtgcctggcagcatgaagaaagtcagtacaacaatggtttctctctg

SEQ ID NO: 7174 - DNA, 201 bp, Homo sapiens
acaggtgtaagcatgattttaattctaaaacacgaagcaagtctataagctagtgaagtaactatccacactagctcaataatgttatttaattttttttrtaaaataattcttataaaacaattttgaagatatagtctgcagaaaagaaatccaagtggtaactaaccatggcctttcacacataaggatggtatcaat

SEQ ID NO: 7175 - DNA, 201 bp, Homo sapiens
caaagtagtgacacctctcaggataacatggatgcagttaaaagctaaaattaacgtctagttctgaaatgacaaaaagaaatgattatcaaagtaaattkaagaaggaataaagagaaaaagtagagtgatttgtggatcatttaaatttgagaaggaaaaactactaatactaatggagtgtctattttgtgtcaggca

SEQ ID NO: 7176 - DNA, 201 bp, Homo sapiens
agtggcttagttatttattcaagatcacacaactggtatgtggcagagccaggatctgaaccaaaaatttctgattgaccctaaaccctatgttttttctrttaaactctgctgcttcctatactcagaaacacacataacaagatggttttccctaataaatgatttgtgatctcaacctatttcccctaccattctttg

SEQ ID NO: 7177 - DNA, 201 bp, Homo sapiens
aacctgcctcggactcctaaagtgctgggattacaggcgtgagccaccacatctggctacagtgaaactttacaaaaacaggcagctggctggattttcayccgctggctgtagattgttaacctctctagttgcttagtgggcaggggttttctgacctctcccacacttaaaaaaacttttttgaaattattattttgt

SEQ ID NO: 7178 - DNA, 201 bp, Homo sapiens
acagcagccacacacaactccttatgtgaccttaaaacatatctatatgcggtaaaagcctaacataacactgtcttagcagccatctttgtcacaatttytccaaaaacctatctagaaaactccatgtgatagccctatatcacccacaccttaccttttcatctatccagtcctacctcttcatcaaacttcagcatg

SEQ ID NO: 7179 - DNA, 201 bp, Homo sapiens
ccatctgccctataccatcccattcccatatcctttccaaaagagctgagtaaatatgggttcatttagaattgtatgaaaatgtttgcttaaaacaaccwctttggaatggaaaatgtcaaattgttgaacttatgtctcctttctttttccttaaggagaatggtgttgaacgcgtgtgtcctgagagcctgctgcagt

SEQ ID NO: 7180 - DNA, 201 bp, Homo sapiens
gtgacagagtgagactccgtctcaaaaaaacaaaaacaaaaaacaaataaaaaaaagtgttggtgaggatgtagagatattggagtcctagtgcacagttsggggaatggaaagtggtgcaggcactatagaaaatgttatggagggccgggtgcggtggctcatgcctgtaatcccagcactttcggaggccgagacagg

SEQ ID NO: 7181 - DNA, 201 bp, Homo sapiens
ttctctcctcttcctcaccctcacattattttgacaacaggcagaatttctcagattatctttgggatttaagtgtgactggtttaccttggagaagagartgaagcttgaagagaggtcccgtgacttggcagaagaaaatttgaagaaagaaatcactaactctttaaaactattagaggtgagaatcagaacatttgg

SEQ ID NO: 7182 - DNA, 201 bp, Homo sapiens
ttgttagtactctggttacagtgttgcacatacatacagataggtaggtaggtaggtagataggtagacagattttttttttttttttttttttttttgaracaggatctcattctgtcacccaggctggactatggtggtgggatcatggctcactgtagcctcaacctcctgggctcaagtgatcctcctgcctcagcc

SEQ ID NO: 7183 - DNA, 201 bp, Homo sapiens
cttgcccatgatcactcaattaataaataacaaacctgggattaaaattcagatttgtccagcttcaaaggatacaggcctttgtcatggctactcttagkacactgaatttagacattttaatcataattacttagcattaccttgaaagtatttttttttttttttggctaagaaatgtactgccttttatatctaaaa

SEQ ID NO: 7184 - DNA, 201 bp, Homo sapiens
acagatcctggattagaaattctgaatatggcttcttgtgaccttgacagaaactcgctctgtaagaaagaggaggatacaagatcagcttctcccacgayagaggcccaaggtaaaatgttgacaggtgtaagcatgattttaattctaaaacacgaagcaagtctataagctagtgaagtaactatccacactagctca

SEQ ID NO: 7185 - DNA, 201 bp, Homo sapiens
agattcattcttgccttattgtttataataacataaaaatgagagtgtctagtaggaaagatattcagtccagcttctttcaaagcaataatgaaaggaayaggagtcatccaggttccttccaaaatagagatgtgtttcttgtcttttagtttgattgaagataacatgcagaggttttcctagtttaaataagaaaaa

SEQ ID NO: 7186 - DNA, 201 bp, Homo sapiens
gtttttttcttttaaaattaattaaaacttctcaaaatttctaaaagtaaacaaggagaaaaatctagtatgcatggtatatttgaacttgcaagttgttrtatattatactctgattttattagctagtttttttcctctcatatggtagaaaaggccttgctcgtctattttctttggaaattttagggggttgggcaa

SEQ ID NO: 7187 - DNA, 201 bp, Homo sapiens
tacgtgtatttttttctgcctggataacgtagagtggacacttcctttctgtcttgagttatgcataacctgtccagatttatgaaatcccttacttgttrcttgtatcttttgctgcccaaaaaacccatacaaatcaggattttgcttatatgaccatgtacttacgatctttctaacaatgccctttaaattcaatct

SEQ ID NO: 7188 - DNA, 201 bp, Homo sapiens
aatttgataaaattaggactgggcgtaggggagtgagaaccatgttatagtttagtatctgctaagatttgcagttttttcacctgtagtaaataactctrcttcctactgccaggtgcccaggccccacaagtggccccagcccaggaacgaatctctcaggctgcatcaggatgaatgatgacccaagtatggaagtga

SEQ ID NO: 7189 - DNA, 201 bp, Homo sapiens
ggtttgttatatatgtatacatgtaccatgttggtgtgctgcacccattaactcgtcatttacattaggtatttctcctaatgctacacctctcctatccmcaccccatgacaggccccagtgtgtgatgttccccgtcctgtgtccaagtgttctcattgttcaattcccacctgtgagtgagaatatgcagagtttggt

SEQ ID NO: 7190 - DNA, 201 bp, Homo sapiens
gcttcaagatagactgtttctaaaacccaagattgcctggtgagcaagcagatgggcaatttagacaatcttatactagctcatcatcgcttctgaaacayggcttcattggcaattgtaagatagtattctgaatttgtattttggagatacacgaccttcagaaacacacgatggccacttcttattgctttggttgct

SEQ ID NO: 7191 - DNA, 201 bp, Homo sapiens
gcagtatcacgaagaattatgtaactaagtttattcctcacctatacctctttcctcaaagcctttgtttacatcaaagtgtcaattatttggagttgatratgttagcattctcctagattactaaattgtgacttttaaataagaatcataagttactcatatgtataccttttgatcaaacacttgaaagctttttta

SEQ ID NO: 7192 - DNA, 201 bp, Homo sapiens
ctatacctgtccctgccctcatcctccttcggtgctcatttgcacctgcctttttaagtatacagactcatcttccttaggaaacattaaaaaatgtcagkgcattttgtgagggcctaatctacctcaataaaatttcccttctgtattgagggtgaggaaggatggctttgaattgcaaatgcttcattttcatttttg

SEQ ID NO: 7193 - DNA, 201 bp, Homo sapiens
tgaggtcgaggctggataatctttgaggggctggtaccctttgtcaaagaccacaaagcacggccatgcccatggagagtagtaaggtattaattggcaargttaggtgctaatgccacttttctacccaagaagagaataatgctaaatgacctgagaaggtcacttaggtcactgtctctatcattgagatgtggttgg

SEQ ID NO: 7194 - DNA, 201 bp, Homo sapiens
tgctcattttaaagatgggattatatttcttttcactattgaattgtacaagttgttgttattcttcctgttgagtgggtatatggcattgtttttgttcwtaaatacctgtctgagcagctaagaaaaaggaaatgaatctattttgctcttacctagaggccaaggtgggcggatcacttgaggtcaggagctcaagaa

SEQ ID NO: 7195 - DNA, 201 bp, Homo sapiens
tcaacacctttctcaggtgtagccaaccaaatccacactctgtgtgaaaggcccacatatggagaagtaaaggatggtgctttggatgtaaaaagacaachcaagtaggttaagagcaaaatttacttactctactcctcatgggtggcccattcccattgcctaacattttaattggtcagattttcataacgtgagatc

SEQ ID NO: 7196 - DNA, 201 bp, Homo sapiens
tctatctcatttatttggcaattaatcctagtttgcattgttgtaattcacatcatgtttgcatcttttcatgtatttacgccctttttgcttcaactagwttggaagcgcccttgcagccaattttatttccttcttaacagcattaaaaactgtagagcaggggtccccagtcgctgctgagccagggatcagaaccca

SEQ ID NO: 7197 - DNA, 201 bp, Homo sapiens
cctcctcggcctcccaaagtgctgggattacaggtgtgagccaccacgcccagccgaaaatttacaattttgagataaagttattgctgtagttttcttgragtgtagttttcttgcttttcttgaatttcataataccactctaaagcttaaaagacaaattagactacctaaaatgtttccactttttaggactatacc

SEQ ID NO: 7198 - DNA, 201 bp, Homo sapiens
tttatttggcaattaatcctagtttgcattgttgtaattcacatcatgtttgcatcttttcatgtatttacgccctttttgcttcaactagattggaagcrcccttgcagccaattttatttccttcttaacagcattaaaaactgtagagcaggggtccccagtcgctgctgagccagggatcagaacccattcgaggct

SEQ ID NO: 7199 - DNA, 201 bp, Homo sapiens
ctgcctttttaagtatacagactcatcttccttaggaaacattaaaaaatgtcagtgcattttgtgagggcctaatctacctcaataaaatttcccttctrtattgagggtgaggaaggatggctttgaattgcaaatgcttcattttcatttttgactggattctctgttgtttgtaacctctctctgatggaggtggga

SEQ ID NO: 7200 - DNA, 201 bp, Homo sapiens; identical to SEQ ID NO: 868

SEQ ID NO: 7201 - DNA, 201 bp, Homo sapiens
agataggtaggtaggtaggtagataggtagacagattttttttttttttttttttttttttgagacaggatctcattctgtcacccaggctggactatggkggtgggatcatggctcactgtagcctcaacctcctgggctcaagtgatcctcctgcctcagcctcctgagtagctaggactataggcgagcaccactatg

SEQ ID NO: 7202 - DNA, 201 bp, Homo sapiens
cgtggaaaaactgtcttccaggaaactggtccctggtaccaaaaaggttggggactgctgttatagagtgtttttgtcagagtaggcttaggagaggacasgaagtaggaaaatgactggttatgaagtatttccactctatgtacagtggtaaaatcttatgattttaggaagccaaagaggaaccagaaacaatagaag

SEQ ID NO: 7203 - DNA, 201 bp, Homo sapiens
taggtaggtaggtaggtagataggtagacagattttttttttttttttttttttttttgagacaggatctcattctgtcacccaggctggactatggtggkgggatcatggctcactgtagcctcaacctcctgggctcaagtgatcctcctgcctcagcctcctgagtagctaggactataggcgagcaccactatgcct

SEQ ID NO: 7204 - DNA, 201 bp, Homo sapiens
caacctcctgggctcaagtgatcctcctgcctcagcctcctgagtagctaggactataggcgagcaccactatgcctggctaatttttaaattttttgtaraggtaggatcttgcagtgttgcctaggctggtctcaaactcctgggctcaagcaatcctcctgcctcagcctcccaaagttttgggattacaggcatgag

SEQ ID NO: 7205 - DNA, 201 bp, Homo sapiens
tttaaattttttgtagaggtaggatcttgcagtgttgcctaggctggtctcaaactcctgggctcaagcaatcctcctgcctcagcctcccaaagttttgrgattacaggcatgagccactctgcccagctgcatgtatttttttagtggtttcttcttaaccctatttctctcataatccctgcattattttgttcttat

SEQ ID NO: 7206 - DNA, 201 bp, Homo sapiens
ggttttaagagaattatttggacctgacattccaaaacatgtttgctatctttttggcagggaatattcctcactaccattacccagacacacttcatcgrcagacggtactataacttcaagtggtaagtggatttggaaataatattaaaatagactgttagtattacagctttcagcctgatgttctgtgacctgctg

SEQ ID NO: 7207 - DNA, 201 bp, Homo sapiens
agaaatacttatttttttttcccctgagacagagtcttgctctgtcacccagagctggagtgcaatggcttgatctcggctcactgcaacctccgcctccygggttcaagcaattctcctgcctcagcctcctgagtaggtgggactacaggtgtgtgctaccatgcctggctaatttttttgtatttttagtagagacaa

SEQ ID NO: 7208 - DNA, 201 bp, Homo sapiens
tgtgctaccatgcctggctaatttttttgtatttttagtagagacaaggtttcaccatgttgttcaggctggtctcgaactcccgacctcaggtgacccayctgcctcggtctcccaaaatgctgggattacaggcatgagccaccgcacccagcctagaaatactcttttaaaaatatgcttttcttcctatgtgaggga

SEQ ID NO: 7209 - DNA, 201 bp, Homo sapiens
gggctgtaatttgagggctcaagcagaggcttattggagataggatttctttatcagtaggaggtcagactgaatgacctctaaaatgtattttctttttytttttttttttttttgagagggagtctcgccctggagtgcagtggcatgatcttggctcactgcaaccttcacctcccaggttcaagtgattctcctgcc

SEQ ID NO: 7210 - DNA, 201 bp, Homo sapiens
ctgcaaccttcacctcccaggttcaagtgattctcctgcctcagcctcccaagtagctaggattacaggcatgcgccaccacacccagctaatttttgtattttttttttttagtagagatggggttttgtcctgttggccaggctagtcccaaagtactggcctaaaatgatccacccaccttggtctctcaaagagctg

SEQ ID NO: 7211 - DNA, 201 bp, Homo sapiens
tttgtccagcttcaaaggatacaggcctttgtcatggctactcttagtacactgaatttagacattttaatcataattacttagcattaccttgaaagtatttttttttttttttggctaagaaatgtactgccttttatatctaaaaggacctccatattgactcttattaggatatgtgactgcgtggttttgtctgtg

SEQ ID NO: 7212 - DNA, 201 bp, Homo sapiens
agattttcttgtgtcttctgtagtttgcaacagcccaggaattagtctgttggctgcaccttctgactgatcccaccagttctcaaccttcccattccagrtttctgctccactggagaatctcaacagcctggtaactgtactctctgcctctgacccttgtcccttgagcaactccccacctaccatcattttatactc

SEQ ID NO: 7213 - DNA, 201 bp, Homo sapiens
gaggctgaggcaggagaatcacttgaatccggaaggaggaggttgagtgagccgagatcgtgccattgttctccagcttgggcgacaagagcgaaactccwtctcaaaagaaaaaaaaagaaagaaaaagaaaaaaaagaagtaggtgctaacagacatcacaatcgagcctccagtcacatgctcctgtaagttccctga

SEQ ID NO: 7214 - DNA, 201 bp, Homo sapiens
aatatttgttgaatgcctatttatttaggttgtactcactacaacgtctgtttaaaacactgagagtgagcactcaattagcttactgctttctgactcayttcttgggctggtgctcctaagaacttgagatttactttctgttccttccccatattcacagaggaagctgtcttctaatatctttcccagaaggcacag

SEQ ID NO: 7215 - DNA, 201 bp, Homo sapiens
tcacagaggaagctgtcttctaatatctttcccagaaggcacagtgcaatataaaagtgaacatcattattcataagcaggtctttgggagagcaaagaasgctaacaaggttaatgtctcaaaaagaacatctcaaagtaaaataatttggagccctgtttgggacattcttgaggaagaaagaacttctttattcaccc

SEQ ID NO: 7216 - DNA, 201 bp, Homo sapiens
caataaattagtttatttgggatattctggtgtagttaggaaagaaggaaacaaattatttccagtccttatcttttggagattcattctgaaatatttayggataaaaatgttatgatgtctgccatttgcttcaaaacaaggtttagagggtgagagtttgaaacaagattggccataggttggtaattgttgaatctg

SEQ ID NO: 7217 - DNA, 201 bp, Homo sapiens
tatattaaagggctcttgtaaattttaatgtactaaacatatataagctactatcattgtactggataaatacaaattcagcaaacccttagtaaacctgyactttacttgtctgtgactatgggagatactttctgggactgattctaaatactgtgtttgatatacaatattcccccatgggaacctattgttggttgt

SEQ ID NO: 7218 - DNA, 201 bp, Homo sapiens
gttgagtgagccgagatcgtgccattgttctccagcttgggcgacaagagcgaaactccatctcaaaagaaaaaaaaagaaagaaaaagaaaaaaaagaartaggtgctaacagacatcacaatcgagcctccagtcacatgctcctgtaagttccctgaagattttcttgtgtcttctgtagtttgcaacagcccaggaa

SEQ ID NO: 7219 - DNA, 201 bp, Homo sapiens
tggattatgtttaaatatgttttttgtcttatcctacagcacttctgctaatgagaaggaggtggaggtgagtttaaagcaaattttttttccttttaaaraagtgttccagactcacttgctacagtcacttcatgttttggcacaagctctcatatgctcggtgtctgtttggcttggctgtgactcagtgcaggtgaa

SEQ ID NO: 7220 - DNA, 201 bp, Homo sapiens
catgctcctgtaagttccctgaagattttcttgtgtcttctgtagtttgcaacagcccaggaattagtctgttggctgcaccttctgactgatcccaccarttctcaaccttcccattccagatttctgctccactggagaatctcaacagcctggtaactgtactctctgcctctgacccttgtcccttgagcaactccc

SEQ ID NO: 7221 - DNA, 201 bp, Homo sapiens
tagaggcaagacactgcctctcaatgccttgtttccccacttgctgatgactaagaaggcctttcctttcatggagtcatttcccaacatttccagtgagytccagaggtgaataccaaatatatccccatgttcttcaggcctcaccgactagtggcttccatgcagacttttaacctctcgagaaattgtggggccaag

SEQ ID NO: 7222 - DNA, 201 bp, Homo sapiens
tgactaagaaggcctttcctttcatggagtcatttcccaacatttccagtgagttccagaggtgaataccaaatatatccccatgttcttcaggcctcacygactagtggcttccatgcagacttttaacctctcgagaaattgtggggccaagaagttggtttcacgactcatgtctctgcagttcttttggtttgttgt

SEQ ID NO: 7223 - DNA, 201 bp, Homo sapiens
ccaggtagataaatacacatcaaaacacggaatttctatcaccccagaaacttcccttgtgcaacttcccagtcaatgccccgcctccacctctagcaccytaaggaacaaccactggtctgataggttagcttagcctgttctagaactcagttacacagtatgtacttttttgtgtgtttgtcttttttctgtcagcat

SEQ ID NO: 7224 - DNA, 201 bp, Homo sapiens
taccaaatatatccccatgttcttcaggcctcaccgactagtggcttccatgcagacttttaacctctcgagaaattgtggggccaagaagttggtttcasgactcatgtctctgcagttcttttggtttgttgtccacactgtcctatgacaacaaaattgattcttccttctatcttacttcagtctcaactctgaccc

SEQ ID NO: 7225 - DNA, 201 bp, Homo sapiens
catgaaggccagagtatatcttgaaacaagccaatgatttggagatgaatttctctgtttttcttttggctgttaaaaaaattacatataccaaatattamgtgtcttgtctctctttgcgttatccttcatgttattacatgcttttgtctaagatgtactatcactgggaggcggtgatttattaaggccaagaacagg

SEQ ID NO: 7226 - DNA, 201 bp, Homo sapiens
tatctagtagattatctttctcatgatctgtccaggtgtcacagttggtgcgtgctggttatgttctgctgtgggcctggtttgctggtttaaatagaggyggctttagaagctagaagaaaagagcccaaatgtggaaagtttttgccccaaccccttgagggtttcatctccagctttcatgaactgttgtcctaaatt

SEQ ID NO: 7227 - DNA, 201 bp, Homo sapiens
ttttgacaacaggcagaatttctcagattatctttgggatttaagtgtgactggtttaccttggagaagagagtgaagcttgaagagaggtcccgtgactkggcagaagaaaatttgaagaaagaaatcactaactctttaaaactattagaggtgagaatcagaacatttgggatataaacatttggtctagccaggcac

SEQ ID NO: 7228 - DNA, 201 bp, Homo sapiens
agtattaaatggctactaaacataggcaatttctccaaaatcacataattatttgtttaatcaataaatattttgtatttattgaaagacttctaactacratgtttcatatctaacgtatagggcaaaagaaggccttacacagagcattagggcaaatgagactgatatgtaacataatggaggcaaactgtattttta

SEQ ID NO: 7229 - DNA, 201 bp, Homo sapiens
ttatttttatcttggtcatgttaaccatgtttttagaaaggggaaaaagctaactttttttctaaaattaatatctcagtaaaaactcacataattaagakatttggtagactggcattgtcttagtttggaaatgggaagttctagatttcagatttaagttcagcagggatttgaccctttcctcaaatgtagaaggtg

SEQ ID NO: 7230 - DNA, 201 bp, Homo sapiens
tgtaaccaaggcagagcccagtctatacctggaaccattccagtttttaacttttatgtctttcatttgcctcaagaatgaatgacctcattcagaaaacrctgtcagtcatttgcccaccttttaaagtctgtctttttttatttttatcttggtcatgttaaccatgtttttagaaaggggaaaaagctaacttttttt

SEQ ID NO: 7231 - DNA, 201 bp, Homo sapiens
cctttaaaaaaaaaaacaacaacaacaaaataaaacaaaaaaacggtttactttcttcctacactttgaaacctttaacctcaaaattttatttttaaatrccatgagccctcaaagtcagattaaaagaggtgatagttcctcccggcatgcattccccaaatctgtgttgtagaatgtaaatgaagataaaagatggaa

SEQ ID NO: 7232 - DNA, 201 bp, Homo sapiens
gaaaatagttactatgatgcatttaggacaaaaacaaaaatcagaccaggtgcaaaatgaataaggtgaatgatggtaacatagttttgttttgcgcgcgbgtgtgtgtgtgtgtgtgtgtgtgtgtgtgtgtgtttgctggtgccttagttagcaacccagagaaaacagaaagaacacttggttgtgatacccctccat

SEQ ID NO: 7233 - DNA, 201 bp, Homo sapiens
ttaaaatttaaatcacttgagtgtgaaggcataaaacatttttatatttgtgtgagtgccttgtgcttgagcatttctgttaaagactgattttttttttwaatttggttgcttgaataaatctgggctgcaaaggaggagatgttgcatcatgtcctttcctttctcgtgtagacgcctgtgtacattatgcaggtttat

SEQ ID NO: 7234 - DNA, 201 bp, Homo sapiens
tctctactcacaagccgtaatgtatttgggtttcaaagactttgcatagtaggcagcgtgccatgatgctgacaaatttgttatataaaaatactcgcctrtatctcccttggtttttaacctgctaatcggctttaaaataaagtatgttagtaaactgcaagaataaattctgacaattgagggagggctcggagtact

SEQ ID NO: 7235 - DNA, 201 bp, Homo sapiens
gttgagtagctctctctataacatagatattctgtttttgtttagccacagggaaataatttgcaatatataaaagggattcttacttttatccttatgamagaacacagtaactgaaagctctgtgtggtaactatttagtgatccgtacacaaaagtcattgggcctgtactgtttttaatgtatataaatgacctata

SEQ ID NO: 7236 - DNA, 201 bp, Homo sapiens; identical to SEQ ID NO: 929

SEQ ID NO: 7237 - DNA, 201 bp, Homo sapiens; identical to SEQ ID NO: 931

SEQ ID NO: 7238 - DNA, 201 bp, Homo sapiens
atcagctttttcaggagggagcagcttagactaaatctaagcctacatttataatatgttctgattgtgaacaaagggtttcgttccaaaaaatagaaaaraacttttcttgaagcctaggttttagaagcccgtgtgtgtgtgtgcttggatgtgtgtgtgcgtgtatgagtgtgtgtgtgcatgtgtgcacgtgtgaat

SEQ ID NO: 7239 - DNA, 201 bp, Homo sapiens; identical to SEQ ID NO: 922

SEQ ID NO: 7240 - DNA, 201 bp, Homo sapiens
ggcattttaaaaatgagaattggaggaattgctatgatttacccaaaggtaaaatggcatctgtggagagtagatgagtctcctgattcatcgttcaaacrttcagccaaaatctagtcattgtttgaggaagtaaagtccatttagaaaactgagttgctaaagaggtaaaattaggactattaacccatgtgaccaaag

SEQ ID NO: 7241 - DNA, 201 bp, Homo sapiens
aatctacagatagagaacaggaatacagaaatacattaattcattaacagttattatgtataggtagttggactttaaatgagtttttcttattttcatamattttttgtgaatgtttatataaaagaaactattttaaatgaaaatgaagatatccagtagccaggaggcgagaataacaccctctcttaatctagacac

SEQ ID NO: 7242 - DNA, 201 bp, Homo sapiens
aaaatagttactatgatgcatttaggacaaaaacaaaaatcagaccaggtgcaaaatgaataaggtgaatgatggtaacatagttttgttttgcgcgcgcktgtgtgtgtgtgtgtgtgtgtgtgtgtgtgtgtttgctggtgccttagttagcaacccagagaaaacagaaagaacacttggttgtgatacccctccatt

SEQ ID NO: 7243 - DNA, 201 bp, Homo sapiens
tcttagctgtctgctatacttgggtttaaaaatatttatatttctaaataagcaactgattctttgtatagggaaaataacatgcattagagctccagggrgtatgttgcagataccaccttccacgcttcctctgcccagcattttgcgggccgattaatcgctgccttcaaggactcccaaggcagtgactgccctaca

SEQ ID NO: 7244 - DNA, 201 bp, Homo sapiens
ttagtctgtaccaagagtgtcagcctgtccttcggagctttgaagccagttattaacttccccttagctgtgaaagtcctagatggaatcttcttccaataaaagtctgtggggcctacattgaaaatctgttgcttagtggagccagcttcatcccttctcttagctatatcttctggataatctgctgcagcttctacg

SEQ ID NO: 7245 - DNA, 201 bp, Homo sapiens
attgccaggaaagcctgtccagtttgggaattgaatttgccctgagatgactttttgaagcaagttgatttgtgaccattccatgtgcattgttaactaayaaaataggagtgaatcattctgtctgtggtattactcaggttgagccctgcctttgagctgaatccaagtcccacaatcaatcccctccccactcagcca

SEQ ID NO: 7246 - DNA, 201 bp, Homo sapiens
gactcttaaacctcagtatccaaagagagagtagcatttggtcagttgcattttctttttaaatctgggttttccagaacagtattttcagtttgtactctttttttttttggatgtttgtagcatgtttgttgagcacttgctttaggccagccactggactaagttctggggtacatcgacttaaaacaattatagata

SEQ ID NO: 7247 - DNA, 201 bp, Homo sapiens
atgaggaaattcacatctaccttgcatgtaagcaagagtaatgccatcaatatgtctattagaagaaacataataattgtcataactaaaccacaggcagrcagtgaagtgtaagtgcagttccctattagcacattaaaattgatcagttctgtgtgttgttctgtggacaataaaataagatcatttttgctaatatgg

SEQ ID NO: 7248 - DNA, 201 bp, Homo sapiens
tagctggaagtgaggctggagacatgggctgagacgagactgaagagctttactcttgagcaatagggcacactcatatcataatcatatatgagtaatgwtatgtatgctggctgaactggaattgatcttagaagaagaaacaccaggtaggagacttcaagagttgcccatatgtaataggaggacctcaatgaacaa

SEQ ID NO: 7249 - DNA, 201 bp, Homo sapiens
taaaataacaaagaaactaggacagcgtagtttagctatgagatttgttttaggtctgagaagctacacaggacatgggcaatggatacgtaacttaaaawtcaactatgtgttttataagaagtcaagccagtggtgacattccatctttttcctccctctagtttctcccggggactaataagttattttgtttcatct

SEQ ID NO: 7250 - DNA, 201 bp, Homo sapiens
tggccattgtatcataatcttgtgcgtccaggccagagagctccactgatgacagtagacaaggaggtgccagagtccttggcctggagattttcaaggcrtaatcaaaagaaggaaataaaataatgtgactgcctttagaggcgtatgttcccccttagacactatggaatggaaatggtttgtattctaaagcttagt

SEQ ID NO: 7251 - DNA, 201 bp, Homo sapiens
tgcatataggtttctagtctgaattattatgtatctgaacaatccacccttcaagaacatatacggcttcttttgcctgcagaaagagcctggaaggagcygggttctaaatctcaaactcttaagcttgctccttctccctttgttgtgggcctttggggaaatgataataaactgcttctcatctttagaggaaacaag

SEQ ID NO: 7252 - DNA, 201 bp, Homo sapiens
tcatccaaagttggttgtttgaaaatctcatgaggaatattttatgacctaattagattgaagaagctgttaggttataattggtaggtagtaaaacagcraatagtcatttagctcatggaaaaaaaaacccacaactaaactatttggagaagggaggaaagagaggtgcaccccaatatcagcaaagttattaaagta

SEQ ID NO: 7253 - DNA, 201 bp, Homo sapiens; identical to SEQ ID NO: 928

SEQ ID NO: 7254 - DNA, 201 bp, Homo sapiens
tttaaaaagagaaatatatatactatactcatctgtctcttcgataaatgtttttccagggcattgaatgacaccaagcaggtgagcagagaagaaatccwcccaaaagagatcatggagaacagtgttaaaatgccctccatagaggaaaaggaagatgacgaggccattgggatagacttttccctaaagaatgaaaca

SEQ ID NO: 7255 - DNA, 201 bp, Homo sapiens; identical to SEQ ID NO: 932

SEQ ID NO: 7256 - DNA, 201 bp, Homo sapiens; identical to SEQ ID NO: 933

SEQ ID NO: 7257 - DNA, 201 bp, Homo sapiens
tccacattgcaagcagcatgttgggaaaaggttcaagaccttttacttttcctctcccccaacccctttatttatttatttttacttttttttctcttctytttttttaattcaaagaagaaacgctgagatttcccctcctccctcctagatcagatttctccaccgcatgccattgaagcttctcggggttaagatttg

SEQ ID NO: 7258 - DNA, 201 bp, Homo sapiens
tagacgcctgtgtacattatgcaggtttattttctcacctacagggaagggtattctgtggcaacctgttgccatgctgcgatttcctttaaaaaaaaaaacaacaacaacaaaataaaacaaaaaaacggtttactttcttcctacactttgaaacctttaacctcaaaattttatttttaaataccatgagccctcaaa

SEQ ID NO: 7259 - DNA, 201 bp, Homo sapiens
gtgggagggaagaaagggaaggggaattgctgagatgacagtgtcccacacagcttcaaataaaatccatggaaagatgttgcatttgtggaataagtgcktacttgaaaagcatgttcttcttttattttcttactgttaagaatttttatttgtaggatgtttgttttaatttaatttttttaagggatgggggccatc

SEQ ID NO: 7260 - DNA, 201 bp, Homo sapiens
gttttaagctgtagggatacagccatgaagagtcaggcaaggtttctgcactgaaggaatttgaacttgaacgagaagagagactaaaaaacaggtgaataatagttttatgagggtattcctattgagttgatcaccattggaagcacaatgtttcatgcttagctttgcccatgtatatgtatcttgcacatccatagt

SEQ ID NO: 7261 - DNA, 201 bp, Homo sapiens; identical to SEQ ID NO: 923

SEQ ID NO: 7262 - DNA, 201 bp, Homo sapiens; identical to SEQ ID NO: 926

SEQ ID NO: 7263 - DNA, 201 bp, Homo sapiens; identical to SEQ ID NO: 927

SEQ ID NO: 7264 - DNA, 201 bp, Homo sapiens
taagaggttacttgggcctggaagatgggagcagggattgattacaaaggatatgaaggagcttctcagagtgatgagagtgttcttaaacatcattgagwtgtttacttataatagataaattttatggtaggtaaattatacctcaatacctaaaacagatgcaagtttcccataacccaacacacagtaggtcttcaa

SEQ ID NO: 7265 - DNA, 201 bp, Homo sapiens
gaaatataaagacacaggccatggtctgtggccaggggaatttagggtcaagggttggtttatgaaattaaaaaaaaacaaaacaaaacccactgactcakcaaaataaagcacgtctttgaaaatatcagtaaaatactatgatgtgtcaaagaagagaaatgttacatcagctttggaagagtcaggaaggttttatgg

SEQ ID NO: 7266 - DNA, 201 bp, Homo sapiens
atcttctagaatttttatagtttctcctcttagatttaagtccttaatccatcttgagttgatttttgtataaagtgagagatgaggatccagtttcattmtcctacatgtggctagccaattatcccagcaccatttgttgaaaagggtgtcctttccccacttcatgttttgtttgctttgccaaagatcaattggcta

SEQ ID NO: 7267 - DNA, 201 bp, Homo sapiens
gcaactcacagccaccagcaatattcacacaaccaagcttgcattaaaagaaaaaaatgaaaaaatagaataaagagggcagtagtattctatatattgtyatatatatattcatccgtggtgagaggaaggcttaattacagaacttggatgctatactcacttcacatgtgaacccatttagtaattttcatggtggca

SEQ ID NO: 7268 - DNA, 201 bp, Homo sapiens
aaggtaatagggaaaggatgattttttttttaaatggtgctgaaacaattagatttgtgtatgcagattatgacccttgacctttacagcactctctacacacacacacacacacacacacacacacacacacacacacaacaatcaaaatggaccgtaagcttaaatgtgtgagctaaaactataaaactttcagaagaa

SEQ ID NO: 7269 - DNA, 201 bp, Homo sapiens
aggtaatagggaaaggatgattttttttttaaatggtgctgaaacaattagatttgtgtatgcagattatgacccttgacctttacagcactctctacacacacacacacacacacacacacacacacacacacacacaacaatcaaaatggaccgtaagcttaaatgtgtgagctaaaactataaaactttcagaagaat

SEQ ID NO: 7270 - DNA, 201 bp, Homo sapiens
gatacccctccatttataatatagaacttgatatagtcctcccaaaagagaagtctgtgatattgtgaattaatagaaaaatgttgcaaggagcttggcartttccttttgtaccgatttttaaataaatttcaattggtttttctgctctaaactctagaataatatttgacaaacactatttttatcaagacatttctc

SEQ ID NO: 7271 - DNA, 201 bp, Homo sapiens
tgtgtcgtctacgatttctttcagcagtgttttgtagttttccttgtagaggtcttttgcctcctttgttaggtatattcctaagtactttatttttttgyggctattttaaaaggggttgggttcttgatttgattctccactggtcgctgttgatgtatggaagagctactgatctgtgtacattaatcttgtatctgg

SEQ ID NO: 7272 - DNA, 201 bp, Homo sapiens
aaattactcatctttttcaaacaaagctttctataattattcacatgtatcttatttacgtaactacctcagacctttttattacagtgtttaagcctccrggctgatattttcagacagaacaaatcagaaagaagattcttctctagttgttgcacggtagcttgcaaatcactgaggaaatccagaaaatgttagaaa

SEQ ID NO: 7273 - DNA, 201 bp, Homo sapiens
tgaggaaattctatgctattttccgtgagactgtaccattttgcattccaaacagcagcacacaagggttccagtttctccacagccttgccagcacttaytttctttttttgataatcaccatcctaactagggaatccttttcaaaatgccttaagcattttaatttcatttaaaatgtaaatacatgtattcaccagt

SEQ ID NO: 7274 - DNA, 201 bp, Homo sapiens
cccttatcaatcatgaaataaaatccaaacatccatgcacactaagaaattcgcgataacattcctcgtgggtagcagggagaaccagacagtcaaccaayacatccactgtagatgacgtggcaagaagtgctatcaagagaaagaaagccatggtgaagggtagaaaggatgggagttggagtgtcaggtaaggtggtt

SEQ ID NO: 7275 - DNA, 201 bp, Homo sapiens
gcttcatccatgtccctacaaaggacatgaactcatccttttttatggctgcatagtattccatggtgtatatgtgccacattttcttaatccagtctatyattgatggacatttgggttggttccaagtctttgctgttgtgaatagtgccacaataaacatacgtgtgcatgtgtctttatagcagcatgatttgtaat

SEQ ID NO: 7276 - DNA, 201 bp, Homo sapiens
ataccctacacctgaatccagcatcactgggcagcatttctgtggggtgagtttggagtgggtggaggagctatcctaagggaacaacctactgctttaayggtgattaaaaatatagcttaacctagagcgaggattttcttacactgcatggaaataggtgaaaataaaagaaaaaaagggttaagaaacccactgggt

SEQ ID NO: 7277 - DNA, 201 bp, Homo sapiens
ttttttcagtgtggtaaagacatctatatgatctaaacgaacagcaggaaaccttacttcctcatcacacaattcaaaagagtcacaggtgaattatgcaytcggtattgtgagagcttctcaattaacaatggcagatgccacccagagtttcctccaaaaaacattagaaaaaggatccttcaccacacattcatttcc

SEQ ID NO: 7278 - DNA, 201 bp, Homo sapiens
agccactacaagtctttaggcaaaatggatagtctgtatgctacatatctgggatgagtgcatttctaatggaggaaaataggtaaaacagtgtatacagkgaaaatatagttctaaacacctgaaggtaatccatgaataccttctcacagattgcaaagggctctatttgtatggtctcaggtgttgattgtttatcaa

SEQ ID NO: 7279 - DNA, 201 bp, Homo sapiens
aacttctgttgatgttgtgcaaatcaggctcaaactttccaaaagacacacagcagaaagccttttgttgcattatttctaaaggcttgaagttttgaagrgaagagattttgttttcctctctgctacacaatggagctttcagagaacctcctttaaaaggaatagctacagcctttgtgttgaagggtgtgtctgttg

SEQ ID NO: 7280 - DNA, 201 bp, Homo sapiens
gtgagtttcaggagtccatcagacacaaagcttgaatagtctttcagctttagatgaagactcagatgatcacaaagctcattaggtttcccattgcagarttctgtttctggtcactacagattcctggatcactgtcgcatacatgaaaatactgaaactatttttgtcctttgcctaagtttattagcagttgtataa

SEQ ID NO: 7281 - DNA, 201 bp, Homo sapiens
ccatcagacacaaagcttgaatagtctttcagctttagatgaagactcagatgatcacaaagctcattaggtttcccattgcagaattctgtttctggtcwctacagattcctggatcactgtcgcatacatgaaaatactgaaactatttttgtcctttgcctaagtttattagcagttgtataatagaagttgcatggc

SEQ ID NO: 7282 - DNA, 201 bp, Homo sapiens
cagttctgggtatttgcagggcttatcttcacaacatgcttctagaaatgtctcctgtgtggtcccttattttgtttatataagcattttgaaatttcagrtattctttctctttttgagtcttgctttattttttttcataatgcttcaaaatgttagtgttttcttccctattcattttagtgttattttctgtctatt

SEQ ID NO: 7283 - DNA, 201 bp, Homo sapiens
tatgtgtcagggttggttggttggttggttggttggttgggaatgtatggtgatgctaagccatgacctgcttttaaaggtggaccaccttagtctttgcygttggttccattgtagataccactggccatacaggtgttaaagatctaacttgtgtgagccgcagttgggtgcagaacttcccactgaattcacatccat

SEQ ID NO: 7284 - DNA, 201 bp, Homo sapiens
caacattaatctccttgtatatcttcatcagagctctagggtgatgaagttcattgccaatgagtagtaacattttgaaaggaatcttttttatctgagtwgtaagtcccaacagtgagcttcaaatatttagtaaaccatgctgtaaacagatgtgctatcatccaggctttgttgttccatttatagagcacagagtac

SEQ ID NO: 7285 - DNA, 201 bp, Homo sapiens
gactatacatacaagaatataggttgagatatgttactttagttattgcagatttatcagaagcacgtggataacataaacatcagaaatcaacattgcakatattgacccagagatgagaatagtactagttgccattactgagcatcattatgtgctagcctcagtgctggtcgtttttatataacatttttctttaat

SEQ ID NO: 7286 - DNA, 201 bp, Homo sapiens
acacacctttggccacatttttttttggattgctttttatttctgaactaaatgctagcagctttagctttatcaacagcaatgatttctgcaagctgaargcttctctagaagactatgccatttcgtttctgctttccctcatgcagttctgcttcttggtttgttaactatagctctgtctcttccgtgtgttgtaga

SEQ ID NO: 7287 - DNA, 201 bp, Homo sapiens
atgcaacagtgatctcccgagatgtgagtcaactcttcctctgaaatccctcaatgctgtgccctacctctcttaagaacatgtagttcagtctactgacyccataatattaccaggagggagctctttaggagcagggtttttgttatttttttattctgaacaatgaatataaggctgcttccttcctagagtagatgt

SEQ ID NO: 7288 - DNA, 201 bp, Homo sapiens
cccttggtttttaacctgctaatcggctttaaaataaagtatgttagtaaactgcaagaataaattctgacaattgagggagggctcggagtactgatggmtaccactgtattttaccagccttttggtcacttagaagaggtgccaaagatcaaggagaggaaagtggtgggctacaaatgtaaattctgtgtggaagtg

SEQ ID NO: 7289 - DNA, 201 bp, Homo sapiens
tattaagcgtttccttgacaaatggcattggaagacatatcatgctagaaaatgtttatctggtatttttccttctttgaagttatgaggtcaaggacatmatctccattatgtctgattgcctctctttagccaatgttccaactggcaaagtccaataagagaaatctactgatactggaattttttcccattaatgga

SEQ ID NO: 7290 - DNA, 201 bp, Homo sapiens; identical to SEQ ID NO: 921

SEQ ID NO: 7291 - DNA, 201 bp, Homo sapiens
gttttcaggtctaatggactgtgcgaaaggagaagtggggtggggcctcagtgactgctgtaatttgatccagagctgatagcaacctcttccacacaatytgggttggtgcttagacataaaagcttgtgtatctggaatattgagacttagctgaaaagagtctggtgcacagttcaatgtttattgaaaaaggataaa

SEQ ID NO: 7292 - DNA, 201 bp, Homo sapiens; identical to SEQ ID NO: 924

SEQ ID NO: 7293 - DNA, 201 bp, Homo sapiens; identical to SEQ ID NO: 925

SEQ ID NO: 7294 - DNA, 201 bp, Homo sapiens
cattattacaaatgtgtcctaaatgatgggatttgcttgtttttgtcaataaacctgtccatctgattttaaccaggaggaaaaaaaaaattttatgacayggacgcattagctgttccttttgcactgccatttgagaagggcaatgagcctctgtttcttggaatgcttttcccgtgacttcttgcatttttatttctt

SEQ ID NO: 7295 - DNA, 201 bp, Homo sapiens
acagattttggaccaaggaccttgcctcctcagtgatgtgggatctcatcatatctgtcattataattggtcctgatggcttctaccagcttagccaaagygcctttgtcttccaagttaatgtgtgtgaaggcaacagtagtgcagatctccctgtggactagacaccccaatttggccatctccttgataatacaatag

SEQ ID NO: 7296 - DNA, 201 bp, Homo sapiens
tagccaaagcgcctttgtcttccaagttaatgtgtgtgaaggcaacagtagtgcagatctccctgtggactagacaccccaatttggccatctccttgatmatacaataggggactcccttcttaggactcagggcaagcgggaagacagccagctccatgggatccacatcatgtgcagtcaccatcggctgagctttct

SEQ ID NO: 7297 - DNA, 201 bp, Homo sapiens
gtggggaaaattccctagagcctgcacactggccagcaacaaagggaggactctaaagagtgagtcgcatcggtgtacaacgtaccgatgccctggaaacrttgctattcagtgactctgggaataaatcatgctttcttgacttaataatacattgctgtttctaaataatataagtatatgttgtgtgcgtccatttgt

SEQ ID NO: 7298 - DNA, 201 bp, Homo sapiens
tgtagtctctccctcctctccccctcccctttacttccctctcccttccttcactccctgcattctctgtcccccaacattctaccccccaacacacatartgaattatttatcagtaatgccctttattagcaatactgttgaaagatgaagacaacattttttcttttttgagtcagggtcttgctctgttgcccaggc

SEQ ID NO: 7299 - DNA, 201 bp, Homo sapiens
ggatcgtggcaaagaaggttgtattgtgtctcactgctagtggtcggcatgcttgcagaacttcttcacctgcagaagtatttgaaacttgggttgttatragagttacacctttgaattcaactacaaaaaaaatgtgttttggatatttactctatactctagccttcattttacttttggtctcctgcgtactatagc

SEQ ID NO: 7300 - DNA, 201 bp, Homo sapiens
aataaaatagacattaataataaagtgtgataaatggtgtacagagcagaggcaacaaattcagccttggatgttaggaaatactcctagaaatgacatcycctttttctccatacatgatatatctgcaggaaacctctgattaattttgaaattttgatatttatgttcactggggtaaaagttcttacttccaattat

SEQ ID NO: 7301 - DNA, 201 bp, Homo sapiens
gatttatttgtagatctcttatattttaataacatttaaattgcattttaatatgtaattgttaattgttaattattgcaatagacatacaatatatgtckgtttactcttgctcattaccttataaaaagttacacaaatttgaaaattacataagtgttctttttatgcacttctttttatggattttatgcacaatca

SEQ ID NO: 7302 - DNA, 201 bp, Homo sapiens
agacagtttgctgtaacaagaattttcaattctctaatgacttttttctctgctatgaaaagaaaaagcttctatattaaaatgatgtacacgggcaaaasgaaatttatgatctaaacttgctgcaaatcatttgtattgatctgttttgtttccattctgctgaagctaatggaaatcatttgtcacctgacttgtccc

SEQ ID NO: 7303 - DNA, 201 bp, Homo sapiens
catccagcaagacactaagaacgactacccagaaagcactgctgtacctgtgtggtggagatgactgaagcccaacatagcttgagcttccagaaacggtrctccccacgcttccagctaacaggtctagaaaaccagcttgtggctaacagtccctgtggccgtccctgtgaagatgacattagcattgcccccaacctc

SEQ ID NO: 7304 - DNA, 201 bp, Homo sapiens
taaatcagagacagtttgctgtaacaagaattttcaattctctaatgacttttttctctgctatgaaaagaaaaagcttctatattaaaatgatgtacacrggcaaaaggaaatttatgatctaaacttgctgcaaatcatttgtattgatctgttttgtttccattctgctgaagctaatggaaatcatttgtcacctga

SEQ ID NO: 7305 - DNA, 201 bp, Homo sapiens
aaaaagcttactttatagacttcagcattttatggttggtacacagcttacacataaaattaattttctggaacgttgctcattaacatttttattgtttkccatattttaaaataatatcgttatgtaccactggataaaactaatagtgcattaaaatggtctcaccttaaatcagagacagtttgctgtaacaagaat

SEQ ID NO: 7306 - DNA, 201 bp, Homo sapiens
cagtgaagtggacatgttgaaaattaggtctgaattcaagagaaagtatggcatgtccccgtactattacatccagcaagacactaagaacgactacccaraaagcactgctgtacctgtgtggtggagatgactgaagcccaacatagcttgagcttccagaaacggtgctccccacgcttccagctaacaggtctagaa

SEQ ID NO: 7307 - DNA, 201 bp, Homo sapiens; identical to SEQ ID NO: 948

SEQ ID NO: 7308 - DNA, 201 bp, Homo sapiens; identical to SEQ ID NO: 949

SEQ ID NO: 7309 - DNA, 201 bp, Homo sapiens
tttaaattactagataatatcacactgttttccaaagcgatagcatgaatttatatcccctaaaagaaatagtatgagtttttctacgttcatacaaacamtgggaatttaattttatcttcttttttgggtgcaatttattgaaactttaatattcttttccttgatgactaatgaaattgaacaactttttttcaattg

SEQ ID NO: 7310 - DNA, 201 bp, Homo sapiens
aatagacattaataataaagtgtgataaatggtgtacagagcagaggcaacaaattcagccttggatgttaggaaatactcctagaaatgacatccccttwttctccatacatgatatatctgcaggaaacctctgattaattttgaaattttgatatttatgttcactggggtaaaagttcttacttccaattattatta

SEQ ID NO: 7311 - DNA, 201 bp, Homo sapiens
tcatttgtcacctgacttgtcccagctgatttgaaaaaaacactggaccatttatcaggccagctgaaggtctgatacaagtgtgcttatgtctgcaatcrccaagatacattgagtttctaggcaagtagtgaatatattaggctatattggtcataggcttaaacaaataaattaaatatgaatgcatacataatgcat

SEQ ID NO: 7312 - DNA, 201 bp, Homo sapiens; identical to SEQ ID NO: 955

SEQ ID NO: 7313 - DNA, 201 bp, Homo sapiens; identical to SEQ ID NO: 951

SEQ ID NO: 7314 - DNA, 201 bp, Homo sapiens
tacccctttatattccaacccaccgccatccctaaaccttagcaacactaatttgttctccatctctgtaactttatttcaagagccttatgtaaatgtartcatgcttttttctatatcacgtaacctttcaagattggcttttttcattcatccaagttattgtgtgtatcattactttttcaaccatccaagttattg

SEQ ID NO: 7315 - DNA, 201 bp, Homo sapiens
gggaaaatttgcaaaaaattataagcccccaaagacaaaaagaatggggccgggcgtggtggctcactcccgtagtcccagctatttggggggctgaggcrgaaggacagcttgagcccagatgttccggttgcagtgagccgagatcacgccactgcactcccacctgggtgacaaaatgagaccctatctccaaaagaa

SEQ ID NO: 7316 - DNA, 201 bp, Homo sapiens
gacggggcggctggccgggcgggggctgaccccccacctccctcccggacggggtggctgccaggcagagacgctcctcacctcctagacggggtcacggscgggcagaggcgctccccacatctcagacgatgggcggccgggcagagacgctcctcacttcctagacgggatggcggccgggaagaggtgctcctcact

SEQ ID NO: 7317 - DNA, 201 bp, Homo sapiens
attcattcttagatgaggatatagtcctttggggttctgactttatggtaaggactttctattagatttccaaccttgggtaagccctgggctttatttcstgtgccacagtggtagcctgtgaggctgctacgctcatattaaactttatagcaaataccctcagagcaaaatagtctttgggactcagcaacttccctg

SEQ ID NO: 7318 - DNA, 201 bp, Homo sapiens
gagactgtctcaaaaaaaaaaaaaaaaagaaagaaagaaagaaaaagaaaagaaaaaagaatgggaggaaatatttctggcagcatgaatgcctatttatycccaccaactttcccctgaaaaaaaacttaaaatcattgaatggtgactcacgcctataatcccagcattttgggaggccaaagcaggaggatcacttga

SEQ ID NO: 7319 - DNA, 201 bp, Homo sapiens
ctcacatcccagatgatgggcggccaggcggagacgctcctcacttctcagacagggtggctgccgggcggaggggctcctcacttctcagatggggcagstgccgggcggaggggctcctcacttctcagacggggcagccaggcagagacgctcctcacctcctagacggggtcacggccaggcagaggcgctccccaa

SEQ ID NO: 7320 - DNA, 201 bp, Homo sapiens
gaatcgcttgaagccgggagccgacggttgcagtgagccgagatcacgccactgcactccagcctgggcaacagagcaagaccctgtttcaaaaaaaaaaagaaaaaaggttgcaaattatctgtgacaaatgctttccttaccacttagcatttttgttttacatgtattgaaaatatgggtttatatacataccgattt

SEQ ID NO: 7321 - DNA, 201 bp, Homo sapiens; identical to SEQ ID NO: 952

SEQ ID NO: 7322 - DNA, 201 bp, Homo sapiens
tgaatgagatttttgctccggaaatactttacctataacaacaccattaaatccaaatctcttctaaacaatggcattccgtgtaatgcctttcctggacwtttttttttttttttttttttagacggagctcaggctggagtgcagtggtgcaatcttggctcactgcaacctccgcctccctggttcaagtgattctcc

SEQ ID NO: 7323 - DNA, 201 bp, Homo sapiens
aaaacagccaggcatggtggcgggcgcctgtaatcccagctactcgtgaggctgagataagagaatcgcttgaagccgggagccgacggttgcagtgagcygagatcacgccactgcactccagcctgggcaacagagcaagaccctgtttcaaaaaaaaaaagaaaaaaggttgcaaattatctgtgacaaatgctttcc

SEQ ID NO: 7324 - DNA, 201 bp, Homo sapiens; identical to SEQ ID NO: 960

SEQ ID NO: 7325 - DNA, 201 bp, Homo sapiens
aggttcaagcgattctcctgcctcagccgaccaagtagctgggactacaggcgtgcgccaccacgcccagctaattttttgtatttttagtagagacgggktttcaccgtgttggccaggatagtctggatctcttgacctcgtgattcgactgccttggcctcccaaagtgctgggattacaggcgtgaaccaccatgcc

SEQ ID NO: 7326 - DNA, 201 bp, Homo sapiens
ctcagcaacttccctggttactggctttcacttagtttttcgtgtttaaatagtctttactctcaggccaactcataaatagattttatctatagaagaayaaagaagaataaaataggaggaataactatctcatgcttactactatatagttgcagtaatcaagacagtgtggtattggtgggaggacagacacataga

SEQ ID NO: 7327 - DNA, 201 bp, Homo sapiens; identical to SEQ ID NO: 954

SEQ ID NO: 7328 - DNA, 201 bp, Homo sapiens
ttagtagagacggggtttcaccatattggccaggctgatctcgaactcctgacctcagatgatctgccagcctcagcctcccaaagtgcgggattacaggmgcgagtcttgtatttcttttaaaatcaatctcacacacacccttttttctccctctccctcacatatcctgttttctctttttagacatcggactattaa

SEQ ID NO: 7329 - DNA, 201 bp, Homo sapiens
acagggaggttcccctaaacccctttacccagttcccccaacagtaacatcttgtataaatacagtttaaaattattaaaatattaaaaccaggaaattawcattagcaaaatccagagtttattcaaatttcaccgattttccaaactggcatgtaccaccaaacacttctttttgtgttcgtgtgtgtttgagtggttt

SEQ ID NO: 7330 - DNA, 201 bp, Homo sapiens
ctttgggaggccaaggcaggcggctgggaggtggaggttgtagctagccgagatcatgccactgcactccagcctgggcaacattgagcactgagtgaacragacttggtctgcaatcccggcacctcgcgaggccttctgagtagctggtactacgggcgcctgccaccatgcctggctaatttttgtatttttagtaga

SEQ ID NO: 7331 - DNA, 201 bp, Homo sapiens
tcaaaaaaacggggttgagggggtggcattttttaaactttttttttttttttttgagacggagtctccctctgtcgcccacgctggagtgcagtggcgcwatctcggttcactgcaagccccacctcctgggttcacgccattctcctgcctcagcctcctgagtagctgggactacaggcacccgccaccacgcccggc

SEQ ID NO: 7332 - DNA, 201 bp, Homo sapiens
tcttgtatttcttttaaaatcaatctcacacacacccttttttctccctctccctcacatatcctgttttctctttttagacatcggactattaattagayattggactatttggcttaattttctaattatctttcttatttcctgtctccatctctgctggttcttgttcttggtgccttgttccttatttgtttggaa

SEQ ID NO: 7333 - DNA, 201 bp, Homo sapiens
caccgggccttctgtattttttaggccactgccctggactagtggaagaatggactctagtctttatctgcaagaggaactaaggccttctatcagactgyccggccagcctggggcactgaaaatacagctcattttaatgagttacattatcaaccagctttgcccagcatttaagaaatatcacagggccactaaatc

SEQ ID NO: 7334 - DNA, 201 bp, Homo sapiens
aacccaccgccatccctaaaccttagcaacactaatttgttctccatctctgtaactttatttcaagagccttatgtaaatgtagtcatgcttttttctayatcacgtaacctttcaagattggcttttttcattcatccaagttattgtgtgtatcattactttttcaaccatccaagttattgtgtgtatcattagttt

SEQ ID NO: 7335 - DNA, 201 bp, Homo sapiens
ggtgatgactcttaaggagcatgctgccttcaagcatctgtttaacaaagcacatcttgcaccgcccttaatccatttaaccctgagtggacacagcacakgccgcagagagcacagggctgggggcaaggtcacagctcaacagcatcccaaggcagaagaacccctcccagtacagaacaaaatgaagtctcccaagtc

SEQ ID NO: 7336 - DNA, 201 bp, Homo sapiens
aaaagggaaatagaaaacaataacatggtaactatccctaaaacttcacagagactgattgttaatgattcacttttttgactcagtcttggatgtccackaatttccacgcaatgtagtcctctgtgcatttcataagggctttggtgatgcagcatttcctaagagtgttcctctccaggctctagagttttcttccaa

SEQ ID NO: 7337 - DNA, 201 bp, Homo sapiens
cccaaagtgctgggattacaggcgtgagccaccgcgcccggccttaaactttttattttaaagtaattatagattcatataaggtggccaaaaaaaaaaaatacaatacagggaggttcccctaaacccctttacccagttcccccaacagtaacatcttgtataaatacagtttaaaattattaaaatattaaaaccagg

SEQ ID NO: 7338 - DNA, 201 bp, Homo sapiens; identical to SEQ ID NO: 953

SEQ ID NO: 7339 - DNA, 201 bp, Homo sapiens
gacatttcattcatcaactcattcattcatccaacaagcatttgttaatcactgacaaccaggaactctactagatcagccactaagttcatcaaggaagstgtggcacggcttgccttctgctggaataccaggtcctagctgaaggtgaccaaagaccatggtgttgctgttaagagaaatagcaaagtcaggagaaag

SEQ ID NO: 7340 - DNA, 201 bp, Homo sapiens
gtcaaccacttctcccctcattaccaaacacatgaagcaggtattgatgaacatggtggaatggatccaacttgccctgcaacaatcactttggagtcacytctaaggaaattctcaagccacacagggtgctgactccttaagagctggtaccgtacactaggaactaagaaagacaccagagtggtaagagggtgccct

SEQ ID NO: 7341 - DNA, 201 bp, Homo sapiens
gtgaccaaagaccatggtgttgctgttaagagaaatagcaaagtcaggagaaagaactagtttgggcatctaagaacaaataattccgaatctagtttgayggtacagcagggcaggcagatggaactatccagcaggcaggagaaaatgtaggacttgacctggagagggagatcaagacagaaggttgagatgtggata

SEQ ID NO: 7342 - DNA, 201 bp, Homo sapiens
tggtgttgctgttaagagaaatagcaaagtcaggagaaagaactagtttgggcatctaagaacaaataattccgaatctagtttgatggtacagcagggcrggcagatggaactatccagcaggcaggagaaaatgtaggacttgacctggagagggagatcaagacagaaggttgagatgtggatacctctgtgcacagg

SEQ ID NO: 7343 - DNA, 201 bp, Homo sapiens
agagtgaaactccgtctcaaaaaaaaaaaaaaaaaaacggaaagggctctttcctctccagaatttcagttcattagtcctcattgatggcacaactctgmggtgtcttaaaaaggtgatttctgtaacttactctgttttttctagttgcttcagcaggagtgttggattgttcctacatatacatcctatccagaagag

SEQ ID NO: 7344 - DNA, 201 bp, Homo sapiens
caagctatctgccagcctatatgtatgtcctctgtgttcatgtttgttctcatgtgtaaccacctctagctcctacctttttttgggttgctgaatccagmcattgcagatggattttcaaatggatacatggcctttgaagtcacctagttctacttcccaccaatgaggggatttctgtggaaaacacctctacatgtc

SEQ ID NO: 7345 - DNA, 201 bp, Homo sapiens
cttggtttggacactttcggtgatggggagcttctacagcatgtagcagctcatccattttcagaaagccttaattgaagttcagtcccaagactgaattrtaatccacttccctgtcatttgcaccaactgatctctctggaacaactcaggagattattgtttcttctatgtctgtgcttcagctatccaatgtcccaa

SEQ ID NO: 7346 - DNA, 201 bp, Homo sapiens
tatctgagagctccaaagagagagggatgttccgaggatgagaatttccgaaacttaattccttccttgcctaaatctttgctgttcatcttttccttcarttatgtgacacactccatacccttcaaaaaacacggctttttgctcattcgagctaacttaagtcagtttctgttgtctgcatccacacacagatgaaaa

SEQ ID NO: 7347 - DNA, 201 bp, Homo sapiens
ggatgagaatttccgaaacttaattccttccttgcctaaatctttgctgttcatcttttccttcagttatgtgacacactccatacccttcaaaaaacacrgctttttgctcattcgagctaacttaagtcagtttctgttgtctgcatccacacacagatgaaaaacccttaactgaaattactgttcaatggtgctctg

SEQ ID NO: 7348 - DNA, 201 bp, Homo sapiens
tattttttgagcaccttttataccaggaattgtgttaagtgctttacataaatcattttattgaatcaaatcctcataaacaactctgggtttgttaggaygcttttgactccatgtaagagaaatcccaaataaaaatagcttaaacgtgaggaaatgagttattttctatgtaataataagtccctaccaggggtagct

SEQ ID NO: 7349 - DNA, 201 bp, Homo sapiens
gacagtatttagcagagggacgatctcttccttgtatcttttttaagtacaagaaaagctttccaagaagcctctagttgatcacccctctcatctcagtrgccagaactgggtcatacatgcatgcttaatccaaccattgacccaaaagtggtattattgcaatgggcctacaccaagcataattcacccctgagttga

SEQ ID NO: 7350 - DNA, 201 bp, Homo sapiens
cccactggctcactcaagtctcctcaaatacagtggtgaggaaacttaaaagaagctcaattcggcaaacagcaggcttcagtcttagatatctggctttyggagtgggcatcataagtgaacaaatatcctttctgtgtccttccacatctcctcttattggtattgccacctttggggaattctttctacccaatttca

SEQ ID NO: 7351 - DNA, 201 bp, Homo sapiens
ggaaagagaggaacagctgaacagtgctttgttctgccaggaagaatttgctcatcctttcccataactcctacccactccccaatatgcccaatctcttycgaaaagtatacagaaactctccaactacaacaaatgaaagcaggtaggagaaggaaaaggccaacaaggcgggtatcgtccacaagatgacaataccct

SEQ ID NO: 7352 - DNA, 201 bp, Homo sapiens
catctggaaacaagatctacaatctatccccccgagttcccaccccagctccacatcttgctagttgtgcaaccttggaaaaatggccaaacctcccaacycctcaaattcctcagtttggcgggggagggggaggaacatggcaatcacagaggtcttttataactctcatcttctagataggtaaacgttcacctgtat

SEQ ID NO: 7353 - DNA, 201 bp, Homo sapiens
gcatggggatgcagaattcgacagcacattcccccatgaaggaaacataatgacttcaagcctctttcccctctatcttgaatggcgctaccacgtatcarggaagccacatcggaaagcagcgaggtggtagcaggggatgcccggggaattcggagaaaggagttgcttgctgtccatgtcggtgatgagctgcctagc

SEQ ID NO: 7354 - DNA, 201 bp, Homo sapiens
taataaaaaggtaatttgcagagccaggtattaatatataattcaatgtcatttttgagaagttaaaagctctaatgccagaagcagtggctcacatctgyagtcccagcacttttcaaggccaaggcctatggatcgcttgagcccaggagtttgagatcagcctgggcaacatggcaaaactctgtctctaccaaaata

SEQ ID NO: 7355 - DNA, 201 bp, Homo sapiens
gaaaggagttgcttgctgtccatgtcggtgatgagctgcctagcaagatgctgtcagccactcggggagaagaaggggcacgggcggcacgggcaggcgcsgtgtccccggcgcatactagtccccgttcattcaggcgggtccggccaaccgcgtcgtccttgcgcccctcccgccgccctctccaggggatgctgatga

SEQ ID NO: 7356 - DNA, 201 bp, Homo sapiens
tcggcagtcaaggacattgtcaaccacttctcccctcattaccaaacacatgaagcaggtattgatgaacatggtggaatggatccaacttgccctgcaayaatcactttggagtcacctctaaggaaattctcaagccacacagggtgctgactccttaagagctggtaccgtacactaggaactaagaaagacaccaga

SEQ ID NO: 7357 - DNA, 201 bp, Homo sapiens
cacatgaaaaggacacatagtagacccccatgcatccattacccagccccaagaatcatccctcaagcccagtctagcttttctatgctcccatcagctgmcctctaaatatcccaaagaccattttgaagcaagtgccgaaattatataatttcacctacaaatatttcagtatgtcactctgagataagtaatatgtaa

SEQ ID NO: 7358 - DNA, 201 bp, Homo sapiens
caatcccattagaactattcttatgggattgcaagtaattatttttgctcatccatagtcttctgatttttttcttcataaacatctaccaacttgtccartgaaaataaaataattttaagatgaaaaaccagactctatcaatgaagatttcatctacactatctcaaggaatcttaagggaggcctaaggcttcaggt

SEQ ID NO: 7359 - DNA, 201 bp, Homo sapiens
aggctggaatgcaatggcgcaatctcggctcactgcagccttgatcttctgggctcaagggatcctcctgcctcaccctcccaagtagctgggactacagrcatgggccactgtggccagctaattttgtgtatttttggtagagacagagtttcaccattttgccaggctggtctcaaactcctggactcaagcgatctg

SEQ ID NO: 7360 - DNA, 201 bp, Homo sapiens
aggctggtctcaaactcctggactcaagcgatctgcccccctcagcctccccaagtgctgggattacaggcgtgagccaccacacctggccagtccttcartgttttaacactgaaagcaacccaagaaatcatcaggtgtaatcgtgtcagttcatcctatctccagtcattcatagattcatctgggcagcaggccctg

SEQ ID NO: 7361 - DNA, 201 bp, Homo sapiens
ggagtgttggattgttcctacatatacatcctatccagaagaggaagccctctgaaaccctttcaacatttaaccatagtgaggtcatccagatatatacrgctgaatcaacccagagcataccatggcccctgctccacacctctactacagtgaggacaggtggcccaaacagactagagtctttttgcagcgaaactg

SEQ ID NO: 7362 - DNA, 201 bp, Homo sapiens
tgtaactactttcctgccgaccctctcttccccactccctgctcttcagttagggtagtgtagtttggggaggcacataaaaatgcctggagatcctaagytggaaaagtaaggtgtgaggaaggtaacctggtcaccctggcaaaaaagagagcttgactgagtcagtccctatcccaagactgggtggatccagtcacc

SEQ ID NO: 7363 - DNA, 201 bp, Homo sapiens
tggtcgccgggcgggcgggctgcgcgcgtccgccccactcgcactacacgctgcagctggccccgctctgtttttctgggactcagcgctgacttcaccgrcactccgcggacaaccaatgggctgcggtgcccgccccctcattagcatgcctctggaaccgtccactctggcagcgcccggccagcgggcggtgccggg

SEQ ID NO: 7364 - DNA, 201 bp, Homo sapiens
gctgacttcaccgacactccgcggacaaccaatgggctgcggtgcccgccccctcattagcatgcctctggaaccgtccactctggcagcgcccggccagygggcggtgccgggggcggggccgggcccagccgtgacaggaaggggcgtgtgcgcggatgggaggcgaagaagtgtccggcgcccggctcctggcattgt

SEQ ID NO: 7365 - DNA, 201 bp, Homo sapiens
caaagggagtgagggcaactggactttgtagatgggagaatgggacagacatacctatctcctcccttaggccaaaagaaccaaggacttcttcatttgaycttgaaggagaagtagagcagaaacagagagcatgctagaaccaggtttccagaacctgttgcagcccaagctgcctcctccagagaagaagtgttattc

SEQ ID NO: 7366 - DNA, 201 bp, Homo sapiens
ttcaccatgttggccaggctagtctcagattcctgaccttgtgatctgcccgcttcagtctcccaaagtgctgggattataggcatgagccaccgcgccckgcccatcctcagctactttttgtattatttttctttttgtagagacagggtctcaccatattgcccaggctagtctcaaactcctgggctcaagcaatcc

SEQ ID NO: 7367 - DNA, 201 bp, Homo sapiens
tcaccgacactccgcggacaaccaatgggctgcggtgcccgccccctcattagcatgcctctggaaccgtccactctggcagcgcccggccagcgggcggkgccgggggcggggccgggcccagccgtgacaggaaggggcgtgtgcgcggatgggaggcgaagaagtgtccggcgcccggctcctggcattgtgagcccg

SEQ ID NO: 7368 - DNA, 201 bp, Homo sapiens; identical to SEQ ID NO: 962

SEQ ID NO: 7369 - DNA, 201 bp, Homo sapiens
gaaggaatgtaagctgggttctgaaagatgggaaggtttggagaacagatggaaatggcaacatcagttcaaactaagagaatggcctgagcgtagccacrgagatggtcaagtgaaagatgtgtgagaatagaaacagggtcaggaatgtgagtaattttagtcacacgctagagatattaattggggctggagtgcagt

SEQ ID NO: 7370 - DNA, 201 bp, Homo sapiens
gctcccaccaccacgcccggctaattttttttgtatttttagtagagacaggggtttcactgtgttagccaggatggtcttgatctcctgacctcatgatscaaccgccttggcctcccaaagtgctgggattacaggcgtgagccactctgcccggccacccaggtaattttttaacttcttttttttttttgagacagg

SEQ ID NO: 7371 - DNA, 201 bp, Homo sapiens
acctttggggaattctttctacccaatttcatttatttggttctgatagggacttccagtgacagtaccaagacatcaagtcccagctattcaggaggccraggcaggatgatcacttgagcccaggagtttgagaccagcgtgggcaacacagtaaaatctcatctcaggccaggcgcggtggctcatgcctgtaatccc

SEQ ID NO: 7372 - DNA, 201 bp, Homo sapiens
gccagcatggagaaaccctatctctactaaaaatacaaaaattagctgggtgtggcagcatgtgcctgtaatccaagctacttgggaggctgaggcacgaraatcacttgaacctgggaggtggaggttgcagtgagtcgagatcacaccactgcactgcagcctgggcaactgagtgagactctgccttataaataaata

SEQ ID NO: 7373 - DNA, 201 bp, Homo sapiens
aaaggagctttgattgtttctataatttgttttttgggtttttttttttttttgaaacaaggtctggctctatctctcaggctggagtacagtagcatgamcttggctcactgcaacctctgcctgctagtctcaagccatcctcccacctcagcttcctgagtagctggggttacaggcatgcaccaccacgccaggtta

SEQ ID NO: 7374 - DNA, 201 bp, Homo sapiens
aacaatattatacattgtttatgttgacttacatgtaaaaagtatagaggcctgcacagtggctcacgcctgtaatcctagcactttggaaagccaaggcrggcggatcatgaggtcaggagatcgagaccatcctgactaacacagtgaaaccctgtctctactaaaaatacaaaaatattagccgggcgtggtggcggg

SEQ ID NO: 7375 - DNA, 201 bp, Homo sapiens
catttggggttgtttctactttttggctgctatgaataatgctgctatgaacatttatgtacaagtttttgtatgaacatatgttttcaagtttcttgtgwgtatacctaggagtagagttgttggctcatatgcgaactctatgtttaagttttggaagaactgccagactgttttccaaagcagctgcaccattttaca

SEQ ID NO: 7376 - DNA, 201 bp, Homo sapiens
ataaacactggctctggctggcacactggtgcgcgcctgtaatcccagtgctttgggaggctgagttgggaggtcacttgatcctaggagtttgaggttayagtgagctatgattgcaccactgcactccagcctggataacagagcaagatgctgtatctaaaaggtaataaaaataaaaacacttgctccagtgtgtct

SEQ ID NO: 7377 - DNA, 201 bp, Homo sapiens
ccttgaagtctccagagaaggggggatataaggctactggaaatacctttctagatatgtgtcacctgtatgacatgtttgacattaagtgtgagttctcrgcagtcaaggacattgtcaaccacttctcccctcattaccaaacacatgaagcaggtattgatgaacatggtggaatggatccaacttgccctgcaacaa

SEQ ID NO: 7378 - DNA, 201 bp, Homo sapiens
cttgaaccagggaggcggatattacagtgagccaagatcgcgccactgcactccagcctggtgacagagctagactccgctcaaaaaaaaaaaaaaaaaamaaaacaaaacaaaaacactatttttcagcaaagaaaaggggaggaacccattcggtagttaaccaacagtgtctgctgcaaaccttcgagatacacatga

SEQ ID NO: 7379 - DNA, 201 bp, Homo sapiens
ggctactggaaatacctttctagatatgtgtcacctgtatgacatgtttgacattaagtgtgagttctcggcagtcaaggacattgtcaaccacttctccyctcattaccaaacacatgaagcaggtattgatgaacatggtggaatggatccaacttgccctgcaacaatcactttggagtcacctctaaggaaattctc

SEQ ID NO: 7380 - DNA, 201 bp, Homo sapiens
caaactcctggactcaagcgatctgcccccctcagcctccccaagtgctgggattacaggcgtgagccaccacacctggccagtccttcagtgttttaacrctgaaagcaacccaagaaatcatcaggtgtaatcgtgtcagttcatcctatctccagtcattcatagattcatctgggcagcaggccctgagctaggtgc

SEQ ID NO: 7381 - DNA, 201 bp, Homo sapiens
actgatcggaaactcatcagcaaagattcttagatgtcagggaacggtgacaagtctttggtgaccacctggtgtcctctgctgtgtattaaaaaaaaaaagaagagtcctagccatctggaagcttactctataaatgagaaaacactggggaactactcaacctagggagcccccagcccacggccttcccctatctgc

SEQ ID NO: 7382 - DNA, 201 bp, Homo sapiens
cagcagtccttccgctgttggagagaatttaaaatatcaggcggagagtcatgcacacaaaccaggatcataaacatgctgtgggacgcatccccaagcakgtcataagtgtgaggaattaggaaaggagggagcaggatttttcagaggacagcccagagtcgtcagcctttacttcatcttcagagccacacagattgg

SEQ ID NO: 7383 - DNA, 201 bp, Homo sapiens
tcagccaggaaacgcagaaaaaggccttctggtgagggaaccagtcctggtggggggtgcaggggggcctggcctttggggacgtggagtagggaatgacygggcatctggtggtttggcagagccagcaggaaagcatggaggggtggttctcagcaccagcaggtttgatgcctaccctatccccggcttctccagttg

SEQ ID NO: 7384 - DNA, 201 bp, Homo sapiens
agatcgtgcatggatagtgcctacacactgcctgacacacataagcatcaataagtgaatattattttaacattactaggaggcagtgttgagaaagacamcttcttagaacacgttggttttggtaagttgttttcccagttacccgaaatattgaccatagtcattttcagagatgccgtgctggagaatgccaggaga

SEQ ID NO: 7385 - DNA, 201 bp, Homo sapiens
atcaataagtgaatattattttaacattactaggaggcagtgttgagaaagacaacttcttagaacacgttggttttggtaagttgttttcccagttaccygaaatattgaccatagtcattttcagagatgccgtgctggagaatgccaggagaaaagaagaaaaccaaatgagagaaagagagttatgaatcaaagagt

SEQ ID NO: 7386 - DNA, 201 bp, Homo sapiens
tgagcaagtgttttatttaaaaagagccccaggcagaaactggtaagaaagtagggaaagctggacagggaagtggaatacatcaggcaaggaaaagtctrgaagcctggatttcaggcccagacccagcctcagcctgattcctcaggaaaactgcagaataaattgcagccagaacttgttcctcctaaacataatggg

SEQ ID NO: 7387 - DNA, 201 bp, Homo sapiens
taagagttaaataagacaagaaatgcaaaccacttttagcagagtgcctgccacagctttaaggactcagagcttctgcaaactttacctctaacctaaayggctctccatgcccctataagctccatttttcccagtcaaatcttcctgttggccgggtgcggtggctcacgcctgtaatcccagcactttgggaggctg

SEQ ID NO: 7388 - DNA, 201 bp, Homo sapiens
gctggaatgagggaggtgacgatgaggaatggaaaggaagagacatttcattcatcaactcattcattcatccaacaagcatttgttaatcactgacaacmaggaactctactagatcagccactaagttcatcaaggaaggtgtggcacggcttgccttctgctggaataccaggtcctagctgaaggtgaccaaagacc

SEQ ID NO: 7389 - DNA, 201 bp, Homo sapiens
ttcatcagatgtttggcttccctgtatagcaacatgactctactgaaatttcatctggtgaaacactgaccttgttaagataatgttagattcaaattgcrtcctctaagggctagccacatctttcatcttgcaaattccatgtagtaccacgagttacaactgttctgaaaacagacatcacttgttaaattggttatt

SEQ ID NO: 7390 - DNA, 201 bp, Homo sapiens
caatttccacacagacctccctgaagaaggaggggcctgggaagcccactttgtcatgtactatcaataaagttccctgtactcaaaaaattaattaactrattaatcaaaatgtattgaatactaacattatgctaaggagagtcaattcctgcttgtttttaaaaatataattcttcatcattcaacttgaaattactg

SEQ ID NO: 7391 - DNA, 201 bp, Homo sapiens
gcactcccgtgttcattgcagtactattcacaatagccaagatatggaatcaacttaagtgcccatcaatggattaatggataaagaaaatgtaacatatrtaaacaatggaataccattagccttaaaaaaaaaaggaaatcctgttttttttttttttttctgtgacaactggatgaacctggaggacattatgttaag

SEQ ID NO: 7392 - DNA, 201 bp, Homo sapiens; identical to SEQ ID NO: 965

SEQ ID NO: 7393 - DNA, 201 bp, Homo sapiens
gaaaggcatgtagaaaatgtatacaattactctctgctcctcccgtaagacagacagctgcatcttgtcatgcagcaccagctgtatccctgagacaccayggtgaaggtgaagaccaaagtaaatggatttggccatgttgggtgtctggtcaccagggctgcttttaactttggcaaagtggatactgtcaccatcaat

SEQ ID NO: 7394 - DNA, 201 bp, Homo sapiens
tgaggtctcgctctctcacccaggctagactggaactcctgggctcaagtgatgctcctaccttggtcttccagttagctggggctacaggtgtgctaccrctcctgaatccttttctttattctttatgcacaatttcttattcatcagatgtttggcttccctgtatagcaacatgactctactgaaatttcatctggt

SEQ ID NO: 7395 - DNA, 201 bp, Homo sapiens
atgaaaaatttcaaacatacagaagagttaaaagaatttatacaccacctaaattctacaattaacatgttgccacatttactttatcacatatccacccyctatctctccatcaagccacttttttttttttactttgcagaatttccaagtaagttgcaactatctgtatacctcacccctaaatgcttcagtatgaat

SEQ ID NO: 7396 - DNA, 201 bp, Homo sapiens; identical to SEQ ID NO: 966

SEQ ID NO: 7397 - DNA, 201 bp, Homo sapiens
tctcccctccccacaatttccacacagacctccctgaagaaggaggggcctgggaagcccactttgtcatgtactatcaataaagttccctgtactcaaamaattaattaactaattaatcaaaatgtattgaatactaacattatgctaaggagagtcaattcctgcttgtttttaaaaatataattcttcatcattcaa

SEQ ID NO: 7398 - DNA, 201 bp, Homo sapiens
tccaccttacagtactgatttgactccttctgacttatttatgttttctaatcttggaaagatctttaaagggcacccacttttcttcagttaattatttaaaaaaaaaacacattgacattgttaaattcccagttctttaaggatggactatatggctggtatcattgcttatagagtatcttaaccttgatggagctt

SEQ ID NO: 7399 - DNA, 201 bp, Homo sapiens; identical to SEQ ID NO: 968

SEQ ID NO: 7400 - DNA, 201 bp, Homo sapiens; identical to SEQ ID NO: 969

SEQ ID NO: 7401 - DNA, 201 bp, Homo sapiens; identical to SEQ ID NO: 971

SEQ ID NO: 7402 - DNA, 201 bp, Homo sapiens; identical to SEQ ID NO: 972

SEQ ID NO: 7403 - DNA, 201 bp, Homo sapiens
cacaaaacagagacagcaggtatcagtaatattttgttatagtagcacaaaatgaaccaagacagcaggtaagcaaatcatggaacaatggccatgacagrgtgttgcaagccaacttggcttgtgctcatctaagcactgtccacagagaagagagttttagccaatggtcttctgctattccagattcattaacaaagt

SEQ ID NO: 7404 - DNA, 201 bp, Homo sapiens
gccagcagtggtttgaagattcttgatgctgctgctatgtgcttttatcccctctgagagcactccatttgcctcattaaccataggacttgaattaatakgaattattaaagcaatttcttgttgtctgctttttaaaaagcatttggctaaacatcattgttcttttcacaggaaatgttgattaaccctttagcataa

SEQ ID NO: 7405 - DNA, 201 bp, Homo sapiens
tatattccatggccttgaatttgagtctagctaactggcccctgtggggctaatgcccatgactttggccttttttactatacttaatagtacagaaatayagattcattcggctcctgaaggattagagctttctccatctagcctcctcttcaatacctatgctgaattttttctttttttgctttcaaggatctaaat

SEQ ID NO: 7406 - DNA, 201 bp, Homo sapiens
gtttatcccgagtgtaaagtatgaatagtaggtggttagggggtattttggacttacagtaccctttgccagcagtggtttgaagattcttgatgctgctrctatgtgcttttatcccctctgagagcactccatttgcctcattaaccataggacttgaattaatatgaattattaaagcaatttcttgttgtctgcttt

SEQ ID NO: 7407 - DNA, 201 bp, Homo sapiens; identical to SEQ ID NO: 970

SEQ ID NO: 7408 - DNA, 201 bp, Homo sapiens; identical to SEQ ID NO: 973

SEQ ID NO: 7409 - DNA, 201 bp, Homo sapiens; identical to SEQ ID NO: 976

SEQ ID NO: 7410 - DNA, 201 bp, Homo sapiens; identical to SEQ ID NO: 975

SEQ ID NO: 7411 - DNA, 201 bp, Homo sapiens; identical to SEQ ID NO: 974

SEQ ID NO: 7412 - DNA, 201 bp, Homo sapiens
ttgatgctgctgctatgtgcttttatcccctctgagagcactccatttgcctcattaaccataggacttgaattaatatgaattattaaagcaatttcttrttgtctgctttttaaaaagcatttggctaaacatcattgttcttttcacaggaaatgttgattaaccctttagcataattgtttaaagaaaacataatat

SEQ ID NO: 7413 - DNA, 201 bp, Homo sapiens
tcaagcttcactgaagtgatagattttgggctttgccacattgtcctctgattgcttccctctgctcctccttttcctagtgaatctttgttttactggtrgaaaaatctacatctttgtatcttggcattttactttcacattatctcatagattttatttcaagttgctataaagttatcaacttttatttttaactaa

SEQ ID NO: 7414 - DNA, 201 bp, Homo sapiens
ggagaagacataacggatgatggtaacttggaattagaaatgaacagtgaatcggaaaatggtgcttacttagataatcctccgaaaggagctctgaagawactgatttatgctgctaagttaaatgcttctttaaaaaccttacaaggagaaagaaaccaaatttatagtcagttatctgaagttgataaaggaagagct

SEQ ID NO: 7415 - DNA, 201 bp, Homo sapiens
cagccttccccgctatggaggagcctggggctacccctcagcggtatttggggctggtcctgggggagctaagcagggttgtggcagcactgcctgaaagygtgagaccagactctaatccttatggttttccatgggagttggtgatatgtgcagctgtacatggattttttgctgttctctttttttgtgtggagaagt

SEQ ID NO: 7416 - DNA, 201 bp, Homo sapiens
gcaacttttcctgcctcttttgcctttcatttgtctatatttcaagcttcactgaagtgatagattttgggctttgccacattgtcctctgattgcttccmtctgctcctccttttcctagtgaatctttgttttactggtagaaaaatctacatctttgtatcttggcattttactttcacattatctcatagattttat

SEQ ID NO: 7417 - DNA, 201 bp, Homo sapiens
tcaagaaaatgaaatgaaactccagaggaaattaacagtagatgaaattaccggttagaaaaggaagaaaaactttctaaagtacacgaaaagattagccrtgccactgaagagttggagacctatagaaagtgagccaaagatcttgaagaagagttggcgagaactattcattcttatcaaggatggattatttcccac

SEQ ID NO: 7418 - DNA, 201 bp, Homo sapiens
gaatcggaaaatggtgcttacttagataatcctccgaaaggagctctgaagaaactgatttatgctgctaagttaaatgcttctttaaaaaccttacaagsagaaagaaaccaaatttatagtcagttatctgaagttgataaaggaagagcttacagagcatattaaaaatcttcagactgaacaagcatctttgcagtc

SEQ ID NO: 7419 - DNA, 201 bp, Homo sapiens
agcctggaaatacgcacaggaaaatatgcacaggaccctgtgtgagcaagatataaagatctattacatggtgccattaaggtgagagtattgtgcttatrgtatccagcattaattatcctcactactacaacttctttgtatccatcatgtggaaaagtagagtatttaataaatgattattgagtttattaccttttt

SEQ ID NO: 7420 - DNA, 201 bp, Homo sapiens
ctgaagtgatagattttgggctttgccacattgtcctctgattgcttccctctgctcctccttttcctagtgaatctttgttttactggtagaaaaatctrcatctttgtatcttggcattttactttcacattatctcatagattttatttcaagttgctataaagttatcaacttttatttttaactaatattattttt

SEQ ID NO: 7421 - DNA, 201 bp, Homo sapiens; identical to SEQ ID NO: 977

SEQ ID NO: 7422 - DNA, 201 bp, Homo sapiens
ttttatcaagaaaatgaaatgaaactccagaggaaattaacagtagatgaaattaccggttagaaaaggaagaaaaactttctaaagtacacgaaaagatyagccgtgccactgaagagttggagacctatagaaagtgagccaaagatcttgaagaagagttggcgagaactattcattcttatcaaggatggattattt

SEQ ID NO: 7423 - DNA, 201 bp, Homo sapiens
agcagagtttaaatttgaacttttagaaaaagatccttatgcacttcatgttccaaatacagcatttggcagagagcattccccatatggtccctcaccaytgggtcggccttcatcctaaacaagagcttttctctgagggcccactgagactctcatctttgctaacaggaggaggaggaagaggctcaagaggtccag

SEQ ID NO: 7424 - DNA, 201 bp, Homo sapiens; identical to SEQ ID NO: 979

SEQ ID NO: 7425 - DNA, 201 bp, Homo sapiens; identical to SEQ ID NO: 980

SEQ ID NO: 7426 - DNA, 201 bp, Homo sapiens; identical to SEQ ID NO: 981

SEQ ID NO: 7427 - DNA, 201 bp, Homo sapiens
gaagaggcaggaacaaatggccatcaaactgtgccaagagctaatcattcatacttcaggtaatcagacttagtcctgctgaccagtcagatggcatatgytatcctggtctaagttgatcacatgtaccacctaagagtattgagagagttatgtcatccagtgaaccttaatgatgttgcactaaatttacacacagca

SEQ ID NO: 7428 - DNA, 201 bp, Homo sapiens
aagcagttatattcccattttataggtagaaatattataatagagagattaagtaacttgcctgaggtcactcagctcataaattgcactttagggattgygcactcagtcactcagctattctgactctccagcacctacaatccaaaagggtgctgctggtcataagaacacatatcaacacatttatttatactaaat

SEQ ID NO: 7429 - DNA, 201 bp, Homo sapiens
attgaaaggaggtatagttcatttcatctctgtgacaaatttatagcaaggcactgaattttatcttttggtagaaatgtgtttatttaacacacacacasacctaatactacattcaaagtattttataaatactaacccttgaagaaagcagttatattcccattttataggtagaaatattataatagagagattaag

SEQ ID NO: 7430 - DNA, 201 bp, Homo sapiens
ggggagtggacaggtgttaaatgctttgaggtgccagctttaatactggcgttaaagacatgtgctgtgaaatctccaaaatggggacaaatagttgtggratgtattagaaaagtgagtgttcccaaggttgaagtgaaaatatgtggctttcagaacctctttaaagttgtgtgatatcacacagtcagagaaattctg

SEQ ID NO: 7431 - DNA, 201 bp, Homo sapiens
tgaaaaacacatgctgttcccaggcctcaagatattgaaacattaattagataatttaaagtagcgttttcttctacaatgtctgaagaagtgacctacgygacactcacatttcaggattctgctggagcaaggaataaccgagatggaaataacctaagaaaaagaggtaggagttcagagaagaccagctgtgtcctt

SEQ ID NO: 7432 - DNA, 201 bp, Homo sapiens
ttttcttcataaggtcccaaagaacttcaagtacttctaatataagctgaactgattagatttcattaatggaattccatatttatgaaggaaatacaaawtctcagtccaggatttaagtatttctcttaaagaattctacctgggattatgattaacttaaaataaagaacccagatgtgccagctctgggcagatttt

SEQ ID NO: 7433 - DNA, 201 bp, Homo sapiens
cttgaaaaacacatgctgttcccaggcctcaagatattgaaacattaattagataatttaaagtagcgttttcttctacaatgtctgaagaagtgacctaygcgacactcacatttcaggattctgctggagcaaggaataaccgagatggaaataacctaagaaaaagaggtaggagttcagagaagaccagctgtgtcc

SEQ ID NO: 7434 - DNA, 201 bp, Homo sapiens
tagatttcattaatggaattccatatttatgaaggaaatacaaattctcagtccaggatttaagtatttctcttaaagaattctacctgggattatgattracttaaaataaagaacccagatgtgccagctctgggcagattttgtgccagctttaggcagcttcagattttgaagctttgtggaggcagaagtctctcc

SEQ ID NO: 7435 - DNA, 201 bp, Homo sapiens
cagccttgaaaaacacatgctgttcccaggcctcaagatattgaaacattaattagataatttaaagtagcgttttcttctacaatgtctgaagaagtgamctacgcgacactcacatttcaggattctgctggagcaaggaataaccgagatggaaataacctaagaaaaagaggtaggagttcagagaagaccagctgt

SEQ ID NO: 7436 - DNA, 201 bp, Homo sapiens
cttccacttcagggtttggatgaaactatttaaaggacaaatagaatatataacacttggaaaatttcaatttttttaactatttaaagttatgaaaaaayagacgtcaacaaaaatgtgtaaggggatattaggtttgctaaattctttcacagactataaaacaaaaaattttgaggaacacctctcatcataactaca

SEQ ID NO: 7437 - DNA, 201 bp, Homo sapiens
ttttattatgctggtcaggtatattcacctgatggggtaaatatattaatacatttcaaaataaattccatcctatattcatcctctgtctccttcttgtrgccatttattttccttctgcttttagtttatttttgtttcctttaagtctttgatacctctggctttcatcttcacttttccctatttcttttttgtaaa

SEQ ID NO: 7438 - DNA, 201 bp, Homo sapiens; identical to SEQ ID NO: 982

SEQ ID NO: 7439 - DNA, 201 bp, Homo sapiens
gattaacttaaaataaagaacccagatgtgccagctctgggcagattttgtgccagctttaggcagcttcagattttgaagctttgtggaggcagaagtckctccatattcagatacatgacattggctgtaagagcaactgagggcactaaatagtgatcacgtttcaaatacagaatttataattaattttaaattaat

SEQ ID NO: 7440 - DNA, 201 bp, Homo sapiens; identical to SEQ ID NO: 983

SEQ ID NO: 7441 - DNA, 201 bp, Homo sapiens
aaaccaaagtgaaacaagcacaaagcagttctgtgtgctgattgctcttttggctttctccagggcatccagctccatctcccatttggcgtcatgctgcyctgggtctggtaactctttgcctgatgttgctgattgggctggtgacgttggggatgatgtgtaagtatatcagcatcaaacccaacaaaggcaactaga

SEQ ID NO: 7442 - DNA, 201 bp, Homo sapiens
ttttactgagttgtggaagtggctcctagtgggatgaatggggagctggaaggtggatgaaatgggaaggtgatcttcctctggagtttggccatccaacrgccaaactactctctgaccactcccagccaaactcctcttggcgttcagaagttcctcctcttctctccttctctgtcatgtcattccacctttcatctg

SEQ ID NO: 7443 - DNA, 201 bp, Homo sapiens
aaatggtatatttttaggggaaagaccattgatatggtttggatctgtgtccttaccaaatcacatgtcaagatgtaatccccaatgctggttgtggggcstggtgggaggtgattgggttatgggagcagatttctcatgaatgacttagcaccatcttcttggtgctgttctcatgatagcgagttctcgcaagatccg

SEQ ID NO: 7444 - DNA, 201 bp, Homo sapiens
ctgagaaataaagtcaagaaatatgtattgaaggaagtgcttgctatttttatttacctgaaagacttaacactagactaggttcagtctgcttacatgaracttctctagtggagagaaatcttccaagtagcagcagcagcctgatttctatgaatgagaaagacatataaacaaagaggaagagtggcctgatacacc

SEQ ID NO: 7445 - DNA, 201 bp, Homo sapiens
gaaaaccatccaacagcagcaggataacttatcccagcaactgggcaactccaacaacttgtccatggaggaggaatttctcaagtcacagatctccagtstactgaagaggcaggaacaaatggccatcaaactgtgccaagagctaatcattcatacttcaggtaatcagacttagtcctgctgaccagtcagatggca

SEQ ID NO: 7446 - DNA, 201 bp, Homo sapiens
attataaagaactataaataatttggaatagaaaggcatctggtttgtttctttcatgatacctcaaatactaagagctactaataaatcttgaacaattmagaaatgtttctgtcacgagaattatctacagttataagaatagaagaatatatgaacttgtctcctgtcatgtcttggagttttgcagatatctaatga

SEQ ID NO: 7447 - DNA, 201 bp, Homo sapiens
cagcatcaaacccaacaaaggcaactagaaaacatattgtaaaccatgtactttcagcttggattgtagatgggtcctagcatcctgaatcgtctgatacktttctgctgtctcatatctctcctattcgtcatatcttcccaaaaaaccggcaaaagacattatcaggatttggttctaaattcattgttttatcttgat

SEQ ID NO: 7448 - DNA, 201 bp, Homo sapiens
tttggctttctccagggcatccagctccatctcccatttggcgtcatgctgctctgggtctggtaactctttgcctgatgttgctgattgggctggtgacrttggggatgatgtgtaagtatatcagcatcaaacccaacaaaggcaactagaaaacatattgtaaaccatgtactttcagcttggattgtagatgggtcc

SEQ ID NO: 7449 - DNA, 201 bp, Homo sapiens
ttttcagaggcttctaaagcagtatgctttcagggtgcaggctctcagtccctattgttcaattacatgattttgtttcaaagccttctccagtcactctrgagtcttcagtttatattattgggtataatttccttttcagaccacagatgtaatccatgtcctaagatgtggcaatggtaccaaaatagttgctactat

SEQ ID NO: 7450 - DNA, 201 bp, Homo sapiens
gtctattctgctgtttgtaggttagactgcacattctttccttctttcattcagtattcattcattatttattaggtgataaatagcatgaataatagatragttattgttaacaggtaaaagatactttaaaaagtcgaatccacttttacaaggcagatagaacatgtgccttatagagacttttgagctcaaaagctt

SEQ ID NO: 7451 - DNA, 201 bp, Homo sapiens
agaaagaaacgttagtatcgggaagctccctaagtgggagaaataaacaaaccaaagtgaaacaagcacaaagcagttctgtgtgctgattgctcttttgsctttctccagggcatccagctccatctcccatttggcgtcatgctgctctgggtctggtaactctttgcctgatgttgctgattgggctggtgacgttgg

SEQ ID NO: 7452 - DNA, 201 bp, Homo sapiens
ctactcactcttaatcaaagtgtggaggaggtggcccccacagcagggtttggaacctacagaccctggcccctgagacatgcagctgtcagacaagccakcatgtcaaacacaggttagagagactgagcttccagattgcatagccatttccttgactactgagtaaaggccaaggctaagatttagtaagcctagccc

SEQ ID NO: 7453 - DNA, 201 bp, Homo sapiens
cagaatgtgattttatttttatgtttttcttcataaggtcccaaagaacttcaagtacttctaatataagctgaactgattagatttcattaatggaattmcatatttatgaaggaaatacaaattctcagtccaggatttaagtatttctcttaaagaattctacctgggattatgattaacttaaaataaagaacccag

SEQ ID NO: 7454 - DNA, 201 bp, Homo sapiens
ggcctctctactcactcttaatcaaagtgtggaggaggtggcccccacagcagggtttggaacctacagaccctggcccctgagacatgcagctgtcagayaagccagcatgtcaaacacaggttagagagactgagcttccagattgcatagccatttccttgactactgagtaaaggccaaggctaagatttagtaagc

SEQ ID NO: 7455 - DNA, 201 bp, Homo sapiens
gcttgttaagcaaaaggatttatattttcttccttgtattccccacacctatgaaagcagaataccaattaaatgcaaatttacttaaaggaaagtaggcygggtgtggtgactcatgcctgtaatcccagcactttgggaggctgacgcggatggatcacttgaggccaggagttggaggccagcctggtcaacatggaa

SEQ ID NO: 7456 - DNA, 201 bp, Homo sapiens; identical to SEQ ID NO: 991

SEQ ID NO: 7457 - DNA, 201 bp, Homo sapiens; identical to SEQ ID NO: 992

SEQ ID NO: 7458 - DNA, 201 bp, Homo sapiens
gttttactttaggggacacttctgctgattgggctagggagggaggtaataagaatccagatggtggatattataggcctttttttttttttttttttttttgacagttggcagagctagctgaggttttattttgggaaaaagaaaaaatttgaattgttttgtagctggatacatgggcaaggggactacccaggcagt

SEQ ID NO: 7459 - DNA, 201 bp, Homo sapiens; identical to SEQ ID NO: 993

SEQ ID NO: 7460 - DNA, 201 bp, Homo sapiens
tacagccctcacacacatgagctcttagaaaaaatctgtttagaggacagtaagctgacttgaggtactgagagcatggcttctctgtgccctgaaaagtrattgaggacttcaagggagattaaccttagtagaatcaatacattttccttccttcgcttctgcctgctccctaatgattaagtattcactgccgctgca

SEQ ID NO: 7461 - DNA, 201 bp, Homo sapiens
aagtcttgctttccagtggtgtttattgtcacaaagtcagtcatttcactctgaattaaaattctttaatagttttcaatcccttcagggtttagccccarggtccttattattagacactaagccctttgctctgtcctcttacttcccctccgtggcacattcttcaccactcttactgtttttatctccttcgtaaga

SEQ ID NO: 7462 - DNA, 201 bp, Homo sapiens
ttttttaatttttatttcagcatatttaccattatcagttttattgatggtttctatagtgttgaccttctcttgaaattctttgtcatgcatgaaatcayagtttttctgtttcctccagcttctctcttagtcctttgctctgcagattctctggcttctttttctttttttttttttttttttttttttttcttgaga

SEQ ID NO: 7463 - DNA, 201 bp, Homo sapiens; identical to SEQ ID NO: 994

SEQ ID NO: 7464 - DNA, 201 bp, Homo sapiens
tttaaacatcatttatgatgtcattctttggagtgttactatacggtcagtaagtcctgtgaagaatggaacaccgctctgagagaacaaagacgtgatgkaatgcgggttgtgtatgtgtcttacggagagcctctgaagtgacattaaactgggagctaagggatcaatagtttaaacaggtggctagggaggggaaga

SEQ ID NO: 7465 - DNA, 201 bp, Homo sapiens
actttacaattcaactacttgttctacccagcattttaacggcaagaactttatatttattctcaagcagggcatgtttccctttgttcacattctctgakaaattgaaactctggtttctcttcaaattttgtgccttgtgtttttcatacttctttccagtcctgattagccccctctaaactatgattgtacactgcg

SEQ ID NO: 7466 - DNA, 201 bp, Homo sapiens
ttgccctaaagtcattctgtttaacgcttaaaatagggtaaaaattagtcagattgttgccatcgtttttcaagctcaagttagatgttgcaggtacactwgtctcctttaaacatcatttatgatgtcattctttggagtgttactatacggtcagtaagtcctgtgaagaatggaacaccgctctgagagaacaaagac

SEQ ID NO: 7467 - DNA, 201 bp, Homo sapiens
agttccagacctatatatatctcacagcttactgaccagtactgcaagaatgttccaccaacaccacagattatacaaggcagttctgctgccttccctayttcagcctcttcctgttgcatttcctatctgattatatagcaccaccataccgtcactcaggcaggaatcccaaggaacaggcttggtgcctcctttctc

SEQ ID NO: 7468 - DNA, 201 bp, Homo sapiens
ttttgtttttgttttttaatataccagtaagtctaaactctgtattcctagcacagttctctcacaggagttccagacctatatatatctcacagcttackgaccagtactgcaagaatgttccaccaacaccacagattatacaaggcagttctgctgccttccctacttcagcctcttcctgttgcatttcctatctga

SEQ ID NO: 7469 - DNA, 201 bp, Homo sapiens
gccgatatgctttagcggtaaaggaggtgggtgataggtgagatgtgaggatgagaatgaaatgacatcggggattttggtttgagcaattgagtggttcrtgtggctgtttactaaaatggggatgactggggaagagcagatgctgatggatattgctggagcaggagttctgttggggcctgttaagtgttttgtttt

SEQ ID NO: 7470 - DNA, 201 bp, Homo sapiens
cactctcactctgaaatcttgaagtctaccctttgttcttaccactgaattgtctttgttccctaggagacttgaatgaaaattctgtggagaatcttcarcagaaaacacttcaggatctgttacatgagctttcctcctggctagttttggaaggcatggccagtacaattactggaagtcaggattgtattgtgaatc

SEQ ID NO: 7471 - DNA, 201 bp, Homo sapiens; identical to SEQ ID NO: 998

SEQ ID NO: 7472 - DNA, 201 bp, Homo sapiens; identical to SEQ ID NO: 999

SEQ ID NO: 7473 - DNA, 201 bp, Homo sapiens
ggctgaggcaggagaatctcttgaacccgggaggtggaggttgtagtgagctgagatcatgccactgcactccagcctgggcaacagagtgagactctgtytcaaacaacaaagatgagttgagtgtagcccctatccttcagaatcttccagccaacttgggagagacttaatagctatagtagagggatgtgaaagatg

SEQ ID NO: 7474 - DNA, 201 bp, Homo sapiens; identical to SEQ ID NO: 990

SEQ ID NO: 7475 - DNA, 201 bp, Homo sapiens
ttcagtcattttatttagaattattatttttcatagcaatatgtttatattttattattagattgtgtttaaatgtgatatcctctccagtttttctgggwttttaattatgtaccttttaaattctgttggtctccttatatattttttcaaaattcttgtgttctcagcatgatattggagtgtgtcctcaacccatgc

SEQ ID NO: 7476 - DNA, 201 bp, Homo sapiens
atcctctccagtttttctgggattttaattatgtaccttttaaattctgttggtctccttatatattttttcaaaattcttgtgttctcagcatgatattrgagtgtgtcctcaacccatgcttgacccactttggcatgcatatgtgttttactttaggggacacttctgctgattgggctagggagggaggtaataaga

SEQ ID NO: 7477 - DNA, 201 bp, Homo sapiens
gtggactagtcccgattatggttattacagtttgatgaaatgtggctgagatcattggcactgtggagattaagaaatgtgaggtcagagtgttgggtaarttgttcctgcgagtgttaaggttgtcaggataatggtgggaatggggtgaagatgacaactcagcaatgacacaagaagagagtgacacagaaagattca

SEQ ID NO: 7478 - DNA, 201 bp, Homo sapiens
tggattttactggatggccactgaaaagcctttggagggtttcatgcttggccttgtttttgttttaaaagatcaccttggctgtcatgtggaaaactcaygtttgggggagcaggagtagagtcagaccaaccaggaggttgatgtgggtgagagcaagtgctgcctaggcctagagaggtgacagtgcagggcagggga

SEQ ID NO: 7479 - DNA, 201 bp, Homo sapiens
gggttttcggtggacgttaggcgacggacgggggctcctgtaagagactgaggtttctgtccgcagcactgccttcgctgaaaagagcttgcatctgagcycccgcaccgcaggaacgagccaggctcctgagaatgaggtcggggaaggcgtcttgggcaaccgaaatccatcccgagaagcttctcctcttaactagaa

SEQ ID NO: 7480 - DNA, 201 bp, Homo sapiens; identical to SEQ ID NO: 996

SEQ ID NO: 7481 - DNA, 201 bp, Homo sapiens
ccgctggcagaggcgttcaggggtcaggaaatgggtgtgccgcgggtaaggcgctgggccgccgagctgcggaagccgggagggcggcgatggtagggcaygcgaccagcggaggcgcggcccgcggcggcacgtgtgtcccggcgccgcatttccgagctgctgcgcccccggggccgggctgcggccacaccgaagcct

SEQ ID NO: 7482 - DNA, 201 bp, Homo sapiens
ggaggctgaggtgggaaaattgcttgaacctgggaggtggaggctacagtgagaccagatcacaccacggcactccagcctgggcagcagagtgaaactcygtctcaaaaaaaaaaatgaagtgagatgagatgaaatgttattgttagcaaggatataggacttacagccttctataggattagttagggaagactttcc

SEQ ID NO: 7483 - DNA, 201 bp, Homo sapiens
catgtaaattaaatgttaggaaaaatacagaataatataattttgggaactcatgaaaattcctaggaattttgattgtatattcctgaatcttgaagatkaacctgtcgggaatttggaaacactagcatggagcacaggctagattcaggccacacgtttctgcactcccctttggcaggagtatttgtgcacaaacca

SEQ ID NO: 7484 - DNA, 201 bp, Homo sapiens
gcagggtccttgggttcctctttcccacagacaccactctaaatgcaaactcgaatgagtcctgtctcctcctggactctcctcctgtatcttgctctgcratagcccaaatgaatcattcttccactttgctctctcttctacatttttttccttgcccccacctcatactacaaggaaatgaattttcttatatcctaa

SEQ ID NO: 7485 - DNA, 201 bp, Homo sapiens
cccatgagcttaatgttgagttagaaacttctagagcgatgaggaataaagtgtactttctcataagtctttttataattagaccacaatgatcgtgattscactaattctatttttgtaaatccaagttaaacatctgcagatggcccgttttcagccctggttgatttcactccaggtttgcactgtgtcaataacctt

SEQ ID NO: 7486 - DNA, 201 bp, Homo sapiens
tagctcactgcaacctccgcctcccaggttcaagtgattctcctgcctcagcctcctgagtagctgggattacaggcatgtgccactacgcctggctaacyttttttttttttttttgtaattttagtagagacagggttacaacttgttggccagactgctctcaaactcctgccctcaagtgatctgcccaccttggcc

SEQ ID NO: 7487 - DNA, 201 bp, Homo sapiens; identical to SEQ ID NO: 1025

SEQ ID NO: 7488 - DNA, 201 bp, Homo sapiens
tcatattatgaaattcctatatcaggtgcacattgttgttacatgttgttgcagtatataattatgtcacatattttggctcataataataataaatcatrcatttattacataagttttttttttttacagaaaacctctgaaatttttagcataactctaccacaaaaaatgattcactgtttattatgatagaaatga

SEQ ID NO: 7489 - DNA, 201 bp, Homo sapiens
gaaaagacttttatggatgagaacccactgggagttggagagaggagaggagggagagaaacaaagaaaatgagaatgaattgatatgagcatgaaggctkaaatggactagtccttgcccatgagcttaatgttgagttagaaacttctagagcgatgaggaataaagtgtactttctcataagtctttttataattaga

SEQ ID NO: 7490 - DNA, 201 bp, Homo sapiens
caatttttaaaatgttttttatttggcatttattttgtgttaatgtttccctcatttagtgtttcatattatgaaattcctatatcaggtgcacattgttkttacatgttgttgcagtatataattatgtcacatattttggctcataataataataaatcatgcatttattacataagttttttttttttacagaaaacc

SEQ ID NO: 7491 - DNA, 201 bp, Homo sapiens
cctcagcctcctgagtagctgggattacaggcatgtgccactacgcctggctaaccttttttttttttttttgtaattttagtagagacagggttacaacwtgttggccagactgctctcaaactcctgccctcaagtgatctgcccaccttggcctcccaaagtgctgggattacaggtgtgagacactgcatccggcca

SEQ ID NO: 7492 - DNA, 201 bp, Homo sapiens; identical to SEQ ID NO: 1028

SEQ ID NO: 7493 - DNA, 201 bp, Homo sapiens
cctttttttgcctgcacctcctggagtttctgctttgccggcttttccagtacccagtctaggaagaatgagacaaaaagaaaacccagggaatgcaccgstgtgttgagccacaggtcttcagatccctaggtagtgctcttctttttctctacctttcagagtcaccttatgtttgttttatatacaatatccagattt

SEQ ID NO: 7494 - DNA, 201 bp, Homo sapiens
aataccagagtaattagaagcacgatctttgacgttggaaagaccagttgagttgaaattctgccacttactcaatagccttggatgagttgactaacccytctaagcttcagtttcctcattggtgaaggtggaaaaataaaagttctcttatattaggattattaagaatgttaaatgaaatacaacacatgtaaagtg

SEQ ID NO: 7495 - DNA, 201 bp, Homo sapiens
tttctgatggtgaccaaagtggacaaggtactgagctacaaaataatgggaacttagataattactcatagaccacagatttgattctgttcttgctgaasatcgaggtaaacacaaaaacctaaccagttacttaatttatgtggtccttaagatgaaaacagatcagatcttcaaaaacaaaaccacagcttttccttg

SEQ ID NO: 7496 - DNA, 201 bp, Homo sapiens
cctcccgagtagctgggattacaggtgtgtgacaccacggctggctaatttttgtatttttagtagagatggcgttttgccatgttggccaggctagtttygaactcctgagctcaagtaatccgcccacttcagcctcccaaagtgctgggattacaggtgtgagccactgcacccaacccactttttaaaatttaacaa

SEQ ID NO: 7497 - DNA, 201 bp, Homo sapiens
atagtgttttacacacaaattggcttttggaagcgcagaaattgggggttctctgtgccaaaaaaactgtaagaaattaagaaaatcatggaaccttacamattaataaaatttaaaaattgcccatcctctttctatgctccgaaatggaatagactagaaaagacttttatggatgagaacccactgggagttggagag

SEQ ID NO: 7498 - DNA, 201 bp, Homo sapiens
aaaatatgattataaccatctccacactatagcttacatgtgtatgtgtgttgttattgttcttaggaagagtgctgaaaagattgaggaaactgttagckatagctcctcagaaagtgaggaagatgaagaaccacctgaccatcgtcaggaagcaagtgcagatttgccatcagaatattggcaaattcagaagctggt

SEQ ID NO: 7499 - DNA, 201 bp, Homo sapiens
tgcccatactctgaaatgcttcatccagcctgtcttattcctgagtacttgctgcaatgatggaggcctctagggctcattcccagggccatttctccacrtgtacctcctccctgtgggatgccagcttctgtacctgggattttgatcagagtccaggtgggagagtggggaaagggatgatgaaagcactgatttgga

SEQ ID NO: 7500 - DNA, 201 bp, Homo sapiens
atccattgcttgtgcccatgttgccaaaatatgattataaccatctccacactatagcttacatgtgtatgtgtgttgttattgttcttaggaagagtgckgaaaagattgaggaaactgttagcgatagctcctcagaaagtgaggaagatgaagaaccacctgaccatcgtcaggaagcaagtgcagatttgccatcag

SEQ ID NO: 7501 - DNA, 201 bp, Homo sapiens
tgtatatattcttttcatctggattttttgaacacaatttaatttttaaattaatgaatgtatcacatttttactcaccaaccttccagcttcttctctcycccatagctgatgatgctgtaccctaattctaaaggaagcaaggaacccccttttcagctaccttactgataagcacttatgttctgccttctgccatcc

SEQ ID NO: 7502 - DNA, 201 bp, Homo sapiens
tgctgtatttgctgactttatatggatattattttctcccttggccaagattgttttaaaatcttgcaaggaaaatgtcttgcttttgatcacttctagcrattaaaggagatggtttgttaatgtctctatgctccatactaaatctatgagtctctctaaaacttcagtgaaatcatgctcatttctaaataaggtatg

SEQ ID NO: 7503 - DNA, 201 bp, Homo sapiens
gaaatgttcatgttgacctgactttctatttaccattttctaagtaatgtctgtgattgttggggaaaaaaaagagatttaatgagctcattaatacccaracaggtcaatgaactatagcttattaattgtccagagctatgagctcatatcttggcacatcaaaatagtttgtatttaattatttggtttgacatatgt

SEQ ID NO: 7504 - DNA, 201 bp, Homo sapiens
agtatggtaaccacgagacacgtgggccattgagcacttgaatgtggctagtgtgattggagaactggatttttaattttctttaattttagttaaataartaagttcaaatatctgtaactatagacgaccacatgcaatgagtggcagtcttattgaaaagtgcagccttaagacattcactgaatacccttgtttatt

SEQ ID NO: 7505 - DNA, 201 bp, Homo sapiens
aaggctcttgtaatactgttgtccatgcatcaaaccatagaatgtggtgtacttctgtggaactcaacactttgcatggtaatgtctctcagagttggtgsctaactctttggtcctgaacctgattatgttcatgttattgctgttctttggcaccttgtgcccttgcaagtacttcagtgtaggcattatggagggatg

SEQ ID NO: 7506 - DNA, 201 bp, Homo sapiens
atggaatagactagaaaagacttttatggatgagaacccactgggagttggagagaggagaggagggagagaaacaaagaaaatgagaatgaattgatatragcatgaaggcttaaatggactagtccttgcccatgagcttaatgttgagttagaaacttctagagcgatgaggaataaagtgtactttctcataagtct

SEQ ID NO: 7507 - DNA, 201 bp, Homo sapiens
agtagttcctgagacatcattgtggatttggtgacccaatggcagtaacctggcatccggcagtgggaggtggagacaagttggtgtgatgagtgtgcatrtgcatgagggacctctgcagggacatagggcatatattggattccagaaggctcttgtaatactgttgtccatgcatcaaaccatagaatgtggtgtact

SEQ ID NO: 7508 - DNA, 201 bp, Homo sapiens
attggcttttggaagcgcagaaattgggggttctctgtgccaaaaaaactgtaagaaattaagaaaatcatggaaccttacaaattaataaaatttaaaaattgcccatcctctttctatgctccgaaatggaatagactagaaaagacttttatggatgagaacccactgggagttggagagaggagaggagggagagaa

SEQ ID NO: 7509 - DNA, 201 bp, Homo sapiens
acagatgcttgaattcaggctttccctcttccagggtccagagagcataatcatagtgttttacacacaaattggcttttggaagcgcagaaattgggggytctctgtgccaaaaaaactgtaagaaattaagaaaatcatggaaccttacaaattaataaaatttaaaaattgcccatcctctttctatgctccgaaatg

SEQ ID NO: 7510 - DNA, 201 bp, Homo sapiens
tttctcccttaggatttaatggggcaggcacagagtgagagagtgaacagccgcaataataccctcccagtgaacatggcaaagagagtttctcataatarcctaattactggataactgtcttgagtttttcaactatttaggataagtccaggtagcattaggccaaaaagagatgcactatttctgtcccagtacagc

SEQ ID NO: 7511 - DNA, 201 bp, Homo sapiens
atcattaaaaattatcctcattttttcaataaaggggattagcttcaatgaagaccagcaaaaggaaaaggatcagcttggcaaagcccccaagaaggaaraagcagctgccctccacaaagacatttctggttcaggcaagaggtcactggagaagaaccaaattaatttttggaggaatcaaatgaccaagagatggga

SEQ ID NO: 7512 - DNA, 201 bp, Homo sapiens; identical to SEQ ID NO: 1027

SEQ ID NO: 7513 - DNA, 201 bp, Homo sapiens
caaatgtgatactcttggccagacagtaaattgcttggaattcttatagttcccacaggtaaatattcttcatgtagccaataaaaggaaaagtatatctwtaaatgatttcaaggttttcgacacagataaatattctatctggagacataaaatgatactagaagtctatgaaatgcaaagttgaatgtctctaggcaa

SEQ ID NO: 7514 - DNA, 201 bp, Homo sapiens
ccacctgaccatcgtcaggaagcaagtgcagatttgccatcagaatattggcaaattcagaagctggtgaaatatttaaaggtaagaaaggcctgtggtartatgtttgcaatgttcatttaaaatactttcccaaggatgtatatgctgattccaagtttactttatgtttctttcaaataagagtagtaagcattcctg

SEQ ID NO: 7515 - DNA, 201 bp, Homo sapiens
atttgattctgttcttgctgaacatcgaggtaaacacaaaaacctaaccagttacttaatttatgtggtccttaagatgaaaacagatcagatcttcaaaracaaaaccacagcttttccttggagtttaacaaagatactgaaatacagtattcttcaatagcattcccttgatacctggcagccagcaggccctccatg

SEQ ID NO: 7516 - DNA, 201 bp, Homo sapiens
tagatcttaacagagatctactagaactcagaaggtgttggtatctgatccattgcttgtgcccatgttgccaaaatatgattataaccatctccacactrtagcttacatgtgtatgtgtgttgttattgttcttaggaagagtgctgaaaagattgaggaaactgttagcgatagctcctcagaaagtgaggaagatga

SEQ ID NO: 7517 - DNA, 201 bp, Homo sapiens
agcaaaagatgggctaggaagcagaataccagagtaattagaagcacgatctttgacgttggaaagaccagttgagttgaaattctgccacttactcaatrgccttggatgagttgactaacccctctaagcttcagtttcctcattggtgaaggtggaaaaataaaagttctcttatattaggattattaagaatgttaa

SEQ ID NO: 7518 - DNA, 201 bp, Homo sapiens
atttctctgaggtttccttgcttgtagaatgtggatgatagagcctgctttgcaaagtggttgtgaggtttagaaataataaatataaagtgcctgggacrggccgggcgcagtggctcatacctgtaataccagcactttgggaggccgagacgggaggatcacgaggtcaagagtttgagaccagcctgaccaacatgg

SEQ ID NO: 7519 - DNA, 201 bp, Homo sapiens
tcttgctgaacatcgaggtaaacacaaaaacctaaccagttacttaatttatgtggtccttaagatgaaaacagatcagatcttcaaaaacaaaaccacascttttccttggagtttaacaaagatactgaaatacagtattcttcaatagcattcccttgatacctggcagccagcaggccctccatgcatgtgtggtga

SEQ ID NO: 7520 - DNA, 201 bp, Homo sapiens
attttattttattttatttttgagagagagtcttactctgtcttccaggctggagtgcagtggtatgataatgtaataatggtttactgcagctcaaactyctgggctcaagcgatcctcctgcgtcaagcctcctgagtagctgggattacaggcatgcaccaccatgtctggctaattaaaatttgtttttgtagagac

SEQ ID NO: 7521 - DNA, 201 bp, Homo sapiens
tggaacttacgaagacactacaagaaaacacagaaataaaaattttctgatggtgaccaaagtggacaaggtactgagctacaaaataatgggaacttagrtaattactcatagaccacagatttgattctgttcttgctgaacatcgaggtaaacacaaaaacctaaccagttacttaatttatgtggtccttaagatga

SEQ ID NO: 7522 - DNA, 201 bp, Homo sapiens
cctatgtcccatcatcatcttgaaaaacctgaaaccccaggaggaaaaccaataccaaatcttggcctgcgcactccctggtttcagtctcactgactgtygcctcctctccatcaagctgctgctactgccacctcctggaattatcaccagaagtacccttcttccaaaatctaaacctagactgaattttgttcattc

SEQ ID NO: 7523 - DNA, 201 bp, Homo sapiens
accaggctgcctggtaccaaccctctctcctggctggggagtgcccatggtaaacagctgacactgagacttgctgccattttatgatttgtagtatggtrtggaagaaataacatggatttttaaagcggactttggttaaactccaggctgtttcccttactagcaacgtagctgttgaaacgttacagttttgagccc

SEQ ID NO: 7524 - DNA, 201 bp, Homo sapiens
ctgttgttttatctaagtgtgtgcagggaaaggtcttattaccctgaggatgcaagattcatcctcatggagcaaccaggctgcctggtaccaaccctctstcctggctggggagtgcccatggtaaacagctgacactgagacttgctgccattttatgatttgtagtatggtatggaagaaataacatggatttttaaa

SEQ ID NO: 7525 - DNA, 201 bp, Homo sapiens
catagggctgtgctgaaagagtgaaaaagacagctccgagtgtcagaatgaggctggaactcttgtcaggaacacacatcatttgagcacatggaaataayggagtatatatctacattgccatcttttattttttattaattagcataaagcaataaagctaatatatttgtatatttttttaaagcaaaggctcagcaa

SEQ ID NO: 7526 - DNA, 201 bp, Homo sapiens
tccagggggtggctggcagggtccttgggttcctctttcccacagacaccactctaaatgcaaactcgaatgagtcctgtctcctcctggactctcctccygtatcttgctctgcaatagcccaaatgaatcattcttccactttgctctctcttctacatttttttccttgcccccacctcatactacaaggaaatgaat

SEQ ID NO: 7527 - DNA, 201 bp, Homo sapiens
ctccagggggtggctggcagggtccttgggttcctctttcccacagacaccactctaaatgcaaactcgaatgagtcctgtctcctcctggactctcctcytgtatcttgctctgcaatagcccaaatgaatcattcttccactttgctctctcttctacatttttttccttgcccccacctcatactacaaggaaatgaa

SEQ ID NO: 7528 - DNA, 201 bp, Homo sapiens
taatgtttcacataactttatttatttatttttgagatggagtcttgctctgttggccaggctggagtgcactggtgcaatcttagctcactgcaacctcygcctcccaggttcaagtgattctcctgcctcagcctcctgagtagctgggattacaggcatgtgccactacgcctggctaaccttttttttttttttttg

SEQ ID NO: 7529 - DNA, 201 bp, Homo sapiens
cacttgaacccgggtggcggaggttgcagtgagccaagattgtgccagtgcactccagccagggcgacagagtgagactccatctcacaaaaaaaaaaaaagtacctaggacaaaatagaccaacctacacaaaactggtggctgctgttggtattatttaatattaaaaatagctagaagatttaaaagtttgcttctgt

SEQ ID NO: 7530 - DNA, 201 bp, Homo sapiens
caggcatgtgccactacgcctggctaaccttttttttttttttttgtaattttagtagagacagggttacaacttgttggccagactgctctcaaactccygccctcaagtgatctgcccaccttggcctcccaaagtgctgggattacaggtgtgagacactgcatccggccagaactttattttataatagaaaaatac

SEQ ID NO: 7531 - DNA, 201 bp, Homo sapiens; identical to SEQ ID NO: 1022

SEQ ID NO: 7532 - DNA, 201 bp, Homo sapiens
aataagagtagtaagcattcctgttgttttatctaagtgtgtgcagggaaaggtcttattaccctgaggatgcaagattcatcctcatggagcaaccaggmtgcctggtaccaaccctctctcctggctggggagtgcccatggtaaacagctgacactgagacttgctgccattttatgatttgtagtatggtatggaag

SEQ ID NO: 7533 - DNA, 201 bp, Homo sapiens
ctgaaatacagtattcttcaatagcattcccttgatacctggcagccagcaggccctccatgcatgtgtggtgaatgaatatgcatgataatacagaactrtctaacacgtatttcatgctttttgtatgccaggcactgttataagctttttacatactaactgctgttatcatcctcaatttgcaggtgaggaaaccga

SEQ ID NO: 7534 - DNA, 201 bp, Homo sapiens
cagggtccttgggttcctctttcccacagacaccactctaaatgcaaactcgaatgagtcctgtctcctcctggactctcctcctgtatcttgctctgcartagcccaaatgaatcattcttccactttgctctctcttctacatttttttccttgcccccacctcatactacaaggaaatgaattttcttatatcctaac

SEQ ID NO: 7535 - DNA, 201 bp, Homo sapiens
actttcccaaggatgtatatgctgattccaagtttactttatgtttctttcaaataagagtagtaagcattcctgttgttttatctaagtgtgtgcagggraaggtcttattaccctgaggatgcaagattcatcctcatggagcaaccaggctgcctggtaccaaccctctctcctggctggggagtgcccatggtaaac

SEQ ID NO: 7536 - DNA, 201 bp, Homo sapiens; identical to SEQ ID NO: 1031

SEQ ID NO: 7537 - DNA, 201 bp, Homo sapiens
aaaaaaggctcgggagtccagccccaagggagctgagacagcctcacatagagcaggggcctgacaagttagtgggaaacaccatctacaccaagccttcrttcatccaagagcataaggccgcagtctcctctgtgctgaaacccttctccatgggtgtgccttctgcctccacccctgcaaaagccctacctcaggtca

SEQ ID NO: 7538 - DNA, 201 bp, Homo sapiens
aaagttgtaccccaacttccagtatatcaagaggttacaattccaacaccaggtcaggatcaggctcagcatccaatgtcacccagcattacagttcaacytttggacctgggacttaccatcactccagaacccactacggaggttggacattctacacccctgaagaagaatgtagttcctccaaagcaccctaaggtg

SEQ ID NO: 7539 - DNA, 201 bp, Homo sapiens
gcattcagatttgcccaatgtctctgttaagcctccagacatgcagctcaccatagcaacagagcctagtgcagaggtgggaacttctccagtccaccagraggctacagctcagctctcaggaccaggtaatgatgtagaacctcccactatccagcacgggggcccacctcttcctccagagtcaccggaagatgctgg

SEQ ID NO: 7540 - DNA, 201 bp, Homo sapiens
ctattgagccggaggcagcctcagacagcaatggcatcaatttgtcaggctttgggagtgggcagctagacaccaatgatgagagggatgttatcagtgcactaagttacatcttgctttatttctcagcggtaaatctagatgtgaaatcaatgttgttacccttcattaatctgctttcttcaaatgtgcaagatggag

SEQ ID NO: 7541 - DNA, 201 bp, Homo sapiens; identical to SEQ ID NO: 1037

SEQ ID NO: 7542 - DNA, 201 bp, Homo sapiens
attgagccggaggcagcctcagacagcaatggcatcaatttgtcaggctttgggagtgggcagctagacaccaatgatgagagggatgttatcagtgcactaagttacatcttgctttatttctcagcggtaaatctagatgtgaaatcaatgttgttacccttcattaatctgctttcttcaaatgtgcaagatggagat

SEQ ID NO: 7543 - DNA, 201 bp, Homo sapiens
cttcccaagcccagcaggaggctccagttcagtttccagaggaggtggaaccttctgcaacccaacagtaggccccaaccgagcctccatgtcatcctacrgagcgtgaactttccattagtgagcaggagcagccagctcagccttctgagtcttctggggaggttgaatcttctcagactcggcaggagaccccagctc

SEQ ID NO: 7544 - DNA, 201 bp, Homo sapiens; identical to SEQ ID NO: 1038

SEQ ID NO: 7545 - DNA, 201 bp, Homo sapiens; identical to SEQ ID NO: 1039

SEQ ID NO: 7546 - DNA, 201 bp, Homo sapiens
ttgagccggaggcagcctcagacagcaatggcatcaatttgtcaggctttgggagtgggcagctagacaccaatgatgagagggatgttatcagtgcactaagttacatcttgctttatttctcagcggtaaatctagatgtgaaatcaatgttgttacccttcattaatctgctttcttcaaatgtgcaagatggagata

SEQ ID NO: 7547 - DNA, 201 bp, Homo sapiens
tgagccggaggcagcctcagacagcaatggcatcaatttgtcaggctttgggagtgggcagctagacaccaatgatgagagggatgttatcagtgcactaagttacatcttgctttatttctcagcggtaaatctagatgtgaaatcaatgttgttacccttcattaatctgctttcttcaaatgtgcaagatggagatag

SEQ ID NO: 7548 - DNA, 201 bp, Homo sapiens
gagccggaggcagcctcagacagcaatggcatcaatttgtcaggctttgggagtgggcagctagacaccaatgatgagagggatgttatcagtgcactaagttacatcttgctttatttctcagcggtaaatctagatgtgaaatcaatgttgttacccttcattaatctgctttcttcaaatgtgcaagatggagatagg

SEQ ID NO: 7549 - DNA, 201 bp, Homo sapiens
tgtgcatgtgtgaaagagagactatgggggtggggagtgtgtgtgtgtgtgagagagagagagattatctctgcttcttttgtggaaaagcagccccgcckcctcctgctgatcagagtatatgaatcctgccccagtggtgatgtatttcttgtcttttggttactggacccaaagaatctaaagcacccaacccataac

SEQ ID NO: 7550 - DNA, 201 bp, Homo sapiens
tgccacaagagtaaataaccaggcatggaagctgcacaagaagtcatctaatgaggatgagatccccatctgatgaggacagcgaaaccccaacagagaasggggaggagagtgaagccctgccacgggaggagaacacagagtgaccccagcccacctcaggcgtcctgcaaaaatacttagcgtaaacaacaagggcca

SEQ ID NO: 7551 - DNA, 201 bp, Homo sapiens
agccggaggcagcctcagacagcaatggcatcaatttgtcaggctttgggagtgggcagctagacaccaatgatgagagggatgttatcagtgcactaagttacatcttgctttatttctcagcggtaaatctagatgtgaaatcaatgttgttacccttcattaatctgctttcttcaaatgtgcaagatggagataggc

SEQ ID NO: 7552 - DNA, 201 bp, Homo sapiens
ccggaggcagcctcagacagcaatggcatcaatttgtcaggctttgggagtgggcagctagacaccaatgatgagagggatgttatcagtgcactaagttacatcttgctttatttctcagcggtaaatctagatgtgaaatcaatgttgttacccttcattaatctgctttcttcaaatgtgcaagatggagataggctc

SEQ ID NO: 7553 - DNA, 201 bp, Homo sapiens
attgatgaagttaaaagggaagaaaaaactgccatgcttatgcagtccagccttctaggtaacaaatttaaatgccaaatatttgaaaagaaattagaaactatctaaccacaggaaagcagcctggcaaagattcaaagtgtaggcaaaaacctgcagagagtgaacagagtcctcatgggcccaaggagcatcttgaaa

SEQ ID NO: 7554 - DNA, 201 bp, Homo sapiens
ttgatgaagttaaaagggaagaaaaaactgccatgcttatgcagtccagccttctaggtaacaaatttaaatgccaaatatttgaaaagaaattagaaactatctaaccacaggaaagcagcctggcaaagattcaaagtgtaggcaaaaacctgcagagagtgaacagagtcctcatgggcccaaggagcatcttgaaaa

SEQ ID NO: 7555 - DNA, 201 bp, Homo sapiens
ggtcagagacagagcaaaagacttaacctacaccattttcattttagaaaatgcaaaggctagagttaaaaatatgaaggctgctaaaccaatcgtacatyccagaaaaaaatactgctttcataaaacttgctcccgcatggcccacagaacactcaaggccaaaaagagtccaaagttcagaaagaaaaattacctcat

SEQ ID NO: 7556 - DNA, 201 bp, Homo sapiens; identical to SEQ ID NO: 1045

SEQ ID NO: 7557 - DNA, 201 bp, Homo sapiens; identical to SEQ ID NO: 1046

SEQ ID NO: 7558 - DNA, 201 bp, Homo sapiens
tgatgaagttaaaagggaagaaaaaactgccatgcttatgcagtccagccttctaggtaacaaatttaaatgccaaatatttgaaaagaaattagaaactatctaaccacaggaaagcagcctggcaaagattcaaagtgtaggcaaaaacctgcagagagtgaacagagtcctcatgggcccaaggagcatcttgaaaag

SEQ ID NO: 7559 - DNA, 201 bp, Homo sapiens; identical to SEQ ID NO: 1049

SEQ ID NO: 7560 - DNA, 201 bp, Homo sapiens; identical to SEQ ID NO: 1030

SEQ ID NO: 7561 - DNA, 201 bp, Homo sapiens; identical to SEQ ID NO: 1032

SEQ ID NO: 7562 - DNA, 201 bp, Homo sapiens
cactatccagcacgggggcccacctcttcctccagagtcaccggaagatgctggacctttagcaattcaacaggagacttcagttcaatctccggaacctrttaataatgagaacccctctccaacccagcaggaagctgcagctgagcatccacagactgctgagaagggtaagtcttctctaacccagcaggaggcccc

SEQ ID NO: 7563 - DNA, 201 bp, Homo sapiens; identical to SEQ ID NO: 1033

SEQ ID NO: 7564 - DNA, 201 bp, Homo sapiens; identical to SEQ ID NO: 1034

SEQ ID NO: 7565 - DNA, 201 bp, Homo sapiens; identical to SEQ ID NO: 1035

SEQ ID NO: 7566 - DNA, 201 bp, Homo sapiens; identical to SEQ ID NO: 1036

SEQ ID NO: 7567 - DNA, 201 bp, Homo sapiens
acgagcactgagctgactattgagccggaggcagcctcagacagcaatggcatcaatttgtcaggctttgggagtgggcagctagacaccaatgatgagagggatgttatcagtgcactaagttacatcttgctttatttctcagcggtaaatctagatgtgaaatcaatgttgttacccttcattaatctgctttcttca

SEQ ID NO: 7568 - DNA, 201 bp, Homo sapiens
agaacatcatgaagtcaccgtttcacctccaggtcaccatcaaactcagcattcagatttgcccaatgtctctgttaagcctccagacatgcagctcaccrtagcaacagagcctagtgcagaggtgggaacttctccagtccaccaggaggctacagctcagctctcaggaccaggtaatgatgtagaacctcccactat

SEQ ID NO: 7569 - DNA, 201 bp, Homo sapiens
gcccagcaggagaccccagctcagcctccagaacatcatgaagtcaccgtttcacctccaggtcaccatcaaactcagcattcagatttgcccaatgtctytgttaagcctccagacatgcagctcaccatagcaacagagcctagtgcagaggtgggaacttctccagtccaccaggaggctacagctcagctctcagga

SEQ ID NO: 7570 - DNA, 201 bp, Homo sapiens
agcctaccaatgagaaagaatcttcccaagcccagcaggaggctccagttcagtttccagaggaggtggaaccttctgcaacccaacagtaggccccaacygagcctccatgtcatcctacggagcgtgaactttccattagtgagcaggagcagccagctcagccttctgagtcttctggggaggttgaatcttctcaga

SEQ ID NO: 7571 - DNA, 201 bp, Homo sapiens
agcactgagctgactattgagccggaggcagcctcagacagcaatggcatcaatttgtcaggctttgggagtgggcagctagacaccaatgatgagagggatgttatcagtgcactaagttacatcttgctttatttctcagcggtaaatctagatgtgaaatcaatgttgttacccttcattaatctgctttcttcaaat

SEQ ID NO: 7572 - DNA, 201 bp, Homo sapiens
gaagtcatctaatgaggatgagatccccatctgatgaggacagcgaaaccccaacagagaagggggaggagagtgaagccctgccacgggaggagaacacrgagtgaccccagcccacctcaggcgtcctgcaaaaatacttagcgtaaacaacaagggccatcagaaagaaaagcaggactgaagccagcggcccacgca

SEQ ID NO: 7573 - DNA, 201 bp, Homo sapiens
agagcctagtgcagaggtgggaacttctccagtccaccaggaggctacagctcagctctcaggaccaggtaatgatgtagaacctcccactatccagcacrggggcccacctcttcctccagagtcaccggaagatgctggacctttagcaattcaacaggagacttcagttcaatctccggaacctgttaataatgagaa

SEQ ID NO: 7574 - DNA, 201 bp, Homo sapiens
gcactgagctgactattgagccggaggcagcctcagacagcaatggcatcaatttgtcaggctttgggagtgggcagctagacaccaatgatgagagggatgttatcagtgcactaagttacatcttgctttatttctcagcggtaaatctagatgtgaaatcaatgttgttacccttcattaatctgctttcttcaaatg

SEQ ID NO: 7575 - DNA, 201 bp, Homo sapiens
gacacgagcgtttcggggctgccagaatggctctcgctcactgcgcggtgccagcatgtgtcatgtcccggctgtgtttctggggcctatggcccctgctyacgtggcaactattgtggctactagtcaaggaggctcagcctctggagtgagtcaaggatctgctccagctgacctctaacccccgggggccgcctgagc

SEQ ID NO: 7576 - DNA, 201 bp, Homo sapiens
ctgagctgactattgagccggaggcagcctcagacagcaatggcatcaatttgtcaggctttgggagtgggcagctagacaccaatgatgagagggatgttatcagtgcactaagttacatcttgctttatttctcagcggtaaatctagatgtgaaatcaatgttgttacccttcattaatctgctttcttcaaatgtgc

SEQ ID NO: 7577 - DNA, 201 bp, Homo sapiens
cagcatgtgtcatgtcccggctgtgtttctggggcctatggcccctgctcacgtggcaactattgtggctactagtcaaggaggctcagcctctggagtgrgtcaaggatctgctccagctgacctctaacccccgggggccgcctgagccctggtcttccgctcctcccatctcccatgggaatctccccatgcccctat

SEQ ID NO: 7578 - DNA, 201 bp, Homo sapiens
ctgactattgagccggaggcagcctcagacagcaatggcatcaatttgtcaggctttgggagtgggcagctagacaccaatgatgagagggatgttatcagtgcactaagttacatcttgctttatttctcagcggtaaatctagatgtgaaatcaatgttgttacccttcattaatctgctttcttcaaatgtgcaagat

SEQ ID NO: 7579 - DNA, 201 bp, Homo sapiens
gtcccggctgtgtttctggggcctatggcccctgctcacgtggcaactattgtggctactagtcaaggaggctcagcctctggagtgagtcaaggatctgytccagctgacctctaacccccgggggccgcctgagccctggtcttccgctcctcccatctcccatgggaatctccccatgcccctattgccccagcagat

SEQ ID NO: 7580 - DNA, 201 bp, Homo sapiens
gactattgagccggaggcagcctcagacagcaatggcatcaatttgtcaggctttgggagtgggcagctagacaccaatgatgagagggatgttatcagtrcactaagttacatcttgctttatttctcagcggtaaatctagatgtgaaatcaatgttgttacccttcattaatctgctttcttcaaatgtgcaagatgg

SEQ ID NO: 7581 - DNA, 201 bp, Homo sapiens; identical to SEQ ID NO: 1044

SEQ ID NO: 7582 - DNA, 201 bp, Homo sapiens
actattgagccggaggcagcctcagacagcaatggcatcaatttgtcaggctttgggagtgggcagctagacaccaatgatgagagggatgttatcagtgcactaagttacatcttgctttatttctcagcggtaaatctagatgtgaaatcaatgttgttacccttcattaatctgctttcttcaaatgtgcaagatgga

SEQ ID NO: 7583 - DNA, 201 bp, Homo sapiens; identical to SEQ ID NO: 1047

SEQ ID NO: 7584 - DNA, 201 bp, Homo sapiens
acagttcaacctccaggtgaggatcaagctcattataacttgcccaacattacagttaaacctgcagatgtggaggttaccataacttcggagcctaccartgagaaagaatcttcccaagcccagcaggaggctccagttcagtttccagaggaggtggaaccttctgcaacccaacagtaggccccaaccgagcctcca

SEQ ID NO: 7585 - DNA, 201 bp, Homo sapiens
agagaacaggacttgcctgccttccagatcccagagctgcagtgatgagaagcacaggaaaaccttagaagattattgggagcatttgtaactggggacaytcctgtttctacctctcagtttcctgtagattcttcctatgaagaactactatataaagatctgtgattgaatatgtataaaagatgatgcctcctgctt

SEQ ID NO: 7586 - DNA, 201 bp, Homo sapiens
gatgaagttaaaagggaagaaaaaactgccatgcttatgcagtccagccttctaggtaacaaatttaaatgccaaatatttgaaaagaaattagaaactatctaaccacaggaaagcagcctggcaaagattcaaagtgtaggcaaaaacctgcagagagtgaacagagtcctcatgggcccaaggagcatcttgaaaagg

SEQ ID NO: 7587 - DNA, 201 bp, Homo sapiens
aacacaactgcaagaaatgcctttgaagaaaacatttttatggaaaacactactaggccataaggcaccatctctgaaaacacaacccacaatcatcctcmtgaggcagattccgctgggactgcattcaacttagggccaactattaagcaaactgagacaaaatgggaatacaacaacgtgggcactgacctgtccccc

SEQ ID NO: 7588 - DNA, 201 bp, Homo sapiens
gatcaagctcattataacttgcccaacattacagttaaacctgcagatgtggaggttaccataacttcggagcctaccaatgagaaagaatcttcccaagsccagcaggaggctccagttcagtttccagaggaggtggaaccttctgcaacccaacagtaggccccaaccgagcctccatgtcatcctacggagcgtgaa

SEQ ID NO: 7589 - DNA, 201 bp, Homo sapiens
caacttagggccaactattaagcaaactgagacaaaatgggaatacaacaacgtgggcactgacctgtcccccgagcccaaaagcttcaattacccattgytctcgtccccaggtgatcagtttgaaattcagctaacccaacagccacgttccctcatccccaacaacaatgtgagaaggctcatttctcatgttatccg

SEQ ID NO: 7590 - DNA, 201 bp, Homo sapiens
atatgtacgtatatattctatttttttgtattcacatatatgtttttttttcttatcatcaacaatcaccttccctagagcactttctgagtataaatctrtgagctttgttaagcacagcactgggagaatttctggagcccagtctctgcctgtgtttctttgtgctctctcacttgacatttctgaatgcaaatatgt

SEQ ID NO: 7591 - DNA, 201 bp, Homo sapiens
gtgttttatgagagttaaaaataacatgactatttacaaagatgtaggcagagttaggagaataaagaaggggtagtgaagcactctgttaccagcaagawtgtggacctgttattctatctggacctaaaggtatttactggaaatgtgacataatatcagagctgtaagacatgggagtccaacaggaactgtgacttc

SEQ ID NO: 7592 - DNA, 201 bp, Homo sapiens
ctgggatctacttagaattctatgctttacatatagggccaacgtggccaggtcactatgtctctcagagcctcagcttctctgtttgtgaaagatcatgycttccctgaccaaagtgcctgtcagaaccagatgctcatgatcgtgctgactttgtgggttgtttactccccctcttttctctttcccttatagttttat

SEQ ID NO: 7593 - DNA, 201 bp, Homo sapiens
atctttgtggttttgttttttccacttgcttatgactttgaacatatttgcaagtattttggccatttgtgctttctcttcagtaaaatgcctattcaggyttttgacaatttttcttttgaattgtttgtctaattctaatttatttgtaggaacgaattctattttctagatattaatcctatgtcagttatgtatgta

SEQ ID NO: 7594 - DNA, 201 bp, Homo sapiens
atccccagtagagacctgggggccagttggataaaattcacacttatgtccattttcctttatcaaaatgaaacagaatttccaacctaaattaacactcwtttaagttcttactatatgatatctatatgggtgtgtgcatgcacacatgtactcatgtataaataggtattaacatataacacatgtacatatagtatg

SEQ ID NO: 7595 - DNA, 201 bp, Homo sapiens
agtctttctacctatctgttcatctatccatccgtccattcatccatctatccatccatgtatccatctcctaacttttaccacagaaagtttgagtttcstcacacatctctatagtaaaatataaacagataaagttcaaaattagagaacatatagaaagcacagaagtctgaggccaagagcaaattaaaacacaga

SEQ ID NO: 7596 - DNA, 201 bp, Homo sapiens
ccttgggataaagaagttaaactgatttctaaactgactctggagtcagccagagtgaggaactttctttatcatatatctatccatacatctgtctctgwatccatcagtctaccttatctttaatcatgaatttcagagtaaattttaatagtcagcatgtttcacccccgtatattgtgcatatcattaattagaatt

SEQ ID NO: 7597 - DNA, 201 bp, Homo sapiens
tctaaactgactctggagtcagccagagtgaggaactttctttatcatatatctatccatacatctgtctctgaatccatcagtctaccttatctttaatyatgaatttcagagtaaattttaatagtcagcatgtttcacccccgtatattgtgcatatcattaattagaattcaaaatttgttgatgatttttatttgt

SEQ ID NO: 7598 - DNA, 201 bp, Homo sapiens
ctaaactgactctggagtcagccagagtgaggaactttctttatcatatatctatccatacatctgtctctgaatccatcagtctaccttatctttaatcmtgaatttcagagtaaattttaatagtcagcatgtttcacccccgtatattgtgcatatcattaattagaattcaaaatttgttgatgatttttatttgtt

SEQ ID NO: 7599 - DNA, 201 bp, Homo sapiens
cctttaaagtaactcttgaggtcagatagtctatgtccttgaacttagttcttctttgacatgattgttctggatcttttggtcctttgcatttctgtatmcatttataattaagttgtcaatttctacaaaaatgcttgatccgattataattgagattgatcagtttggtgagaattgtacttttaacaatttattgaa

SEQ ID NO: 7600 - DNA, 201 bp, Homo sapiens
gtggaccgaagcagcgtctgttgcacagtacttccaggtcaggagggtgatcctgggtggaataaactgatttgtttcaaggtgtgcctctgaacacatcraggcagggtgggtggagaggagataatttctattctattgcagtggttctcaaaatgtggtcaccaggccagcagcatcagccttacatagatttaaatc

SEQ ID NO: 7601 - DNA, 201 bp, Homo sapiens
ttccctgaccaaagtgcctgtcagaaccagatgctcatgatcgtgctgactttgtgggttgtttactccccctcttttctctttcccttatagttttatgrctgcatttctcaacagcagaacatgatgcaagattttgtgaggacagccacttaccacagagccgtcctccagaatcacattgactttagagacaaggta

SEQ ID NO: 7602 - DNA, 201 bp, Homo sapiens
acctaggtccaaatctattgaatctatgtagtcagaagtctgggatctacttagaattctatgctttacatatagggccaacgtggccaggtcactatgtstctcagagcctcagcttctctgtttgtgaaagatcatgccttccctgaccaaagtgcctgtcagaaccagatgctcatgatcgtgctgactttgtgggtt

SEQ ID NO: 7603 - DNA, 201 bp, Homo sapiens
taccattacagaccatatcgaaaagccaattttttttggatcaagatttgtgaagaatctgagattttatcctatttgcaaggtaacaagttacattgccwctgtttcatgggtgctgacaaaggacatagggatcctggttcagagataaaggctttattactcagagaaagagcattagccagagtgtcagcacattgt

SEQ ID NO: 7604 - DNA, 201 bp, Homo sapiens
ttctgcaaaatttccttaacacaggctaactcagagaaaaggtatgtcatttcttcattgcctcttcctgctgcttgctgccgggaatgtagacatgattkccagagctgcagcagtcactttgtgacttccaggcactctcagatggaaagtgtgctctaagcacatcagagaagtatgcctttgccttgtccttccttg

SEQ ID NO: 7605 - DNA, 201 bp, Homo sapiens
ccatatcgaaaagccaattttttttggatcaagatttgtgaagaatctgagattttatcctatttgcaaggtaacaagttacattgcctctgtttcatggktgctgacaaaggacatagggatcctggttcagagataaaggctttattactcagagaaagagcattagccagagtgtcagcacattgtcagttctgtgag

SEQ ID NO: 7606 - DNA, 201 bp, Homo sapiens
ttaactttgcatccataccttgggctgaacttgaaatctagggtgttgtacttttaattgaagaaagttctagaaagtttcttctgaatgtagtacatttttcttttctttgggaccatggattgcattctccaacttaacagcctccatttcttaaatggcagttgtgagcgttcttgtaacagaccatggccacatgaa

SEQ ID NO: 7607 - DNA, 201 bp, Homo sapiens
gctgcttgctgccgggaatgtagacatgattgccagagctgcagcagtcactttgtgacttccaggcactctcagatggaaagtgtgctctaagcacatcrgagaagtatgcctttgccttgtccttccttgtgtctgcctaactgtggaactgctgaactgtctaattctggacttctgttatgagagagaaaaataaat

SEQ ID NO: 7608 - DNA, 201 bp, Homo sapiens
cataaatttgggtatgttgtggtttccttgctatacagttcaatatattttctaatttttattgttattttctctttgacctatggatttattttttgatscatggattatttggggatgtttaatttccaatcatttggggattttccagatatctcttggttatgatttctagttgaattctttcttgatctgggaaaa

SEQ ID NO: 7609 - DNA, 201 bp, Homo sapiens
taactttgcatccataccttgggctgaacttgaaatctagggtgttgtacttttaattgaagaaagttctagaaagtttcttctgaatgtagtacatttttcttttctttgggaccatggattgcattctccaacttaacagcctccatttcttaaatggcagttgtgagcgttcttgtaacagaccatggccacatgaag

SEQ ID NO: 7610 - DNA, 201 bp, Homo sapiens
tgcagcagtcactttgtgacttccaggcactctcagatggaaagtgtgctctaagcacatcagagaagtatgcctttgccttgtccttccttgtgtctgcmtaactgtggaactgctgaactgtctaattctggacttctgttatgagagagaaaaataaattactaattcatttaatctactataattttggggagcttt

SEQ ID NO: 7611 - DNA, 201 bp, Homo sapiens
gtatgttgtggtttccttgctatacagttcaatatattttctaatttttattgttattttctctttgacctatggatttattttttgatccatggattatktggggatgtttaatttccaatcatttggggattttccagatatctcttggttatgatttctagttgaattctttcttgatctgggaaaatgctctgtacg

SEQ ID NO: 7612 - DNA, 201 bp, Homo sapiens
aactttgcatccataccttgggctgaacttgaaatctagggtgttgtacttttaattgaagaaagttctagaaagtttcttctgaatgtagtacatttttcttttctttgggaccatggattgcattctccaacttaacagcctccatttcttaaatggcagttgtgagcgttcttgtaacagaccatggccacatgaaga

SEQ ID NO: 7613 - DNA, 201 bp, Homo sapiens
agaaatggcctgagccaactgcctggtgctgcctgcctcactggtttcaggtgcggtcaggctgtagccatggcctttgggataggatgtaagtaagctgwcctggcactcatcactccaggatttctctagccttgcatgtcaatctgtcttcacttttggacagaggagcatgtctgcctcttagtgcgtctggaccta

SEQ ID NO: 7614 - DNA, 201 bp, Homo sapiens
tatgcatgtacatgtttttgcaggagtggtcacaaggttggcaaggtgtggctacgtgctctcactgtgggtcccatgtgacatttctgggtcagtaaaamgataccattcctgtttaaggaacagggcaggactaaaggtctcccgtgggtctccaagctgtgaaacttcccacctcaagctggaagctatctcttgctc

SEQ ID NO: 7615 - DNA, 201 bp, Homo sapiens
gttgcttgtcatagagtagatggttgatcactttgttagggaaggatgataaagcggtgggtggcataggcatcctctctgagtggaatcactcttcaatrtagatgccatactccaggatcccatggatcattagtaattatacaggaagggtggggaaatgaatggtttgagaaaaactcgttttcatagctgaaatca

SEQ ID NO: 7616 - DNA, 201 bp, Homo sapiens
catgtacatgtttttgcaggagtggtcacaaggttggcaaggtgtggctacgtgctctcactgtgggtcccatgtgacatttctgggtcagtaaaaagatrccattcctgtttaaggaacagggcaggactaaaggtctcccgtgggtctccaagctgtgaaacttcccacctcaagctggaagctatctcttgctccttt

SEQ ID NO: 7617 - DNA, 201 bp, Homo sapiens
agatggttgatcactttgttagggaaggatgataaagcggtgggtggcataggcatcctctctgagtggaatcactcttcaatatagatgccatactccakgatcccatggatcattagtaattatacaggaagggtggggaaatgaatggtttgagaaaaactcgttttcatagctgaaatcagtcaacagtaccatatt

SEQ ID NO: 7618 - DNA, 201 bp, Homo sapiens
atgtacatgtttttgcaggagtggtcacaaggttggcaaggtgtggctacgtgctctcactgtgggtcccatgtgacatttctgggtcagtaaaaagataycattcctgtttaaggaacagggcaggactaaaggtctcccgtgggtctccaagctgtgaaacttcccacctcaagctggaagctatctcttgctcctttt

SEQ ID NO: 7619 - DNA, 201 bp, Homo sapiens
aagtttaattaatggacttacagtaatatctgtgaagcattgactatgtacttacaagatatctgcaaggttaattcctgttcatctatccattcatccastcattcaacaaatacttattgagagtcagttatgtgccaagtacttctttatgtgctgaagatacagcactgaagaaatagaagttcttacaattacaaa

SEQ ID NO: 7620 - DNA, 201 bp, Homo sapiens
ccagtgctttgcaccaatcttttggttggacaaaaatagtgttaggttagtgttacacaacttatgaactgtaggcttggttgttaattgtaaggctttgrgtgaagaggaaacccaaataatatattcagtttcttagaacttataagtaactttgttttaagagagtttgattcgatggctgcttttgctgacaaattc

SEQ ID NO: 7621 - DNA, 201 bp, Homo sapiens
cttcttgccttttccagcctttagaggttgcccacattacttggattgtggctacatcactctgacttttgcttccattatcatatctccttctctgattmtgaccctcctgcctccctcttacaaggactcttgtgactgttttggacccttctagataatctaaggtaatctccccatttcaccatttttagtaacatc

SEQ ID NO: 7622 - DNA, 201 bp, Homo sapiens
cctgggcaatgctggaaggggaaatgtgtttttcttcaggggcaccctctgtgcaaatgaacttcaatcacaggtgaaaccaaagctgtcactacagggtrcaactctggagcaaaaacacgctgcatagtctcctcactaccccagcggacaggcagcctctgccagcacctaccacagttagaagtaaaaccaagaaaa

SEQ ID NO: 7623 - DNA, 201 bp, Homo sapiens
caaatgtggacatccattttgactttcttatactctaaatagctggcctttcttccctctcctctggtaaacattccagctctacagaattaacagcgttyttcaaacaaatggtacctgcagatcaaaagcctcctccacatcaaaaaaaaaaaagaaaaaaaaaaagcactccttgccaaaatcttctccaaaggcaaa

SEQ ID NO: 7624 - DNA, 201 bp, Homo sapiens
tcatccagtcattcaacaaatacttattgagagtcagttatgtgccaagtacttctttatgtgctgaagatacagcactgaagaaatagaagttcttacarttacaaagctgacattttcaggaagggacacagacaataagcaaataaacatatagtgggttacgtgcgataagtgtggaaaagacaaaccagaataaga

SEQ ID NO: 7625 - DNA, 201 bp, Homo sapiens
taatggaattattctttttattgtattctttttgatttgtggcatttttctaaattttttatacttttcatttgttggttttgtagttatttttaaaccaycatttgcatcctttcctttatagggatataactgcaaaagatagagttgagagaaattttataatgaagatacatttttaaccaaagaatccttctgttt

SEQ ID NO: 7626 - DNA, 201 bp, Homo sapiens
agggacacagacaataagcaaataaacatatagtgggttacgtgcgataagtgtggaaaagacaaaccagaataagaaacagagaatagctgggaattaartcaatgtactacatataggtaattttggagggggtagcctcataataagatgacatctgagtagaaaactacaatggggatggggaggagccgtgtgcat

SEQ ID NO: 7627 - DNA, 201 bp, Homo sapiens
ttccccttacctgagcccccaaaccctggccttcagggttcccttctgcttccactgggttctcttggctgagcagagagaaggttcaactgagcccttckcatcctgcaggtactggattgtgcaggcacctggcttgtacctctctctcccttcctgctatctgcctcctggctatggcattcctcaattaccatccct

SEQ ID NO: 7628 - DNA, 201 bp, Homo sapiens
ctccccatcatatatacatctatcctattagtcctgtccctaataggatagatgctattgctctccagactgggtgacagagtgagaccctgtcttaaaartaattctctcttcggctttgattttccacaccttgattataatgtgtctcagtgtgggtttctttgagttcatcttatttggagatgaaccctgactaat

SEQ ID NO: 7629 - DNA, 201 bp, Homo sapiens
ataataagatgacatctgagtagaaaactacaatggggatggggaggagccgtgtgcatctgtgctaagggtggtccagacagagggagcagaactacaargcccttgaagcaagatgtgttcaaaggatggaggagaaggcaggagacaggatcagattgctagaggcctggtcaggtgagacactagggaccataatga

SEQ ID NO: 7630 - DNA, 201 bp, Homo sapiens
ttcgctatctgtgcaccttcctactgcacaggtttgaaagttgcagggaaaagaggggaaagactacctacacgttggctgtcactgtgtggtgttcctcrtgtgggctgcaccactccatggccaccaaatctctgttctcttcctgactgccctactctcttcccaggctttctagtatgttccaactagcaaagagat

SEQ ID NO: 7631 - DNA, 201 bp, Homo sapiens
tgacactaattcttgtttctccaattttcaaggaaataaacacagatgttaatgttaattttagattttaggaaaaagtgaaaatgagatgcttttctgtstgtcatatcaactctaactaaactacgcaaagcctcttaagccaaatgaattgagctttggaggagtgagagagggtttgtgctttttgaaccttcttgg

SEQ ID NO: 7632 - DNA, 201 bp, Homo sapiens
cctcttaattatgaatcactctaaagttggcaaagaactctatatacatgtttgcaaagaactcttatatacatgtttttccatttaacatacagaagaaycttatgaggaaagtaggagagagattttgtcacccttcaacaaatgcagataccaagtttcagggaatttaagtgccttccaaggttccacagctaaaat

SEQ ID NO: 7633 - DNA, 201 bp, Homo sapiens
aaaatcgactttgattagctttatttattgctctgaactacctcctgaatcctagggaatattttgaaaattatgtctatgtgggttttccaccgatgtcrttcattcatttgtgcatcaattcagcaaatgtttattgagatcctactatgtgccaggtactgtggtggtgctagcacatgtgtggaaagtaatttttaa

SEQ ID NO: 7634 - DNA, 201 bp, Homo sapiens
tggatggaaaactgcaatccttccatatgctcagagcaagagaaatggcatttgcaaacgactttaataactatcaaagatccagacaaaatcgactttgrttagctttatttattgctctgaactacctcctgaatcctagggaatattttgaaaattatgtctatgtgggttttccaccgatgtcgttcattcatttgt

SEQ ID NO: 7635 - DNA, 201 bp, Homo sapiens
tcctgtccctaataggatagatgctattgctctccagactgggtgacagagtgagaccctgtcttaaaagtaattctctcttcggctttgattttccacascttgattataatgtgtctcagtgtgggtttctttgagttcatcttatttggagatgaaccctgactaatacagtcagtctagataacaatttgtcaattt

SEQ ID NO: 7636 - DNA, 201 bp, Homo sapiens
acaatttgtcaattttgtttatctttttaaagaatcaaattttttattttgttgattgtcctctattgttttcctattatctatttcatttatctctgctrtaatctttattgttttttattttatttttattttttgctagctttaaggctagtccttctttttctagttccttgtcattaaggtaggttgttgatttga

SEQ ID NO: 7637 - DNA, 201 bp, Homo sapiens
tctccataccaagaatcagcctgaagtgtaaactttcactgggcatatgcagtaacttactaatttcccctatgtatgcagatgcttttgaatgccctagsctttaatgtctgactcccaaaaggggaaaatagaaaaatgatggaaatcagggtgtcaacctttgaaatctcctggaagttttggagagagaagcttatg

SEQ ID NO: 7638 - DNA, 201 bp, Homo sapiens
tttgtttatctttttaaagaatcaaattttttattttgttgattgtcctctattgttttcctattatctatttcatttatctctgctataatctttattgktttttattttatttttattttttgctagctttaaggctagtccttctttttctagttccttgtcattaaggtaggttgttgatttgagattttgattgtt

SEQ ID NO: 7639 - DNA, 201 bp, Homo sapiens
agtttctacataagtggttatatcagctgtgattagagacagttttactttcttcctatcctgtctgtatgtctcgccttccttccttttttttctttttyttttttttgccttattgcatcagctaggtgctctagtacaatgtacaatgttgtatagaagagagtgagcatccttgcctctttcatgaactcgagagta

SEQ ID NO: 7640 - DNA, 201 bp, Homo sapiens
taattaacttgaccaagattactaggaagtgtgaaagtagagacttgaactcaggttctttcgtcttagaagcaagtgctctaccactgcactgtgctatmcacacacacacacacacacacaaaagggaaaaggaagaaaaaaagagttataaagaggtaacagaataaattaaatccctgaactaaaatgaaaaattgt

SEQ ID NO: 7641 - DNA, 201 bp, Homo sapiens
tcatttttattttagtctgttaatatatggatttttcaatgctaaaacaaccttgaatttctgagttaaacctcattgtcatgatgtatgacccttttaasatattgctagatgaagtttgctagaattttataaatgatttttgtgtctgtgtttatttggtattgctttgtagttttcttaatgcctttgtggggcttg

SEQ ID NO: 7642 - DNA, 201 bp, Homo sapiens
gcttgaaaccaggaggcagaggctgcagtaagccgatattgcgccactgcactccagcctgggtgacagagtgggactctctcaaaaaaaagaaaaaaaaygttctatatatcaaaaacagataaaacttttccctgtcagattgcgtcccttctttcccttcatagtctggttgccactgtttcttttatatttctcttt

SEQ ID NO: 7643 - DNA, 201 bp, Homo sapiens
agtctgttaatatatggatttttcaatgctaaaacaaccttgaatttctgagttaaacctcattgtcatgatgtatgacccttttaacatattgctagatkaagtttgctagaattttataaatgatttttgtgtctgtgtttatttggtattgctttgtagttttcttaatgcctttgtggggcttgggtatcagagtaa

SEQ ID NO: 7644 - DNA, 201 bp, Homo sapiens
ataagttaaaaataatattcataggatggatacagtatcatttatgcattcatttccctattaatgacttctagtttgtttcaacattttattattatcartattatatatattatatattatatagtacacatgttcaaattttttctagaatgtatgcttctggggggtggtatttccaaattataagtacatctttaa

SEQ ID NO: 7645 - DNA, 201 bp, Homo sapiens
aggaatggttgaatgggagaaggaaaccaaagtggaggagatttttgagaggtaatgtcaaggaggtaaagagttttttccatttggtttgtggccgctasaccttcttgcccatacagaactgaccctgggaagctgttctttctgggcctgaaaatgacttctctcattagtgattaatgttacctattcaggggtctt

SEQ ID NO: 7646 - DNA, 201 bp, Homo sapiens
ggatggatacagtatcatttatgcattcatttccctattaatgacttctagtttgtttcaacattttattattatcaatattatatatattatatattatmtagtacacatgttcaaattttttctagaatgtatgcttctggggggtggtatttccaaattataagtacatctttaacttgacaataatgccaagtgatt

SEQ ID NO: 7647 - DNA, 201 bp, Homo sapiens
taataagcatattttcatgtttgttagactttatgacttcaaaaatatataaataatagtccacatgagaattcctgtaatttgcttaaccaatcgcctawagtagaacatttaaatagtttctgcttttttctatcataaataatattttttctattataattagtagtagcaactttgaaaattataaataaatagacg

SEQ ID NO: 7648 - DNA, 201 bp, Homo sapiens
ctgaagaataggtactattatgattcccattttataggtaaagtaatggactccaaggaaattatgcatcttggccacaggccacagctagtaaatggagratctaaactagcaaccgaggccttcacctccaaaatgcttgcttcttttcatgctttgagacagactataattacgtgctatattgtgtagtacagcctc

SEQ ID NO: 7649 - DNA, 201 bp, Homo sapiens
taatattttttctattataattagtagtagcaactttgaaaattataaataaatagacgtctttgggaggggtagcttttggatggtttcattcagatcartcctaagaggttggacaactctgccaaaggatatgaactttttgttttttgctctgctacatgctgccaaattgcttcccaaaacacatgttctgttttg

SEQ ID NO: 7650 - DNA, 201 bp, Homo sapiens
ctgtaccccactgcagccggcgtcatggcagcggctgcttcgcacaggctgccgctgccatcgttaccatgctgaccatcaggtagtattaaacgggattsctggctctctcaggaccatcttcaaaagatcaaatgaactacatccaggacagtttatacggcagataaacgaatttatacactggcttttatctcctca

SEQ ID NO: 7651 - DNA, 201 bp, Homo sapiens
gggtcatatgccacacctgttactgagggtagactaagttcacatggaactttttggacagaatgtggagaagagatgaatccgcactgctaaacaaattytggatagtcagaaaacacacacacacacacacacacacacacacacaccccaaatgcctgctccagagattttttatagagtaaatgatatatcctagta

SEQ ID NO: 7652 - DNA, 201 bp, Homo sapiens
ctgattcttacgactgtaaattccacaggaaagcctgccttttcctaataacttaagcaaagagctccagatttagtttaggtagttcagtgaggttatcbtaccttggattatgtgctcatctacggatcaatcactgtcttcaggggaaaagtagtgctctgacttgccaatctggggtcatatgccacacctgttact

SEQ ID NO: 7653 - DNA, 201 bp, Homo sapiens
ctgggcccccaagagcgcagagatgcctgggtctgcagccaccctgcagcggctgcagctgcaccctagaagctcttgctccaaattggaaggggcggggytctcgcctgtctccaggtcccaccagctccgtggagcttgcagccctggtggcgcctccttgcagcctgaggcgggggcttcatgtcctcactgggcccg

SEQ ID NO: 7654 - DNA, 201 bp, Homo sapiens
gacccgtccccttctgcccaggagcctgtctgcctccagccactgtccatgccttcatgccaaggggcgcctgcaggccagtgctgggctgtcctcagccrcccctaagcctccctttcatgtttgtcagagcccaaagtctagaggaggtcgaggtggcagggggctggtgtgttaacactgccgcaatcgtgtgcacac

SEQ ID NO: 7655 - DNA, 201 bp, Homo sapiens
tttgttttttttttttactttgaatactttttcctcaatgttcacatggtcaattcttttaactccatgaagtctttgtcaaatgccaccttctcaatgaratctaccctgaccatcctattttaaattgtacccataccatgcccaacccttctttttcaattctgtgtttttcctcgaacacttacagcatcctaaaag

SEQ ID NO: 7656 - DNA, 201 bp, Homo sapiens
caaaccgtcaagtaattatattggttctattttcaaaatgtatccagaatcacaccaatttttattatattctctgtttcctcgttttctcaacaccatcrtctctcatctagattactgcaatagcttcttacctgtctcttctcaacagagccaaagcctcgcaggagcttcttcatagtctggctcctaggtactctc

SEQ ID NO: 7657 - DNA, 201 bp, Homo sapiens
ttatcctctccatcattcaagccaagaattttgaaggcctctctttctttatctcctgaatccaaaccgtcaagtaattatattggttctattttcaaaaygtatccagaatcacaccaatttttattatattctctgtttcctcgttttctcaacaccatcatctctcatctagattactgcaatagcttcttacctgtc

SEQ ID NO: 7658 - DNA, 201 bp, Homo sapiens
aacaatttttactcaatatttttaaagcttggtgttttggtttttgtgttttgtttctgtctgcaaatcttgctattgagaattccaatgccattctgacwcctgctcctttagagtaacaaagttttcccctctagatgcttttagtatcttctctttatttctagtgttctaatgagaatcttttttcagttcttgtgc

SEQ ID NO: 7659 - DNA, 201 bp, Homo sapiens
  misc_feature (1)...(201): n = A,T,C or G, or insertion/deletion polymorphism (see Tables 1-2)
tctcagaatttagcataaagaaatataggcctagatcattatttggttaaattaagaatcagcgtttccagtgttatgatgtaatgtaactattgttgaantctgagtcagttggtatagtagatgctctatgcttatgtatgttttctcatatagtcttttgtttttcctggagttaattgtcttggtttctttcattag

SEQ ID NO: 7660 - DNA, 201 bp, Homo sapiens
taaggaacatataagaaatcaaagattcaatttattcctagacacacacccttctcctgctagcaactaccaacagtactgttatgccacattctcaacaycctttgtggctatagcgacatttttgaatccttgcttttgtttcctcgttcctggagttacatatgtctcccatcaggttagtgtccccttggctgttaa

SEQ ID NO: 7661 - DNA, 201 bp, Homo sapiens
taattctggtagagcacagcacattaagacacaaaagttgcttaactgtcaaacagcacaacctggattccgcacccccaacaccatcccacttctctctstctctctctcatttatctttctaccttccttcttctcttttttcaaaggaagaaaacttcttaatggggatgagtagcattttttttgtcagaataggat

SEQ ID NO: 7662 - DNA, 201 bp, Homo sapiens
cttttttatggatgcatagtattccatggtgtatatgtgtcacattttctttatctagtctatcattgatgggcatttgggtcagttccaagtctttgctrttgtgaacagtgccacaataaacatgcatgtgcacgtgtctttagagtagaatggtttataatcttttgggtatatacccagtaatgggattgctgggtc

SEQ ID NO: 7663 - DNA, 201 bp, Homo sapiens
aaatggtatttgtagttctagatccttgaggaatcacaatactgtcttccacaatgtttgaaccaatttacactcccaccaatagtgtaaaagcatttctstttctccacatcctctccatcatctgttgtttcctgactttttaatgatcaccattctaactggcatgagatagtatctcattgtgttattgatttgcat

SEQ ID NO: 7664 - DNA, 201 bp, Homo sapiens
tgagatagtatctcattgtgttattgatttgcatttctctagtgaccagtgatgatgagctttttttcatatgtttgttggctgcataaatgtcttctttkgagaagtgtctgttcagatccttcacccactttttgatggggttgttttttttttcttgtaaatttatttaagttctttgtagattctgaatattagccc

SEQ ID NO: 7665 - DNA, 201 bp, Homo sapiens
tctttgacttatgtattcctttgcactttctcatttgatttgatccttgaaataacactgaagaataggtactattatgattcccattttataggtaaagwaatggactccaaggaaattatgcatcttggccacaggccacagctagtaaatggaggatctaaactagcaaccgaggccttcacctccaaaatgcttgct

SEQ ID NO: 7666 - DNA, 201 bp, Homo sapiens
ccatgctgttttggttactgtagccttgtagtatagtttgaagtcaggtaacatgatgtccccagctttgttctttttgcttatgattgtcttggctatgygggctcctttttggttccatatgaaatttaaagtagtttttttccagttctgtgaagaaagtcaatggtagtttgatggggatagcactgagtctataaa

SEQ ID NO: 7667 - DNA, 201 bp, Homo sapiens
tgtattcctttgcactttctcatttgatttgatccttgaaataacactgaagaataggtactattatgattcccattttataggtaaagtaatggactccmaggaaattatgcatcttggccacaggccacagctagtaaatggaggatctaaactagcaaccgaggccttcacctccaaaatgcttgcttcttttcatgc

SEQ ID NO: 7668 - DNA, 201 bp, Homo sapiens
agccagtggctagggaagaacagagaaggaaaatctattttctcaaacagcaggagggtcaagcggctttggagatctaaagtcgtgctcttggttgggawagtgggaggaccaaggaaactgcatttcagcacttggacagcacagaacagcacagagttggggggccatctgtcaggggagatcaagggtaggagctca

SEQ ID NO: 7669 - DNA, 201 bp, Homo sapiens
ttcagcttctaaactgaacaggaataagtaaacaaccatctatagtacatgtaagttattgaaaacccttctaaatgagacaagaacagcagcatatcagrtggaattactgccctgatctctcttggaacttacccctgtacctaaaaggatgaattctgctgctaccacctgaagtgtgtgtgtgtatgtgtacgtgta

SEQ ID NO: 7670 - DNA, 201 bp, Homo sapiens
ttttttctgtaaagggtcagacagtaaatactttaggctccatgggccatgggcttagttgcaaccactcagctctgtcattgtagcatgaaagcagccayagacaatatgcgtagaaatgaatgtggctgtgctaccgtaacactttatttatggacactgaaatttgaatttcatatgattttcatttgtcacaaaata

SEQ ID NO: 7671 - DNA, 201 bp, Homo sapiens
cagcaggagggtcaagcggctttggagatctaaagtcgtgctcttggttgggaaagtgggaggaccaaggaaactgcatttcagcacttggacagcacagmacagcacagagttggggggccatctgtcaggggagatcaagggtaggagctcaaaggccttcctgccagcaaatatcattcttgataatctccttgcaag

SEQ ID NO: 7672 - DNA, 201 bp, Homo sapiens
agaggctttaagtgacttccccaaggtcacatagctctttggtgataaaggtagaactaaaatttgtatcttcagattcctgatcttgtgtgaaactgatyaaaaatagattaagtcacaagatgcaatgacctgaaggcaggcctatttgctcccttccaggcatgtgatgtgtccttctttgccagtgagaataatgag

SEQ ID NO: 7673 - DNA, 201 bp, Homo sapiens
ccttaaagacgaagataacaaagtgacttcttgtaaattactggaacctccatatggttttaatagcatacagttctccaaattgttttctgttatattaygtataaatcataggacatacttctgagactaaaataataaaaagtgatattcagatgctaacagctaatctcacttccagaaagaattgataaatcctat

SEQ ID NO: 7674 - DNA, 201 bp, Homo sapiens
agcggctttggagatctaaagtcgtgctcttggttgggaaagtgggaggaccaaggaaactgcatttcagcacttggacagcacagaacagcacagagttggggggccatctgtcaggggagatcaagggtaggagctcaaaggccttcctgccagcaaatatcattcttgataatctccttgcaagtttatttatttatt

SEQ ID NO: 7675 - DNA, 201 bp, Homo sapiens
caaggtcacatagctctttggtgataaaggtagaactaaaatttgtatcttcagattcctgatcttgtgtgaaactgatcaaaaatagattaagtcacaasatgcaatgacctgaaggcaggcctatttgctcccttccaggcatgtgatgtgtccttctttgccagtgagaataatgagacctaaaattatttcctgtgg

SEQ ID NO: 7676 - DNA, 201 bp, Homo sapiens
gaacctccatatggttttaatagcatacagttctccaaattgttttctgttatattacgtataaatcataggacatacttctgagactaaaataataaaargtgatattcagatgctaacagctaatctcacttccagaaagaattgataaatcctataacaacagtactgataaattcagtttgtttgtctcctgaagtc

SEQ ID NO: 7677 - DNA, 201 bp, Homo sapiens
ctcaaaggccttcctgccagcaaatatcattcttgataatctccttgcaagtttatttatttatttacttatttagagacaaggtctcactctgtcacccrtgctggagtgcagtggcatgatcttggctcactacaacctctgcctcccaggttcaagcaattctcctgcctcagcctcccaagtagctgggactataag

SEQ ID NO: 7678 - DNA, 201 bp, Homo sapiens
ttgctcccttccaggcatgtgatgtgtccttctttgccagtgagaataatgagacctaaaattatttcctgtggacccaaaattgcacttctgacagctcmtgaaatcctctctctgaaaccttattacatctctgctctccctaaagattcaagagtctagggatgtcctctctaaattctgcatataaggcctacatca

SEQ ID NO: 7679 - DNA, 201 bp, Homo sapiens
ataaatcataggacatacttctgagactaaaataataaaaagtgatattcagatgctaacagctaatctcacttccagaaagaattgataaatcctataayaacagtactgataaattcagtttgtttgtctcctgaagtcttcctggatcaacattacccacgaattctttcatgtgctgtctgctcatgtcctgtgctg

SEQ ID NO: 7680 - DNA, 201 bp, Homo sapiens
aaccttattacatctctgctctccctaaagattcaagagtctagggatgtcctctctaaattctgcatataaggcctacatcacagatattcacctgaatrtcttattatgttgtgccctccagcaacacttagagagcaactccccttccagcgtcctgttccaagttgacaagtctgtggcaagaggcaatttcttatc

SEQ ID NO: 7681 - DNA, 201 bp, Homo sapiens
tggcaggaatgagcctaaagtcttctaagaaggcctgtgttcaggcaggaagacctggcagaaggctacctcagctcgtcagaagggtgatcgtgttccartgatagtcaaggaagaagagtagagatcatgaagatcaagagtgaaaagtgtcagatgcatggggtgacttggaggccaagaaataagaaagaggcccga

SEQ ID NO: 7682 - DNA, 201 bp, Homo sapiens
caatgtctgattgaaaacataccttgcctatatctggaatactagtaatttttatgtttttgtttatttgttaatttacatttctctttttaagtaaaaasgttttttttttcttgacagagtctcactctgtcacctaggctggagtgcagtggcaagatctcagctcactacaacctccctcccctgagttcaagggat

SEQ ID NO: 7683 - DNA, 201 bp, Homo sapiens
gattacattgctattctcgtcactctctgcttgagaatttagctttcctgaatagcagctccttccttcctgatgcacctaccccacccccattctctcartatatttagataggtcctcagttcctttatcccaacccttggtgccagatatgtttcagaattcagaagaaggactttggaaagttaatatcacctacca

SEQ ID NO: 7684 - DNA, 201 bp, Homo sapiens
ttttttttttcttgacagagtctcactctgtcacctaggctggagtgcagtggcaagatctcagctcactacaacctccctcccctgagttcaagggatcmtcccacctcagcctcctgagtagctgattacaggcgtactccaccacgtccgactaactttttttgtatatttagtagaatcgagtttcaccatgttagc

SEQ ID NO: 7685 - DNA, 201 bp, Homo sapiens
tctgtatgatgagatttgtaatgtagttaattcacgtgcatcacctgagcccctcttaaactgagtatttagataatatctaggtatcttttctccccggrtatttgaaatgaatatgacattttatactgggctatatatctttaggcaagtagaaatgaatactgattttattggctttctaggctatgtattcctcag

SEQ ID NO: 7686 - DNA, 201 bp, Homo sapiens
ggttttttttttcttgacagagtctcactctgtcacctaggctggagtgcagtggcaagatctcagctcactacaacctccctcccctgagttcaagggaycctcccacctcagcctcctgagtagctgattacaggcgtactccaccacgtccgactaactttttttgtatatttagtagaatcgagtttcaccatgtta

SEQ ID NO: 7687 - DNA, 201 bp, Homo sapiens
aatattactatatattaaaattcctatatatgaatacctctcctagattccatgctcctctgtttattccccaaagttactaacatcttaagttttatctwtagcataagagttttaaaaaattataccctaattaatacagtttacttttgaatacgtttgaccatttttataaaataaatcacactatatattcttcag

SEQ ID NO: 7688 - DNA, 201 bp, Homo sapiens
taaccattggtttttaaattatagcttctttattactaatttctttagattcatctcttatttatgtagattttgttgccactttggttcagcattttttmaaggaggtctcatgtgtgctacatgtcctgagttctttcatgttgacaatgtccatttattatctttataggtgaataacaccttctctggatttaatct

SEQ ID NO: 7689 - DNA, 201 bp, Homo sapiens
tttgaaatctagtacattttattttgtacttgacaccccatgtgaattttgactagccccatttcaagggctccgtcacctcctgtgactactggctatcrtagtgctcagtgcaggtcttgagggaaagataaaggcatagatggttatttcaaagtaatggggagagcgatgggacagaagtccagcgggcattgtgag

SEQ ID NO: 7690 - DNA, 201 bp, Homo sapiens
gctccgtcacctcctgtgactactggctatcatagtgctcagtgcaggtcttgagggaaagataaaggcatagatggttatttcaaagtaatggggagagygatgggacagaagtccagcgggcattgtgagaccacagcaaagggacacttagcccaacctggaactccagggaagcttccagaggaagacacctgggct

SEQ ID NO: 7691 - DNA, 201 bp, Homo sapiens
taaaagcagaatgaggctcagtcatgaagggccttgtaggaggagccaaggagtatgattttctgtgcatgaccctcttcagctttacagtgttcttccaygtacactaggacatttgggaagagcagcggccctcaaagtaggcatttgtggtgaccaagactgctagttgtctccccgttctattctctccttccacac

SEQ ID NO: 7692 - DNA, 201 bp, Homo sapiens
acatgattgccagagctgcagcagtcactttgtgacttccaggcactctcagatggaaagtgtgctctaagcacatcagagaagtatgcctttgccttgtycttccttgtgtctgcctaactgtggaactgctgaactgtctaattctggacttctgttatgagagagaaaaataaattactaattcatttaatctactat

SEQ ID NO: 7693 - DNA, 201 bp, Homo sapiens
gttcatctttcttgctaagtagtagtcacaatttgtttattctcattttgatggatattgaggctgtttccagattttgtctattatgaatatggctgctrtaaatattctcattccaatatatttctatacatatttttttcatttctcgagtcaaaaatctaagagtaaaattcctgggtcatacagtaagtgcatgat

SEQ ID NO: 7694 - DNA, 201 bp, Homo sapiens
ctagcacagggtgataatactcaaatctgtcaattctgcaacttgtcagctgctctacagagggcttggtgggaaaggaggttgctgactcaaagctaaaygtaattttatatcatctgcagaactcagtcaaccgcaagacacatattgcttgcaagttgaccacatcagtcaatggtttattgagcatcttcattgacc

SEQ ID NO: 7695 - DNA, 201 bp, Homo sapiens
tgcaagtttatttatttatttacttatttagagacaaggtctcactctgtcacccgtgctggagtgcagtggcatgatcttggctcactacaacctctgcytcccaggttcaagcaattctcctgcctcagcctcccaagtagctgggactataagtgcctgccaccacgcatggctaatttttgtaattttagtagagat

SEQ ID NO: 7696 - DNA, 201 bp, Homo sapiens
cgtgctggagtgcagtggcatgatcttggctcactacaacctctgcctcccaggttcaagcaattctcctgcctcagcctcccaagtagctgggactatargtgcctgccaccacgcatggctaatttttgtaattttagtagagatgaggtttcagcatgttgcctaggctgttctcgaactcctgagctcaagtgttcc

SEQ ID NO: 7697 - DNA, 201 bp, Homo sapiens
tttatctcttttcttgccctatagggtaactgtttggctgtcaacagccccagctgagcctctgactcattggtaccaggtgcagtgcctcctgcagactmctctctttgccaaggaagggaagacactgtcagggaaagtgctgtttgtagccaataaatggtaagcaggaaagtacagatgtgctttcacctctgtttc

SEQ ID NO: 7698 - DNA, 201 bp, Homo sapiens
ggcatgatcttggctcactacaacctctgcctcccaggttcaagcaattctcctgcctcagcctcccaagtagctgggactataagtgcctgccaccacgsatggctaatttttgtaattttagtagagatgaggtttcagcatgttgcctaggctgttctcgaactcctgagctcaagtgttcctcccgccacaacctcc

SEQ ID NO: 7699 - DNA, 201 bp, Homo sapiens
gtggaatcactcttcaatatagatgccatactccaggatcccatggatcattagtaattatacaggaagggtggggaaatgaatggtttgagaaaaactcrttttcatagctgaaatcagtcaacagtaccatattcatataaaaatatgttgtttgggaatgatagtgactgactcaccagaacttatctgatagctcta

SEQ ID NO: 7700 - DNA, 201 bp, Homo sapiens
ataagtgcctgccaccacgcatggctaatttttgtaattttagtagagatgaggtttcagcatgttgcctaggctgttctcgaactcctgagctcaagtgwtcctcccgccacaacctcccaaagtgctgggattacaggggtgagcccaatttatttcaactcaacttcatttccccttctttctctccccaccccaggt

SEQ ID NO: 7701 - DNA, 201 bp, Homo sapiens
aatgatgatagaatagcattccaagagtcgctggccatggatgaatactgacaatggatgacatgttcaaatagttttcttcgttattcctccatagatcmgagattacttgattttaaaaaacaaagtaagaaagacattttgtatgctcacaggggatttgttggtgagcagcaccctagaagataggattaatgtgaa

SEQ ID NO: 7702 - DNA, 201 bp, Homo sapiens
ttttatgattttgtggtgctcaaaaatagaagggaagtacttgatattttaagttgcagactttttgtccatgaagttttgtaatggggccttgagtataygggaagcacagactcaaatgcctatgcagcccaagcaagtcatggaaatgcatgaagagggctggttgcaaagaagagagaatggggcaactatggcaac

SEQ ID NO: 7703 - DNA, 201 bp, Homo sapiens
ttaatgtgaaaggtatcctagccatttgaagaagtgatcagaaattaagaaggtgccactgaattataacaagtgcatagtacattgcacttaggatgggyaaagggattaagctacaaaaatacaaaatggaaggactcagacaggctgtaaatacaatgagcaaagatctacaagtctcagagaggaacaactctctga

SEQ ID NO: 7704 - DNA, 201 bp, Homo sapiens
aatggggcaactatggcaactggaggtctcatgtccattcaaaaggttgcagtagctacttccctcatgtcggttgttgctacacagtaattcagaccccwgtgtgccctgtcatactatttaaggtagaaatccttgtttcctgtgacattcttctgacttttaaaacacatcatggccaaattaaatattcctacagac

SEQ ID NO: 7705 - DNA, 201 bp, Homo sapiens
agccatttgaagaagtgatcagaaattaagaaggtgccactgaattataacaagtgcatagtacattgcacttaggatgggtaaagggattaagctacaamaatacaaaatggaaggactcagacaggctgtaaatacaatgagcaaagatctacaagtctcagagaggaacaactctctgagttgtttatatatttatgc

SEQ ID NO: 7706 - DNA, 201 bp, Homo sapiens
aaatttgaaatctcaagtcttccaggtacaaaatactttctttcctctgtcttgtaccagctatagcatttctcaactgagtttgtaagtgtttttgtctsattcatttatggataatatataaagggaaagcccagagagattttgaagtctacgtattatgcaaagtttcctcttggcaaaataaagtgccccaagcat

SEQ ID NO: 7707 - DNA, 201 bp, Homo sapiens
cagctgttatattctatttttttctctgtgtacttatagatgtgaatgtttaacaaaatgatgcttaagtattgcttcatatattccttcttttatttgaygtaagcaagtgtctatcctatatcataattcttgaaaatgtagttttcaatggcattatatgaatatatagcactatttaataatttcccattgttgaat

SEQ ID NO: 7708 - DNA, 201 bp, Homo sapiens
ccatttgaagaagtgatcagaaattaagaaggtgccactgaattataacaagtgcatagtacattgcacttaggatgggtaaagggattaagctacaaaartacaaaatggaaggactcagacaggctgtaaatacaatgagcaaagatctacaagtctcagagaggaacaactctctgagttgtttatatatttatgctg

SEQ ID NO: 7709 - DNA, 201 bp, Homo sapiens
ctaattgaataatagctcatgctacaacataaataaattagtccctctgtgaatacatgttaaatgctccagaaggtgcattctggccttacgtagtgaaygaaggtaccatttatctttctataagtctggtgaccttcaaatgactaggaggttgtctgaaattccatcttcatcccaagtaatattaatatggggtgg

SEQ ID NO: 7710 - DNA, 201 bp, Homo sapiens
gaaattaagaaggtgccactgaattataacaagtgcatagtacattgcacttaggatgggtaaagggattaagctacaaaaatacaaaatggaaggactcwgacaggctgtaaatacaatgagcaaagatctacaagtctcagagaggaacaactctctgagttgtttatatatttatgctggcaaatataagatgtttac

SEQ ID NO: 7711 - DNA, 201 bp, Homo sapiens
agtcttccttttgggttagataaggctggctcaaggctagtccattggcattgatcccctggccacagaaatggattcagagatgggtctttaattgaacrtggttcaacaagactcaatatggggcttttgttggaacactttggagggactgaggttgctgagcttgtagcagtgttgttttagagttgctggtaatca

SEQ ID NO: 7712 - DNA, 201 bp, Homo sapiens
tatatttatgctggcaaatataagatgtttactagaaaatatgttttcaggcagtagaaagacataaatataataattcaatcaccctgtcatatttggcwttcagaagaaatacattagaaacataataaatgtatttctcttcagggtgcctcttttaaaagagtttaaatttattaaataaaatatcaaggacatcaa

SEQ ID NO: 7713 - DNA, 201 bp, Homo sapiens
gttttgaagatatgcatgaagatcatctctgatttgaaaaaacatgatctcaattgttttgccataagattcttgacagttaaagacttgactaatacacraaatactcccaacaatagtcctacccagtgctttgcaccaatcttttggttggacaaaaatagtgttaggttagtgttacacaacttatgaactgtaggc

SEQ ID NO: 7714 - DNA, 201 bp, Homo sapiens
ttatctttttcagatgctagtgaaaaacaatcacctttcagacaagatcattgttttgccaggaaaaactgaagacgtctcacttcctgaggctgtagatrtgatcatttccgaaccaatgggatacatgctgttcaatgaacggatgctagagagttatcttcattccaaaaaatggctaaaatcaaatggtaagttggc

SEQ ID NO: 7715 - DNA, 201 bp, Homo sapiens
attctttttaaagaggagaaaaaagcactaaaagggggaaattagcttgaagtttgatgaagctgtgcatttttctagttttttcatgtatcagtaggaamatacagtgtcttataataatgctatttatgttgggcactcagagaatctgctttatatctaaacgctttttgctactttactaagtaaacaaacccttgt

SEQ ID NO: 7716 - DNA, 201 bp, Homo sapiens
ttcaatgaacggatgctagagagttatcttcattccaaaaaatggctaaaatcaaatggtaagttggcccattcttggtttaaaaaacagtctaacttctstgtaaaattttgccactctctgtcccctacatctggttctgtacagaaagaaggagagagcatttctgttatactcaattatttgtttttctcatctcat

SEQ ID NO: 7717 - DNA, 201 bp, Homo sapiens
atgattagactttttaagtaaatagatggagcccaaatatttaagtttacacacctatgattagggaagaaataagtaaatgagaaaataaactccttatyctgaagtaattgctttagaagacgtgaaccagtcaagaggtagaagtcgaaatggatcaaaaaaggagaaagaggatgaggaggaaaaataaagagaaga

SEQ ID NO: 7718 - DNA, 201 bp, Homo sapiens
catctgacactgaagcctacactcataacttgggcacacacactagctttccactcttcaccagagaaagttggcacattccaacagcaggtgttttcaawtaaagcatggcagataacttgccaattttaagttgcatctcatgagaatttcagctccttccccagttgtatttacttaaattaccaatgttgtagctcc

SEQ ID NO: 7719 - DNA, 201 bp, Homo sapiens
ccttggcttgaagattgccttcttttctctgtgtcttcccataagctgtcctctgtagttgcctgtgtcctaatctcctcttcttataaggacaccagtcrtattgaattggggcccactctaatgactttattttaacttaatctctttaaagaccctgtctctaaattcagtcacattctgagccaccaggggttagaa

SEQ ID NO: 7720 - DNA, 201 bp, Homo sapiens
cacatggctttctattctttgtcatgtccattctgctattgagcccatcagtgaagtttttattttggttatcatatttttcagtgccaaaatttccattkggcactttgttatatcatctgtttcttggctgacactttctattttccattggttttagtggtattcatgattgccggttggaactttttaaataatagc

SEQ ID NO: 7721 - DNA, 201 bp, Homo sapiens
ccagctactctggaagctgaggcaggaggattgcttgagcacaggaggccaaggttgcaatgggccctgatggtgccactgcactccagcctggatgacaraatgagactcctgtctcaataaataaactaattaattaattaataggggatttttttcttattcatcatgggaatgattggttttctggagtacaccagt

SEQ ID NO: 7722 - DNA, 201 bp, Homo sapiens
aggttgcaatgggccctgatggtgccactgcactccagcctggatgacaaaatgagactcctgtctcaataaataaactaattaattaattaataggggatttttttcttattcatcatgggaatgattggttttctggagtacaccagttactgaccttggtaatggtgagcaagccagaaacaggcttccttccctcat

SEQ ID NO: 7723 - DNA, 201 bp, Homo sapiens
aagctttgcctcaagtccttgtcccccttcctcctttctgcctacccaaatgtctccttcttcctttggttcacagttcacctcctctaagcagccttccytgatggaacacacagagctccgtcccctggatctttgaatacaaattattctaaaaacattttgtgtgtaacaatgtattgctttgcagtagttctcgtg

SEQ ID NO: 7724 - DNA, 201 bp, Homo sapiens
ctcctctaagcagccttccctgatggaacacacagagctccgtcccctggatctttgaatacaaattattctaaaaacattttgtgtgtaacaatgtattsctttgcagtagttctcgtgtgtgtccgtttcttctgtctctctctctctctctcctctctctctcctcgtcacatattccttgatgggggaagtctcatt

SEQ ID NO: 7725 - DNA, 201 bp, Homo sapiens
tttccaacctaaattaacactcttttaagttcttactatatgatatctatatgggtgtgtgcatgcacacatgtactcatgtataaataggtattaacatwtaacacatgtacatatagtatgtatgcatgtggattttatctatctgtctacctagcaagagagaaagagagagagagtctgagctctctgcctctgcac

SEQ ID NO: 7726 - DNA, 201 bp, Homo sapiens
ctggaatgcagatattggtgctggaatgaacagtggcctggctggtttgtctcagagcaaactgtgtctgtagttctcttccatctgtatgatggagatcrtaatatctcttggcaatggggattggattaagtggcactatgaatgtgaaaatggtactaaatggagcacttcctgagtgcgtgtttgcttttgaccctg

SEQ ID NO: 7727 - DNA, 201 bp, Homo sapiens
tgttctggatcttttggtcctttgcatttctgtatccatttataattaagttgtcaatttctacaaaaatgcttgatccgattataattgagattgatcartttggtgagaattgtacttttaacaatttattgaatgtattgagcaatttattgaaaaggcaaaagagagcaactgtccctgacagtttccaaattatag

SEQ ID NO: 7728 - DNA, 201 bp, Homo sapiens
acaaactgtgttttctgatgtatgtctgaagtgttcaacaaggtcttctcacactgacttgttggaactataaactttctccatgttatattatctctggsaattgttcagcttagaaaaattagagctccttgaagttattcttttcccatagaggtttttgtccacttgcggaaacttaccatatatatgcgctgctta

SEQ ID NO: 7729 - DNA, 201 bp, Homo sapiens
tagctctatcctcgctgccaagaaatggcctgagccaactgcctggtgctgcctgcctcactggtttcaggtgcggtcaggctgtagccatggcctttggrataggatgtaagtaagctgacctggcactcatcactccaggatttctctagccttgcatgtcaatctgtcttcacttttggacagaggagcatgtctgcc

SEQ ID NO: 7730 - DNA, 201 bp, Homo sapiens
tagcatggagctgctatgtccttggtaaaatatctacatgacagagaaaattacatttgtgtatttgtgatcaaaaaaattacaagacacaatggtttacagcctgagagcttataatagtagttccaccaggtcattccttttagaaacagtgtgggtagatgtgtcctttgaaaggagttctcattttactcatgatgt

SEQ ID NO: 7731 - DNA, 201 bp, Homo sapiens
ccaaagtcgctgaggagaggggagaaatcaacaattaagtttcttttcctttttacagaggttttttttatttattaatttttttgactctttacacaccrtgtggaaacatagacacttttctttatttatacacatttatttaaccattaaaataaaagtgagggtaaattgtgaaaaaacaaaaacaaaaacaaaaac

SEQ ID NO: 7732 - DNA, 201 bp, Homo sapiens
cataaatcagagacaggtgaatcaaggagccgttcatgcaacatcaaacatccggaaagctatcctgctgctaaaacaatatcctcccctgcctgctgttkctctcttcccatttttcaccatccacttctttgactcagggcaatggcttctgttaggacttgaccttgtcagagaacatatcaatcagtacacctgata

SEQ ID NO: 7733 - DNA, 201 bp, Homo sapiens
aagctggtcttggtacttacttgataccatagctagagaaaaatcaatcttttcctagagtatgagaatgtttttattcttttattattattattattatwataatactttgagttttagggtacatgtgcacaacgtgcaggttagttacatatgtatacatgtgccatgctggtgtgctgcacccattaactcgtcatt

SEQ ID NO: 7734 - DNA, 201 bp, Homo sapiens
accctaaatgattacatttgaattatgacctcctgaggaaatgcagagatgaaagggttacgaattttaagtagcagaatagaccagaccaacaaactagwggtttgttgtccaggcagtccttgcgtgaccttccaaccataccatctgctgccatcttactaacttgaggatattaatgatcacagtggtttggctcag

SEQ ID NO: 7735 - DNA, 201 bp, Homo sapiens
aaacaagaggctgtgattttcggtttgttaaatgtggcccctgtattaagattataaatagctgtgactatagtgtctgccgtggactgaattgtgtcccrtccagattcacatgttgaaatcctaaccccagtgtggctgtatttggagtaaggaagcaattaagtttaaacgaggtcatgaggtggagccttggttctg

SEQ ID NO: 7736 - DNA, 201 bp, Homo sapiens
tgtgtctttatagcagcatgatttatagtcctttgggtatatacccagtaatgggatggctgggtcaaatggtatttctagttctagatccctgaggattygccacactgacttccacaatggttgaactagtttacagtcccaccaacagtgtaaaagtgttcctatttctccacatcctctccagcacctgttgtttcc

SEQ ID NO: 7737 - DNA, 201 bp, Homo sapiens
tgacctcctgaggaaatgcagagatgaaagggttacgaattttaagtagcagaatagaccagaccaacaaactagtggtttgttgtccaggcagtccttgygtgaccttccaaccataccatctgctgccatcttactaacttgaggatattaatgatcacagtggtttggctcagatttccaccacgtaccaacatgctg

SEQ ID NO: 7738 - DNA, 201 bp, Homo sapiens
tttggagtaaggaagcaattaagtttaaacgaggtcatgaggtggagccttggttctgcagaattcacgtccttataaaaagagacatcagagagctcaayagcttgctgtctctgccatgtgaggatgcagtggaaaaggcagaaaactgcaagccagaaagggaacccttgccaggaacctaaccatctggcaccttga

SEQ ID NO: 7739 - DNA, 201 bp, Homo sapiens
ccctgaggattcgccacactgacttccacaatggttgaactagtttacagtcccaccaacagtgtaaaagtgttcctatttctccacatcctctccagcamctgttgtttcctgactttttaatgatagccattctaactggtgtgagatggtatctcattgtggttttgatttgcatgtctccgatggccagtgatgatg

SEQ ID NO: 7740 - DNA, 201 bp, Homo sapiens
taatcttctctagatgtcgctttcccagtcagccatggccaattctctaagcccctttcagcaaaattcctcaaaagagttgtctatactcagtgtccaaytccccccttctgtttctcactggagccatttctccaaaaccactcttttcgaggtcaccagtgccctgacctccacattgctaattccagtgatcaactg

SEQ ID NO: 7741 - DNA, 201 bp, Homo sapiens
cttggacttcccagtctccaaaactttgagaaaataaatttctgttgtttaagccacccaatctgtggcattttattatggcagcctaagcagactaacaytgttaataatataataaaattggatttttaaaatatcaaacacaatagaactgacacatccagctcagtacttactttgtaggctatttatgtattgcat

SEQ ID NO: 7742 - DNA, 201 bp, Homo sapiens
aggttatttgtttttttcttgtaaatttgtttgagttcattgtagattctggatattagccctttgtcagatgagtaggttgcgaaaattttctcccattwtgtaggttgcctgttcactctgatggtagtttctgttgctgtgcagaagctctttagtttaattagatcccatttgtcaattttggcttttgttgccatt

SEQ ID NO: 7743 - DNA, 201 bp, Homo sapiens
tttctttataccacgtatcaccatataccatattatatgtttttacttatttattgtctatctcccccatgagactacaagttccctaagtgtggctgctycatttacttctgtagccccatcatccaacctggttaacagtagttgctgcagacatttttgatgattagaagacaaatgcattgatttgtaaaaattctg

SEQ ID NO: 7744 - DNA, 201 bp, Homo sapiens
gtgtaactttatagtcaaaatcttgttttttaaccaaaaatgatatttttcaacttgccatatatcctactaacttaattgggcagccattattttgggtkgtattaaggtctcaaatttcccccaaaggatagagacttgcaactgttgagaatattcaaaagattatttgttaaacaaattaatttaccgtaggctttg

SEQ ID NO: 7745 - DNA, 201 bp, Homo sapiens
gctgtgcagaagctctttagtttaattagatcccatttgtcaattttggcttttgttgccattgcttttggtgttttagacatgaagcccttgcccatgcstatgtcctgaatggtaatgcctaggttttcttctagggtttttatggttttaggtctaaggtttaagtcttcaatccatcttgaattaatttttgtataa

SEQ ID NO: 7746 - DNA, 201 bp, Homo sapiens
ccaacctggttaacagtagttgctgcagacatttttgatgattagaagacaaatgcattgatttgtaaaaattctgtctatattaaggacattaagactgycgtattttcttcagaatttccagcttgctttgtgattttatttgtgatagttttgaccacaaaacaacttaaactttttatgtagctggatctaccagta

SEQ ID NO: 7747 - DNA, 201 bp, Homo sapiens
taacttaattgggcagccattattttgggttgtattaaggtctcaaatttcccccaaaggatagagacttgcaactgttgagaatattcaaaagattattkgttaaacaaattaatttaccgtaggctttgaaagcccaaacaacagagactcaaagaactcacagatgggtgacaaaaaccactgctggcaatctctgag

SEQ ID NO: 7748 - DNA, 201 bp, Homo sapiens
ttctaaactgactctggagtcagccagagtgaggaactttctttatcatatatctatccatacatctgtctctgaatccatcagtctaccttatctttaatcatgaatttcagagtaaattttaatagtcagcatgtttcacccccgtatattgtgcatatcattaattagaattcaaaatttgttgatgatttttatttg

SEQ ID NO: 7749 - DNA, 201 bp, Homo sapiens
gtaaggcccatcataaagaatcatcattcccaaatgtaattcttcttaatatgttgggtacctctggcattactgaaaataattggctcaggggttttacmccaaagcctgtagatacaattttaaatggattctcatatgaagaaaaatatatacataggatcaattaagaggtgtgccaaatattgtcaagaagcttga

SEQ ID NO: 7750 - DNA, 201 bp, Homo sapiens
ctagaagtttctacataagtggttatatcagctgtgattagagacagttttactttcttcctatcctgtctgtatgtctcgccttccttccttttttttcttttttttttttttgccttattgcatcagctaggtgctctagtacaatgtacaatgttgtatagaagagagtgagcatccttgcctctttcatgaactcga

SEQ ID NO: 7751 - DNA, 201 bp, Homo sapiens
cgtagaaaaaagaaaatgtactgggtcatgtaaccaggcagtctagagagggagtggttagcaactcaaatgagtttttctccccagccctgcatctctcycccgaccttgttattgaggaagaggctcgctgcccaacacacataggagccactactgcagcaccgactttcaagaaaaagaaaggttggggggttgtgt

SEQ ID NO: 7752 - DNA, 201 bp, Homo sapiens
tttcagggatgggtcctctgcttgtacttttctaccataaaagccctttcttcatgggccaggttacccatggtgtagggttcttccagatgctgaatatrtctttcccaattacatattcagggaccaggaaaataatcatagggtttgcatgaaacaagtggatacactgtgagatggacttggtccaaaactccactt

SEQ ID NO: 7753 - DNA, 201 bp, Homo sapiens
tcttttgtgcagttcctcattcaacaacctaatagctatctgaaaagcgctttcttgaaaagaaaaaagtctcttcctctcaggcagaagcaataataccrcatgattctctgattaaactatcacactgcgcatattacagggcatctgacctgcttgaaactgacttactgctgaggtttcttggtatttgcactgttg

SEQ ID NO: 7754 - DNA, 201 bp, Homo sapiens
tgaggcagatcttgaagagaataaaatcatctttcaaggcacaggctcttggagaagttgttgcatagtctttaagcaaggctgttttcctctggcaaagsgggaaagaattctgcctctgctggcttgaaagattcaggggaattggaaagatttcaggcttctctgctttgcccaccctattatcccaaccccaggtct

SEQ ID NO: 7755 - DNA, 201 bp, Homo sapiens
aactaccgtgggtacattttgctctctaaaagaatgaatacaagatgaatttcttaaataggattaggtagcacaaccatgccgaattattgttaaatgcrtgttagaatgggaagagagctagatcttaaaaatcgcatggcaaaactaacaaagcagttacttgtcatccaaactggtctttttaaatttgaaatctca

SEQ ID NO: 7756 - DNA, 201 bp, Homo sapiens
tcctcaattaacagagggagcctagagaagttaagtggtttgtccaaacccacagttggttttcctttttctatagtatcagtgcccccaatattcactaytgaaacttaatctccattgtgatggtattaagaggtggggaagaccttttaggcagtgatcaagtcatgaggggtctgcctttatgaatgtatttgcacc

SEQ ID NO: 7757 - DNA, 201 bp, Homo sapiens
gcaaggctgttttcctctggcaaagggggaaagaattctgcctctgctggcttgaaagattcaggggaattggaaagatttcaggcttctctgctttgccmaccctattatcccaaccccaggtctcagggccataccctttccctgtcggggccacaattttaatacataagacctgtcaagagtgcatatccaatctcc

SEQ ID NO: 7758 - DNA, 201 bp, Homo sapiens
cagaaggagatcaagaaaaactttagaagctgagacccgatttcctcaattaacagagggagcctagagaagttaagtggtttgtccaaacccacagttgsttttcctttttctatagtatcagtgcccccaatattcactattgaaacttaatctccattgtgatggtattaagaggtggggaagaccttttaggcagtg

SEQ ID NO: 7759 - DNA, 201 bp, Homo sapiens
tgctgctgtaaaaaattaatgcaaacagtagcttaaaaaaatacagttgtattactttacaactctggaggtcagaagtcagaaatgggtctcatgtggckaaaatgaagatgttgcagaaatctgttctttctggacgctgtaggggagaatcagcttcttgccttttccagcctttagaggttgcccacattacttgga

SEQ ID NO: 7760 - DNA, 201 bp, Homo sapiens
gaaacagactcaacgtggaggtttgtaagcaggaagcatattgggaagagctctcaggagcctcacttctggggaagtgaaggaagcaggatagattggcygaggggggagttaagctgcaatatagtcatactaaagtactcagccaatcgcacagggagttcttgagctggggtggcccttcagagttgaaccaccttg

SEQ ID NO: 7761 - DNA, 201 bp, Homo sapiens
ctttctaatcttcagtgtcctcatttgtgagatggggacagttccaatacatagtacagagggctactggttgattaaatgagataatccagctactctgsaggatctcctgagcccaggagttcaaggctgcagtgagctgtgattctgccactgcactgcagcctcggtgacagagcaagaccctgtctcaaaaaaaaa

SEQ ID NO: 7762 - DNA, 201 bp, Homo sapiens
ttttccattggttttagtggtattcatgattgccggttggaactttttaaataatagctgctttaaaagtctttgtcagattgttctgacctctatgtcayggcagtgttagtttcagctgattatcttttcccataggaattgaggttttcccatttcttcttgattgggttcgggctgcaagttccttccccatagttg

SEQ ID NO: 7763 - DNA, 201 bp, Homo sapiens
gaacatgggaaaaccaacttttatcaacgtttcactaactgtcaaaaacaaatagagacaccggcagacttcattctggggacttatgagtcatggaaagstttcttcaggaatttgaaaaattttcaaacttacagaacagttacataaacataacagagaacttatgaataccctttaaatagattcattaatgtgtag

SEQ ID NO: 7764 - DNA, 201 bp, Homo sapiens
agttcctccactgcaaagttactcttctttccctgttagccataactcataagcaatctgtgcaaaagcactttgagatcccacaaatatcctgttcctcrtcatatagcctcctacctcaaatttagtatccgattgttatccattgctttggaaagacagttgatctttttgtgtgttagccttgtatcctgcaacctt

SEQ ID NO: 7765 - DNA, 201 bp, Homo sapiens
tgaaagcagccatagacaatatgcgtagaaatgaatgtggctgtgctaccgtaacactttatttatggacactgaaatttgaatttcatatgattttcatktgtcacaaaatattattcttactttgattttttaaaccatgtaaaaaacatgaaaactattcttgactaatatgctatacagaaagagacaaggggctgg

SEQ ID NO: 7766 - DNA, 201 bp, Homo sapiens
tgcgtctggacctagagcagggatgaaaattttttttctgtaaagggtcagacagtaaatactttaggctccatgggccatgggcttagttgcaaccactyagctctgtcattgtagcatgaaagcagccatagacaatatgcgtagaaatgaatgtggctgtgctaccgtaacactttatttatggacactgaaatttga

SEQ ID NO: 7767 - DNA, 201 bp, Homo sapiens
gctcaaagagacagcagacccacctgggactgccacacaagctcagtccttgcacttctgctaatctcctacagcccacaactgtgctgcagcattctcartccagcatcaccattacctttgccagcaccccttgccctttcatctgctcacagtcccttggcagccacaggggtagaacttccactttccatcgtttgt

SEQ ID NO: 7768 - DNA, 201 bp, Homo sapiens
gtgttgctcttgatgtttaaaatcttccctctacatctcccacccacaaaacttcattgcagacttttgctactcacacaggggagagattttagatattrgtcacatatgggaatgatgtgtcaatattagcttcatttattgctaaataaagataatgatgtctccttcctaggatattatccccattttatagatgac

SEQ ID NO: 7769 - DNA, 201 bp, Homo sapiens
ggtggatcatctgaggtcaggagttcaagaccagcctggccaacatggtgaaaacccatctctactaaaaacacaaaaattagctgggcatggtggcaggwgcttgtaatcccagctacttgggaggctgaggcaggagaattgcttgaaaccaggaggtggaggttgcagtgagctgagatggtgccattgcactctacc

SEQ ID NO: 7770 - DNA, 201 bp, Homo sapiens
agggagagaccgggtcacagtgcctgtggtggagtggaaagaggccacagacagtagagactgctgggcagtattcaggagacatctctgaggcagaagtyacaggaactggccactgtgaacactgtgttgtctatcagcaatatcacttctggaattttttgagctttcacttctatattctttcctcaaatgacagag

SEQ ID NO: 7771 - DNA, 201 bp, Homo sapiens
tggctcacgcctgtaatcccagcactttgggaggccaaggtgggtggctctcaggagtttgagaccaggctggccaacgtggtgaaaccctgtctctactracaaaaattagctgggtgtggtggcagccacctctagtaccagctacttgggaggctgaggcagagagaatcacttgaacctgggagacggaggttgaag

SEQ ID NO: 7772 - DNA, 201 bp, Homo sapiens
aggaaattgtagcttaacagacttgatatttttgactcccaatcaaattttataagcaaatagttgggtccagaatttaagggaacatagtcaaaaaacaytgttgaaattaagataaattaagttctacttagtctctgatgttgcctctgagaacaaattggagaaatgagcaaaatgacatgacaattaaagagcttt

SEQ ID NO: 7773 - DNA, 201 bp, Homo sapiens
gccactgtgaacactgtgttgtctatcagcaatatcacttctggaattttttgagctttcacttctatattctttcctcaaatgacagagcatttctttgygttcacatattcccagttattttaccttttctctataaatctagataatactaaatgagagagaaaaaactgtcatgacaatagaatgagattagatgaa

SEQ ID NO: 7774 - DNA, 201 bp, Homo sapiens
gggaggccaaggtgggtggctctcaggagtttgagaccaggctggccaacgtggtgaaaccctgtctctactgacaaaaattagctgggtgtggtggcagscacctctagtaccagctacttgggaggctgaggcagagagaatcacttgaacctgggagacggaggttgaagtgagccgagatggcaccactgcactcca

SEQ ID NO: 7775 - DNA, 201 bp, Homo sapiens
agctcagtttatcttggcagaaaggtaacatctttgatttttccccctaaggacacatttgatgttaggattttgatggctggaacagtcaaatacacagyaaactttatggatgcagaagaggaagatctacacaggtttgtgcaaatcagtgttgctcttgatgtttaaaatcttccctctacatctcccacccacaaa

SEQ ID NO: 7776 - DNA, 201 bp, Homo sapiens
gatggacaggcagaataactgagaagtaaatttgttctaggccactgagatttgaagattgtgtgttacaaagcacagccacctgtcctgactgatttggscaacatgaacagttcagttgcctgcattgccgtgccacagcactagggtgccaggccattgcaacactacagagcactgcagcagatcttggagtcaggt

SEQ ID NO: 7777 - DNA, 201 bp, Homo sapiens
gtcctggctattttctctcttgcctcttttcttttttttttttttgacagagtctcgctctcttgcctaggctggatcacacttgtgtgattatagctcamtgcagcctccaactcttgggctcaagtgatcctcctactttaacctcccgaagttctgggattgcaggtgtcaaccatcccaacttgtctattattctca

SEQ ID NO: 7778 - DNA, 201 bp, Homo sapiens
aggtggcagggggctggtgtgttaacactgccgcaatcgtgtgcacacctatccagactgcaacaccgcctggactcggccccaacttagctccaagatcraagtggacaccaacagcagggagaggccaggcagcagcagcaggaacttcccagcctgctgggggcaagcggatcctcctgggcccccaagagcgcagag

SEQ ID NO: 7779 - DNA, 201 bp, Homo sapiens
aaagcagtatagaaaattattaatgagacattttacattgtttttctttttactatgtttttgaaatctagtacattttattttgtacttgacaccccatrtgaattttgactagccccatttcaagggctccgtcacctcctgtgactactggctatcatagtgctcagtgcaggtcttgagggaaagataaaggcatag

SEQ ID NO: 7780 - DNA, 201 bp, Homo sapiens
gctgatacatgcatcaccatgggtgaacccccaaaaaaatgctaagtgaaagaagtcagtcacaaaaggtcatgtgattccatttatgcgaagcatcagartagataaatttatagagatggaaagtgcactagtggtgtggctgccagggttgagggaggaagggaagtaggaagtgactgcttaacggggacggagctt

SEQ ID NO: 7781 - DNA, 201 bp, Homo sapiens
tggactcggccccaacttagctccaagatcaaagtggacaccaacagcagggagaggccaggcagcagcagcaggaacttcccagcctgctgggggcaagsggatcctcctgggcccccaagagcgcagagatgcctgggtctgcagccaccctgcagcggctgcagctgcaccctagaagctcttgctccaaattggaag

SEQ ID NO: 7782 - DNA, 201 bp, Homo sapiens
gccacaataaacatgcatgtgcacgtgtctttagagtagaatggtttataatcttttgggtatatacccagtaatgggattgctgggtcaaatggtatttstagttctagatccttgaggaatcacaatactgtcttccacaatgtttgaaccaatttacactcccaccaatagtgtaaaagcatttctgtttctccacat

SEQ ID NO: 7783 - DNA, 201 bp, Homo sapiens
ttgaaatctagtacattttattttgtacttgacaccccatgtgaattttgactagccccatttcaagggctccgtcacctcctgtgactactggctatcayagtgctcagtgcaggtcttgagggaaagataaaggcatagatggttatttcaaagtaatggggagagcgatgggacagaagtccagcgggcattgtgaga

SEQ ID NO: 7784 - DNA, 201 bp, Homo sapiens
ccagataaaggtaatggtcgcccaatgtaatgaacgtctgaaatgacgccatactgtatactttaaaatagttaatggttaattggatgttatgtgaattyatctcactaaaattattaacctttgagtgccaggaactcgagagactgaatgcactgttttggtgcatcgaacagtttaggagctttattgctacataat

SEQ ID NO: 7785 - DNA, 201 bp, Homo sapiens
attttgcctactacacaagttacttgacctttcccaaccttgttttttttaacctataaaactgtagataacaatagtccctcataaagatattataaggwttgaataagaaaacccatataaaattagcacagtgcctgccattctctagctagtgctattattgtcatcacagttatcatcgacattattatggggcct

SEQ ID NO: 7786 - DNA, 201 bp, Homo sapiens
ggcgcctccttgcagcctgaggcgggggcttcatgtcctcactgggcccgggcctacgactggggcaggggtgacgttgtcacgagttctccctgcggccyggggctccccctcgtcctgcttactaaccgctgcccccttgaacagtgtgtctggttcacccactgggctgaaactctccaatgaccaggacgcgccccc

SEQ ID NO: 7787 - DNA, 201 bp, Homo sapiens
tacatagtacagagggctactggttgattaaatgagataatccagctactctggaggatctcctgagcccaggagttcaaggctgcagtgagctgtgattstgccactgcactgcagcctcggtgacagagcaagaccctgtctcaaaaaaaaaaaaaaaaagaaaagaaaaaagaaaaagatgtatatcactcaggacac

SEQ ID NO: 7788 - DNA, 201 bp, Homo sapiens
atctcactaaaattattaacctttgagtgccaggaactcgagagactgaatgcactgttttggtgcatcgaacagtttaggagctttattgctacataatraatagctcttcatgagacactctatttcaattttttcatagactccacaagtacatgcgtttatttccttaatgaaatggatatgaatgatgaatggttg

SEQ ID NO: 7789 - DNA, 201 bp, Homo sapiens
cctcaccatcaggattgtctggcttagcggtcaccttaatgtggggcaggtcctggggatacggcctcaggcggccccatacggagcctcttcctgaggcrcaggaacttggcgccatcggcgggttgggcgcagtggtcatgccactgggcaggtcctcgaagtgggtgccgctcccacttcttgccctgggcccctgaa

SEQ ID NO: 7790 - DNA, 201 bp, Homo sapiens
caaaccctttaggagagttcttttcttccaatacacttttaaaatgctgctgcagctaccagttaccttgggaattacttctctcatttttgcactgttayagtttctttctgctctgtccactctttgatctgccttctgctgtgatggcaggaagggtttttgaggttattctaggatgttgaagtatgaaaggagctt

SEQ ID NO: 7791 - DNA, 201 bp, Homo sapiens
aggcaacagtactagtccaaagactcggcagtatgggatctagtttcatattttctccttaactagctgtgtgatcttaggcaaaatgctgaagttctctmagcctcacagtctagtctactgacataacaattgtagatccatggtcctttagctttgcagcattacttcccagggaggttgttgtagaatattgaaata

SEQ ID NO: 7792 - DNA, 201 bp, Homo sapiens
gtctgtagaggatgtgtgtgttacagtaatctttcttttctatgtacaactggggcaggttggggacaggggtggctttccaaatgctgtcagggactgcygggagcccttgaaatcctcgctcgcaagtctgttttgctcccgaggcttcccctgcatgtggtcctgagaacaggctggttaaaaatgtattcggcacca

SEQ ID NO: 7793 - DNA, 201 bp, Homo sapiens
gggggtggctgggcccagccctattcccggggctcccaggggtgagttctcagggcagcaggttccgggggcgctcctaggtgcaggctccaggggctgcmcacctcagagtctgtacctgaggacccgcgacctactcctgtaccccactgcagccggcgtcatggcagcggctgcttcgcacaggctgccgctgccatc

SEQ ID NO: 7794 - DNA, 201 bp, Homo sapiens
ggaagaggaagaggaggaggaggaggatgcagataaagaggataaaagaatagcagtactttgatggagcttcttttgtgctaggcactccgccaagcgctttatatatatatatatgtgatggttaatattgagtgtcaacttgattggattgaaggatgcaaagtattgttcctgggtgtgtctgtgaggctgttgcca

SEQ ID NO: 7795 - DNA, 201 bp, Homo sapiens
tggccacgattacatggaccagttgttgacttttcccagttagtcctgccagggatttcatactattttcgggtgccactatgtataagccaaaaaagagycatatctaccatcactgcctgtgtatccaacagggagctgaggatgaattccctctctagaaggtaattgtccacaagacgtaactggatggtaatatag

SEQ ID NO: 7796 - DNA, 201 bp, Homo sapiens
agctgcattctgagagagcgtgaacatttggtatggggtaatggctcccactgccacagagaattgctcatgagggagcacagaatgaagtaaagggacaygattcctggcccagggtgtgtgtggaagaagggagagaagtacaaaagaagaggccagaaaggtcagtcattactggatggctcaggactaaggacaacg

SEQ ID NO: 7797 - DNA, 201 bp, Homo sapiens
ggctcccaggggtgagttctcagggcagcaggttccgggggcgctcctaggtgcaggctccaggggctgcacacctcagagtctgtacctgaggacccgcracctactcctgtaccccactgcagccggcgtcatggcagcggctgcttcgcacaggctgccgctgccatcgttaccatgctgaccatcaggtagtattaa

SEQ ID NO: 7798 - DNA, 201 bp, Homo sapiens
aatataaacagataaagttcaaaattagagaacatatagaaagcacagaagtctgaggccaagagcaaattaaaacacagatctgcatattagaggactcrtaagtattactgccaacccatgattttgactctgggcatcttgacattcaagcaaaaggggaaacactgtgaatttacatgatctccagagtccataaaa

SEQ ID NO: 7799 - DNA, 201 bp, Homo sapiens
gtctttggtaagctcacaggctaagcaggaaagacaaccatgtaaagaactacttgtcatatcctgtgataagtgctgttagagagtgacatgcaaaggtsccagagggcccagcctaccctgactggggaatcaggcatccctgagatatgagatttgagctaggtcttgaagggtgtttcccaggtagaaaaatgagag

SEQ ID NO: 7800 - DNA, 201 bp, Homo sapiens
cgttaccatgctgaccatcaggtagtattaaacgggattgctggctctctcaggaccatcttcaaaagatcaaatgaactacatccaggacagtttatacrgcagataaacgaatttatacactggcttttatctcctcatttatcaaatacccatcctgccaacattaactagcccttctgggtcttatggcgtctcata

SEQ ID NO: 7801 - DNA, 201 bp, Homo sapiens
catgtggaaacatagacacttttctttatttatacacatttatttaaccattaaaataaaagtgagggtaaattgtgaaaaaacaaaaacaaaaacaaaarccttttgacagaattccccacggggaggaattagctgatgatggttcctggacttgccaggatattcctgattttctaaatcccatcaatcccataaata

SEQ ID NO: 7802 - DNA, 201 bp, Homo sapiens
catgctgaccatcaggtagtattaaacgggattgctggctctctcaggaccatcttcaaaagatcaaatgaactacatccaggacagtttatacggcagayaaacgaatttatacactggcttttatctcctcatttatcaaatacccatcctgccaacattaactagcccttctgggtcttatggcgtctcatacccaaa

SEQ ID NO: 7803 - DNA, 201 bp, Homo sapiens
gggagaaaggtttccttcccttatagttttggttaatgcaggctgatgttgccaataccacaagattcttggggacgggagtgtggaagaaggaaggaaarggaagggaaatagagggaagagaggagggggagaagagagcaacacagagaattttcacaccctgactattagaaatttacttttctgctgctaaagcca

SEQ ID NO: 7804 - DNA, 201 bp, Homo sapiens
ctcagctcgtcagaagggtgatcgtgttccaatgatagtcaaggaagaagagtagagatcatgaagatcaagagtgaaaagtgtcagatgcatggggtgayttggaggccaagaaataagaaagaggcccgaatgcagaagacatggaaggttgagtgaaacatcataggctgtgaatcttgaataaggcaagggcatcct

SEQ ID NO: 7805 - DNA, 201 bp, Homo sapiens
atacaacaggaggacctagcatggtaggacagcaaagaccaggggagatgtttgtgacttagccaagacaacatctccccacctccttgcacctacatgcrtggccaatggaatgtaagaggaagtgatttgggaggccgaggcgggcggatcacgaggtcaggagatcgagaccatcccggctaaaacggtgaaaccccg

SEQ ID NO: 7806 - DNA, 201 bp, Homo sapiens
caccttcaccagaccactgactcaaatgttaatatcttttggcaacacccacacaaacacacccaggatgaatactttgtattcttcaagcaagttcacactcagtattaaccatcacacagggtgttttatgagagttaaaaataacatgactatttacaaagatgtaggcagagttaggagaataaagaaggggtagtg

SEQ ID NO: 7807 - DNA, 201 bp, Homo sapiens
ccatggccacatgaagatgatgtatttcctggggaggatgaggaaaagagaatactaaaatttctaaaagtgtagacagcctgatagccaattttggagtstggatgacattttaaattggtaatgctcctaattacccaaaccctaggaaactgtatggaatacagccacagctctagattaatataagtgagcactgtg

SEQ ID NO: 7808 - DNA, 201 bp, Homo sapiens
atataagtgagcactgtgaacccattactaacagcatgttatcttagaataatggcacagtatctgtgtcatcacagtgtgatattgcagttaaaatgcgmacacacacacacacacacacacaccccttaatatttcttgttttttggcaaatttttcctgctataatttttttaacttttctaaattttccaacagaac

SEQ ID NO: 7809 - DNA, 201 bp, Homo sapiens
actagaaacatcaaagctagtgttattataataagtctgacctcaacacccaaagctggctttgtgccagtaagccaagcccttgtttgtgttttcacactttttttttttttttttgtcttctttccttttaggtggttctagatgttggttgtggatcaggaatcctgtcattttttgctgtacaggctggagctagga

SEQ ID NO: 7810 - DNA, 201 bp, Homo sapiens
gggtcagttatatatatcatagccatagccctttatcattaagcatttcagtgtgtatttcctaaaaacgaggcttttctcttatataaccaaaagagaayttgatttaaagctgaaaaagaagctatatgatgacttgctcattgagtctttcagttttggtggtaaaaggtgtttggggtggtcccagcatgagcaggg

SEQ ID NO: 7811 - DNA, 201 bp, Homo sapiens
cagggtgtttgctcaaagagacagcagacccacctgggactgccacacaagctcagtccttgcacttctgctaatctcctacagcccacaactgtgctgcwgcattctcaatccagcatcaccattacctttgccagcaccccttgccctttcatctgctcacagtcccttggcagccacaggggtagaacttccactttc

SEQ ID NO: 7812 - DNA, 201 bp, Homo sapiens
tcacagctcggaatagtacccatttccgccttgccatctcttatcatgtatgtgttcagggatgaatgtgccattttcatcttctaatattttcacagttrgaattttttacagagtgcaatggtgagctctatggtttccaaggtgaagaaatggatctactttttatccttgcagaattcagtgcatttgcaaatactt

SEQ ID NO: 7813 - DNA, 201 bp, Homo sapiens
ttatcatgtatgtgttcagggatgaatgtgccattttcatcttctaatattttcacagttagaattttttacagagtgcaatggtgagctctatggtttcsaaggtgaagaaatggatctactttttatccttgcagaattcagtgcatttgcaaatactttgaaaatatgccaaaataaaaaaaaggaatactcagcgtt

SEQ ID NO: 7814 - DNA, 201 bp, Homo sapiens
ttttctagaaaaattcttcccccatgtagccacaaggctagcatttactctattcagttcccttcaaatgttcacttagaaggtcttctctaatcactctrtgtaaagaagaatctccctttggatcattctcttttcctttatcctgctttatttttattaatggcacttttatatcaaacacatttcaaatcaatactc

SEQ ID NO: 7815 - DNA, 201 bp, Homo sapiens
gtgttcagggatgaatgtgccattttcatcttctaatattttcacagttagaattttttacagagtgcaatggtgagctctatggtttccaaggtgaagaratggatctactttttatccttgcagaattcagtgcatttgcaaatactttgaaaatatgccaaaataaaaaaaaggaatactcagcgttcagccagtgga

SEQ ID NO: 7816 - DNA, 201 bp, Homo sapiens
aagtattatttaataagaataatataataataattttaatgcttacatagctcttaatatattttatttggtttgatcctcaaacctatgaagtagtcacrgccatcattgttttcattacataaatgtcattttttaagtccatatttgaagctagtaggaactggacaagttgatgctggcagaagaaggtagaaacaa

SEQ ID NO: 7817 - DNA, 201 bp, Homo sapiens
ctgggaattatttttcctttttgacttttctgcatttctaaattttatacggttaagtaagagacaaattttttcaattgcaaaagaaaatggttaaggcygggtgtggtggctcacacctgtaatcccagcactttgggaggctgagaaggatggatcatttgaggtcaggagttcaagaccagcctgtccaacatggtg

SEQ ID NO: 7818 - DNA, 201 bp, Homo sapiens
ttaacttacatgatcacaaggtcccacaacaggctctctgcaagctgaggggcaaggagagccagtctgagtcccaaaactgaagaacttggagtctgatrtccaagggcaggaagcatccagcacaggagaaagacgtaggctggggggctaggccagtctctccttttcaagtttttctggctactttatatttgctgg

SEQ ID NO: 7819 - DNA, 201 bp, Homo sapiens
atggcgtctcatacccaaagttaacagggatgccccagggcaggaggagagaggcacactgtgcaggcctggggtgagacattgtggcaccgtgcccatgygaggtcagaggagcccatcctttggcatagctggtgcagaacacgtggctgaggattccagagacaggtaagaaagatctgggatggcacttaaaaggtg

SEQ ID NO: 7820 - DNA, 201 bp, Homo sapiens
aataatacaatgtaattttataagtaagaggcatttttacatacacacaaacgtacccagaatgttaagcataattagtcacttgtataatggaattattmtttttattgtattctttttgatttgtggcatttttctaaattttttatacttttcatttgttggttttgtagttatttttaaaccatcatttgcatcctt

SEQ ID NO: 7821 - DNA, 201 bp, Homo sapiens
ggtcagaggagcccatcctttggcatagctggtgcagaacacgtggctgaggattccagagacaggtaagaaagatctgggatggcacttaaaaggtgatrtaccacctaaggcaccaaacgatattttccagttcccttgtcagagtattatgcatggatagtatgcatctatcatgcttgaccagagcagagccaattg

SEQ ID NO: 7822 - DNA, 201 bp, Homo sapiens
tctgacctcactgtcctcaccccctctgatctcctattgtcatttctcttgacgtatcccaactagaatccagtggcaaggaagcccattgtaacagtctrtatagatcaggctcctgccaaagaccaggatgagaagagtggaggatagatctggagaagcaaatagaaaatatccagcacaatagtcactgagtaggtg

SEQ ID NO: 7823 - DNA, 201 bp, Homo sapiens
agaatattgccataggcaatgagagctccctttttgctcctttctactctgagtccactaaataccttgttgcccatggtactactgagaaacattatttktaaagaaatccattctactgagtggacaagctgctgaattctactgtgaagttaatgaacgatttgttcctagcctaattatgcactaacctaaatttcc

SEQ ID NO: 7824 - DNA, 201 bp, Homo sapiens
agctgctttaaaagtctttgtcagattgttctgacctctatgtcatggcagtgttagtttcagctgattatcttttcccataggaattgaggttttcccawttcttcttgattgggttcgggctgcaagttccttccccatagttggtcttctgagggctatgtttcctatgtcagttcatttttcaaagccttggcggtg

SEQ ID NO: 7825 - DNA, 201 bp, Homo sapiens
tacttttaattgaagaaagttctagaaagtttcttctgaatgtagtacatttttcttttctttgggaccatggattgcattctccaacttaacagcctccrtttcttaaatggcagttgtgagcgttcttgtaacagaccatggccacatgaagatgatgtatttcctggggaggatgaggaaaagagaatactaaaattt

SEQ ID NO: 7826 - DNA, 201 bp, Homo sapiens
cgatctgtaccagctcgtggtttttgcttctcacaccaacactcatctgtacagtttgtgggtggcaaaatgcgactgtgaacagcacggaaaagaatttyactctaagaataggctgatctagcagcacagcacacagtgcatggtgctcctttcgaccttttcattatttggtaattgaaccagcagacatttaattct

SEQ ID NO: 7827 - DNA, 201 bp, Homo sapiens
gtccactaaataccttgttgcccatggtactactgagaaacattatttgtaaagaaatccattctactgagtggacaagctgctgaattctactgtgaagktaatgaacgatttgttcctagcctaattatgcactaacctaaatttcccactaaagtttcttttgcataattagagttttaggccttctggtcattccca

SEQ ID NO: 7828 - DNA, 201 bp, Homo sapiens
tttgctcggcacttctccttcctgtcatcatgtgaagaaggatgtgtttgcttccccttctgccatgattacaagtttcctgaggcctccccagccatgtkgaattgtgagtcaattaaacctctttcctttgtaaattacccagtctcaggtaggtctttagtagcagcgtgagaacggactaatgcatttcctaatctg

SEQ ID NO: 7829 - DNA, 201 bp, Homo sapiens
atggcagttgtgagcgttcttgtaacagaccatggccacatgaagatgatgtatttcctggggaggatgaggaaaagagaatactaaaatttctaaaagtrtagacagcctgatagccaattttggagtctggatgacattttaaattggtaatgctcctaattacccaaaccctaggaaactgtatggaatacagccaca

SEQ ID NO: 7830 - DNA, 201 bp, Homo sapiens
cagaagcaaggatttgtctggtatgccacagcatgtgcttcaagatccaggattctgactttgggctaccaaaaggaagctgatagaggataaagaaaaartgacagtaaatcaaaggaaaagagttagaatgagggagccagcaggatgataccaaaagcttaggaaaagccacaaggcgacaggttgtgagtcctttag

SEQ ID NO: 7831 - DNA, 201 bp, Homo sapiens
gcaatgtgttttctagagaatccagatttatagactcatagctccatccccacttctcctttgccacagtttaaacaaaagtcataggcttgactctcacygggtcacgtgcttaaccctaagtctgtcaccaaggctagggtgataagacgctgttattggctgagactgagccgcatgtcgaaagcatagtcaagacca

SEQ ID NO: 7832 - DNA, 201 bp, Homo sapiens
atttgttttgtgttctaggttgataaactgacatttcgctatgtgatttttggaatgtgaggggagcaggctgtgatggtaaaaaacagtatctgcttacwtatatatatatatatataatttttttctatagcttgggattttaagtctgattcagttttccagggctaccataacaaattaccacaaagtcagtagcta

SEQ ID NO: 7833 - DNA, 201 bp, Homo sapiens
acactagaaaaagcatatactttgaagtttttctgtatgaatttatcctgatttcaactctttgagctagggtttttctccaatttcttaagtgtctccarttgctaacttctccttcctcctcactctcccacagacaccaaatgcctgagtcacaagattccatccagcctgtcaacactttttatttttgcactgaca

SEQ ID NO: 7834 - DNA, 201 bp, Homo sapiens
gcaaaaaaaaaactattacaaatacgaaaaatatctaaccatagcgtaaggaaaatacaagccacgctactttgctggtgtttaaaccagtaaaatcagasacataacgagcatgcatctttgcacagataccactttccacagtggttgatatgcctgcattctgctggggtggaaaattgtatcaaatcaaaattacag

SEQ ID NO: 7835 - DNA, 201 bp, Homo sapiens
agaccatcccggctaaaacggtgaaaccccgtctctactaaaaatacaaaaaattagccgggcgtagtggcgggcgcctgtagtcccagctacttgggagrctgaggcaggagaatggcgtgaacccgggaggcggagcttgcagtgagccgagatcccgccactgcactccagcctgggcgacagagcgagactccgtct

SEQ ID NO: 7836 - DNA, 201 bp, Homo sapiens
gttttctttccttcatatagtttgtttttcatatattttaaagtggttggagatactttagttacttttaaaaccttaaacatctaatatccttggatatrgtactttaaggaaaaagaggaaggaattagctagagatattctcacctttctgagccataatcctgtctccagccatagcaggtgcaagtacactgtgac

SEQ ID NO: 7837 - DNA, 201 bp, Homo sapiens
agtttttgagttttgaaagcatttccacatctataaactcatagatcttcaggaagagtctgtgtggtgcttggagcaaacaataccatccccacattacrgttaagaaagaacctcagagaagatagccatgaaggtgggacatgacttgtgaaaacaattccttgctgcttccttctagaatgttcaggtaagcaggaa

SEQ ID NO: 7838 - DNA, 201 bp, Homo sapiens
gccctatagggtaactgtttggctgtcaacagccccagctgagcctctgactcattggtaccaggtgcagtgcctcctgcagactcctctctttgccaagraagggaagacactgtcagggaaagtgctgtttgtagccaataaatggtaagcaggaaagtacagatgtgctttcacctctgtttccagggcattgaggtc

SEQ ID NO: 7839 - DNA, 201 bp, Homo sapiens
gagaaagacgtaggctggggggctaggccagtctctccttttcaagtttttctggctactttatatttgctggaagctgattagattgtgcctaccagatkaggggtgaatccaccttcaccagaccactgactcaaatgttaatatcttttggcaacacccacacaaacacacccaggatgaatactttgtattcttcaa

SEQ ID NO: 7840 - DNA, 201 bp, Homo sapiens
tcaccccgtttgctttatcttttgttctagtttgtcttcccaccacatgcaaacatacattaatattaatgtgtatacagatatgtatatgatcacacacrtttatgaacatatacacacatttatatgaacatgaatgtatatatgaaaaatacacacatgtatatgaacacatgagcacacgtgtatgtatatgaacac

SEQ ID NO: 7841 - DNA, 201 bp, Homo sapiens
gatcttcaggaagagtctgtgtggtgcttggagcaaacaataccatccccacattacggttaagaaagaacctcagagaagatagccatgaaggtgggacrtgacttgtgaaaacaattccttgctgcttccttctagaatgttcaggtaagcaggaactggtgattcccttgaaagtgaagaagtgaatgtgtttgacta

SEQ ID NO: 7842 - DNA, 201 bp, Homo sapiens
tctctttgccaaggaagggaagacactgtcagggaaagtgctgtttgtagccaataaatggtaagcaggaaagtacagatgtgctttcacctctgtttccwgggcattgaggtctgggagcaggaggaagctggcaggcccctaagactccagcacctacaaatggacagcaggctttccagaggcctgcctgagcactgt

SEQ ID NO: 7843 - DNA, 201 bp, Homo sapiens
tcttaactttgcatccataccttgggctgaacttgaaatctagggtgttgtacttttaattgaagaaagttctagaaagtttcttctgaatgtagtacatttttcttttctttgggaccatggattgcattctccaacttaacagcctccatttcttaaatggcagttgtgagcgttcttgtaacagaccatggccacatg

SEQ ID NO: 7844 - DNA, 201 bp, Homo sapiens
actattgtgcattgctgtcatggggccctatttaaggacccatttcattctaggcattagaggagagaagcagcgtgtttagagaaaatacttgttgatckaaagcatttttctactgcagcagccacacattctagggggattgtgattaggccacatgttttcttggcaagaaaagaaggaacgttgggacggactata

SEQ ID NO: 7845 - DNA, 201 bp, Homo sapiens
gtactttctgctcaacatatggagactaggtaatttataaaggacaaatttatttctcataggcctggagtctggtaagtccaagataaaggtgccagtcwgtttggttgtctggtgaaggctacatcctctggaggggagaaacacttgtgttctcacatggtggaaggcaggtggaaggacaaatgagctgaatactgt

SEQ ID NO: 7846 - DNA, 201 bp, Homo sapiens
cttaactttgcatccataccttgggctgaacttgaaatctagggtgttgtacttttaattgaagaaagttctagaaagtttcttctgaatgtagtacatttttcttttctttgggaccatggattgcattctccaacttaacagcctccatttcttaaatggcagttgtgagcgttcttgtaacagaccatggccacatga

SEQ ID NO: 7847 - DNA, 201 bp, Homo sapiens
ctttctgctcaacatatggagactaggtaatttataaaggacaaatttatttctcataggcctggagtctggtaagtccaagataaaggtgccagtctgtytggttgtctggtgaaggctacatcctctggaggggagaaacacttgtgttctcacatggtggaaggcaggtggaaggacaaatgagctgaatactgtgtg

SEQ ID NO: 7848 - DNA, 201 bp, Homo sapiens
ctggatcatatggtaattctacatttaactttttgaggaactgccatattgccttcaacaacagctgtatcattcccaccaacagtgctcaagggttccarttttcccacatcttcaccaatacttgttattttcttttttatatatatccattttaattgtggttttgatttgaatttctctaatgactggtaatgttga

SEQ ID NO: 7849 - DNA, 201 bp, Homo sapiens
ttatgttgaaccacccttccattcaaggaataaatctcacttggttgtggtgtatagtacttttaatatgctggtgaattttgtttgctagtattttgtgktgttgtatcagaccaggatcaatgttcatgatactggtttatttttcttgttttattttcttgtggtttctttgtcaggctttggcattcagataatagt

SEQ ID NO: 7850 - DNA, 201 bp, Homo sapiens
gtaatgtctggaaacatttttgtctgtcacactgagggaaggagtagaggccagacatgcggttaagcaccctaaaatgctcagagaagttccctacagcaaaaaaaaaaaaaaaaaaaaattatctggtctaaaatatcaatattgagaaggccagctgtagggttcagcagcatgagagcaggaacctggtctatgttg

SEQ ID NO: 7851 - DNA, 201 bp, Homo sapiens
ctctgttcaaccttctttctccccatagttactgagtgagctcatcatccttccagattttactaacatgtcacttctggtgtaaaggtttcttgactccrtatattttagtagttcagagatccaactaaattttcatgagaatagagacatgtctttgcactttgagtccccacatttgtaaattatcaacaaatgttt

SEQ ID NO: 7852 - DNA, 201 bp, Homo sapiens
aactagcagggtcaaacataaaatttagcagtcatttatattatcaaaactccaacttcaactagtcctttggtaaaaattttatattcacattagctataaaaaaaacccagttgagtcaagagctttgtaaagtgactcattgctataaagaaactgagtaaccttaatagaattgatttgaatttcagttttcctatc

SEQ ID NO: 7853 - DNA, 201 bp, Homo sapiens
tgaatatggctgctataaatattctcattccaatatatttctatacatatttttttcatttctcgagtcaaaaatctaagagtaaaattcctgggtcatasagtaagtgcatgatgagttttacaggaaatagccagaattttttttccaaagtggttatagcattttacactcccagcaacaaataatgaatgagagttc

SEQ ID NO: 7854 - DNA, 201 bp, Homo sapiens
acagtaagtgcatgatgagttttacaggaaatagccagaattttttttccaaagtggttatagcattttacactcccagcaacaaataatgaatgagagtwctggttgttccacgttcttgctaaaatttgctcttgcatgagatatgagttatatctcattacagtttcaatttccattttcctgatgtctaatgatgtt

SEQ ID NO: 7855 - DNA, 201 bp, Homo sapiens
tggatgcttcctgccctcgaacattggactccaagttcttcagcttttggactcttggacttacaccagtggtttgccagggttctcaggcctttcgccamtgaaggctgtactgtcagcatccatatttttgaggtttggggactcagactggcttccttgacagcctattgtgggacttcaccttgtgattatgtgagt

SEQ ID NO: 7856 - DNA, 201 bp, Homo sapiens
actccttttcctctttctccatattcaacacatcaaatctaacaaactccacctttaaaacatacccagaattcagccacttctcaagccctctaccattmcccttcaggctaagtcatctcctacctaaaatactacaggagcctcctaactagtctacttgcttcattcctggctcctcttattctgctttccacaaaa

SEQ ID NO: 7857 - DNA, 201 bp, Homo sapiens
agcaaaacatcctaggcccctgttcacataaaggttgcctcttactggatgttaatattagttgttattaacagtgttatcactttaatttacatcagtcmtcctagctttacccaggatttgccatgagaccagggttttttgttttattttgctttgtgttttgataggattcttatttttcagagatgcactggaaga

SEQ ID NO: 7858 - DNA, 201 bp, Homo sapiens
ccattttttgctcacatacatgtccatgcctatggcttattttactgactaaagcaagtcatgtggctcaggctgatgtgaatggggcaagaacgtatgaytttacctgggggaagggaagagaatatttttagatgatgggaaaaccctctggttttttcatcttcaaaaatctgtctgattttctaaaatccattggct

SEQ ID NO: 7859 - DNA, 201 bp, Homo sapiens
cataggagccactactgcagcaccgactttcaagaaaaagaaaggttggggggttgtgttgcaagctgactagcaaggaaacaggaggcaacagtcaaatmtgtctccctaatctaagggtgggtcaagcttttatggcatttctaactagttctagataataccaatgtagccaatctgccaggctgatggtgttagcaa

SEQ ID NO: 7860 - DNA, 201 bp, Homo sapiens
cagaaggcacgtgcccaggcaattttggctctgtatcatctgtaacaacttaagcaatggttaattggtttgagctggtcctgtggttacaaccttagctytgtctccttctctctctgttggattcattcttttactatagacagtccatctacatgtggagtagatgactgacaatctctgaataacatcctttcagat

SEQ ID NO: 7861 - DNA, 201 bp, Homo sapiens
attggtttgagctggtcctgtggttacaaccttagctttgtctccttctctctctgttggattcattcttttactatagacagtccatctacatgtggagkagatgactgacaatctctgaataacatcctttcagatccatgactcagaaaacaagtcatcttctcctccacatctacaatgaaaaaaatctggggaagg

SEQ ID NO: 7862 - DNA, 201 bp, Homo sapiens
aaaatctttgaactcagtttatgtgctccttcctgtgtctcccgtccttatatgtagggaagtgcttgttataatacataggtcgatgccttcagcagtgygagcagtttaatgattgcgaaggcagattctggtgcctcattgcttgaacttgaatactgatttcactgtttcttggcttggtgaccgtttcagtttgct

SEQ ID NO: 7863 - DNA, 201 bp, Homo sapiens
gggcttgctttgctcttttgttacagcttcttatagtgaaaacctaggtcactaacttcattcttttactttttctaatacagtttcttaaaaccattagrtttccactaagcatggattatctatataaccaaattttggtatgttgcatcatcattattattcagttcaaaatatatactactttctattgtaattact

SEQ ID NO: 7864 - DNA, 201 bp, Homo sapiens
ctttttgacttcgatattcctataatgtatgcaaatgacatgtttctattatcttcaggaatcctcctgtgatcttaaagtgtgcctccaaaatactgacyactgatacatagggctaccattacagaccatatcgaaaagccaattttttttggatcaagatttgtgaagaatctgagattttatcctatttgcaaggta

SEQ ID NO: 7865 - DNA, 201 bp, Homo sapiens
tccactttccatcgtttgtaatgtagtccagttcagcttatggcagatagcaccttgtcactgatgaatttctattaaatagaaggtattctaataaaatrtatatagttttttgataagtcatttacaagcgaggtgagaaatatggtaatctatgtttttatgtgttagcattattttaacttctacttagaaatgaat

SEQ ID NO: 7866 - DNA, 201 bp, Homo sapiens
cgattctcctgcctcagtctcctggaggcttgatttttaaaacattaaaaccaaagttctaatgaaatccaaagcatcatagtttatctttggttttagcktctgtagaggatgtgtgtgttacagtaatctttcttttctatgtacaactggggcaggttggggacaggggtggctttccaaatgctgtcagggactgct

SEQ ID NO: 7867 - DNA, 201 bp, Homo sapiens
ctcagctcactacaacctccctcccctgagttcaagggatcctcccacctcagcctcctgagtagctgattacaggcgtactccaccacgtccgactaactttttttgtatatttagtagaatcgagtttcaccatgttagccaggctagtctcaaactcctgacctcaagtgatctgcccacctcagcttcccaaagtgc

SEQ ID NO: 7868 - DNA, 201 bp, Homo sapiens
acactgcctagtttcagttcccatattagtaaaatagaataataatatatcctaccttatgaggttgttgagcaattaagtgaattaatatatataaagcrcttaagacagtacaaggcacaagtaagccctacttggcattagctgttatttctggtgtgtatatgtctgtctattccactaacctatcacaggtagaga

SEQ ID NO: 7869 - DNA, 201 bp, Homo sapiens
aggtcactgataactgactgaaacagaagaagggactgtcagaaatacatcagctgctcacttttcaagtacagatcttgtttaaatgctttgaggtggtmacaagtcagttaagggactaactggctagggatgaaatgatctttggcacacttacccaagacaatgtgttttgattatcttggaagaaagatgctttgt

SEQ ID NO: 7870 - DNA, 201 bp, Homo sapiens
tggggtagacatgagataattaagggaacacattttgtgaaaggtaaaagtctaatattatcattgatttttaaccaaaagcaaatctaccaactataatkatgtaactaaactctaatattattgattttatccaaagcaaagccactaaaatatcatataactgtaaaatcacataacctaactataactctagttata

SEQ ID NO: 7871 - DNA, 201 bp, Homo sapiens
ccagagtttttaaaactattgctaattggggtcatatgcctcttgtttggtggggagaggggaggcggcggcagtgaggcacctatcccgtacactgtagwatgtttagcagtatccctggtctctacctactagatatcatcttccccccagagttatgacaaccacaaacgctctccagacattgccaaatgtcccctt

SEQ ID NO: 7872 - DNA, 201 bp, Homo sapiens
gttcagaattgcctattaaggagtgggatttgaaaggagagaataaaaggattggttaggtattctgttgtttggggagcttctgacttttttcttttaartgaaagtaaacacccgtacatggggaagagaatcaaacaacataggaaggtctaaaatttaaaaataaatcgtcccccacctaccccactcctgcctgtc

SEQ ID NO: 7873 - DNA, 201 bp, Homo sapiens
cgtacatggggaagagaatcaaacaacataggaaggtctaaaatttaaaaataaatcgtcccccacctaccccactcctgcctgtccacattctccagcgytaaccattctgagcttatgtctttttagttcttccattgattactatgactttatgtcataatgtatgtatttctgttttctgaattaccaactttggat

SEQ ID NO: 7874 - DNA, 201 bp, Homo sapiens
tttttagttcttccattgattactatgactttatgtcataatgtatgtatttctgttttctgaattaccaactttggatatattgttgactcccaaaagakaaacttccctcttctggtgtgactcccaattttgtttggttatattatttctaggttgtcaagatatggaatacatcactgtctttgatgctttgtctat

SEQ ID NO: 7875 - DNA, 201 bp, Homo sapiens
tcagttccaagtctttgctgttgtgaacagtgccacaataaacatgcatgtgcacgtgtctttagagtagaatggtttataatcttttgggtatatacccrgtaatgggattgctgggtcaaatggtatttgtagttctagatccttgaggaatcacaatactgtcttccacaatgtttgaaccaatttacactcccacca

SEQ ID NO: 7876 - DNA, 201 bp, Homo sapiens
tgttgtcatttgtcttatatgattttaaaatctttgaggtttttcatgtgtgaaaatgttttatattcccttatgatttacaagtttttgactgggtatasaattcaagcctcaaaatcgttttccttcagaagttgcttcattatctgctaatatcctgagatgctgatgagatttctgggattagtgtgattttagttc

SEQ ID NO: 7877 - DNA, 201 bp, Homo sapiens
tgggattagtgtgattttagttcacccaaagcttagtgtaacttttttttaaccatgtaagatttaaggacttttctctttatctctagggttgtccagtkttgccgtgatgtatttagatgtggactaaggaactttatcctctctgcttcatatttagtgggccctttccatctaaagacgagtatctttcttgatttc

SEQ ID NO: 7878 - DNA, 201 bp, Homo sapiens
caagatgtgtgctgatttcctggaataagaggatgtggagtttgaaatgcaaggcttttgttttatatttagaaatgagtgaacagctgccaagtatctgwaacttgggtaaaaaataaatccaccttcactggggggttgacctgtgttgataattaggaggcactactaggaaagaaatgatcaaatatacaaatatga

SEQ ID NO: 7879 - DNA, 201 bp, Homo sapiens
tcatctaccaaggacaactactctaaggctctcaaagatgccactgttacctaatcagttttttccctattaccttgtaaaaggaaagtttcctgtgctcygagaaaatagtcaggttgaatgttcttaggtattccatagtcaatccatctagaatttccatgtccctgagccttctgactccttcctcaatgcagcaga

SEQ ID NO: 7880 - DNA, 201 bp, Homo sapiens
ccacttgttaataaaagagttttcacagatataccttagaatcttggttctgttctggttcagtcaattattcctctatttaaggttgacctcctgttccrtctgtttattggagaccatgaagttcttacatcttgagccttctttgttgatgggtagagcatcagggcaagtctaccaggattctacagggattaggga

SEQ ID NO: 7881 - DNA, 201 bp, Homo sapiens
tggctcactgcaaactctgcctcccaggttcaagcgattctcctgcctcagtctcctggaggcttgatttttaaaacattaaaaccaaagttctaatgaawtccaaagcatcatagtttatctttggttttagcgtctgtagaggatgtgtgtgttacagtaatctttcttttctatgtacaactggggcaggttggggac

SEQ ID NO: 7882 - DNA, 201 bp, Homo sapiens
gtttgttccgattccatgttaaagtttatttttcattattatatttgagataaaaataaggctaatatatcactgttagcattttggtttaattattttcwgcatttttgttttgtatccatttttgaatagttgtgatcattatttaaatgttattttatattcaccatcttcatttaatgctctataataagcatattt

SEQ ID NO: 7883 - DNA, 201 bp, Homo sapiens
ataataagcatattttcatgtttgttagactttatgacttcaaaaatatataaataatagtccacatgagaattcctgtaatttgcttaaccaatcgcctrtagtagaacatttaaatagtttctgcttttttctatcataaataatattttttctattataattagtagtagcaactttgaaaattataaataaatagac

SEQ ID NO: 7884 - DNA, 201 bp, Homo sapiens
tcttttctctttcccttatagttttatggctgcatttctcaacagcagaacatgatgcaagattttgtgaggacagccacttaccacagagccgtcctccrgaatcacattgactttagagacaaggtaatgccggcagcaggttatgaatctcatgcatttcagaaacgttttcaagaccagaatcaaaatgaagcttta

SEQ ID NO: 7885 - DNA, 201 bp, Homo sapiens
gtccgattgctactctaccctagctttttacacagtaattatgccattattgcctaggccagataattactgctttcctgctctgacattctgaaatgtcmtccaaaatgtgttcattcagagcacaatttaatggctacatcacctaccaccatctttcatctaccaaggacaactactctaaggctctcaaagatgcca

SEQ ID NO: 7886 - DNA, 201 bp, Homo sapiens
cttggtgggaaaggaggttgctgactcaaagctaaacgtaattttatatcatctgcagaactcagtcaaccgcaagacacatattgcttgcaagttgaccrcatcagtcaatggtttattgagcatcttcattgaccttcagaactaccattagctctatcctcgctgccaagaaatggcctgagccaactgcctggtgct

SEQ ID NO: 7887 - DNA, 201 bp, Homo sapiens
agaacaaattggagaaatgagcaaaatgacatgacaattaaagagctttgaagctttatgtgtagttgagtgaatctctatgaaaagtgttgacacagaawaaagctgacagtatattgttaatagtgaaaaagcaggttgtaaaccaatggagtacaatactattgttgtatatattatagagatagatgtgaaaatgta

SEQ ID NO: 7888 - DNA, 201 bp, Homo sapiens
tcccttcccttacctagtatttctaggaaggcttgattttttgggtaggggcagtggggggacggagtcttgctctttcacccaggttggagtgcagtggygcgatcttggctcactgcaaactctgcctcccaggttcaagcgattctcctgcctcagtctcctggaggcttgatttttaaaacattaaaaccaaagttc

SEQ ID NO: 7889 - DNA, 201 bp, Homo sapiens
gagcataggcattaacccagctttacacaatttattcaaaatctgggcattcccgtctttgccttgctgtctctagcttgtgattctgtaacgttacacaytttgctttctctgttcaaccttctttctccccatagttactgagtgagctcatcatccttccagattttactaacatgtcacttctggtgtaaaggtttc

SEQ ID NO: 7890 - DNA, 201 bp, Homo sapiens
ggaccctgccttcgtcttcacatgatgcactcgctgtgtgtgcagctatctccaaatttccactttttgtaaagacaagaggtatattgtattaggggccmaccagaccccagtacaacttaactaattacatatacaacaaccgtatattcagataaggtcacattctacagtcctgggggttaggacttcaacatatga

SEQ ID NO: 7891 - DNA, 201 bp, Homo sapiens
gaaaatggccagtgttacttataactacattacgttggccaaagcaagtcatatggtcactcctaatttcaacaaagcagggaaatgcaaatctacatctrcccataagaagaaacagaaatatttggtaaatggcactatatattacctttgcaaactcattaaggtagggacaggttgataaggtgatattctcagtgc

SEQ ID NO: 7892 - DNA, 201 bp, Homo sapiens
gctgcaggagagactaccaaaggttgtccagatcttcaccactgttgtcaattctccttgaagatgaggttgtttgcagaaatgcgactttcagtttgagyggtggtcagaatgatttcatcctgtttttgtctttgaatcatttactgagcattttttgactctgggcaataaaaatcaagcaacagagaagtaaattaa

SEQ ID NO: 7893 - DNA, 201 bp, Homo sapiens
ttgtagcaggggcttgacatggtctgggaatgatatcatttttatatactttttaaaggtacgcatttataccctctctcactgtaattctcatagcagayccatgaggttggtatatttcattattcccatttttcagcaaagacactaaggctcacaactattaagaaaattgcctaggtgacaaaaataaaatacaag

SEQ ID NO: 7894 - DNA, 201 bp, Homo sapiens
acgcatttataccctctctcactgtaattctcatagcagatccatgaggttggtatatttcattattcccatttttcagcaaagacactaaggctcacaamtattaagaaaattgcctaggtgacaaaaataaaatacaaggccccttctctttctatgtcctccagacttccccttcacctttcattgcattggctgctg

SEQ ID NO: 7895 - DNA, 201 bp, Homo sapiens
actgaaatttgaatttcatatgattttcatttgtcacaaaatattattcttactttgattttttaaaccatgtaaaaaacatgaaaactattcttgactawtatgctatacagaaagagacaaggggctggatttggcctgtgggctgtaatttgccaatccctgatctagaagcagaggaatatggtggttaaaagggat

SEQ ID NO: 7896 - DNA, 201 bp, Homo sapiens; identical to SEQ ID NO: 994

SEQ ID NO: 7897 - DNA, 201 bp, Homo sapiens; identical to SEQ ID NO: 7465

SEQ ID NO: 7898 - DNA, 201 bp, Homo sapiens
cagcaagggatggctgggaacatgattccagagggcactgtgacctagccagccacagggggaagaaccccaggtcctgagcgtgctctttgaggagaagrttctgacagagtaggaagtgggctgtggggtcacgttgttcccacttcaccacagtgaaagcctgccaggaaacacatcccggaaatgagatctactcta

SEQ ID NO: 7899 - DNA, 201 bp, Homo sapiens
tggttcctaatctctctcaatttccctttctctttaacagaatgttactctgagaccacagaacatgatggcacccaggcgctaagctgtacttgtgcagycttaacatctgagctccctctcctggacccactgagcacgaggcagggggcacacattagacaagcaataatggtttgttcaaggcttagttccactctt

SEQ ID NO: 7900 - DNA, 201 bp, Homo sapiens
ttgccataaaggaacacctgaggctggtaatttatgaaaagaggcttacttggctcatggttctgcaggctgtacaggaagcatggtgccagcatctgctyagcttctgctgagggcttcaggaagcttccaatgatgctggaaggcaaagggtgagccagcgcatcacatggcaagagaggaagaagagagacctgagga

SEQ ID NO: 7901 - DNA, 201 bp, Homo sapiens
ttcagccttccagtatgattgcttagtgctagcacagccttgttaatcctgagcccagggccactgtgttagcccattatcgcattgccataaaggaacasctgaggctggtaatttatgaaaagaggcttacttggctcatggttctgcaggctgtacaggaagcatggtgccagcatctgcttagcttctgctgagggc

SEQ ID NO: 7902 - DNA, 201 bp, Homo sapiens
tccagggttaggatccacatccaggaaggtcattttgtttatggcccaggtgggagccaacaagctgtgccattacaagcttagccctctggcttcttggyaagcagccatactaagcaaagcccaggtgcactggctaggggttttgcatggggaaagcagttgagctacattctccagcaggagaggctggtaccaaat

SEQ ID NO: 7903 - DNA, 201 bp, Homo sapiens
agcatccctcatgaacatagacacaaaaatacttaatattttagcaaatctaatcaaacaatacataaaatacataatacatcatgataaagtgtagtttrtaaaattaatgtgcctttgcaagtctaaaatttttccccatcacagcaccatattatatgcccaagtaaagacccaaatctgtttcatctacctagaatg

SEQ ID NO: 7904 - DNA, 201 bp, Homo sapiens
accctgtatttctcctaggaacaatggttccatatttgctaatcaatgttcacagagactttacagaacataactactgtgaataatgagaatcaactatrtatgtatacataatacatacatctgtatatatatatatgtatctatatatgtatatataatacatatatctgtataaatgtgcatatatttgtataatat

SEQ ID NO: 7905 - DNA, 201 bp, Homo sapiens
catttttcagttttgtgggttttgctggtgatttcactgtttaaaatagtccgctagtgtaggactgaagtactgtctctcgtgttcctaagtgcaagaargctgtgatgtgcctgtggagaatatatgtgtgttaaattagctttattcatgagatgtagtgccattggccataaattcaatattaataaatcagctata

SEQ ID NO: 7906 - DNA, 201 bp, Homo sapiens
tcctggaaagaagaattgatcctacaaaataagacattaagagatattggtcccaaattcatggtgcaaaagaaagatggggaaattatctcccagagttyctttatgagcctccaggtaaatccaggtgccatttgcaaagactgggaagtgcaaagaaagaggctgggcaaaaggtaagggctagaggggtctcggaca

SEQ ID NO: 7907 - DNA, 201 bp, Homo sapiens
tttagcctgtataaaaacttgcagagaaaaaaaaatcagtctaacagccacattcataatatttaaatatgtataataaactggacatttttaatcaaacwttttttaggcaggagatttttattcatactctatgactttaatttctaagtaaataaaaatgcaactgaaaaaaaggaccagttctgctgaagaggtaac

SEQ ID NO: 7908 - DNA, 201 bp, Homo sapiens
cctgccacctggttttgtaagttttattggaataaggatttgttcatatatgtattttgcactacagttgcagagttgagtagttgtgacagagactggaygtcatgcaaaacttaaagcatttactatgtggccctttacagaaaacgtttgccaaccgctgcaatatatgtttgcggtggtggtaacacagatgtatat

SEQ ID NO: 7909 - DNA, 201 bp, Homo sapiens
caccgagctccagcatgtatagtctagaaactcctatttctgttcagttaatctcacagggatcctcaggtagccaaggacctcctccagtaccatggtayttgccaagaaactgagaacaaagaaagccacccctcccacagatggagtatgccagagggctcgggtgtggctccatcctacatcaaggaggttttggta

SEQ ID NO: 7910 - DNA, 201 bp, Homo sapiens
gctgaggcatgagaatcatttgactccaggaaactcatcacagccttgacctccgcagctcaagtgatcctcccacttcagccttccagtatgattgcttrgtgctagcacagccttgttaatcctgagcccagggccactgtgttagcccattatcgcattgccataaaggaacacctgaggctggtaatttatgaaaag

SEQ ID NO: 7911 - DNA, 201 bp, Homo sapiens
cctataatcccagctactcaagaggctgaggcatgagaatcatttgactccaggaaactcatcacagccttgacctccgcagctcaagtgatcctcccacytcagccttccagtatgattgcttagtgctagcacagccttgttaatcctgagcccagggccactgtgttagcccattatcgcattgccataaaggaacac

SEQ ID NO: 7912 - DNA, 201 bp, Homo sapiens
tcatgtgatccgcctgcctcggcctcccaaagtgctgatattacaggcaagagccactgcacccagcctaaaatatttttttcagctttgtccattttctytattacacaggttgatcaaaattatcttgtctacttttaatggaataatcccctacacgagcaaaagcagaagttgtctaaatgtcaaaatataggatat

SEQ ID NO: 7913 - DNA, 201 bp, Homo sapiens
gcttcatttcattcacttcatcttccattactgataccctttcttccagttgattgcatcggctactgaggcttctgcattcgtcacgtagctctcgtgcyttggttttcagctccatcaggtcctttaaggacttctctgcattggttattctagttagccattcatctaatttttttccaaggtttttagcttctttgc

SEQ ID NO: 7914 - DNA, 201 bp, Homo sapiens
agatttggtcttttcacatagtcccatatttcttggaggctttgttcatttctttttactcttttttctctaaacttctcttctggcttcatttcattcayttcatcttccattactgataccctttcttccagttgattgcatcggctactgaggcttctgcattcgtcacgtagctctcgtgctttggttttcagctcc

SEQ ID NO: 7915 - DNA, 201 bp, Homo sapiens
tcgagcagtatctttgtggcgttctctgtatttcctgaatttgaaggttggcctgccttgctagattggggaagttttcctggataatatcctgcagagtstttccaacttggttccattctccctgtcactttcaggtacaccaatcagatgtagatttggtcttttcacatagtcccatatttcttggaggctttgttc

SEQ ID NO: 7916 - DNA, 201 bp, Homo sapiens
tggagttgctcttctcgagcagtatctttgtggcgttctctgtatttcctgaatttgaaggttggcctgccttgctagattggggaagttttcctggatartatcctgcagagtgtttccaacttggttccattctccctgtcactttcaggtacaccaatcagatgtagatttggtcttttcacatagtcccatatttct

SEQ ID NO: 7917 - DNA, 201 bp, Homo sapiens
ttctggcttgtagagtttctgccaagagatccgctgttagtctgatgggcttccctttgtgggtaacccgacctttctctctggctgcccttaacatttttccttcatttcaactttggtgaatctgacaattatgtgtcttggagttgctcttctcgagcagtatctttgtggcgttctctgtatttcctgaatttgaag

SEQ ID NO: 7918 - DNA, 201 bp, Homo sapiens
ccatgctgttttggttactgtagccttgtagtatagtttgaagtcaggtatcttgatgcctccagctttgttcttttggcttaggattgacttggcaatgygggctcttttttggttccatatgaactttaaagtagttttttccaattctgtgaagaaagtcattggtagcttgatgaggatggcattgaatctataaat

SEQ ID NO: 7919 - DNA, 201 bp, Homo sapiens
gagggctctgttctgttccattggtctatatctctgttttggtaccagtaccatgctgttttggttactgtagccttgtagtatagtttgaagtcaggtakcttgatgcctccagctttgttcttttggcttaggattgacttggcaatgcgggctcttttttggttccatatgaactttaaagtagttttttccaattct

SEQ ID NO: 7920 - DNA, 201 bp, Homo sapiens
tccagtttcagctttctacatatggctagccagttttcccagcaccatttattaaatagggaatcatttccccattgcttgtttttgtcaggtttgtcaaygatcagatggttgtagatatgaggcattatttctgagggctctgttctgttccattggtctatatctctgttttggtaccagtaccatgctgttttggtt

SEQ ID NO: 7921 - DNA, 201 bp, Homo sapiens
tcccctccccccaccccacaacaggctccagtgtgtgatgttccacttcctgtgtccatgtgttctcattgttcagttcccacctatgagtgagaacatgyggtgtttggttttttgtccttgcaatagtttgctgagaatgatggtttccagcttcatccatgtccctacaaaggacatgaactcatcattttttatggc

SEQ ID NO: 7922 - DNA, 201 bp, Homo sapiens
cttttatatactttctccaaatttataatattttcatggtattttcatcaattgaatactaataatattataataattcaactaacaataaacattcttttatttttttattatactttaagttttagggtacatgtgcacaatgtgcaggttagttacatatgtatacatgggccatgttggtgtgctgcacccattaac

SEQ ID NO: 7923 - DNA, 201 bp, Homo sapiens
cgccctgcttctgtgacccaaggaacaatgggcagctggtatggagggtcacaagctcaggacctgtaaaagcctctatttccaagagaccccagtatgtraccaacagttgctgctctaatgatgtacagtgcaatgtcaaagagggcagtttcttgcgtcaggggctcatgggcaatttgtggccaccatgagttatga

SEQ ID NO: 7924 - DNA, 201 bp, Homo sapiens
accccagtatgtgaccaacagttgctgctctaatgatgtacagtgcaatgtcaaagagggcagtttcttgcgtcaggggctcatgggcaatttgtggccaycatgagttatgagagaaggctgctaaagcccctatggtaaaggagtctttgaggagactcatgggattcctgtcatattgcaatgtggacagattctaaa

SEQ ID NO: 7925 - DNA, 201 bp, Homo sapiens
aaagaatacacactgcatgattacaattctacttttatgaaactgtagaaaagacaaaactagtgataagcagcagaccagttgttgccagtgggtggggrtgtgaaaaagaaataattacaaagtggcataaggacatttttgcagtgatggaaagattctatatcatgtcaacaaactacagtgcacaggcccaattca

SEQ ID NO: 7926 - DNA, 201 bp, Homo sapiens
ttttaaaaactgtcactgtttgcaaatgacacaattatctacacagaaaattcaaagggatacatgcatacacacacgacgagaataaatgagttcatcargatcacagaatacaagatcagcataccaatatcaactgcatttctgtgtgctagcaatgattatgtgaaaactgaggttaaaggctgaataccatttaca

SEQ ID NO: 7927 - DNA, 201 bp, Homo sapiens
ctaaaaggtctgaaaaatttctgcctggttctcttgagacacttcctctcaggtgaaaccagcccatgtaaaaagtccagttatcctgaaatcactgtcayggacaagctgcatataaatgctccagccaacagtttcagctgagctcccaacagcctgccagccatgtgtgagggtcattgtaggtttccggcccagtag

SEQ ID NO: 7928 - DNA, 201 bp, Homo sapiens
taaaaagttgaaagtatgaaaacggcatcaaaattatgaaatgtagggacaaagttactagacctgtactaaagctacaaaacatgtactaatgctagaaraaagtaaataagtcctaaaaataaatagatacactgtatgcatgagttataaacctcaaggacctacaaagtcaaaacaattttttaagatttttttctt

SEQ ID NO: 7929 - DNA, 201 bp, Homo sapiens
attttaggatgaatggtagaggcatgaaggggaatcatcgaaagcattgaatagtaggtaaaattgccagaaaaaaaatcaggtgatagtgtttgaggggygacggcaaaggaaaaattaagtttggaggaggcaaatgtaggtttttatctcctgctgtaaaatactcactaatacatatgtttccaatgcatcactaat

SEQ ID NO: 7930 - DNA, 201 bp, Homo sapiens
aaactgagtaggttaagtaagaaaaggtttctggactttcagaagatgctaacagggacttctctctatactttctcagattagtgaattctgataaaagkctctccacatttgtagattcacaggatttctgccttctgtgtgttttctgatgtgctataagtgatgacttctggtagaaagtcttctcacattcattac

SEQ ID NO: 7931 - DNA, 201 bp, Homo sapiens
taatcacctcccacccggcccctcccctgacacatggggattacaattcaacatgagatttgtgtgggcacacagagccaaaccatatcaaatgctaacayttatttatgtatgagtagaatgtaacaagatttcaacacatcaatttactctctacaaatattttatttaaaatatacattttttcttatagctataaaa

SEQ ID NO: 7932 - DNA, 201 bp, Homo sapiens
aaaagagggaaaacatctttcacctcgccctttgctcagccacttaaatttacatagagacctatagtgtttatgacagaaatgatcgttggaaagacagyaacaagccatattgcatcgggttccccagtcctgcaccaagaagggcacaccagctccagacactcctgccagaagtgtgtgacctcatcatgagaaaac

SEQ ID NO: 7933 - DNA, 201 bp, Homo sapiens
tttcaaatgatgtaatgtggctgctctgaaattcaggttctctccactccctgggatttctttttgttgccacttattgttgttcttgctgctgctgtttrtttgttttagtgactttcctgaattaatattgtagactctgcctttttgtcataaatgaccgcagaagtcactgctcagttagctcagtgggcagctcac

SEQ ID NO: 7934 - DNA, 201 bp, Homo sapiens; identical to SEQ ID NO: 7482

SEQ ID NO: 7935 - DNA, 201 bp, Homo sapiens; identical to SEQ ID NO: 7455

SEQ ID NO: 7936 - DNA, 201 bp, Homo sapiens
aagtccactttccagcctaagctctacgatgttccgcgttggttcatgtgctaagcacctcggctgtcctcagcagttcctatctccctggtcagttcccrttcttttccctagagtggctctccagatcctacagcctcctccgtcctccagcacgctctccgtcccgagtttccaggtcatctctccctccctctttct

SEQ ID NO: 7937 - DNA, 201 bp, Homo sapiens
agaatcatttttgtttcattgattttttttctattgtttttctgctttcaatctcattgatatctgttctttattttttccttccttctgcttacattttkaagttttcaaacgtcttgagtcaggagctcggattatcgattttcaattttctccttttctagtgcatgtgttaagagatacaaacgttgctctcagcac

SEQ ID NO: 7938 - DNA, 201 bp, Homo sapiens
ttcatgtgctaagcacctcggctgtcctcagcagttcctatctccctggtcagttcccgttcttttccctagagtggctctccagatcctacagcctcctmcgtcctccagcacgctctccgtcccgagtttccaggtcatctctccctccctctttctctcactctggttcgtatttccagcctcttgcccacaacctct

SEQ ID NO: 7939 - DNA, 201 bp, Homo sapiens
tttgcatgtgtagagttgttcatagtaacccacatcatattaatgtctacgggtctgcagtgatatatcaggtttcactcctgatatttgtaatttgtgtrtttattctttctttgccagtctttctagaggtttatcaattttattgatctcttcaaagaatcatttttgtttcattgattttttttctattgtttttct

SEQ ID NO: 7940 - DNA, 201 bp, Homo sapiens
tgcatttgtttttttcattacagaaatatttattgggtgccctttatgtgcaaggtcctctgccaggccctggggatttaacaatgaataaggcaggcatsgttctgcgctcacagagggcacacacatgtaacagacaagtaactaaaaatgtgaaggctgtgaatgaaacaaacagggtgctgcttggagtatgatgtg

SEQ ID NO: 7941 - DNA, 201 bp, Homo sapiens
agagaactctgctcatctgctgctttctctatttaccagctatacaaccttggaaagccacttaagctctgtgatcctcatgcatttgtttttttcattamagaaatatttattgggtgccctttatgtgcaaggtcctctgccaggccctggggatttaacaatgaataaggcaggcatggttctgcgctcacagagggc

SEQ ID NO: 7942 - DNA, 201 bp, Homo sapiens
ggaggcttaggcaggagaatcgcgtgaacccagagggcagaggttgcagtgaaccgagaccacaccaatacactccagcctgggcactgggcaacagagcragactctgtctcaaaaaagaaagaatatttaagacatgatctcatttttttataagtatacatataccctaaaatctaaactgaagtgtaagaaacaaag

SEQ ID NO: 7943 - DNA, 201 bp, Homo sapiens
attctaaatatgttccatgtaatatttgagacatacttttatttaataaaatatttgttgcttacctgaaatttagatctaactaagaatcctatgtttttatttgccaaatctggcaactctgacaggcctacagaatcaaatatgttttgagcccttgggatgggcttaatctgaaatttcacacaagtctgactggtc

SEQ ID NO: 7944 - DNA, 201 bp, Homo sapiens; identical to SEQ ID NO: 7461

SEQ ID NO: 7945 - DNA, 201 bp, Homo sapiens
tgccgcagggaacatctttatgcatatcttttcatgtaactgtgaacagttaaacataaaatacattcgtagaagtagaattgctagattaagttatatayactttaatggttgttgttgttgttgttttgagacagggtctcactctgtcgcccaggctggagtgtagtgatatgatcacagctcactgcagcctcaacc

SEQ ID NO: 7946 - DNA, 201 bp, Homo sapiens
tgtgaaagcaacaaccagctcttccttgatctgactggggagctgaggggactcaaaggaaaccagtagaaagcttcaaagtgacagagacggggctgagrgagaaacgatgccagcattgactactgaggctccttgggcagcttccccaggcctgcccgggcttctttcacttggccctgacaaggctggatgagaggg

SEQ ID NO: 7947 - DNA, 201 bp, Homo sapiens
agagtagacagacttcaaataaaaaatctaacaatgtgccccaaggaactagaaaagcaagaacacacttaatccaaaattagaagggaagaaacaataastatcagagcagaaataaatgaagttgaggtaaaatatatatatatatatacagaatatcaacaaaacaattagttttttgaaaagataaaatcgacaaac

SEQ ID NO: 7948 - DNA, 201 bp, Homo sapiens
cagacttcaaataaaaaatctaacaatgtgccccaaggaactagaaaagcaagaacacacttaatccaaaattagaagggaagaaacaataagtatcagarcagaaataaatgaagttgaggtaaaatatatatatatatatacagaatatcaacaaaacaattagttttttgaaaagataaaatcgacaaacctttagca

SEQ ID NO: 7949 - DNA, 201 bp, Homo sapiens
tcccacattccttgcacttatagttcttctctgtggagcttctgccctcccagtccaggcctttttccatcatgacacttttcgttcgctctcccagaacrgatgcttcagaagtgctttgctttagggctgacatctttgtttcaaaccagtaatcctcgactgaaagaaaattttaaaaattcaaatgttctttatgtt

SEQ ID NO: 7950 - DNA, 201 bp, Homo sapiens
aactatggattttttttttgagaaaaggtctggatctgtcacccaggctgcagtgcagtggcgtgatcatatctcactgcaaactgaaactcctagactcmagtgatcctcctgcctcagcctcccaaagcactgggattacagtgccactgtgcctggcctcacccatggaattataaatggatatagcatccatgaaga

SEQ ID NO: 7951 - DNA, 201 bp, Homo sapiens
tcaatttatttcataaacagtcttgtacctcacacaaccctatttttgtatatataaagtcatcctttacttttcatatacatataatatataatatataygtgtgtgtatattacatatatgaatatacatatataattttttaaccatttatttatttcagcatgtctggtttctctttccagtgtgagctttaaagac

SEQ ID NO: 7952 - DNA, 201 bp, Homo sapiens
attcacaccaaaagccaatgtccagagaaagcatacatgtaggctatggaaacaagatcaggtatgtagttttattctgctgttgtatcttcattttcttytaccacagttgtcattaatgaagctgtcatagccatcaaatcataaaatttccctatttatcaatttatttcataaacagtcttgtacctcacacaaccc

SEQ ID NO: 7953 - DNA, 201 bp, Homo sapiens
gcttttgctgtattgagaaagttagaattaaaacccaagaagaatttaacgtaagtaggtaaaatactgtaggagtctagagcaaacgggacaagtgagaragtgataaaatttgagaatcacaagctttaagtcttgagaatgtataagagagttgtgaataatgttttgagagaattgctgtaagagagaacagaaggt

SEQ ID NO: 7954 - DNA, 201 bp, Homo sapiens
atttcataaacagtcttgtacctcacacaaccctatttttgtatatataaagtcatcctttacttttcatatacatataatatataatatatatgtgtgtrtatattacatatatgaatatacatatataattttttaaccatttatttatttcagcatgtctggtttctctttccagtgtgagctttaaagaccatagtt

SEQ ID NO: 7955 - DNA, 201 bp, Homo sapiens
tcctttaaataattttgtatttaactgttgcatagtttattattccatttggctgactctgagtttacagtcacactatgtggattcttttttaataatamctttttaatatagagacagggtctcatcatgttgcctaggctggtctcaaaatcctgggctcaagcaatcctcctgccttggtgccttcgtctcccaagg

SEQ ID NO: 7956 - DNA, 201 bp, Homo sapiens
agagaaagcatacatgtaggctatggaaacaagatcaggtatgtagttttattctgctgttgtatcttcattttcttctaccacagttgtcattaatgaasctgtcatagccatcaaatcataaaatttccctatttatcaatttatttcataaacagtcttgtacctcacacaaccctatttttgtatatataaagtcat

SEQ ID NO: 7957 - DNA, 201 bp, Homo sapiens
aatggtagaggcatgaaggggaatcatcgaaagcattgaatagtaggtaaaattgccagaaaaaaaatcaggtgatagtgtttgaggggcgacggcaaagraaaaattaagtttggaggaggcaaatgtaggtttttatctcctgctgtaaaatactcactaatacatatgtttccaatgcatcactaattcttttctttg

SEQ ID NO: 7958 - DNA, 201 bp, Homo sapiens
tcagactaacagcggatctcttggcagaaactctacaagccagaagagagtgggggccaacattcagcattcttaaagaaaagaattttcaacccagaatytcatatccagccaaattaagcttcataagtgaaggagaaataaaatactttacagacaagcaaatgctgagagattttgtcaccaccaggcctgccttac

SEQ ID NO: 7959 - DNA, 201 bp, Homo sapiens; identical to SEQ ID NO: 7458

SEQ ID NO: 7960 - DNA, 201 bp, Homo sapiens
tagtaagccatttagttttttagagaaaaactgtctttccgtacactttgattgttccaccacgaggagacatccttcccaggaccgcttcaccgatccgsagatgctgctcctgcactgcggcatccgaatatgcaaaacgatgatcaggtgtttccagagtattgtggtaagaatcagagaaaaccaagtgatacatcc

SEQ ID NO: 7961 - DNA, 201 bp, Homo sapiens
acaaggattgttttccttctaaaattctcaattatctccaccaaacaaaatacctgggccaggcacagtggctcacgcctgtaatcccagcactttgggakgctgaggtgggccgatcacctgaggtcaggagttcaagaccaacttggccaacatagtgaaaccccatctctactaaaaatccaaaaaaaattagtcagg

SEQ ID NO: 7962 - DNA, 201 bp, Homo sapiens
atgacgagttgatgggtgcagcaaaccaacatggcacatgtatacctatgtatcaaacctgcacgttgtgcccttgtaccctagaacttaaagtataattwaaaaaaaaaaaaaaaagaaaaatcaagtgctttgaagagtgtctggcacatatgaagtgctgcacaattgctattactcttttcattatgtttattacta

SEQ ID NO: 7963 - DNA, 201 bp, Homo sapiens
aaagacagaaaaccaaacaccgcatgttctcactgataggtgggaattgaacaatgaaaacacttggacccagggtggggaacatcacacactgcctgtckggggttggggggctgggggagggatagcattaggacaaatacctaatgtaaatgacgagttgatgggtgcagcaaaccaacatggcacatgtatacctat

SEQ ID NO: 7964 - DNA, 201 bp, Homo sapiens
aatctcagctatgatgctcattcaatgatcattgttggctgatgaatttctttttttttttttcttttctttttttctttttttcttttttttttttttttgtttttttggagacagagtcttcttctgtcacccagactagagtgcagtggcacaatctcggcttactgtaacctccacctcccgggttcaagtgactct

SEQ ID NO: 7965 - DNA, 201 bp, Homo sapiens
tatcacaaaattttaaatgcaagttacacaagaacattggctgggtacagtggctcacccctgtaatcctagcactttgggaggctgagccaggtggatcwcttgaggtcgggagtttgagaccagcatggccaacatggtgaaaccctgtctctaccaactctactaaaaatacaaaaattagccgggcatggtggtgag

SEQ ID NO: 7966 - DNA, 201 bp, Homo sapiens
aggagggtccagaagggagaaactcagcacacatctgaacagaaggaacagagtcaggatacaccatctttaagaactgtaacaatcactgcgagggttgrggccttcattcttgaagtcagccataccaagatcccaccgggaggaaccaattctggcccattaccaaatgggaaacgggttccccatgagggcgctgtg

SEQ ID NO: 7967 - DNA, 201 bp, Homo sapiens
ttagaaaactaaaaaacagtaaaactgataaatgatcaaaaagctattgctttggaaaaaaatccacaaagaacagaaaacactagcaaaaaaaaaaaaaagcagaattatacaaatagaatgagacaaagtgggaaaacattgaaatagaggactttttaatattttaagataatactttgctaacttaatgtaaataaa

SEQ ID NO: 7968 - DNA, 201 bp, Homo sapiens
gaccaagacaggaagatcaccctgaggccaggcatttaaaattagcctgggcaacatactgagaccctgtctccaccaaaaaaaaaaaaaaaaaaaaaaargaaaagaaaagaaatagaaaatccaatatccctatatctaataaagaatttcaaataccttcacacaaagaaaactgcaggccaaatggcttcactgata

SEQ ID NO: 7969 - DNA, 201 bp, Homo sapiens
agttaaaataatttttaaaaattagccaggcttggtggtgcttacctgtagtcctagttatttgggaggctgaagtgggaggatccgttgagtccaggagwtcaaagtcacagcaagctataattgagtcactgtactccagcctgggcaacagagcaaaatcttgactcagaattttaaaaaaattaaaaaataatttag

SEQ ID NO: 7970 - DNA, 201 bp, Homo sapiens
aaattagagggaaacaaggagtatgcattgaaccactgcatttcttaaaagtataagaattcagtaattaggatcctgaagtaagaagaaatatttttttwaaaaaatagatcatgtgggccaggtgtagtagctcatgcctacatgtcttgggaggccgaggcaggagggtcacttcaggccaagagttggagaccagcc

SEQ ID NO: 7971 - DNA, 201 bp, Homo sapiens
ttcaaagatgaaattgcctaacgatgcatttctcagaaggtgtccccatcactaagcaccaaatgactgtatttgttcagaactatggcagcaagtgaagrcttcagcttccctagaccttcacagtctcatggaaacttctagggcagccaatcctttcaaaggaactaaaagtcctttcaaagccaataattcacttca

SEQ ID NO: 7972 - DNA, 201 bp, Homo sapiens
atcatactattatttcattaaatcagaaggccagcattttgataggacaaattagagggaaacaaggagtatgcattgaaccactgcatttcttaaaagtrtaagaattcagtaattaggatcctgaagtaagaagaaatattttttttaaaaaatagatcatgtgggccaggtgtagtagctcatgcctacatgtcttgg

SEQ ID NO: 7973 - DNA, 201 bp, Homo sapiens
ggcaggagaatcacttgagcccagaaggcggaggttgcagtgaggcgacaccgtgccactgcactcaagcctgggagacagagtgaaggaaaaaaaaaaaacaggcattattagagaggctttatctcctacgtgttcaaaagcaaccatgctcctcccagtatctcaggacgactggactgcctgtgttcctgttgctct

SEQ ID NO: 7974 - DNA, 201 bp, Homo sapiens
acagacctgtagtcccagctacttgggaggctggggcaggagaatcacttgagcccagaaggcggaggttgcagtgaggcgacaccgtgccactgcactcmagcctgggagacagagtgaaggaaaaaaaaaaaacaggcattattagagaggctttatctcctacgtgttcaaaagcaaccatgctcctcccagtatctc

SEQ ID NO: 7975 - DNA, 201 bp, Homo sapiens
tcaaccccaatcctaacagctttctcccctgctttgggcccttcaatgtgtccactttcctgagacgccttaagggaatttatgcagatctataaaagtgmcgatggtcccccctcacagccaccttttcccaccaatgctttgtcatgtaccttcacggcaggatctgaaacttgtcctagtgtccacagccggtcttga

SEQ ID NO: 7976 - DNA, 201 bp, Homo sapiens
ggccacagtaaccatccatccagtggtacccaacctgtatactttaataggacttattccagcaagtgctacctggtttacagtcttagaattaaagggcrctttcttttgtatccacttggcaccaattagtcagcctatctttgcatttcaataggacaaagaagctacacagttcacctggactaggctcccacaagg

SEQ ID NO: 7977 - DNA, 201 bp, Homo sapiens
gcagccccactaagtgacaccaaacagggtaatcagatctgggtatcagagcctctgcaggaaatgttggcttagcccacagtgctgaaaacaaatgcaawtttgtactaggtgtgggtcatctgctccaccccacactttccctcccactttctggcttataaacaattccatcaagaggttaaagaagggcacagctgg

SEQ ID NO: 7978 - DNA, 201 bp, Homo sapiens; identical to SEQ ID NO: 7475

SEQ ID NO: 7979 - DNA, 201 bp, Homo sapiens
gtacctattttaatatacatttatgacagattaagtacattaaaatgaaaatatataaggaatctaataatatataatgagtccttggttcagactctttyggaatagtacttgtggggcagatataataataaatcatgatttcaattacaaaggaaaaatgaaatgttaactccaaatccaccataaaactcacttccc

SEQ ID NO: 7980 - DNA, 201 bp, Homo sapiens
aatatgaaaaaaggagaggaatctgcaaataaaaacacagtaatctggcactttagaaatgtgaccttcaaaactggataaagtggaataaacaaatacarcaaatggtattttaggatgaatggtagaggcatgaaggggaatcatcgaaagcattgaatagtaggtaaaattgccagaaaaaaaatcaggtgatagtgt

SEQ ID NO: 7981 - DNA, 201 bp, Homo sapiens
tacaaagtttctccccttcactgtttttaatgtaaactgagtaggttaagtaagaaaaggtttctggactttcagaagatgctaacagggacttctctctrtactttctcagattagtgaattctgataaaagtctctccacatttgtagattcacaggatttctgccttctgtgtgttttctgatgtgctataagtgatg

SEQ ID NO: 7982 - DNA, 201 bp, Homo sapiens
acagccacattcataatatttaaatatgtataataaactggacatttttaatcaaactttttttaggcaggagatttttattcatactctatgactttaayttctaagtaaataaaaatgcaactgaaaaaaaggaccagttctgctgaagaggtaacacacttcaacccgtctgtgccacaagctcaatggatttgtcta

SEQ ID NO: 7983 - DNA, 201 bp, Homo sapiens
ggagacacaacaagtgggtgcaatgtaggatcctggattggatccttggaaagaaaatgatcgttaggggggaaactagtgaaacacaaacaaggtcagcwgtttactattaattattaccatgatgcctttgggaagccgagatgggtggatcatgaggtcaggagttcaagaccagcctgaccaacatagtgaaacccc

SEQ ID NO: 7984 - DNA, 201 bp, Homo sapiens
gaaacaagaattttagtataatatttctaaaggaagtttttagtctcaattaccaaactgacatttccagtgagctaaaatctctcatgtataaccaaaamtgaatcattttcaaagttacaacttattcaaaatattcgtaagatgtttcaaatatcaaatatctgctgctcactaagatggccctttatttctgggcaa

SEQ ID NO: 7985 - DNA, 201 bp, Homo sapiens
ctgccttatggtgcccttcaccaacatcacagaacctaggccatgggaacaccttcccaggaggacctccaggtatggaccaatgccaggggcccaaaacwgaagtaacaacttctccttctgctgtagaaaaattgcagaaaaatattgtctctaattttattagaagtacttctaaatgtaaaatgtttccaattaagt

SEQ ID NO: 7986 - DNA, 201 bp, Homo sapiens
cctgaccaacatggagaaaccccatctctactaaaaacacaaaattagctgggcgtggtggtgcatgcctgtaatcccaacaactcgggaggctgaggcasgagaatcgcttgaacctgggaagctgaggttgcagtgagctgagattgcaccattgcactccagccagggcaacaagagtaaaactccatctcaaacaaa

SEQ ID NO: 7987 - DNA, 201 bp, Homo sapiens
cacacttctgtgctttaacacaatgaaaaattgctttgacattgaagttctgtattgagtcccacaagatattattcccttacagcgcttgtattgtaagytgcaaactgaacatttgaaaaatcaaaatgaaagcatgtagcataaaggtctgccttttttttttttttttttttgagacagagtctcactctgtcgccc

SEQ ID NO: 7988 - DNA, 201 bp, Homo sapiens
cacatcgactgctcactggttgtgagatcttggatatgtgtggtaacctctccaaaccatggagggaagaacaatgcctactacaaaggatgaaattatasattctatgcagcaatggctacatacacacatctgtgaccaagagcgacagacgtggactgtttccaagcccattttttaaattatatttatatttgagca

SEQ ID NO: 7989 - DNA, 201 bp, Homo sapiens
cagatttattactataggatgtatttgggtagaattatttcttcccattatactggccttattcacacttctgtgctttaacacaatgaaaaattgctttracattgaagttctgtattgagtcccacaagatattattcccttacagcgcttgtattgtaagttgcaaactgaacatttgaaaaatcaaaatgaaagcat

SEQ ID NO: 7990 - DNA, 201 bp, Homo sapiens; identical to SEQ ID NO: 7460

SEQ ID NO: 7991 - DNA, 201 bp, Homo sapiens
ataaagagtagacactgagttagaaaactaaaaaacagtaaaactgataaatgatcaaaaagctattgctttggaaaaaaatccacaaagaacagaaaacmctagcaaaaaaaaaaaaaagcagaattatacaaatagaatgagacaaagtgggaaaacattgaaatagaggactttttaatattttaagataatactttg

SEQ ID NO: 7992 - DNA, 201 bp, Homo sapiens
gtcatcatgtgcaaaacaataataacataatagctttgacccattccatgcaccatgtgcaaaagttaactcaaaatggatcgtagacctaattctaaagsctgaaactataaaacttctagaagaaaacataggaggaaatctctatgacctttggttagacaaagagtgcttaccatgatccacaagggaaaaatttta

SEQ ID NO: 7993 - DNA, 201 bp, Homo sapiens
ttataataattgagacaatgtggtattggtataaagatacacaaatagatcagtgtaacagaatagagagaccagaaattggcctacttatatatggacarctgatttgcaaccaacgtgcacagactatgcaaagaataaaaatagctatttctgcaaatgggattgaagcaattgggtcatcatgtgcaaaacaataat

SEQ ID NO: 7994 - DNA, 201 bp, Homo sapiens
atcagtgacctggtctaggaagaaataagtgaccaggtgtctggctgagcagaccagttttttgtcttgctgaatgggtgtacaagatgaagggcagtgtcaggaaggacacagagagccagcaaaaaaggaggagagagagattctgtaaaaaagaaaaaacataggaaagctgagtatgctgctacggggagaattgag

SEQ ID NO: 7995 - DNA, 201 bp, Homo sapiens
aattcaaagctaatttaacattcaaaaatacatcaaagtaattcactatgttaacaaattattttaaatctctatgatcatttaatagatagaaaaaaaawttttgacaaaattcaacttccacttctgattaaaaactctcggcaaactaggaacagaagggaacttccacaacctgatcaagggcatccattaaaaaaa

SEQ ID NO: 7996 - DNA, 201 bp, Homo sapiens
atgcaataaattataaagagaataaataactatacacagaatgttagaacatgatgagtagaatggaaaaacgaaaaagtagaggagacagtgattttaawcagggtagtcggggtacaatgcccccttggtaaagtgatacttgcgttaagccttgaaggaggtgagggagtgagctatagtttggatatttgccccgcc

SEQ ID NO: 7997 - DNA, 201 bp, Homo sapiens
cctggtaaattctatcaaatgtttaaagaggaactaataccaagtctacagaaatttttccagataattaaataagagaaaatacttcccagtcattgaaygaggccaatattactcttattccaaaataagttaggcattacaataaaagtacaatttaatatccctcctgggtatagatgcaaacttctttttaaagca

SEQ ID NO: 7998 - DNA, 201 bp, Homo sapiens
tccaatgatatgactgaccatagcagcagggtagtttttttaatgttccaaactccttaaaactaaacagatcaaatatgaaagtggaaaaaatgaatctrtggataacatcttcaacaccaccaggtaatggagagtcctttatgacctgaataaaagtagtggtgagcaggagtgtgggaggtcagcagctgtgggtct

SEQ ID NO: 7999 - DNA, 201 bp, Homo sapiens
ttctttattgctataatttaagaactttattttaagcagcttaggaagattattaagtttagcttttgaagcagtaactgaactgtagccagatggtcaasaagtaaactacataatttcaagttctagcacattatacattttgagcaatcaaagtactatattttcattgtctataaagtttcctttgcaatttccaca

SEQ ID NO: 8000 - DNA, 201 bp, Homo sapiens
tgagttggtgaattaaatgtggcatattgatacaaggggaaaatatcacagagaaattgtaaaattatatatatatatatatatatatatatatatatatwgatcgacagggataaattccaaaaacaatttaagtgtaaaaaaaggaactaccagtatgacatagtgacatttatggtgtgataaaacttttacaaattt

SEQ ID NO: 8001 - DNA, 201 bp, Homo sapiens
gaataggtgagttggtgaattaaatgtggcatattgatacaaggggaaaatatcacagagaaattgtaaaattatatatatatatatatatatatatatatatatatagatcgacagggataaattccaaaaacaatttaagtgtaaaaaaaggaactaccagtatgacatagtgacatttatggtgtgataaaactttta

SEQ ID NO: 8002 - DNA, 201 bp, Homo sapiens
tcactggtggtccaagatgctgatcaaaacagagcttcctcctcagccttgaccaatgacagatgttctgataacattactgtgtatggcactatcacagrccaaaatttatagggatgttttcttgaatctaatttttattttactacgtattttttgaaataaatgcatattttcctagacactgagtcaattccataa

SEQ ID NO: 8003 - DNA, 201 bp, Homo sapiens
aatgaataggtgagttggtgaattaaatgtggcatattgatacaaggggaaaatatcacagagaaattgtaaaattatatatatatatatatatatatatatatatatatagatcgacagggataaattccaaaaacaatttaagtgtaaaaaaaggaactaccagtatgacatagtgacatttatggtgtgataaaactt

SEQ ID NO: 8004 - DNA, 201 bp, Homo sapiens
gcaaatgaataggtgagttggtgaattaaatgtggcatattgatacaaggggaaaatatcacagagaaattgtaaaattatatatatatatatatatatakatatatatatatagatcgacagggataaattccaaaaacaatttaagtgtaaaaaaaggaactaccagtatgacatagtgacatttatggtgtgataaaa

SEQ ID NO: 8005 - DNA, 201 bp, Homo sapiens
tgttggggccattatctacccacccaccccaagagaaaacacaggatcaccccgtcattctctgatattgcccccttctaatggctgacaagcccagtaamcttcctgcaggagcagagcacacagggcagttggcaggaagtccttttgcctgtcttcaaggctagctcaccccatctctgtctatcaggaatttcctct

SEQ ID NO: 8006 - DNA, 201 bp, Homo sapiens
ccagaagtgagaacttagagcttctcagctctttcctgaacacatgcacggccctgggcatttgcacaaccctgttcatgcaagtggccttccaggttccyaggatgtgtcagagtttttcaaagcctcctttggacatctcagtctctagcttttccctttgggtttttatggtcagcttgtcatttgccccaactatta

SEQ ID NO: 8007 - DNA, 201 bp, Homo sapiens
gacagctctgccttaggctctcctttttgctcttcaggacctcaatatcagccagaagtgagaacttagagcttctcagctctttcctgaacacatgcacrgccctgggcatttgcacaaccctgttcatgcaagtggccttccaggttcctaggatgtgtcagagtttttcaaagcctcctttggacatctcagtctcta

SEQ ID NO: 8008 - DNA, 201 bp, Homo sapiens
agactttcccacattccttgcacttatagttcttctctgtggagcttctgccctcccagtccaggcctttttccatcatgacacttttcgttcgctctccyagaacagatgcttcagaagtgctttgctttagggctgacatctttgtttcaaaccagtaatcctcgactgaaagaaaattttaaaaattcaaatgttctt

SEQ ID NO: 8009 - DNA, 201 bp, Homo sapiens
tgcaagctctggaatgaggctctgcattcggccaggcacgactccaagggatcctcgagagcaagggccatgaagagtctctggaacgccaccgctgcgcsgttagaagcgctccgggagaaattgtgtctgggctgcaggcggcgggagatgcagtccaggaggcgctgcagcagccgtcgggccagcagcctttgcggc

SEQ ID NO: 8010 - DNA, 201 bp, Homo sapiens
gctaagccaagatgacaaacgaaaagtggtcaaagccaaggtttcctcgcgctgcctttgtcttcttcccactgcctggcctgagccctgcagccggaccycacgaggcgagttcttcgcggggcctccccacccaagctggggcaagtccgctgcccatccagaggcaaagagctccggggctgactccacggcagtact

SEQ ID NO: 8011 - DNA, 201 bp, Homo sapiens
tcagcctgccacctggttttgtaagttttattggaataaggatttgttcatatatgtattttgcactacagttgcagagttgagtagttgtgacagagacyggatgtcatgcaaaacttaaagcatttactatgtggccctttacagaaaacgtttgccaaccgctgcaatatatgtttgcggtggtggtaacacagatgt

SEQ ID NO: 8012 - DNA, 201 bp, Homo sapiens; identical to SEQ ID NO: 7479

SEQ ID NO: 8013 - DNA, 201 bp, Homo sapiens; identical to SEQ ID NO: 7481

SEQ ID NO: 8014 - DNA, 201 bp, Homo sapiens
ggcctctttggcagcagggaaggttcaataaggtagtaggagtgggccctgatctaatagaatatgtctttcaaataagagatactagagcacatgctctmtctccccatcccccaccctgcaagccatgaggaagtgccatgtgaggatatagtgagaaggcagcaatccagaagccaggaagcacttaccagaaagaga

SEQ ID NO: 8015 - DNA, 201 bp, Homo sapiens
ataggacttgtatgctgaaaattacaaaacactaataaaagaaatcgaagaagatctaaataagtcgagacatacatattcattgatatttgagatgtcarttctcttcaaactgatctgtagttttaacataattcctatcaaaatctcagcaagatttttttgttgatgtatgcaggcttactctgaaatttatatggc

SEQ ID NO: 8016 - DNA, 201 bp, Homo sapiens
gaagaaaggaaggaaggaaggctggctggctggctatgtgaggacatagcaagaaggtggccatctgtaagccaggaacaaagagagcactcacaagaaasttaatcttccaggaactcagtctgggacttctagccttcagaactgtgagagaataagtttctgttagttaagcaatctcttccgtagaattgtatttta

SEQ ID NO: 8017 - DNA, 201 bp, Homo sapiens
cgtgggacgtggaggttgcagtgagccgagatcgcaacattgcactccagcctgggcaacaagagcaaaactccatctcaaaaaaaaaaaaattagcaaaytgaacccaaaaatatatcaacagaatcatgcactacaactaagtgaggcttattccacgaaggcaagaatagttcaatatattaatccaccatattaata

SEQ ID NO: 8018 - DNA, 201 bp, Homo sapiens
cagatttctcaaattgtctctgctagctccctttccagtatgctagtccacatactacagctgccttaaacttcttgaactctgaaatatttatgcttcawagaataagaatatgtttggagttatctctatctatgccatagtctaggaatttccttctgacaagaagctgtgccaatcataagactggccatatttgct

SEQ ID NO: 8019 - DNA, 201 bp, Homo sapiens
actattctttgaaagggaagaatgaccccaaagatcataaaggctccctccttggtttcaaagaataaagccaccatttcttcagtttaaacaggccaggytaaccctgcctagggccttgtgggcaggtccacccgacagagtatgtggtggaacaaccacctagggccatgggggttgaggccaccaccccaggcagga

SEQ ID NO: 8020 - DNA, 201 bp, Homo sapiens
caaacagaaatatatcagaatttttactgcagtctttttcgttatagtgaaaaatctgaaatagcagaaatgcaaatgaataggtgagttggtgaattaartgtggcatattgatacaaggggaaaatatcacagagaaattgtaaaattatatatatatatatatatatatatatatatatatagatcgacagggataaa

SEQ ID NO: 8021 - DNA, 201 bp, Homo sapiens
agcatgtttcagattttactatgatggttctgctagctacagtaaaggaagaaggcttttatgtttgtgtgcatgtggctgtcttgcaaaatgtatatggsatatgcattgtctgttctttaaaaacatacaatgattcgtctatgtatttccaacttattagttctgtttacttagtcatttccactctcaacttctatt

SEQ ID NO: 8022 - DNA, 201 bp, Homo sapiens; identical to SEQ ID NO: 1060

SEQ ID NO: 8023 - DNA, 201 bp, Homo sapiens; identical to SEQ ID NO: 1061

SEQ ID NO: 8024 - DNA, 201 bp, Homo sapiens; identical to SEQ ID NO: 1063

SEQ ID NO: 8025 - DNA, 201 bp, Homo sapiens; identical to SEQ ID NO: 1057

SEQ ID NO: 8026 - DNA, 201 bp, Homo sapiens; identical to SEQ ID NO: 1058

SEQ ID NO: 8027 - DNA, 201 bp, Homo sapiens; identical to SEQ ID NO: 1059

SEQ ID NO: 8028 - DNA, 201 bp, Homo sapiens
taaagagaacatctacatcctaaatgacaaaacatattatctgggtgaaaggatgatttaactcgtgaaactcaagaacacaagaacaacaactataatcrtttccttgaacacggtcgctagaagggcaaagcatttttctacataaaacattacaattttcccactactccaaaggaatccaataaataattgtacagt

SEQ ID NO: 8029 - DNA, 201 bp, Homo sapiens
tgcaagctgcttttaggtcttgatttatgtaagaatcttgcacagcactgctaatgtaaatttcagttttttccctctaggacaaacacttaccaaaataygcaacttttttggtgggaagagagattgtcctgtgatttctacccatttcctgatcctgtggaaataaatctttatgtacttaaagttatacagaaaata

SEQ ID NO: 8030 - DNA, 201 bp, Homo sapiens
agaaccacttgaatccaggagatggaggctgcagtgagccaagattgtgccactgcactccagcctgggtgacagaatgagactctgtctcaaaaaaatawattaaaattaaaattaaaaaatatatatataatgcaatatcacaggtcccaaatacataaagcaaaaattgagagaacaaaggaaatatagacaccacca

SEQ ID NO: 8031 - DNA, 201 bp, Homo sapiens
attagtgctactaccaaggacttgaaagacgctggggtggtgattcccaccacatccccattcagctctcccatttagcctgtgcagatgacagatcttgkagaatgaccatggattattgtaagcttaacaaagtggtgactccaattgcagctgctgtaccagatgtggtttcattgcttgagcaaattagcacatttc

SEQ ID NO: 8032 - DNA, 201 bp, Homo sapiens
aaagagaaagtaagaaaaatttgaaaatattttgaactgaatgaatatgtcagaatttgtgaaatgtagctaaagcagtgcttagaggtgaaatcagagawaaagatttcaattcgatagtctaaacttccaccttacgaaatgagaaaaagaacagaaatcatccaaagcaagtagaacaggagatgatacagagctaaa

SEQ ID NO: 8033 - DNA, 201 bp, Homo sapiens
gctcacagcttttgtgcagcataaatctactgcagcactaccggctgtgttgggggacagatattgtacaggggtgagggagtggcctcagccggaaatghcccagtaaaccaacaaccttcagcatgggtgtcattgcccttgtgaacatgtcacaggcctgcagagattttgtttatggccagatttgggggcctattc

SEQ ID NO: 8034 - DNA, 201 bp, Homo sapiens
ttacaattggttcaatagtcccaggttgtccatcaggcccttcataatgcaaaatataactactttgatatatttcaggggctttatcaactccaaccatgttaaattgagcaggttgaattggccacatggacagccagtgctgtagagaaatgattgaattgtccactcctgtatctagcaaacctttaaatttctttc

SEQ ID NO: 8035 - DNA, 201 bp, Homo sapiens
cctggacaataatacgggtaggtgaatgctgagttggaaaaattagcaaatctagagtcttctctgggtctattctatttatttgggctttatggacatgyttttcaattcgctgtaactctgcctcagcctcctttgttaattgtcaagggctagtgagactagaatctcctctaaggatagaaaatagattactcatgg

SEQ ID NO: 8036 - DNA, 201 bp, Homo sapiens
gcaggagactagcttgaacttgggaggtgcaggttgcagggaggcagaggttgcagtgagccgagatcgtgccactgtactccagcctgggtgacagagcyagactctgtctcaagctacatactggaagaaaatgtttataaaccatatctgacaaaggattgtatcaagtaagaactttcaaaattcaacagtaagaaa

SEQ ID NO: 8037 - DNA, 201 bp, Homo sapiens
caaggtggtcaaagccagcttctgacagttccaacagtgctcatggaaaccaacaagtaaaagctgagggctgaggggatgtgcgactcctcccttgagcrggttcttcctgcatgcctgtcctgctccctcctccaggcctagcctctgctcactccacccttcatgtcacctcatcaaaaaggtcttctatttctccac

SEQ ID NO: 8038 - DNA, 201 bp, Homo sapiens
ctaaacaattaccaaaattcattgaactcgatgcttaagatccgtgcattttattacatgtaagatatacttcagtaaccatgaaacagtataaatgtattgcccacaagctctttgacactcatcccatgaagagatggggggtatgtcaccaccacttgaatctggacacgcttgtgactgcttcaaacaatagaacac

SEQ ID NO: 8039 - DNA, 201 bp, Homo sapiens
aaaacaatgttctgtacctgacatcaggcagttgatgcaggggtctaaacaattaccaaaattcattgaactcgatgcttaagatccgtgcattttattayatgtaagatatacttcagtaaccatgaaacagtataaatgtattgcccacaagctctttgacactcatcccatgaagagatggggggtatgtcaccacca

SEQ ID NO: 8040 - DNA, 201 bp, Homo sapiens
gtgaaggcttcagcttccctagaccttcacagtctcatggaaacttctagggcagccaatcctttcaaaggaactaaaagtcctttcaaagccaataattyacttcagcaacctggaccctaaggctttcattccacaattaggatacaattatctgattatttttccccaaagaaaaaattctagaaggaatatgtgcat

SEQ ID NO: 8041 - DNA, 201 bp, Homo sapiens
gcaggcaggcctccttgagctgcggtggtctccacccagttcgagcttcccagccgctttgtttacctactcaagcctctgcaatggcgggtgcccctccyccagcttcgctgccaccttgtagttggatctcagactgctgtgctagcaatgagtgaggctcagtgggtgtaagaccctccgagccatgcgcgggatata

SEQ ID NO: 8042 - DNA, 201 bp, Homo sapiens
tttagttattttaggcagaatccaattagttaatttcaaaaattgaaacagtttcattttaggaaaatgattattgagaatacccacaaagtcagctaaayggatttgccaagtaagactattttataaaagcttgctgtatttgtgtcttcgtgagtgggacaataatttttccaggatcatatccatgtaatttaacaa

SEQ ID NO: 8043 - DNA, 201 bp, Homo sapiens
cagaagattataccaccatatttttactatagcatttctatgtttagatacacaaatacttgccattgtgttacaattgcatgcagtattcagtacagttrctagcatgtgactgtactgaatagagtctaaaccactgagccttacactgagtcttacactgagtgtgtaatgggaggtaccatctaggtttgtgtaagt

SEQ ID NO: 8044 - DNA, 201 bp, Homo sapiens
tccaggtgtcgtctgtcacccctttctttgactaggaaagggaattccctgaccccttgcgcttcccgggtgaggcgatgcctcgccctgcttcagctcaygctgggtgtgctgcacccactatcccgcacccactttccaacactccctagagagatgagcccggtacctcagttggaaatgcagaaatcatttgtcttc

SEQ ID NO: 8045 - DNA, 201 bp, Homo sapiens
ctggtgttattataattctgtgagttgttaatattaggggaaggtgagtgaaaaatatatgtgaatcctctgcattgtttttgcaacttttctgtaagtckaaaatcatttcaaaatgaaaagttaaaagaaaaaagtttaaaatgatctgtctctgcatattcaaggattctcaatcattttcatctttttggagatcaa

SEQ ID NO: 8046 - DNA, 201 bp, Homo sapiens
tagtcgtttgggaagcactgtcagccactgagcaatgagccagaaccagaagctgtgccacacacaggtgcaagaatgagtggggtaccactgtggcaaaytgggtacaatcccactgaggcactgtaagagaacatgaaacacggcaggactgactcacggaaaagggggtgagctgggatagtcctccaggaactccta

SEQ ID NO: 8047 - DNA, 201 bp, Homo sapiens
attctatgcagcaatggctacatacacacatctgtgaccaagagcgacagacgtggactgtttccaagcccattttttaaattatatttatatttgagcayagtggtgctcaaatataaatataataccaaaccatcactatggtttggtatttttgagacaggttctcactctgttgcccaggcgaagtgcagtggcacg

SEQ ID NO: 8048 - DNA, 201 bp, Homo sapiens
ggcaggggttgggtccagcctgtgctgcttctgagccgcaggaagtcgctgagaccagcgtaaggaggaaaccccaaaacctctaactggacaggagaacycctgaggaaccttccgagaggaggggccgcagctgaagccggcaggcagagacggagagaaatttgacgtcgtcataatcagcaccaatacatatataca

SEQ ID NO: 8049 - DNA, 201 bp, Homo sapiens
agcatgagaatggaatagagaagaaatacacctttttgacttgtcactaggattttactgtttttgctgcagtataatctaatctactttcactgatacarcttctttggtggtaatttttagtggagatgtaatttagacacacaaaaaaatgcaaaacattcatttcaatatgctttggtaattatattactcctgtgc

SEQ ID NO: 8050 - DNA, 201 bp, Homo sapiens
aatttatttctcacagctctggaggctggaagtttgagatcagagtgctgggcagtttggttcctggtgagggctcccttcctggcttgtagacaaacacsttcttgctgtatcctcacatggccttcttttgatgaacatgcatcccttgtgctatggtgtgagtgtttgtgtccctgccgacattcagtttcatgttga

SEQ ID NO: 8051 - DNA, 201 bp, Homo sapiens
cacacttagggatgaattagattgtgtaattagttctggacaacaatttgtgagctgctatgatttgaatatttgacccctgaaaacctcatgatgaaatytgatccccagtgttgaaggtaagagcctaatagaaggtgtttgggtcataagggtggacccctcataaatagattagtgtccaggggtggggctgagtaa

SEQ ID NO: 8052 - DNA, 201 bp, Homo sapiens
ccacagggctctgccctgtggtaagccttgctgtcctaggaagcaggctctgtccctctgggctgctcaccaagccacatgcacaaaaccctgccagtccycccagcagcctgccacgctgctgagcccagatggtatcttttagtggaaatttcctgaagacacaggaagaagccaagggaaatgtaacagagaacttag

SEQ ID NO: 8053 - DNA, 201 bp, Homo sapiens
tgcccagacatcccaggccctcccgagtccatgcccttccctaagagtctccacttcccaggatggtgacaataaaggcccattcccctcaggagaagccycctctgctcaagatgtggccttggagatgtgctccgaccatgcccagagccacacagacccaagtgcagccaggaccacccacactggcctgcccctgcc

SEQ ID NO: 8054 - DNA, 201 bp, Homo sapiens
ggctgctgggttactcgcccaagatcatatcctgggggagccacggcaagaagccaagactcacggactacttctaagctttttccaaaggatatagtagyctttctaataggaaaatcaatgtttttaattataaagccacttttacaaaatcttggggaaactgcttcctcagacctgtgatctagggagaaaaatatg

SEQ ID NO: 8055 - DNA, 201 bp, Homo sapiens
gcagtattgagaggtggggcctttaagaggtgactgggtgatgaaggttctgccctcttgaataggttagtccattcctggattaatggattgatgaaggrgttgatggattaatgtgttatgcagtaggactgttggcttataaaaagggaaaagagacttgagatggcacgctcagccccctgccatatgatgccctga

SEQ ID NO: 8056 - DNA, 201 bp, Homo sapiens
ggcgacagagtccaaccccaggcagcaggcgccatgtaccccagggacttttaatgtgtgtgcagctgttgagcaagaataccttgaacttccaaatgatktgctggcatgctggtagggaattcctttgcagcttgtgttccaagttggaagtgagtcctccaaataaaaatttaaatgattctcctggtcatcacagca

SEQ ID NO: 8057 - DNA, 201 bp, Homo sapiens
ctccagcctgggcaacagagcaaaatcttgactcagaattttaaaaaaattaaaaaataatttagagcacatacaagaggattcctaggatctgaaagagyacttcaatctggtcaaactctcttcctttctgttcaattttataagcattctgaccagctctttagtgattaggaactagacaactgtctaatgtaagag

SEQ ID NO: 8058 - DNA, 201 bp, Homo sapiens
tatggggtgtcctgtagtccctgtttctcctcttttgctttttcaactgctgtttcagggagagattcattatttctactatggcttgtccttgagaattwtatgggatgccagtaatgtgcttaatattccacatagagaaaaatgtagctagagcttggctagtatagcctgaggcattatctgttttaatagaagctg

SEQ ID NO: 8059 - DNA, 201 bp, Homo sapiens
aaaccagtgcctttctgcaccaacagggcactcaaagatgagcttccactcaggaacccccgtactgctccgtgtgctcagcttctgctgggatgttcccyacccactcacctgcatgtgtgcctgatggagcctctcgcacctcagtccagggctctgccccttgctccaactgagtaattagttttggtttggaagaga

SEQ ID NO: 8060 - DNA, 201 bp, Homo sapiens
cgatagcatctggcctttaggcaggctcaaaaaatttaaagtcaataatgctagattcaactgcatatggggtgtcctgtagtccctgtttctcctctttkgctttttcaactgctgtttcagggagagattcattatttctactatggcttgtccttgagaattttatgggatgccagtaatgtgcttaatattccacat

SEQ ID NO: 8061 - DNA, 201 bp, Homo sapiens
aagccggcaggcagagacggagagaaatttgacgtcgtcataatcagcaccaatacatatatacataaatacttggaaaaccacccaatgttaaatttcarattagaaacgtcctaaatgtccaacagcaggggaatggctaagtaaagtataatacctagctagaacagatggtaccagccagtctaaaaggagggttca

SEQ ID NO: 8062 - DNA, 201 bp, Homo sapiens
ccctaaccctgtcatgctgtggttgttttttgttcatctttccacatgtttctgaagaggaataagtcatagaatatttactgattatatataagccacagaatatgtacacaatgtgagcataataaaattaaccattcaaatgtgcaataaatgattcagttccaatcatcccagctacatagtcatgtagaaaataat

SEQ ID NO: 8063 - DNA, 201 bp, Homo sapiens
gttccaacaagcactctgcacccctcccaagagagtatggctagaggaagagtctgccaatccagtgaagccaaccagctccatggcaagaaccgggatgsgtcgtcggcttcatcccagataggagaagacagaacacaggagaaattcaagagaaaatgtggatgagaataagtgctgaatagtgcatcacggagtggg

SEQ ID NO: 8064 - DNA, 201 bp, Homo sapiens
gggctaagtgcaaattaaggctccagcatctggtgactcattcttgctgagtcatcccatggtggaaggtaagagggcaggagaggatgagagagggtagrggaaggcagaaaaggcagggcaaacaccctttagtaaggaacccacgcctgtgataacgaacccactcccaagataatagcgtcaatccattcatgaggg

SEQ ID NO: 8065 - DNA, 201 bp, Homo sapiens
atataaaaaaaagaaagaaagaaaatggaacagaagtagaaagaaacaaaagatacctggtgaatgcctggaaagagagagagaaaaatcacataaagagyttgaggatttcagaaggctgggagatggcacagatgggcctgaggccctcaggaaggcagcagccctcccaagtgcagaaagactggggagaaaagcggc

SEQ ID NO: 8066 - DNA, 201 bp, Homo sapiens; identical to SEQ ID NO: 7473

SEQ ID NO: 8067 - DNA, 201 bp, Homo sapiens
tttgttgactcacatctcactgactctccatgcagtccacacagatttctgccttcattagctccccaggagcatattccctcgagtcatcaatgctctcyatgtaactggtttcagtggatggttgtcagactccttctgattttctcatacttctcctggtttccctaactccacattctcttagttgtcctcctctat

SEQ ID NO: 8068 - DNA, 201 bp, Homo sapiens
ataaagtataagaatgtttacagcacttgcaatagccaaaagctggaaaatgccatatatgcatctgaatgtaagagagaaactgcagtagagtcacacartgagtcactctagaacagtgattttccaagcatgggctccagccccacagcaccagcatcagcatgcctgagaacctgctgaataaagaactctgcaggg

SEQ ID NO: 8069 - DNA, 201 bp, Homo sapiens
ataataaaatattttcacctctcagatttgcaaggatcaaagcatataagacactgctgacaagctataaaagtggcactcatatgttgtcattaggagtrtaaacatgtattatctttatgaatagcggaaatacccaccaaatttggtggatttaaaaattttaacctttaacaattcttataggaatttattctatag

SEQ ID NO: 8070 - DNA, 201 bp, Homo sapiens
aaacccagtacttgaagttttaacactttcacatttccagggactgttcatcatcacagatttcttctcccattttttgcttgcaccctctctctctctcygaaattttaacatttaaacaagttcaaatctctcctatcgtcaaagcaaaaagcaaacaaaaaaatgcctcaactgcaatgttccttctagccaccatcc

SEQ ID NO: 8071 - DNA, 201 bp, Homo sapiens
tccacactcgcctttcctgtagtccaccagacagctcctcccaaatgccgaatcttaaattgaaaacacaaagggcaaactcctgattcccccccccccccataaaaaaatagtccgcaggctgggtgcggggggggctcacgcctgtaatcccagcacattgggaggccgaggcaggcagatcacaaggtcaagagatag

SEQ ID NO: 8072 - DNA, 201 bp, Homo sapiens
cacactgcgactgctgtcacctcctgggcatcccctgaccactgtgagcagcctccgctctctccatcctccctatcagcaccttgtgctattttttttttgtaactttactgttgtctgaaatcatctcactgatttctttgttttcagccaggcgcggtggctcatgcctgtaatcccagcaatttgggaggccgaggc

SEQ ID NO: 8073 - DNA, 201 bp, Homo sapiens
tccttatacttaccgggctagtcccacatcctagtacttaccaggctagacccacatcctagtacttaccgggctagtcacatatccttatacttaccagkctagtcccacatccttatacttaccgggctagtcccacatcctagtacttaccaggctagacccacatcctagtacttaccgggctagtcccacatccta

SEQ ID NO: 8074 - DNA, 201 bp, Homo sapiens
acctttggtctttgatgatggtgacgtacagatggggttttggtgtggtgtcctttctgtttgttagttttccttctaacagtcaggaccctcagctgcakgtctgttggagtttgttggaggtccactccagaccctgtttgcctgggtatcagcagcggaggctgcagaacagcggatactggtgagcagcaaatgttg

SEQ ID NO: 8075 - DNA, 201 bp, Homo sapiens
cacatccagctaatttttttttgtatttttagtagagacgaggtttcaccatgttgaccaggctgatcttgaactcctgacctcaggtgatccacctgccycagcctcccaaagtgctgggattacagacttttttcaaaactaaagatatagtgatcaagatagtatggtactggatctaggctacacatacaggtaaac

SEQ ID NO: 8076 - DNA, 201 bp, Homo sapiens
acctgcagaggctccatctgcacacagttttgatgaagctggaaattctccctctctccttgcacctctttctcagactttcttcagggatttttatggtyttctaaattatttttgcataaacactattttaacagcaaagaataaaaatttttaagtgcaaacattcacacttcatctcactgctctcaaattatcttt

SEQ ID NO: 8077 - DNA, 201 bp, Homo sapiens
tttgggaggatcaacaagtgttacattcagaatagccagcttcaagagcaaaggcaaacccaaataagccatttctgaaaatattatcccaagtgtattaygtgtgtgtgtcaaaattatgcaatggtttcatgcaaattgttgagtagtgaatgagaacattgccgtttaaaacaaacaaacaaaaagccctagatgagt

SEQ ID NO: 8078 - DNA, 201 bp, Homo sapiens
aatggtttcatgcaaattgttgagtagtgaatgagaacattgccgtttaaaacaaacaaacaaaaagccctagatgagtccaaaaccacttactggaaggratgaagaattaaagaaaatcactaaactgcaataagagaggatatattactaacaagtctgatgaaccaagtgaactagatgcaacccctctctctttct

SEQ ID NO: 8079 - DNA, 201 bp, Homo sapiens
ggaaaccgaaaatcattaaagacttacgcttccataaagggcagaccaagttttgtgtgtttgttgccaattgtagatatattttaaatgagactgatackgttttaggataacaaccataggatcaaaactgggctgatttcctggctgacccttagtaagagatggaagcaaatggaatgtggctcactcatccaaaga

SEQ ID NO: 8080 - DNA, 201 bp, Homo sapiens; identical to SEQ ID NO: 992

SEQ ID NO: 8081 - DNA, 201 bp, Homo sapiens
cacaaactatttgaacgtgtcttaaacaacagaaatttatttctcacagctctggaggctggaagtttgagatcagagtgctgggcagtttggttcctggkgagggctcccttcctggcttgtagacaaacacgttcttgctgtatcctcacatggccttcttttgatgaacatgcatcccttgtgctatggtgtgagtgt

SEQ ID NO: 8082 - DNA, 201 bp, Homo sapiens; identical to SEQ ID NO: 993

SEQ ID NO: 8083 - DNA, 201 bp, Homo sapiens
tttagtagagacagggtttcaccatgttggccaggctggtctcaaactcctgacctcaagtgctgggcttacaggtgtgagcctcacgcccagcctcaagwgtactgattttcttaagcactccctaaggtatatctcgaacccaccacttcaagatcacagctgtgggtaacagggagccaataaagaggtgaagtaagc

SEQ ID NO: 8084 - DNA, 201 bp, Homo sapiens
ccaggctggtcttgaactcctgacctcagacaatccacccacatcagcctcccaaagttctgggattacagtgagccacagtgccctgctgcctctttttktttgtttgtttgtttgtttttttagtatttattgatcattcttgggtgtttctcagagagggggatgtggcagggtcataggataatagtggagagaagg

SEQ ID NO: 8085 - DNA, 201 bp, Homo sapiens
tgaacccaggaggcagaggttgcagtgagccgagatcacaccattgtactccagcctgggcaacaagagcaaaactctgtttcaaaaaaaaaaaaaaaaaacagtatattttacccaatttctgtgacttacaagtagctcaaaagaaataaagttttcttgattccgcaaaacaaaacatgaaaagaatcagcaatgttt

SEQ ID NO: 8086 - DNA, 201 bp, Homo sapiens
ttgaacccaggaggcagaggttgcagtgagccgagatcacaccattgtactccagcctgggcaacaagagcaaaactctgtttcaaaaaaaaaaaaaaaaaacagtatattttacccaatttctgtgacttacaagtagctcaaaagaaataaagttttcttgattccgcaaaacaaaacatgaaaagaatcagcaatgtt

SEQ ID NO: 8087 - DNA, 201 bp, Homo sapiens
cacagcctgttggccgcaaagttcaggaaaagtggaacgcatgaactggacactcaagcagctactgaagaaatattgccaaaaaactcatctgagatagkatcaggtctagcctatggtcctcctctgagtcagatgcacccccaccaaacaactaagaattcaccatatgagattttgttcagtcggcctcccccagtc

SEQ ID NO: 8088 - DNA, 201 bp, Homo sapiens
gtggctcatgcctgtaatcccagcactttgggaagccaaggagggcagatcacttgaggtcaggagttcgagaccagcctggccaacatggtgaaaccccmctgataaaaatacaaaaattagctgggcatggcggcagtcacctgtaatgccagctacttgggaggctgaggcaggagaatcacttgaacccaggaggca

SEQ ID NO: 8089 - DNA, 201 bp, Homo sapiens
caaggcaggaggattgcttgagtcaaagagtttgagaccagcctgggcaactggacaacagaccctatctctacaaaaaaaaaaaaaaaaaaaaaaaaaawtcctgggcatggtggcacatgcctgtagtcccagctatttgggaggatcatttgagcccaggaagttgagaatgcagtgagccatgatcacaccactgca

SEQ ID NO: 8090 - DNA, 201 bp, Homo sapiens
gatgacatagcgagactccgtctcaaaaaaaaaaaaaaaagaagagagagagacctaagatgatgtttcctcctccagaggaatttttcttgctgctaacrggggacacactccttgatatctttaaaggaatttcgtgttaggtgcagtgcctcatgcctataatcccaacactttgggaggccaaggcaggaggattgc

SEQ ID NO: 8091 - DNA, 201 bp, Homo sapiens
agctgggtttgaattaaccccctcacaatgccacagggtgccatagggtggcttttccctatgaccctacagaggaggatttttcttgcaatggaggctcrggcagcaaagtactgcagtggaaacctgcaaggcccatggcccagtggtgggtggactgaaactatccttagcaacagtcccgccttttccatgacacag

SEQ ID NO: 8092 - DNA, 201 bp, Homo sapiens
taaataaaaataaaaataaattagccaagcatagtagtgggctcctgtaatcccagctactctggaggctgaggcagagaattgcttgaacctgggaggcrgaggttgcagtgagccgagatcacaccactgctctccagcctggatgacatagcgagactccgtctcaaaaaaaaaaaaaaaagaagagagagagaccta

SEQ ID NO: 8093 - DNA, 201 bp, Homo sapiens
cagtgatgcaatcttagctcactacaacctccgcctcccgggttcaaacgattctcctgcctcagcctcccgagtagctgggattacaggcatgcaccacyacacctggctagtttttttgtttgtttgtttttgtttttgttttttgtatttttgtatttttagtagagacgggattttgccatgttggccaggctggtc

SEQ ID NO: 8094 - DNA, 201 bp, Homo sapiens
ataaataaaaataaaaataaattagccaagcatagtagtgggctcctgtaatcccagctactctggaggctgaggcagagaattgcttgaacctgggaggyagaggttgcagtgagccgagatcacaccactgctctccagcctggatgacatagcgagactccgtctcaaaaaaaaaaaaaaaagaagagagagagacct

SEQ ID NO: 8095 - DNA, 201 bp, Homo sapiens
taattttatttatttatttattttgaggtgtagtttcactcttgtcacccaggctgaagtgcagtgatgcaatcttagctcactacaacctccgcctcccrggttcaaacgattctcctgcctcagcctcccgagtagctgggattacaggcatgcaccaccacacctggctagtttttttgtttgtttgtttttgttttt

SEQ ID NO: 8096 - DNA, 201 bp, Homo sapiens
ttttttttattatactttaagttctagggtacatgtgcacaatgtgcaggtttgttacatatgtatacatgtgccatgttggtgtgctgcacccattaackcatcatttacattaggtatacctcctgatgctatccccccccaccccacgacaggccccagtgtgtgatgttccccttcctgtgtccaagtgttctcatt

SEQ ID NO: 8097 - DNA, 201 bp, Homo sapiens
taggatgaatggtagaggcatgaaggggaatcatcgaaagcattgaatagtaggtaaaattgccagaaaaaaaatcaggtgatagtgtttgaggggcgacrgcaaaggaaaaattaagtttggaggaggcaaatgtaggtttttatctcctgctgtaaaatactcactaatacatatgtttccaatgcatcactaattctt

SEQ ID NO: 8098 - DNA, 201 bp, Homo sapiens
ctggtcttggttttcctggttcttctccatcaggtcaactttccagaattctagaaatgagaatagtttaccatatcttataaatattaacacatttcatrtggaaaggggatgtaacatgcaaatgctctaggatagcccaggcatctggtctgaaagtaatcctgaaggcatacatctcactcccttaggattagacaa

SEQ ID NO: 8099 - DNA, 201 bp, Homo sapiens
ttgatggtgtattttttgttcagtcacttagaataaaaattcaagtgtgaagaaagaaaaatactttaaggcttagaaatgtaaccttttgctttattttrgaaatttttatttatatgattatgcatttcctagatactagttctttctgttcaaggccatttactccaacacccaagtggatttcttgattgcagattt

SEQ ID NO: 8100 - DNA, 201 bp, Homo sapiens; identical to SEQ ID NO: 996

SEQ ID NO: 8101 - DNA, 201 bp, Homo sapiens; identical to SEQ ID NO: 991

SEQ ID NO: 8102 - DNA, 201 bp, Homo sapiens
gtacaggtgcagcagacaccatggtccacaccgccagtccccacacagtgcggtgatcactacgaggcacacctactgcaggcccgctgtcttcatgcagyaaataagaccacagcagcctatagagctgttgagaacatgaagtggagtaacaaagaccgagcactttacacccggcctgtcattcggccagtgttcatc

SEQ ID NO: 8103 - DNA, 201 bp, Homo sapiens
acaggtgcagcagacaccatggtccacaccgccagtccccacacagtgcggtgatcactacgaggcacacctactgcaggcccgctgtcttcatgcagcarataagaccacagcagcctatagagctgttgagaacatgaagtggagtaacaaagaccgagcactttacacccggcctgtcattcggccagtgttcatcat

SEQ ID NO: 8104 - DNA, 201 bp, Homo sapiens
ggctcagaatcttcctgaattcctccctcaggccatgagcacagcccacatcagcccacagccccctgccctgggccccggcacgtgccagcccttacagsctgccccacacgcagcctcagagggtcacttttccactcgtacccttcaacggtgtcctgtggccctaaggacaaaatccatgtgcccaccatggtggcc

SEQ ID NO: 8105 - DNA, 201 bp, Homo sapiens
tcttcctgaattcctccctcaggccatgagcacagcccacatcagcccacagccccctgccctgggccccggcacgtgccagcccttacagcctgccccayacgcagcctcagagggtcacttttccactcgtacccttcaacggtgtcctgtggccctaaggacaaaatccatgtgcccaccatggtggccagggctctc

SEQ ID NO: 8106 - DNA, 201 bp, Homo sapiens
tcacactgcgactgctgtcacctcctgggcatcccctgaccactgtgagcagcctccgctctctccatcctccctatcagcaccttgtgctattttttttwtgtaactttactgttgtctgaaatcatctcactgatttctttgttttcagccaggcgcggtggctcatgcctgtaatcccagcaatttgggaggccgagg

SEQ ID NO: 8107 - DNA, 201 bp, Homo sapiens
cccccatctctactaaaaatacgaaaattagccaggcatagtagcacatgcttgtaatcccagctacttgggagactgaggcaggagactcatttgaaccsgggaggcagaggttgcagggagccgagatcacaccactgcactctagcctaaacgacagagtgagactctgtctaaaaataaaaaataaaaaatcattgt

SEQ ID NO: 8108 - DNA, 201 bp, Homo sapiens
aagctacagtttttgttcattatgtatcttcagtcttcatgctgctttctggctctttcacccaaactgacaacaaggtagacttttgtgaactgaccttyccattcctgagttcctgtggttgattattctctcagttataacaccataaagcttagcataattccagagcccttgcacgtaagaagggatttgctgtct

SEQ ID NO: 8109 - DNA, 201 bp, Homo sapiens
tacaacttattccccaaagtgggtcttacatgtagataatattttattttccctctgttttcctgtagaaaaattgttctaaattcattatagaaagttayatgccatttaactacctgaaaggtgatgttaatgtgacaattttgtaaatatttctaaaatgcccagaattatactgtatgaatacatcattatttctgg

SEQ ID NO: 8110 - DNA, 201 bp, Homo sapiens
ttatggccactgtggagcgctgggctctgctgttgcaggtgggcacctttgaagcttttcctcctgtctggggtgcttttcacttgggcttgtgcctcagyctctgcattatctgagctcctctaataatcttatatccccattgctcactgagaatttgaaatatggatctttaaattcttttttatttcttcctaaaaa

SEQ ID NO: 8111 - DNA, 201 bp, Homo sapiens
cacttagggtcaatgtatgcccttgtgaatacaggaaggggcttattttgttccaccaaataggctacacggaagaaaaagccatgccagtcctccctccrcccggccagcagcattgtaccttcggggaccacatggttcaggactcagtgggacatgtcctcccccttacctccccaacattgcaaaccagcagggagg

SEQ ID NO: 8112 - DNA, 201 bp, Homo sapiens
tgaatacaggaaggggcttattttgttccaccaaataggctacacggaagaaaaagccatgccagtcctccctccgcccggccagcagcattgtaccttcrgggaccacatggttcaggactcagtgggacatgtcctcccccttacctccccaacattgcaaaccagcagggaggaggagaggcaaggcccaggctcagg

SEQ ID NO: 8113 - DNA, 201 bp, Homo sapiens
aaagcagagaaatgaggtagtggctggagagaaatagggtgcaaggtaaggggttttatttattttatggacaatattacagtgtattcattagtatgctrataattcagtacagaatgaaaatcttgaaatacagaagagagagaaggacctcattcatgagaaagcatttaacatccagggtgcaaaagaattttctca

SEQ ID NO: 8114 - DNA, 201 bp, Homo sapiens
gactgcgagggaagaattgggagacagcgctgctacctctcctccgctactctctggctcccctgaacagatttagaaagagaaggtttatggggaaatcrggtggaggaaagaggtcagggaaacagtacagggagcagttctctggtcaacgccaagagtcgttcccttgccaggcatggcagggcttggtcgtggcct

SEQ ID NO: 8115 - DNA, 201 bp, Homo sapiens
aagaggtcagggaaacagtacagggagcagttctctggtcaacgccaagagtcgttcccttgccaggcatggcagggcttggtcgtggcctgggttttgarccatgacagaggaagttactggcctttgaactaggctgatggatttgctccatcttgggctaggagacaatgattgaggtcagctatcaaagcctttcta

SEQ ID NO: 8116 - DNA, 201 bp, Homo sapiens
cagggaacttctacctcagtaaaatttctaggggtccagtggtgtggggcctgttgagatattccttctaaggtgaagaataagttgctgcatttgaccaytccttcaaccaagaaagaggcacaatgcctagtaggcctatttggattttggaggcaaagcattcctcatctgggtgtgttactccagcccatttatcaa

SEQ ID NO: 8117 - DNA, 201 bp, Homo sapiens
gaagttactggcctttgaactaggctgatggatttgctccatcttgggctaggagacaatgattgaggtcagctatcaaagcctttctatgaaacctccaraaagtaaccacagctcagacctaagactgctcagtggcctgagagccaacaacatgggcctgtgaggggagagatgaccacaggccccaagccgttgtcc

SEQ ID NO: 8118 - DNA, 201 bp, Homo sapiens
tgtgcacagagttaaccagtgctactgttctggtggttggggccggttgagcgactgtgttatcagtggagccgctctctttattgtacagaaacagatgstttctgcctatggaggaagaaaggggaccatggctgagtggcgtggagaagcgcagcctcagctcgctggccaggccctgactgtcaggtcaacaccaac

SEQ ID NO: 8119 - DNA, 201 bp, Homo sapiens
taaagggcagaccaagttttgtgtgtttgttgccaattgtagatatattttaaatgagactgatactgttttaggataacaaccataggatcaaaactggkctgatttcctggctgacccttagtaagagatggaagcaaatggaatgtggctcactcatccaaagacagcaaatagagaaagaagacagaaagctgggcc

SEQ ID NO: 8120 - DNA, 201 bp, Homo sapiens; identical to SEQ ID NO: 7476

SEQ ID NO: 8121 - DNA, 201 bp, Homo sapiens
ctgggctgatttcctggctgacccttagtaagagatggaagcaaatggaatgtggctcactcatccaaagacagcaaatagagaaagaagacagaaagctrggcctactctgcaggtgtccatggtaggcaccactaatggggcaggggctccctcacctcccatgctccccccaacatgggtcctcgcaaccttcctctt

SEQ ID NO: 8122 - DNA, 201 bp, Homo sapiens; identical to SEQ ID NO: 7477

SEQ ID NO: 8123 - DNA, 201 bp, Homo sapiens
taaagaccaataaactcaatagataatgaaaatgaaaacacttattatccacaatagcatattagttaaattatgatagattatatgtggtgaaatgatartatatctctgaacatagtgttccagaaagaccagcaatgaacaatatataatatgttcttggcatagtacatgataaaagtaaacatagtacaattccaa

SEQ ID NO: 8124 - DNA, 201 bp, Homo sapiens; identical to SEQ ID NO: 7478

SEQ ID NO: 8125 - DNA, 201 bp, Homo sapiens
gtacactgttgatgggaatgtaaattagtacaaccactatggagaacagtatggaggctcctcagaaaactaaaaatagaattaccatatgatccagcaawtccactactgggtatatatcccaaagaaaaggaatcaatatactaaagagctatctgcattcccatgtttactgcaacaatattcacaatatccaaaata

SEQ ID NO: 8126 - DNA, 201 bp, Homo sapiens
agaaaagcaagaacacacttaatccaaaattagaagggaagaaacaataagtatcagagcagaaataaatgaagttgaggtaaaatatatatatatatatwcagaatatcaacaaaacaattagttttttgaaaagataaaatcgacaaacctttagcaagtctaaggaaaaaagagagaagacccaaatacataaaacca

SEQ ID NO: 8127 - DNA, 201 bp, Homo sapiens
atgtttgtggaggaactaacatgggagaccagtggccttaggaagcaaaagagtcaatgccacaagataattttactctgactgacttttcccccaaaccratgcccacaagttcaagcgtctggctcttaaaaacttctattaggccaggcgtggtggctcactttgggaggccaaggcgggcagatcatgtgagatcag

SEQ ID NO: 8128 - DNA, 201 bp, Homo sapiens
cactgggccagccctcccatgcagccattcaactcgggtgcagtcatcactgtccttgtggaggaagccctgcctgcttccctaagtgtgtgttattgccrggcacctgcaggcaattatatctgagacctgaaacagagttttttctgtggtgtgcattaactacatgatggtatcattgtgtcatagacaacttaaagc

SEQ ID NO: 8129 - DNA, 201 bp, Homo sapiens
acttgttacatttaaaaggcttctctccactatgtattctttcatgacgagtaagagctgcattctgagcgaaggctttcccacagtcattacatttgtarggtttctggccagtatgaattctctgatgacttaaaaggattgagttctttctgaaagtttttccacattcaatgcatttgtggggtttctccctagaat

SEQ ID NO: 8130 - DNA, 201 bp, Homo sapiens
tgtggaggaagccctgcctgcttccctaagtgtgtgttattgccgggcacctgcaggcaattatatctgagacctgaaacagagttttttctgtggtgtgyattaactacatgatggtatcattgtgtcatagacaacttaaagcatctaatgttaagggcacaataaaataatattgatgagaaaatttaaaacaaaaac

SEQ ID NO: 8131 - DNA, 201 bp, Homo sapiens
ggggggcaacggacttgcatctatcagcccttttcaaccactgatctcttaaactggaaacaccatactccctcctatatggagaatccccaagctcttayagatctgatgcagtccatccttctgacacacaatctaacctggccaaactgcaggcagcttcttctcacactgtttaacactgaggaacacaggagagta

SEQ ID NO: 8132 - DNA, 201 bp, Homo sapiens
gttttttctgtggtgtgcattaactacatgatggtatcattgtgtcatagacaacttaaagcatctaatgttaagggcacaataaaataatattgatgagmaaatttaaaacaaaaacactcacatcccatttttccaaaggattccttctggatcatcatcctctctggttcctggttgctctcccctcctcatcccctg

SEQ ID NO: 8133 - DNA, 201 bp, Homo sapiens
caatccactcacaattctactatggagcccaataggcatgagacagaaatttaaaaataataataacaataagtactgcatttattcactccaagaaaagygaataaatgcagtaattaaaggtgaagtgagaaacacaagtttttctctgctgcaggcaagggtatagacaggtcgtggtgacctagcctgcagaaatga

SEQ ID NO: 8134 - DNA, 201 bp, Homo sapiens
tcacatcccatttttccaaaggattccttctggatcatcatcctctctggttcctggttgctctcccctcctcatcccctggctcagactccctgtgccayctctaaggtttggctgctttgtttgcacagggccccaggaactgtggacagaggcaaaatctctggagggctgaagcatttgtgccacgagcaggtcatc

SEQ ID NO: 8135 - DNA, 201 bp, Homo sapiens
agctctctttgtcttcatccttggcttctgaaccttgcctggcttagagacatttctcactcatcagaaattaaagagccatgtcatggttaccaagctamagtttttgttcattatgtatcttcagtcttcatgctgctttctggctctttcacccaaactgacaacaaggtagacttttgtgaactgaccttcccattc

SEQ ID NO: 8136 - DNA, 201 bp, Homo sapiens
tccaggtggagtctttcctgcctcagattttagagtccattttgggactcaccgcctctagtgggttttgctttaatttgggccactgtggaccatttctwtttctaagaacactcccttgttctcccactgctgctttttcataattgcctacacttgtgtttaatcaaagttctggccccttaatgccctctgagatgc

SEQ ID NO: 8137 - DNA, 201 bp, Homo sapiens
tgccaggcactgttctaggtgcttaggtttcaccagtgaacagcacaaatgtccctacattgttgccagagaatgcaataaattataaagagaataaatarctatacacagaatgttagaacatgatgagtagaatggaaaaacgaaaaagtagaggagacagtgattttaaacagggtagtcggggtacaatgccccctt

SEQ ID NO: 8138 - DNA, 201 bp, Homo sapiens
ttatttgagttgaaggaaaggcctccccactgagagatgagtgagccttataccttacacctttccttcagggtgttcagctaagaggctgaccagcagamcaaggccctctcagaagggaagtaggtgatcaaccacatggggtcctcggggtgcacccgcctcggctaacagggggccaagctgagccccgggaaaagc

SEQ ID NO: 8139 - DNA, 201 bp, Homo sapiens
ggggtgcacccgcctcggctaacagggggccaagctgagccccgggaaaagctgtggcctgctgttctgtgtgtgctctgaaagagttccggaaatctttycctttattctcccataactgcttcctgacccacctgttcctccagcctctggactttagatttattcagtcagatctgtaattataacaagaagagctaa

SEQ ID NO: 8140 - DNA, 201 bp, Homo sapiens
ctgagattttccagggtttgtttcaaaagcgagcattaattaccctaatacacgtctaccatctgccggtagctgactcccaaaggtacatctctacctasatctcatctctgagctctgaatctgaatatatgtgtctcctcaatatctcccatcataagtccaagggcctttcttccagaatatgcaaacctgacctca

SEQ ID NO: 8141 - DNA, 201 bp, Homo sapiens
tgttcaagcccaagttcaaaactacagtgagctatgatcacatggcactccagcctgggtgacagagtaagagctagtttcttttaaaaaaaaaaaaaaaagagagagagagagagataactgctgttaagattggtctttatttgtccaggtctttttgaatgcatataatatagatttcctgaaacttgcttctttaac

SEQ ID NO: 8142 - DNA, 201 bp, Homo sapiens
ttgtacctgttggtgctcagacaaattttggattttggagcacttcagatttcagattttccagttatggatgctcaacctatactacatcctcatcaaarataactgctgttagctgagtgtggtggtacgtgcctgtagccccagctactccagagactgaagtgggaaggttgttcaagcccaagttcaaaactacag

SEQ ID NO: 8143 - DNA, 201 bp, Homo sapiens
taggggaaacaaggaaggaaagaggaggaagggcgagaaggcgagcccacccagctcagaagcgcctaccggcaagcccacgccagcctcctggcctcgcsctgcccaccaccctccttcttccctagaaagtgagtccttgacagaaaaaactgccaccgttctatgcctggaaggcgctagcaaatatgccacgggccg

SEQ ID NO: 8144 - DNA, 201 bp, Homo sapiens
gctctgtcgcccaggccggactgcggactgcagtggtgcaatctcggctcactgcaagctccgcttcccaggttcacgccattctcctgcctcagcctccygagtagctgggactacaggcgcccgccaccgcgcccggctaattttttgtatttttagtagagacggggtttcaccttgttagccaggatggtctcgatc

SEQ ID NO: 8145 - DNA, 201 bp, Homo sapiens
tgagtcaagtgttgattaatacagataaggtcaagtctagaaggccaactctattaaactcaaatcttattatcacatcttacatggacattaaaacctcycagataatggcagctatgtgcactgagggtgacatcgtggtttttcaggcactggagaaattactttgacagggaaacttacgtgctgaaggcaaaacag

SEQ ID NO: 8146 - DNA, 201 bp, Homo sapiens
cctttctatgaaacctccagaaagtaaccacagctcagacctaagactgctcagtggcctgagagccaacaacatgggcctgtgaggggagagatgaccasaggccccaagccgttgtccctccctatctgtcccaggctcagacactgccagcttctgcacgtgattcttggttcagccccttaggttcccatgctgtgg

SEQ ID NO: 8147 - DNA, 201 bp, Homo sapiens
tcttattatcacatcttacatggacattaaaacctctcagataatggcagctatgtgcactgagggtgacatcgtggtttttcaggcactggagaaattaytttgacagggaaacttacgtgctgaaggcaaaacagcagataagcgagctgggccatttcctgagagtcatgagacaggatacaatgtggctgtcatgct

SEQ ID NO: 8148 - DNA, 201 bp, Homo sapiens
aacccagatgacatgtgtctgtgcatgcacatggccctttggctacacagggcaaagtgaaggctggtggggcccctggaaataagcaaataaagagcagyccccactgtcttcaggggcttggtgtcctgcagtgggaggtcagtgcccctgcagagcctgccctgtcttgccaccagtgcctcccagaagcctggcccc

SEQ ID NO: 8149 - DNA, 201 bp, Homo sapiens
tgggctattctcccccagtgaccgctccctctacagcaacagggattctgcagaggtaattgaggtctcttgtcagttgactttcagttaaccaaaaaggrgattctcgcagttgtgagcctgacgtgatcaggtgagcccttacaagggcccttctggagggagagactggaagtgagaaagggccgtgccagcagcccc

SEQ ID NO: 8150 - DNA, 201 bp, Homo sapiens
aaataaagagcagcccccactgtcttcaggggcttggtgtcctgcagtgggaggtcagtgcccctgcagagcctgccctgtcttgccaccagtgcctcccmgaagcctggccccatgcaggaagtgcttatcagtgagattgttgaagagcaaacagtcaatgtggtctctaccacaactggcatgattaatttaggggct

SEQ ID NO: 8151 - DNA, 201 bp, Homo sapiens
acccaggtcagggcttggcatggatggcggcggggggctcccaagcagacctgctgcgcaaggggctcctgccagcagagcaaaagcaagggcagcacggmcctgccgagggacagaagcgactgccggagcagaaaccgggaaaaaaagggccccttgtcccacaagaagtcagttgagagagaaaaagagcaggccctt

SEQ ID NO: 8152 - DNA, 201 bp, Homo sapiens
gccggagcagaaaccgggaaaaaaagggccccttgtcccacaagaagtcagttgagagagaaaaagagcaggcccttatcccaccagggtaagtgcccccrgcagaaaacaaaacaaaacaaaatgagaggatgcattctcccctggtgccttcacgttctcagctaaagacctgtggcgcccacagtaaggctgaggacg

SEQ ID NO: 8153 - DNA, 201 bp, Homo sapiens
aagcatgctttttaaatagccacataacatttcatggtataactgaagtccagaaattgaattcccaccttaatggccctcgtctcgtctggctgagatcrtcagaggtgtgagtctgccatgcacatcaggcctgcagcagagaagcctgacagtaagaaggccctttggccttggtgtccagctgggggtgaatttctc

SEQ ID NO: 8154 - DNA, 201 bp, Homo sapiens
tgactctgatactcctccaaagaagtatgttctatgttccctcccctttgagtttggacaggcttgactatggagaaagagacactgaattttttgttgtygttattgtttgtttgtttgagacaaggtctcactccagttgcccagactggagtgcagtggtgcaatcttggttcactgtaacctctgcctcccaggctc

SEQ ID NO: 8155 - DNA, 201 bp, Homo sapiens
tggtcaccaagacactcacggcacccgagtcctgctcacccccagcttccgtccgctttctgacgctgtgtcgcacgccctcaccccctaaccacccccckcaccctgatgccctccgtaccctctctcacatagtcctggcctcactgggagcttcaggccactaatctcacctccgtccccggctcctcctgtcctgcc

SEQ ID NO: 8156 - DNA, 201 bp, Homo sapiens
atctggggcagtcacagctgcctggaccatatctaaaaacactacgatcactgcttcctcaacaaaataatacacaggaaattcaatgagttgaatttagkgttcctaagttaatttacccaaatgaaaagcaaaggactccaggccaaagagtcaggctcacttattcattaataaatattgtacaaactaagaaatctt

SEQ ID NO: 8157 - DNA, 201 bp, Homo sapiens
tcctgctcacccccagcttccgtccgctttctgacgctgtgtcgcacgccctcaccccctaaccacccccctcaccctgatgccctccgtaccctctctcmcatagtcctggcctcactgggagcttcaggccactaatctcacctccgtccccggctcctcctgtcctgccccagctggaactccatggccctttcctta

SEQ ID NO: 8158 - DNA, 201 bp, Homo sapiens
gcaaagttgcctggctggaaatgctgggagcccatcagaaaccccaagcacatggatataggatggaagagcctggaagggaatccaatatatccttcctyactctttttaggatgttttagagcaaactaaaagggtaaccaccacagaaaactaccaacacagagattttcacacaaagctctctggggtgtgcatgtg

SEQ ID NO: 8159 - DNA, 201 bp, Homo sapiens
atatggagtgataatgatgactgtcaaaggctgttaacatcacaagagaaaaatcagacattatgtgcttcgttgttgaagtacacaactacctatgaaayattcttgtcaaaaaaattgtatcatccagatctatctaccaatctacatgaaatacagagaatagaggagcatgtcaaataacacaatggagagaaaatc

SEQ ID NO: 8160 - DNA, 201 bp, Homo sapiens
ctaccaatctacatgaaatacagagaatagaggagcatgtcaaataacacaatggagagaaaatcagtaaattcaggcagggaaaatctctacacaaaaayaaaccgtttccttcaacaaggaataatctgacatttgccagtttttacaaaagctctcttattttttgatagccactgttttggacaggaaagacctgac

SEQ ID NO: 8161 - DNA, 201 bp, Homo sapiens
ccttgatgatggacttcaagcctacagaattatgcaaaaataaatgtctgttgtttatgccaccaagtctgtggtattttgttatggcagcccaagcagaycaatacagcatctcaaacatgcccaatccttgcccactcccaatatatccatgggatcttcaaaaatccatactaatggagaaagagactgtcatctcag

SEQ ID NO: 8162 - DNA, 201 bp, Homo sapiens
aaaataaaaaatgaaactacaccaaactaacagcttctgtacagcaaaaaaaaaactaacaagatgaaaaggtagccaatggattgggagaaaatattttyaagccatatatctgataatgggttaatatccaaaatatacagggaactcatgcaactcaatagcaaactaaaaagtaaaaacaacccaatcaataaattg

SEQ ID NO: 8163 - DNA, 201 bp, Homo sapiens
tctgcaggctgtacaggaagcatggtgccagcatctgcttagcttctgctgagggcttcaggaagcttccaatgatgctggaaggcaaagggtgagccagygcatcacatggcaagagaggaagaagagagacctgaggaaggaggggccaaactctttaaaacaaccggcactcagctctccagagaactgaccaagaac

SEQ ID NO: 8164 - DNA, 201 bp, Homo sapiens
aatgcagtgagccatgatcacaccactgcactccagcctgggcaacagagcaagaccatatctcaaaaaaaaaataaaaataaaaggagatttcagggctkaagaatgttctgggctttccaaacatcttgaagtccactgcaatttgtgggaaggaaggctgatgttctttttgttcatgctacctgtacagaatcttcc

SEQ ID NO: 8165 - DNA, 201 bp, Homo sapiens
cacccgccaccgtgcctggctgatttttgtatttttagtagagacagggtttcgccatctttgccaggctggtctcgaactcctgacctcaggtaaaccamccacctcagcctctcaaagtgcagagattacaggcatgagccaccgcaccctaaggtcctagcaggtgttgctctatctctgatttcttttaaattatct

SEQ ID NO: 8166 - DNA, 201 bp, Homo sapiens
ctggcttatttgtctgcagcgatgttggggaagcagcccacggctgatctagaggctcaacaccgtcaccaagaccaggccccatgagtagtcctgccccrccgtcctcagagtgaggctcctgtgctgggatcacaggatggctgctgtgctcccagcatttccaggggccaagatgggaggaagaagatggacggcaga

SEQ ID NO: 8167 - DNA, 201 bp, Homo sapiens
ggcttttgtgctgctgcaccttggtagctagctctgatggcccaaatggcaaccactgcagctggcattgctacaggctctactgtggggcacacactggrggctttagtggaagaaataatgctgagcctccaaggcctggcctcacttaccaagaacctcagggaacccggccagcacagcagcagcagccttgcttct

SEQ ID NO: 8168 - DNA, 201 bp, Homo sapiens
ttccccatcatcctgaagcagctggattgacagaacagtggaatggccttttgaagtcacaaatataacaccaactaggtgacaatattttgcaaggctgrggcaaagttctccagaaggctgtgtatgctctgaatcagcatccaatatatggtactgtttctcccatagccaggattcatgggtccaggaatcaaggga

SEQ ID NO: 8169 - DNA, 201 bp, Homo sapiens
tatgtggtaataaaaatattttatttgcatcatttagattgggtttgtctgcaagtaacagagaacctaacagtgctggcttatttgtctgcagcgatgtkggggaagcagcccacggctgatctagaggctcaacaccgtcaccaagaccaggccccatgagtagtcctgccccgccgtcctcagagtgaggctcctgtg

SEQ ID NO: 8170 - DNA, 201 bp, Homo sapiens
tcagcccccagcagcagccccaccctctgcaactggcttttgtgctgctgcaccttggtagctagctctgatggcccaaatggcaaccactgcagctggcattgctacaggctctactgtggggcacacactgggggctttagtggaagaaataatgctgagcctccaaggcctggcctcacttaccaagaacctcaggga

SEQ ID NO: 8171 - DNA, 201 bp, Homo sapiens
tgggtccaggaatcaagggatggaagtgaaagtggcaccagttaccatcacccctagtgttccacaagcaaaatttttgcttcctgttcccgcaaaattaygttctgctggcctagaggtcttagttccatagggaggaacactgccaccaggagacccaacaacaattccattaaactggaagattgccacctgaacact

SEQ ID NO: 8172 - DNA, 201 bp, Homo sapiens
gcatgagcgacctgtgccttaggacatgctcctgctgcagttaactagggcaacctgttcctttaattcggcccatcccttcgtttcccataagggatacwtttagttaatttaacatctatagaaacaatgctaatgactggtttgctgctaataaatatgtgggtaaatctctgttcggggctctcagctctgaaggct

SEQ ID NO: 8173 - DNA, 201 bp, Homo sapiens
aagccatcctcacccacagacaccagattcccatagttctccagcatcacatccctgtacagggcccgctgagcagcatccaggtgtctccactcaatccrggtaaaggccacagccacatccccaaatgtcagcggtccctgcaaaaccaaacccaattctgctcatccgggaacccctgagggaggcatcccaagagaa

SEQ ID NO: 8174 - DNA, 201 bp, Homo sapiens
ggcctattgctcctacgctacaaacctgtatagcatgtgactatactgaatactgtaggcaagtgtaacacaatggtaagtatttgtgtgtctaaacataraaaaggcatagtaagtatacagcgtgaaagataaaaaggctgaagcacagtggctcacacctgtaatcccagcactttgggaggtagaggcaggtggatt

SEQ ID NO: 8175 - DNA, 201 bp, Homo sapiens
accatctgccggtagctgactcccaaaggtacatctctacctagatctcatctctgagctctgaatctgaatatatgtgtctcctcaatatctcccatcayaagtccaagggcctttcttccagaatatgcaaacctgacctcatggcactgccaattgcttctcttcctgggttcctatcccagtgaatggcaccttatc

SEQ ID NO: 8176 - DNA, 201 bp, Homo sapiens
tgcttctcttcctgggttcctatcccagtgaatggcaccttatccatcagctgctgaagccagaaactcggaaatcatcttccatgtcttctttccctcayattccccaatatgcaccatcagacatctagtctatccctaaacctagtggatttttctctcctaagttgtactttttcaccattacttccctagtaccag

SEQ ID NO: 8177 - DNA, 201 bp, Homo sapiens
agtcagcatgctctggtttccccgcctcctggttaccagagctccttgggccatgccagcacttgacagcaggcaccgggacaccagccaaaactcctcaraaccgcctccctaagttgcacttgtcagcaattaaaacatttgtcaaagagtatttaatcctagtgttataaagtgctatggcaaacagatttggctcga

SEQ ID NO: 8178 - DNA, 201 bp, Homo sapiens
ctaacaagtctgatgaaccaagtgaactagatgcaacccctctctctttctctctctctctctctgtctacacacacacacacacacacacacacacacamtcccatcaggaaaagagagtaagttagcatcattttaaaccagcatttaagatcacaaactaaacaataaagaatagaaacaggtgggaaattggacaga

SEQ ID NO: 8179 - DNA, 201 bp, Homo sapiens
cattgtataggagaatctagccagtgtattaaggcaagaaaaggggggcgcaagaaaggcaccccgattttaagggaagaataaaagctctctttattcaycaaaaacatgatcgtaaatccagaaattcctaaggatctacaaaaaaaatactagaaataataagagagtgtatcagggttgcagaatgtaacatgaata

SEQ ID NO: 8180 - DNA, 201 bp, Homo sapiens
tcaatattatgaagatgtctgttctagaaacagcacactatccaaataaactcctagtcagctttactggaaaaaatgaaaaggtaattaaaaattcacamggaaatgtaaaggacataaactagccaaaacaactttgaaaacaaatgacctaattcataatttgtcataaagttataataattgagacaatgtggtatt

SEQ ID NO: 8181 - DNA, 201 bp, Homo sapiens
tgtttccccctggctctcctgccctgatggcatcatttgttgacttcggaggtgtttacccttttaatcttctgaagtttggaaaggggattgcacatttycctccatgtgttttgcgagaagaccacatttggtggcagctcaggcactgctgagcggcctttttgcgattcagttgatctgtttgcctgctccttgggt

SEQ ID NO: 8182 - DNA, 201 bp, Homo sapiens
ctctaggtttccaaagccctgaccgctttctctcattcgatgtgtcctgacttgcttattgtctttcatccctcactaaacatgtgcttcaagcaagcagsggtttttttttaagagacagggccccactctgttgcccagactgaagtgcagtggcttttcacaggtgtgatcatagcctgcagcagcttcaacctccca

SEQ ID NO: 8183 - DNA, 201 bp, Homo sapiens
attcaatatagatttctcacaaagcccaatatgtattagtctgttctcacactgctgataaagacatacccaagactgcgcaatttacaaaagaaagaggyttattggacttacaattccacatggcctgtaggcctcatgatcatggcagaaggtgaaaggcatgtctcacatggcggcagacaagagagcttgggcagg

SEQ ID NO: 8184 - DNA, 201 bp, Homo sapiens
gtacaagttagactcgatagatttttttaatgtttactcaacacacaggaactagaattctagaagaaggaaaaggcatgcagagatacaaagtgaatcaygttatgacgatcagaggcaccagcaaaaaagaacacacagccctcaccatcacatgaggctcaaataacatgctatgccaacacatgaagtaactcctgc

SEQ ID NO: 8185 - DNA, 201 bp, Homo sapiens
tatcctgggtctgcctcaaccatgagataggagagtctccggtactagctgctgtagcagtgcccttcatccagggcagttaaaggagtattcaacccttkctttctctgggatccctgcccagcaccttcctacagagatgaaaaaaaaaaaaaggaaaaacaacactccattccaaggagtctggtattcctgaatcct

SEQ ID NO: 8186 - DNA, 201 bp, Homo sapiens
ggtaacacacttcaacccgtctgtgccacaagctcaatggatttgtctagtaaataaatgcataggaaagtttcttcttaaaagccctttggagccaggcrtggtggctcacacctgtaatcccagtactttgggaagctgaggcagatggatcacttgaggcaaggagtttgagaccagcctagccaacatgacaaaacc

SEQ ID NO: 8187 - DNA, 201 bp, Homo sapiens
aacatgacatgattgacattaatagttcacccaaaacagcagaatacacattttttcaggtgcacatagaatattcaccaagaaagaccatattctgggcyataaaataagtgttaataaaaccaaaaggattcaagctgtatgaaatttaaaattatataaacagacatttctcaaaaggagatatataaatggccaata

SEQ ID NO: 8188 - DNA, 201 bp, Homo sapiens
cattccacgcaaaattgtttcctataagcattccttttattcactattctatcctgggtctgcctcaaccatgagataggagagtctccggtactagctgytgtagcagtgcccttcatccagggcagttaaaggagtattcaaccctttctttctctgggatccctgcccagcaccttcctacagagatgaaaaaaaaaa

SEQ ID NO: 8189 - DNA, 201 bp, Homo sapiens
ttgtctgcttgctctggctagaacttcctgcacccatgtttattggcagcacaattcccaattgcaaagatcaacctaaggcccaccaactgatgagtggrtaaagaaaatgtagtatacacataccatagaatacttctcagccataaaaaaagaatgaaataatggcttttgcagcaacttgcatggaactggaggcca

SEQ ID NO: 8190 - DNA, 201 bp, Homo sapiens
tggccatctagcattccacgcaaaattgtttcctataagcattccttttattcactattctatcctgggtctgcctcaaccatgagataggagagtctccrgtactagctgctgtagcagtgcccttcatccagggcagttaaaggagtattcaaccctttctttctctgggatccctgcccagcaccttcctacagagat

SEQ ID NO: 8191 - DNA, 201 bp, Homo sapiens
aagtgtgagcaaacagtatatgtacaaaacaattgtcatgaccaggtgggattcgttccagaaaagaaagcgattttcgaaagcctaatcacattagtgtktgactcatggtatctatatcttcaagaagaaaagtcatgttgtttcacacgtgctgtgccagttatcaggctgtcgtccctgagcttccagcctgcgctc

SEQ ID NO: 8192 - DNA, 201 bp, Homo sapiens
ccaggtgggattcgttccagaaaagaaagcgattttcgaaagcctaatcacattagtgtttgactcatggtatctatatcttcaagaagaaaagtcatgtygtttcacacgtgctgtgccagttatcaggctgtcgtccctgagcttccagcctgcgctcctcacttcgctctgcaatgctggggctggtaccctgcaaac

SEQ ID NO: 8193 - DNA, 201 bp, Homo sapiens
actgttgactgtgaagaactgctggttccaaaacacagttccccacagaatccacatcagaaaatggctccccatgctgtgcagctctctccaccgagctmcaagtttaattctccagtgggtgcatctcattgctgggccatccagcccacgtggaatcccaggcacaatgacaactggaaaatacagttttcaggtttc

SEQ ID NO: 8194 - DNA, 201 bp, Homo sapiens
gaaagatgtggagatggtacacacagttttgaagttggagtgagctctcttggttacagcttctcagtgtcaatagccggcaggtaataagctttccgatytgttggcacctatctcagagcagatcaaagaagtgataaccttttgggagaagaaccgaggcagcaagttgtttaatcagctgtcagctgtcagtgaaag

SEQ ID NO: 8195 - DNA, 201 bp, Homo sapiens
gcacccgccaccgtgcctggctgatttttgtatttttagtagagacagggtttcgccatctttgccaggctggtctcgaactcctgacctcaggtaaaccwcccacctcagcctctcaaagtgcagagattacaggcatgagccaccgcaccctaaggtcctagcaggtgttgctctatctctgatttcttttaaattatc

SEQ ID NO: 8196 - DNA, 201 bp, Homo sapiens
gtgaaaattttaaatttgtgagatataattttactttttagcttttgctgtattgagaaagttagaattaaaacccaagaagaatttaacgtaagtaggtraaatactgtaggagtctagagcaaacgggacaagtgagagagtgataaaatttgagaatcacaagctttaagtcttgagaatgtataagagagttgtgaa

SEQ ID NO: 8197 - DNA, 201 bp, Homo sapiens
aaaaaggttctaagagtttatttgcttggttagctaaaatacagataagaagatgatccactgtgagcaagctggatatgcctcatctcccttggtttaaygtagaggaagggatacaaaggcttagggagattgggatggtggagtggattagtcactttagacctactcatcccagctgggagggcccagaagatatac

SEQ ID NO: 8198 - DNA, 201 bp, Homo sapiens
gctcctggacaataatacgggtaggtgaatgctgagttggaaaaattagcaaatctagagtcttctctgggtctattctatttatttgggctttatggacrtgcttttcaattcgctgtaactctgcctcagcctcctttgttaattgtcaagggctagtgagactagaatctcctctaaggatagaaaatagattactca

SEQ ID NO: 8199 - DNA, 201 bp, Homo sapiens
tattcacaataataaagacttggaaccaacccaaatgtccatcaatgatagactggattaagaaaatttggcacatgtacaccatggaatactatgcagcmataaaaaatgatgagttcatgtcctttgcagggacatggatgaagctggaaaccatcattctcaaaaaactatcacaaggacagaaaagcaaacaccaca

SEQ ID NO: 8200 - DNA, 201 bp, Homo sapiens
atgatctcaggagatgtgtatgggttcaagttgacaaccggtggacttgtgatggttaatactgagtgtcaacttaattgtattgaaggatacaaagtatkgatcccgggcgtgtctgtgagggggttgccaaagaagattaacatttgagtcagtgggctgggaaaggcagacccaccttaatctgggtgggcacaatct

SEQ ID NO: 8201 - DNA, 201 bp, Homo sapiens
ggaaacaacagatgctggagaggatgtggagaaataggaacacttttacactgttggtgggagtgtaaattagttcaaacattgtggaagacagtgtggcrattcctcaaggatcttgaactagaattaccatacgacccagcaatcccattactgggtatatacacccaaaggattataaatcatgctactataaagaca

SEQ ID NO: 8202 - DNA, 201 bp, Homo sapiens
gtcacactcaccagcttatggcttctgtccaagcacctgaacaggggaccaaaacctccactgcaagctgcttttaggtcttgatttatgtaagaatcttscacagcactgctaatgtaaatttcagttttttccctctaggacaaacacttaccaaaatacgcaacttttttggtgggaagagagattgtcctgtgattt

SEQ ID NO: 8203 - DNA, 201 bp, Homo sapiens
actattctatcctgggtctgcctcaaccatgagataggagagtctccggtactagctgctgtagcagtgcccttcatccagggcagttaaaggagtattcraccctttctttctctgggatccctgcccagcaccttcctacagagatgaaaaaaaaaaaaaggaaaaacaacactccattccaaggagtctggtattcct

SEQ ID NO: 8204 - DNA, 201 bp, Homo sapiens
ggccagcacctgccctcctccttccttggtttatctgccccctcaatggggataacactcctagacgttgctgcctcatagagacagtgtgaccgtggaaygaacaccctttgcacagcataatcaggatcagcagtcctgaagctgcaaggctggagagagaacaggaggtgaaagaaaagggtgagttagaccacaatt

SEQ ID NO: 8205 - DNA, 201 bp, Homo sapiens
cattagtacagaagtaatcactacaacacacacacatgcacacacaaatcctcctggataccaaagtcagtgcccaataaaagcaagtaaaacgtgacctrgtcaaactgagaacatgccattcctatcaataaatagaaataggcttagatcatgtattaaaagaaaagatttatcaaactaactaatgaagcaaaatcc

SEQ ID NO: 8206 - DNA, 201 bp, Homo sapiens
ggggaattgtattctgcatggcaaaatccacacaggagagacaccctatctgtgcggccagtgtggaaaaagcttcacccagagagggagtctggctgtgmaccagcgaagctgctcacagaggctcaccctttgaccactttcctgaagagaagttctctttatgaattaagagtacaaaatcctctgagatgaagcaac

SEQ ID NO: 8207 - DNA, 201 bp, Homo sapiens
ttacatccaggcattattgccagccaagattgataaatatgcccaataagtataattgttctctgtgtcagcccttgctaaaggaatactcatggcaatgktgatcaccgctatcatagctatcattaaattacgcattatgactggttgtcacactttcctcaggttctcttccaccatctgtgacagcttcttgatctg

SEQ ID NO: 8208 - DNA, 201 bp, Homo sapiens
aaagcaaatcatttttgcaattacatagactttgccagaacaactgtgaggaaactgaatcagtaatattagactctgaaagcttttttccctccaccaastaccacggacaattttatacaggacaagaatttccagccaaaataaccaaatattttctttaccacctggcatgctgcttcttccagcttgtgtggtaca

SEQ ID NO: 8209 - DNA, 201 bp, Homo sapiens
aaaattggacagggcagtgggccgcctggaggcagtatcccatacctctgacatgcaccgtggatatggagatagtccttcaaaagcaggagcagctccayatgcgcaggcatttgactcgctgcttgcctgccctgtggcagagtacttgaagatcagtaaagagattggggaagacgtgcagaaagatgtggagatggt

SEQ ID NO: 8210 - DNA, 201 bp, Homo sapiens
caaaaggaaaggaagggccacaaaagtaccttgttgtgctaccacttgcatatgaaagctcctctgaacaaatgcagatgtgctgccgaggtagcggacayctctggaagctggcagcaagggctgcctggagggagaggaaaatagtgaagcaagagatacccaaacccattaaaaagtgtgctgtatgtctggtgtcta

SEQ ID NO: 8211 - DNA, 201 bp, Homo sapiens
tgactgtcgggtgcaccatgcccaggctggggagacctctgaagcaggcaggagggtactatctggtaaccacagtccctggggtagttgagtggccaggkcctaagcagaacctactctttattccatatttgcattccatgttccctttgcaaggctggggaagtggctccagcatctgaattagggccttgacctttt

SEQ ID NO: 8212 - DNA, 201 bp, Homo sapiens
aaatcatccaagtgactgtgggaaggtggcctgcagcacccagcctgggcctctagaaagagattgtgactttattgccagaggctggaagttagtagacraacttgtgaggcacagttattttctctgaaactggaggaacacagccaaagtgtcttctcccattgtagatgacaaactgtgaagacatgtcttaaagtc

SEQ ID NO: 8213 - DNA, 201 bp, Homo sapiens
atcccatcccacatcttaaattccaagaaaggtctggcttttgcctgactccaggagtaaacctctaacccctggccttagagtgtcctgcctgagaaaastgtcttttcctggggccttgggccatgccacatactttatggtgacaatgtgatttagtcaagcgggaggggagttggtcccaggccatgtggtgtgaag

SEQ ID NO: 8214 - DNA, 201 bp, Homo sapiens
tgttagccaggttggtctcgatctcctgacctcgtgatctgcccaccttggcctcctaaagtgctgggattacaggtgtgagccaccacgcccagccaggrcctcacttcttatggcaaaattatcacttagggactgtccctaataaaaatccacaagggacctggtagtgaatacaaaagtctttgcagcaggaattga

SEQ ID NO: 8215 - DNA, 201 bp, Homo sapiens
ctgtaataaaccataaccacccgcttcacagcttttctgagttctgtgagtccttctagtgaatcgctgaggctgaggatggcctctgggacccccaaaayagcacaccatgtcatcaagtcctacactaatgactcataaatccatattttcttctgcacatgtctcccaagaaccccatctacacacataacaaccaag

SEQ ID NO: 8216 - DNA, 201 bp, Homo sapiens
acattgcatttacagaaccaagaacagaagccatataatttcaatagatgctgagaaagcattcaataaaatttaacatccctttatgataaaaatgctcracaaactgggggtatcccatacctcaaagtaatacaagccatatattagacaaacccaaagccaacatcatacttaatggggaaaaattgaaaatccttt

SEQ ID NO: 8217 - DNA, 201 bp, Homo sapiens
cctacacttgtaaattaacctgcctgtctgcactttgtgctctgggagaaacctgtgcaccccaggcttacgatatgggagagcctcggtatatttccaamaatgaatgagcaaatggcatttagggatggacttgtcattccctgtgggactgatattggctccatcaggtgtcttatgtaagtgggaacaataacgcca

SEQ ID NO: 8218 - DNA, 201 bp, Homo sapiens
aaacccaaagccaacatcatacttaatggggaaaaattgaaaatcctttctctaacatctggagccagacaaagatccccactttcaccacttttattcartataattctggaagtcctggctagagcaattagctgagagaaaaaataaagggcatctgaactagaaaggaagaagtcaagttagacttgttggcagaca

SEQ ID NO: 8219 - DNA, 201 bp, Homo sapiens
tgaaaaaaggcatcagaaaaggagattagcattatgtagagctgaaaccaaaagaagacctagttaacgccggatcccatctatttcagggtgcctagaartttaatatcagacttacagtttcaaaaatggactttattaactatcataaacaaatataaattacagtcagattaaagacataaatgtcagcgtagagtt

SEQ ID NO: 8220 - DNA, 201 bp, Homo sapiens
cggatcccatctatttcagggtgcctagaaatttaatatcagacttacagtttcaaaaatggactttattaactatcataaacaaatataaattacagtcrgattaaagacataaatgtcagcgtagagttccatatccagcaaaaaatatgtttcaaaaataaagactgtttgcagaaataaaaagctaaaagaattcat

SEQ ID NO: 8221 - DNA, 201 bp, Homo sapiens
cctagaaatttaatatcagacttacagtttcaaaaatggactttattaactatcataaacaaatataaattacagtcagattaaagacataaatgtcagcstagagttccatatccagcaaaaaatatgtttcaaaaataaagactgtttgcagaaataaaaagctaaaagaattcatcaccagcaaacatggactaaaag

SEQ ID NO: 8222 - DNA, 201 bp, Homo sapiens
atcagaaaccccaagcacatggatataggatggaagagcctggaagggaatccaatatatccttccttactctttttaggatgttttagagcaaactaaargggtaaccaccacagaaaactaccaacacagagattttcacacaaagctctctggggtgtgcatgtgtttgtgcagttctttatgtgtgctctgttgagt

SEQ ID NO: 8223 - DNA, 201 bp, Homo sapiens
gggctgagagagaaacgatgccagcattgactactgaggctccttgggcagcttccccaggcctgcccgggcttctttcacttggccctgacaaggctggrtgagagggggcattcttgctcctcatcagaggctgcacatgttagagactctagaacatggaatgttcctctctcagcaagggatggctgggaacatgat

SEQ ID NO: 8224 - DNA, 201 bp, Homo sapiens
agtcaacaaggatgaataaatacatgatttcttacctaattttgatgtcaagtcacaggaaggagtacagacaagtcaaccatgccaaaaaggccccacayatgcaaactcaaaggaacatcttcatcttcccttttatcatgggcacaggtctctcccaaagtcccttccacaccatccaccaagtccagttcaccagat

SEQ ID NO: 8225 - DNA, 201 bp, Homo sapiens
atcagctatcattagcgttagtgtattttatgtggggcccaagacaattcttccaatgtggcccagggaagccaaatgattggacacccctgctaaaaagkaatacacaagtctgggtaatctgtaaagaaaggaggtttatttggctcacaattccgcaggctgtacaagcatggtaccagcatctgctcagcttctggt

SEQ ID NO: 8226 - DNA, 201 bp, Homo sapiens
tcaggacgaagacgcctgcgtgggtacaatgggtcctctgggggtgcagtagaggtctttgtgggggagggcagtgcatgggggtctggtggccccttcasctccttctagaacccttgggaaagagacactgcatgggaaaggctgagtgtcatgactcacccaaccccttgtccaacatgaagtgaccaagcccttgat

SEQ ID NO: 8227 - DNA, 201 bp, Homo sapiens
caggcatgatagtgtatgtttgtaatcccagctactccagaggctgaggcaggagaatcgcttgaacctgggggcagaggttacagtgagccgagatcgcrccactgcactccagcctgagtgacacagcaagactccatctcaaaaaaaaaagaaagaaagaaagaaaaatgatgctatgaatatttacatataagtttt

SEQ ID NO: 8228 - DNA, 201 bp, Homo sapiens
gttcaagaccagtctggccaaaatgatgaaactctgtctcaaataaaaatacaaaaattagccaggcatgatagtgtatgtttgtaatcccagctactccrgaggctgaggcaggagaatcgcttgaacctgggggcagaggttacagtgagccgagatcgcgccactgcactccagcctgagtgacacagcaagactcca

SEQ ID NO: 8229 - DNA, 201 bp, Homo sapiens
aagaaagaatttcacaccttcttaggagctaaggacataggcttagaatggcaagcagtggatacctggaataactgcctcacacatccaggtagaaaggmcttgagggtggagtcgactattctcaaaatgtcagagtactagaatccccacatacccctgttgtctatcagtgacctggtctaggaagaaataagtgac

SEQ ID NO: 8230 - DNA, 201 bp, Homo sapiens
caggtcgatcacctgaggtcaggagttcaagaccagtctggccaaaatgatgaaactctgtctcaaataaaaatacaaaaattagccaggcatgatagtgyatgtttgtaatcccagctactccagaggctgaggcaggagaatcgcttgaacctgggggcagaggttacagtgagccgagatcgcgccactgcactccag

SEQ ID NO: 8231 - DNA, 201 bp, Homo sapiens
gaatgggtgtacaagatgaagggcagtgtcaggaaggacacagagagccagcaaaaaaggaggagagagagattctgtaaaaaagaaaaaacataggaaarctgagtatgctgctacggggagaattgaggaaaagaggaggccattagagatgtggtgacaatgttggttgtaagcacttcctcctccgtctcccccaag

SEQ ID NO: 8232 - DNA, 201 bp, Homo sapiens
cagagagagaaagatcgggttacccacaaagggaagcccatcagactaacagcggatctcttggcagaaactctacaagccagaagagagtgggggccaasattcagcattcttaaagaaaagaattttcaacccagaatctcatatccagccaaattaagcttcataagtgaaggagaaataaaatactttacagacaag

SEQ ID NO: 8233 - DNA, 201 bp, Homo sapiens
aatctcatatccagccaaattaagcttcataagtgaaggagaaataaaatactttacagacaagcaaatgctgagagattttgtcaccaccaggcctgccytacaagagctcctgaaggaagcactaaacatggaaaggaacaaccagtaccagccactgcaaaaacatgccaaattgtaaagaccatcaaggctaggaag

SEQ ID NO: 8234 - DNA, 201 bp, Homo sapiens
tcttcaaaacccaaatttaggttgtgctttgtaggaccatttctggtaccaattatcataggttgggattaccaaaaaaaaagagtctctaaagctctgaratttgtatgcagaaggtttgttaggaattactcttaacagtcacatctataaggggtgagaaaagcaaaactgtgcaaaggaagttgaactgcaaggtgg

SEQ ID NO: 8235 - DNA, 201 bp, Homo sapiens
tgagaactgtcagcttccggcatggagtgcctcagtcctgaggggcacctggggaacacaatagcacccgctacacttgctgccccctctcaaacacaccrtgttctctcccatttcaccagtggaagtggataaacaccagtatttccttttctcagcccagggctctttccactgagggtaagagagaggctgaagagt

SEQ ID NO: 8236 - DNA, 201 bp, Homo sapiens
gggttacagggtgtgtgtgggcaccagggcagccccctacagtgggactgggtggaactctgtgcatggattgcagccggtgaggtggacagggaaaggamagcatgaacaggaagggagctggctgttcccacactttcctaggccctgtccttgctcttagacgattgcactcacagcccagtgtcacctaccaccagc

SEQ ID NO: 8237 - DNA, 201 bp, Homo sapiens
tgtgggcaccagggcagccccctacagtgggactgggtggaactctgtgcatggattgcagccggtgaggtggacagggaaaggacagcatgaacaggaarggagctggctgttcccacactttcctaggccctgtccttgctcttagacgattgcactcacagcccagtgtcacctaccaccagcacactgacgacttcc

SEQ ID NO: 8238 - DNA, 201 bp, Homo sapiens
aagaagatttgaggagttaaagtggctttttgaagaggatacggaagaagatgaggacccctactaaggaaggtccctattgatgggaagcagttatccaycatggagaagctgggccctcctccatcctaataagccctaataaactgatttttactgtttgttttgaaataattttagacttacaaaaatgtcacacca

SEQ ID NO: 8239 - DNA, 201 bp, Homo sapiens
tttacatcctggaatgacactggtttagatgaaaagataagtataggggcataaggaggaagaagatttgaggagttaaagtggctttttgaagaggatayggaagaagatgaggacccctactaaggaaggtccctattgatgggaagcagttatccatcatggagaagctgggccctcctccatcctaataagccctaa

SEQ ID NO: 8240 - DNA, 201 bp, Homo sapiens
gatcctatttccaagcaggacatggtctgaggtactggcagttaggacttcaacatatctttttggaggacagaattgaacccataacacttggggtgtaycctccacggtatcaaaaacattcttctgcagaaatacatataaatccaacctagtggttcctgaggacatcagcatcacctgggaacttataggaaatgc

SEQ ID NO: 8241 - DNA, 201 bp, Homo sapiens
cagctctcagagcgcttaaagtgctcaatacccacatgaattctcttggcaagaacttgcccttaacttgtgtgtttacaacaatgccgacggcctgctgsgtaacactgtagactcttccagttctgccatgataacacttgtggggcattccttcttgaacagtgcccactcctttaatgtctacaatatcatctttct

SEQ ID NO: 8242 - DNA, 201 bp, Homo sapiens
gttggggcaggtctgtttgacccccgaggtactcagatctgcttgcccctgaagtctgtgaaagcaacaaccagctcttccttgatctgactggggagctsaggggactcaaaggaaaccagtagaaagcttcaaagtgacagagacggggctgagagagaaacgatgccagcattgactactgaggctccttgggcagct

SEQ ID NO: 8243 - DNA, 201 bp, Homo sapiens
actcatcacttttcctccttacttccaatgaacttcctctccagaagaccagagccactcacctccatccatgatcatatttgtaacttctgcattattartccaacaatggtctcaattttaatcatctcattttctgattatcaactcctgtctttgcatctcacttcctctagtgaactaaagccaataaattgtcag

SEQ ID NO: 8244 - DNA, 201 bp, Homo sapiens
gttcccacactttcctaggccctgtccttgctcttagacgattgcactcacagcccagtgtcacctaccaccagcacactgacgacttccagacacatgcwtccagctccagctgtgctcccaaatgcagacccagcactggcctgcctggtaaatgcctccacctgcatgcacaaaggagatatgaacatctccaaaacc

SEQ ID NO: 8245 - DNA, 201 bp, Homo sapiens
aacacaggatcaccccgtcattctctgatattgcccccttctaatggctgacaagcccagtaaccttcctgcaggagcagagcacacagggcagttggcasgaagtccttttgcctgtcttcaaggctagctcaccccatctctgtctatcaggaatttcctctataaattataaaccctggaaaaatggtgatttctcca

SEQ ID NO: 8246 - DNA, 201 bp, Homo sapiens
atggcatctagtggattactgattggcattagcaattgtttccaacatggttgatgagagaaatcaactgaggaatctattttaaaaatccagtctcctgraacatgccaccaggaaggcagccagcttacagacaggattcccaggtaaatatgaacttcagataaactgcgaattgtggtttattctaaatatgttcca

SEQ ID NO: 8247 - DNA, 201 bp, Homo sapiens
tttctgtattgatttcgagtttgattccataacattagataatgtgttctgtatgatttcaattcttctaaatttgttaaggtttgttttatggttcagcrtatgttctatgctgctatctactttgtgggcctgaaaaaaatgtgtgttctgctgttgctagacagattattctataaatattaaccatatactgttggt

SEQ ID NO: 8248 - DNA, 201 bp, Homo sapiens
tctgtatgatttcaattcttctaaatttgttaaggtttgttttatggttcagcatatgttctatgctgctatctactttgtgggcctgaaaaaaatgtgtrttctgctgttgctagacagattattctataaatattaaccatatactgttggttgagggagtttttgagttcttttatatccttactgattttatgtcta

SEQ ID NO: 8249 - DNA, 201 bp, Homo sapiens
ttcttagtgattgctatggggattatacttcattctaacaatctagtccaagttaatatcaacttaattttaatggtatataaaaacttttgcttctatayagctccattctcttcatttctttctttgtgcaattgtcatcatagaaattacatctttttgtacacccattaacactgtgttataattattactttattg

SEQ ID NO: 8250 - DNA, 201 bp, Homo sapiens
ttgagcctagaaggtcaaggcttgagtgagctgtgatcacaccactgcactccagcctgggcatcagagtaggactctgtctccaaacaaataaaataaartaacaaaaaaaaccctcaaaatccaacttatctttgtcttttatcaggagaatttagtcaattttcacttcctgtaattattaaaatatctggccgtttc

SEQ ID NO: 8251 - DNA, 201 bp, Homo sapiens
tgcacatggattcaggacataccagcaacctacctgtgcagcattgtctaagccataatgatcttcctcatctcccactggaggtagatgtaagaatctckggctgggcgcagtggctcacacctgtaatcccagtactttgggaggtcgaggtgggcagatcgcgacgtcaggagatcaagacaatcctggacaacatgg

SEQ ID NO: 8252 - DNA, 201 bp, Homo sapiens
aatatctggccgtttctttatttttttggtcaggggtgcagcttttaggtgttccacactttccactctttactctccaatactttattaccctttttggrtctgattcaatttgtttacaatggttggttttaattttccactttctctcatttgcaggtttgaaagtgatagtgttttgcttattttagcatttgttca

SEQ ID NO: 8253 - DNA, 201 bp, Homo sapiens
gtgagccgagatcatgccattgtactccaaactgggagacagagcaagactccgtctctaataataataataacaatgtattatgggccaaagacaaagcaaaaaaaaaaaaaaaagcctggggacactgaaaacacagggcaggttaatagaactacaaatagtactgtttgttggtgaaaggatagagctatattaaga

SEQ ID NO: 8254 - DNA, 201 bp, Homo sapiens
agatttttaaggcacagcggagtgtgggtagttttcttatctaattagctggaatatttcatcacagcttatttggaagccatatatatatatatatatatttttttttttttttttttttgaggaagggtcttgctctgtctcccaggctgtccagtggcacaatcatggctcactgcagcctcgacctcccaggctcaa

SEQ ID NO: 8255 - DNA, 201 bp, Homo sapiens
aggagaatcgcttgaacctgcgaggcagaggtagcagtgagccgagatcatgcccccaggagacagagtgagactctgtctcaaaaaaaaaaaaaagaaaraaaaaggccaggcatggtggctcatgcctgtaatcccagcactttgggagtctgaggcggggaaatcacctgaggttgggagttcgagaccagcctgacc

SEQ ID NO: 8256 - DNA, 201 bp, Homo sapiens
aaattagccaggcttggtggccggcgcctataaactcagctactcaggagcctgagacatgagaattgcttgaacccaggaggtggaggttgcagtgagcmgagatcacattattgcactccagccagggcgacagagcgagactccatctcaaaaaataaataaaaataaataaataaataaatgtgtatctaattacct

SEQ ID NO: 8257 - DNA, 201 bp, Homo sapiens
ttacctgttagctagtgactttttaaatttttttcacttttttagaaatggagtctttctatgttggccaggttggtcttgaactcctggcctcaagcaawcctccttccttggcatgagccactgcacccagcctagtgactttcatataattctgtattcaagttaaatatgttgatgtagtatctccaagaagttggg

SEQ ID NO: 8258 - DNA, 201 bp, Homo sapiens
tgagacagagcaagactctgaaaaaaagaaagagaagagaagagaaggaggggaaggaaaggaaggagagagaaagaaagaagaaagagagagaaaaaagrgaaagaaaagaaagaaggaaggaaaaatatcgggggaaacagccctcaatatttcaatgtagattctttctattttccataagtgatggctggctgagaa

SEQ ID NO: 8259 - DNA, 201 bp, Homo sapiens
ggaggggaaggaaaggaaggagagagaaagaaagaagaaagagagagaaaaaagagaaagaaaagaaagaaggaaggaaaaatatcgggggaaacagcccycaatatttcaatgtagattctttctattttccataagtgatggctggctgagaaataaaggaaagagtacaaagagaggaattttacagctgggcctctg

SEQ ID NO: 8260 - DNA, 201 bp, Homo sapiens
acacagcaccagctaacatttaccttgcactttgcatctggtattcagctaagcactttataaaattacctcctttaaacaaaactagttttttttttatytgtacatggtagacaattcaacaggctacataactagccagtggtttcacaaagtatattaagaggtaagctgcatcttgcaccctgactccaaagatta

SEQ ID NO: 8261 - DNA, 201 bp, Homo sapiens
ttgtttgtttgagacaaggtctcactccagttgcccagactggagtgcagtggtgcaatcttggttcactgtaacctctgcctcccaggctcaagcagtcmtcccacctcagcctccccagcactacaggcacgtgccacagacctggctaatttttttgtatttttttgtagagacagggtttcaccaagttgccaagac

SEQ ID NO: 8262 - DNA, 201 bp, Homo sapiens
tggtgtttgcctaagttttcaagatttcagtatctgtatccttccttccaaagccctaactccaataataagccaattatttggaggacctcacttttttkgggggggcggggggaaggagtctcgctctgtcgcccaggctggagtgcagtggtgtgacctctgctccctgcaagctctgcctcctgggttcacaccatt

SEQ ID NO: 8263 - DNA, 201 bp, Homo sapiens
cgactgctatagcccaggttaaactgcactttccaagggatgggctgatcgtggtcttcaacctggaggagattcctatctctcactgccctctcctcctmttctgcagaagccagggcacacggtgcccgccaggttcaccatctcgcgtgcacacgcggggcgcagaacgaggcaggtgcagacccaggcgcatggccc

SEQ ID NO: 8264 - DNA, 201 bp, Homo sapiens
aatgtcattaattctaactttcatctttgtcaattgcctccttctacattgttcatttctttggttcttcacttgggtttatgatgtataaaaccaacttmttttagctcctcagagtctcactccatgtgtgattcagttttctgggcttcaaaccacccaggacattgcttagcaaagcaggtgcagcaagaatgagtg

SEQ ID NO: 8265 - DNA, 201 bp, Homo sapiens
cattctggtaacaaatgtgaggacatccaagaagaaggctattttactcaaaatcctggtgctacaaacaagaatattgcatacacttgtctagtggatasagcttgtgacttaagccctctcactcaggcattgtaaaggatgctagagacaccgcaggtacattttggagcttgaaattaatcaaaagatcaacaacat

SEQ ID NO: 8266 - DNA, 201 bp, Homo sapiens
ccgcttggtttccaattctttgctttcaacaaaattgaaggaaaacctagtgaatttgtcagctgacaaatcactgaaaataatatttgatgatagattaygatttgatttttggcaaatacctaggaaagagttcaaagtactgacaaaacaaaactccattctcatctacttacataaaagagtaaaggttctcaggct

SEQ ID NO: 8267 - DNA, 201 bp, Homo sapiens
gttcaaaaaaataaaacagagctaataaaggggaaataggaaaatataggaaatggaaaaaagacaaagtaagaaatcagggaaaagtaaccaaagatgtrgagaatattactaagagttataaaaagctactttgttcaacacaagtaacttatgaccttgaattactggatgctttttaggaaattataaattactaaa

SEQ ID NO: 8268 - DNA, 201 bp, Homo sapiens
taaagaaaaaaagaaaagaaaaattaaaatccccaccctgagcccagccccaggggccccaaccatcaggccaaatgtctgcattaaggtccacagtgctygtctgcagggcacaaaatggcctctgcacaacccttgtcacttggaaggtgtgtgcgtggctgtgtatcagctgatgctccctgggtctctctgctcgtc

SEQ ID NO: 8269 - DNA, 201 bp, Homo sapiens
aaagttactgttcccggaggagtgaggctcaccttccccaggcagcaggcgcagccctacaacccagcccccacacatcagcaccagcaacccacactgckgttgctttatactcatatactagggatggagatttcaatgtggctgctgtgttctcaactttgtgcttttcagatgtttctaaagggcttcttcatcacc

SEQ ID NO: 8270 - DNA, 201 bp, Homo sapiens
aggcgtggtggtgctcacctgtagtctcagctactcagaaggctgaggtgggaggatcgctcaggcctggcaggttgaggctacagtgagctatgattgcrccactgcactccagcacgggcaacagagtaagaccctgactcacaaaaaaaaaaagaaatgcatgatttccttccacctctgcatccaatatgcctagat

SEQ ID NO: 8271 - DNA, 201 bp, Homo sapiens
aggaggagtaaggtccaggccagagccagacgaggcccgacctgggggggacacttctcacaccagggacagtgaccacatggggggagagaggtgtcccrgcacaggtagggccaccacccactgtggccataactgagtgaggtcagactcagaaaaatgtgaatgtctatacaatagggtcagcagactttattcact

SEQ ID NO: 8272 - DNA, 201 bp, Homo sapiens
ttactgtgacccagctgtacaggtgcagcagacaccatggtccacaccgccagtccccacacagtgcggtgatcactacgaggcacacctactgcaggccygctgtcttcatgcagcaaataagaccacagcagcctatagagctgttgagaacatgaagtggagtaacaaagaccgagcactttacacccggcctgtcat

SEQ ID NO: 8273 - DNA, 201 bp, Homo sapiens
tgacgagttgacagaagtaggcttcagaaggtcggtaataacaaacttctcggagctaaaggaggatgttcaaacccatcgcaaggaagctaaaaacgttaaaaaaaaattagacaaatggctaactagaataaacagtgtagagaagaccttaaataacctgatggagttgaaaaccatggcacgagaacttcgtgacgc

SEQ ID NO: 8274 - DNA, 201 bp, Homo sapiens
ataaaggaaagagtacaaagagaggaattttacagctgggcctctgggggtgatatcacatatcgataggactgtgatgtccacttgagccacaaaaccascaagtttttattaaggatttcaaaaggggagggggtgtacgaatagggagtaggtcacaaagatcacatgcttcaaaggacaaaaggcagaataaagatc

SEQ ID NO: 8275 - DNA, 201 bp, Homo sapiens
aaaacactattcaggatattatccaggagaacttccccaacctagcaaggcagaccaacattcaaattcaggaaataaagagaacaccacaaagatactcygcgagaagagcaaccccaagacacataattgtcagattcaccaaggttgaaacaaacgaaaagatgttaaggcagccagagagaaaggtcaagttaccca

SEQ ID NO: 8276 - DNA, 201 bp, Homo sapiens
ctcccaggctcaagcagtcatcccacctcagcctccccagcactacaggcacgtgccacagacctggctaatttttttgtatttttttgtagagacagggyttcaccaagttgccaagactggtcttgaactcctggccccaagcaatccacccacctcagcctctaaaagtgctgggattacaggtatgagccaccacgc

SEQ ID NO: 8277 - DNA, 201 bp, Homo sapiens
gaggcctatgcagccacataaaaaggtcacatgtaggtgttcatatgcaactgccctagctgaggtcccagccaacagcatcaaccacccaatttgtgatrgagccttcagttgtgttgtctgatagcaacatgcgaaccatacatgtaggccgcatatgtaaatttaaattttctagtagtcacattaaaattcaatttt

SEQ ID NO: 8278 - DNA, 201 bp, Homo sapiens
ttctcccacctctttccaggatattagtataaccaatgacgatgagcaatacaagctctgtaagttagtcaaattatttccttaaatgtttgagggtggcrtttctgggtcaattagaacatacatttacatttacattcatgttgccaaactgttatccaaagcagcttaaccagttcttaccaacaatcatctatgtgt

SEQ ID NO: 8279 - DNA, 201 bp, Homo sapiens
accaatgacgatgagcaatacaagctctgtaagttagtcaaattatttccttaaatgtttgagggtggcatttctgggtcaattagaacatacatttacayttacattcatgttgccaaactgttatccaaagcagcttaaccagttcttaccaacaatcatctatgtgtgtgcagccgtgcttcttttgattaaatctgg

SEQ ID NO: 8280 - DNA, 201 bp, Homo sapiens
gaagcctctagttgcagaaactaaaagcttttagtttctgtgtggcatttgtcttatttttatgacttctgagttttcttatataggaagataactatackaagttacagaagatacatgaatgatgcttgattaaatatttcatttcaaagaactcagtcaaagtcataatttcacttcatcataccaatataggtcgag

SEQ ID NO: 8281 - DNA, 201 bp, Homo sapiens
acagttgaattatccctgaaagctctcccacacttgttacatttaaaaggcttctctccactatgtattctttcatgacgagtaagagctgcattctgagygaaggctttcccacagtcattacatttgtagggtttctggccagtatgaattctctgatgacttaaaaggattgagttctttctgaaagtttttccacat

SEQ ID NO: 8282 - DNA, 201 bp, Homo sapiens
caagtttttattaaggatttcaaaaggggagggggtgtacgaatagggagtaggtcacaaagatcacatgcttcaaaggacaaaaggcagaataaagatcrcatgcttttgaggaaacaggacaagggcaaaatcagaactactgataaggatctatgttcagctgtgcacatattgtcttgataaacatcttaaacaaaa

SEQ ID NO: 8283 - DNA, 201 bp, Homo sapiens
ctgtcctgtaacctatttcttcatccaacatatccactttatcctttttaatggttgtatcatattccatgatagatcatattttccaaaattattgcaawaatatattccatcgaatatacttttctggcaatgtgactctgatactcctccaaagaagtatgttctatgttccctcccctttgagtttggacaggcttg

SEQ ID NO: 8284 - DNA, 201 bp, Homo sapiens
ctcagctctgcaacaagcagacctaatagacatctacagaactctccagcccaaagcagcagaatatacattcttctcagcaccacatagcacttattctraaagtgaccacataattggaagtacagcactcctcagcaaatgtaaaagaaatcacaacaaactgtgtctcagatcacagtgcaatcaaattagaactca

SEQ ID NO: 8285 - DNA, 201 bp, Homo sapiens
catggtagcacatgcctttaatcccagctactcgggaggctgaggcaggagaatcgcttgaacccgggaggcagaagttgcagtgagctgagatcatgccmctgcactccagcctaggtgacagagcaagactctgtctcaaaaaacaaaaaaaaaattaccaatcaatgggtgtactatgtgaattttctctagcttttt

SEQ ID NO: 8286 - DNA, 201 bp, Homo sapiens; identical to SEQ ID NO: 7466

SEQ ID NO: 8287 - DNA, 201 bp, Homo sapiens; identical to SEQ ID NO: 7468

SEQ ID NO: 8288 - DNA, 201 bp, Homo sapiens; identical to SEQ ID NO: 999

SEQ ID NO: 8289 - DNA, 201 bp, Homo sapiens; identical to SEQ ID NO: 990

SEQ ID NO: 8290 - DNA, 201 bp, Homo sapiens
actatggtgaatcttcccattcatgaatatgacatgtctctccatttatttaggtcttttattactttcatcagcattttatagttctcagtgtacaggtmctatgcatgttttgatttatacctaaggatttcattattttatgaactattgcaaatgacagtttttaatctcagctttcaattgtacattgctagtgtg

SEQ ID NO: 8291 - DNA, 201 bp, Homo sapiens
ctccatctcctcatgactgaaattcagtgctgtgtaaaaatcacactccatgcttccttattcttgcctagcaagaggtctcaccgttccaacaagcactytgcacccctcccaagagagtatggctagaggaagagtctgccaatccagtgaagccaaccagctccatggcaagaaccgggatgcgtcgtcggcttcatc

SEQ ID NO: 8292 - DNA, 201 bp, Homo sapiens
ttcacgtgcaaagcagccaatccagagtccataccccaacccctccttcatggggctgtcctgcaacattgctgagctcactttgtttctaggagggtctygcaggttccttgggattttctatagagctaatcatgtcatttgcaaatggagacagttttattttttctttcaaatctgcatgtcttttatatccttttc

SEQ ID NO: 8293 - DNA, 201 bp, Homo sapiens
gatgccttcaagaaatagctattatcccataatatcccaaaaaatcttcataaatctttacagttaaaaggtggtgatattaactttatcactttgtatgkcactgctctataacaaatatttctttctaactgtttaactttaaaatattttcatgctggttttgtttttttgccacaaatgcaccctaaggtcctagca

SEQ ID NO: 8294 - DNA, 201 bp, Homo sapiens
agaacaacccatgacaggggcccacttggcccccaggaattcaggaagtaggagccacgccttgtgaaaacttgcttatagactttaccgaactgccccgygctggaggctgtcagtatatgctactgcttatttgcatcttttcaggataggttgaggctttccccaccaaaacagaaaaagcacgagtagtgaccaaag

SEQ ID NO: 8295 - DNA, 201 bp, Homo sapiens
cagaacaacccatgacaggggcccacttggcccccaggaattcaggaagtaggagccacgccttgtgaaaacttgcttatagactttaccgaactgccccstgctggaggctgtcagtatatgctactgcttatttgcatcttttcaggataggttgaggctttccccaccaaaacagaaaaagcacgagtagtgaccaaa

SEQ ID NO: 8296 - DNA, 201 bp, Homo sapiens
ttaaaagcaaggattacatagtgtttatcttctggaggggtgctcataattttcttttttttacaatccagaggtcttctattttattttttttaacaccrattatgccatgaatcaatccatagggaagaggttccagcagctcaagctccttcccatttgttctcacacagtgcgcttctctgggcagagcagactggc

SEQ ID NO: 8297 - DNA, 201 bp, Homo sapiens
cccccacccatagcatgtcgttaccacctggagtgtccaggtcccatcctgagactacccagtggggcagccccaccgtaaatcacatctagactacccakcgtgagcccaggccactggcaaatgaagacaatcctattaagcactatactccaagggcttggagatagatcacctgccagaagctgaggacaaagtcag

SEQ ID NO: 8298 - DNA, 201 bp, Homo sapiens
gacacagaaccgactgagagctgctgtcattgtaggtagggtttattacagtgaaagtctagattaaaattggccaagggcagggtgcagggaaagtaccrcatgcagttcccactgtcccctccccatggagtgaggaaggcgtggctttcccagcatcgctgtgtaacagtaggcatgcagcagggccaccctgcaaag

SEQ ID NO: 8299 - DNA, 201 bp, Homo sapiens
tcctgtttgctccctcttcagccagtatcatcccatcctcacttcttcacctcaaatgtggtggtgtgttccaggagcagcacttgagtccagtttgctgwttgcacttgctcctccagccagccgctgcctccatcagacgtctgggtctggctccaggagcccgtcaggcctcaggacccagcctgagctcagggagtg

SEQ ID NO: 8300 - DNA, 201 bp, Homo sapiens
aaattcctggacacatacactctcccaagactaaaccgggaagaagttgaatctctgaatagaccaataacaggctctcaaattgaggcaataattaatarcctaccaaccaaaaaaagtccaggaccagacggattcacagctgaattctaccacagctagaaagacgagctggtaccattccttctgaaactattccaa

SEQ ID NO: 8301 - DNA, 201 bp, Homo sapiens
agctgagagtgcccaaagagaagtcctgcctaatcacttccaggctgggggataaagggcaacttattctggatccaatgatgcttataaatccatggagsagccaacagcattatcaacagagaggctgcacatcctgtccgcaatggctatacataacttaattttacatacaaaactgtaattcaaaactgttgagtc

SEQ ID NO: 8302 - DNA, 201 bp, Homo sapiens
gctggttcaacgtatgcaaatcaataaacataatccatcacataaacagaaccaacaacaaaaaaccacatgattatctcaatagatgcagaaaaggcctytgacaaaattcaacagcccttcatgctaaaaactctcaataaactaggtgttgatggagcatatctcaaaatgataagagctatttatgacaaacccaca

SEQ ID NO: 8303 - DNA, 201 bp, Homo sapiens
ttgtcagatcaccaaaaagatttttttgctttaagccccacccctagtgacttctgattccatccaaacacccaaaattgggtcatatgtcccccgcttarctattaaggtatctgtagagttagatacttttcagtaggtattgacatacaagggtgctcttaggaagtagagaagaatgaacattgactaagcaattag

SEQ ID NO: 8304 - DNA, 201 bp, Homo sapiens
tgattcagagacctgagaacagcagggaagggcatttgtcggcttggggccaggaagctgaaggaatcttcttctaacctagggaaagatgtgcatgccakcaggggctgagatggggcagtggggagagggaatggaggagcatggtaacagtggaatggccgttccctgaggaaggagagcatacccacccgagcccca

SEQ ID NO: 8305 - DNA, 201 bp, Homo sapiens
agcctcctgagtagctgggattacaggaatgcaccaccacgcccagctaagttttgtatttttagtagagacggggtttcaccatgttgaccaggctagtytagatctcctgacctcaagtgatccacccacatcagcctcccgaagtgctgggattacaggcgtgagccaccgcgcccggccgcaagccggtctttaggg

SEQ ID NO: 8306 - DNA, 201 bp, Homo sapiens
tcagccaccatttggagttgctgccgggaacatggaaccaaggagaccttgggaggcagggtctgtcctggcctctcagactaacctggcagatgccctcrcacaggcaggaagagatgctgatgggaggcttgaacgtcccagtgttcccacggacacttcattctcaaagggaaagaagaaaagggaaggcctgcctgc

SEQ ID NO: 8307 - DNA, 201 bp, Homo sapiens
aggtgacatttaacacaggcagaagactctcctgattggcatatagcccaaagtgagaaaaggtgtccacacatacatgtacataagctagtctcccaaaygagggaacatgtgtgatgtccatttgctaaaaagaattaggttccaatcctcgaggagtaactcctcctataaaagatgacgaatgcaccatttggcaag

SEQ ID NO: 8308 - DNA, 201 bp, Homo sapiens
aaaatctattgaacacagaaaaagcagtactaagagggaagtttttagcaataaacaccttcaccaaaaaagcagaaagacaggccaggcacagtgactcmtgcctgtaatcccggcactttgggaggccgaagtgggaagtctgcttgaggccaagagttcgatatcagcttggacaaacacagtgagacctcatctcta

SEQ ID NO: 8309 - DNA, 201 bp, Homo sapiens
tttacaagagaaaaacaaacaacccattaaaaagtgggcaaacagatggggcacagtggctcacgtctttaatcccagcgctttgggaggctgaggcagayggatcacttgaggtaaggagttcaagactaacctggccatccctcctaaaaatacaaaaattagccaggcatggtggcatgcacctgtaatcccagctac

SEQ ID NO: 8310 - DNA, 201 bp, Homo sapiens
atttcgtttacaccagctgaacatagtgtggccgtggtatgcagactgagaggtgcaattcaacctaaacatccccttaggggaccaatcaataatgattycataggaatcattgcgcagcacctctgcctgttctgcaaatgcagtgttcccaaacaagtacattcactatttctgaccaggtccaattctgtttacaaa

SEQ ID NO: 8311 - DNA, 201 bp, Homo sapiens
ttaattcttgttctgcttgatgttgagttagtgatatggtttgaatctgtgtcccaaatcgcatgtcaagttgtaatcccagtgttggaggtggggcctgktgggaggtgattgggttgtggggacagatttcccctttggtgctattctcatgagagtgagtgagttctcatgagatccggttgtttaaaagtgtgtagc

SEQ ID NO: 8312 - DNA, 201 bp, Homo sapiens
catctgatctttgacaaacctgacaaaaacaagaaatggggaaaggattccctatttaataaatggtgctgggaaaactggctagccatatgtagaaagckgaaactggatcccttccttacaccttatacaaaaattaattcaagatggattaaagacttaaatgttagacctaaaaccataaaataccctagaagaaaa

SEQ ID NO: 8313 - DNA, 201 bp, Homo sapiens
atgtaaatgatgagttgatggatgcagcaaaccaacatggcacatgtatacctatgcatcaaacctgcacattgtgcacatgtaccctagaacttaaagtrtaataaaaaaaaaaaagaagaaatccactacagaaggaaccaaggaatttaagcatcaaaattcccacctgccccccaccatttttttgtgagcccagga

SEQ ID NO: 8314 - DNA, 201 bp, Homo sapiens
tgcactgatttcatattgttcaaacacacgttttacaatcaatttgtacagttaacaaaattatcacaatagtcctgaggtgacgtatgttctcagcttaygaagataacaggattaagagattaaagacaggcataagaaattataaaagtattattggggaattgataaatgtccatattaaaatgaaatcttctcaat

SEQ ID NO: 8315 - DNA, 201 bp, Homo sapiens
tcaaaagtagcatacacattcctttcaagtgcacatgaaaccttcaccaaaacagaccatatgctgggccacaaaacaagtctcaataaatttaaaacatytgaattatacagagtatattctttggccactacagcattaaattagtaatcaataataataaaatatctagaaaattcccccaattgtttggaaattaaa

SEQ ID NO: 8316 - DNA, 201 bp, Homo sapiens
tttcgtggaccgcaggaagctcagagaagccagggaacgctactcccagactacagggagccgttctgtagacatgcagtggagacagatgtgaatagagyatcccaccaatagccgtctcccctcatttttaggaaatggatctcctcttcaacgctgtggttggggcaggtctgtttgacccccgaggtactcagatct

SEQ ID NO: 8317 - DNA, 201 bp, Homo sapiens
caggaaggcagcagccctcccaagtgcagaaagactggggagaaaagcggccagccacttgacaggaggatgacatcaaaagaggaaaccagtgcctttcygcaccaacagggcactcaaagatgagcttccactcaggaacccccgtactgctccgtgtgctcagcttctgctgggatgttccccacccactcacctgca

SEQ ID NO: 8318 - DNA, 201 bp, Homo sapiens
tacaacataaggactaaaattagtaaaattctattagagatttttattaagtaaactgtagctgctcttgtcacaacaaaagcaactatgtgagatgacaratccattaatctgcttcactaaacactttactatctatacatatcccataacatgttgtaagcctcaaaaatacacattaaatttatttttaaaaaataa

SEQ ID NO: 8319 - DNA, 201 bp, Homo sapiens
caaggcctataccccaccaaatgataactgccccttgttacagtacttggatgaccttcttgtggcagccccaaaccgagaggactgttatcagggaaacsaggatctcctctatctcctgtagaaagcaggttacaaagtatctaaaaagaaagcccaaatttgccatgaagaggttaaatatctaggtttcatagtgag

SEQ ID NO: 8320 - DNA, 201 bp, Homo sapiens
agtctcagctactagagagactgaggtgggagggtctcttgagctcaggaggctgaggctgcagtgagccaacattgcaccactgcactccaacctgggtragaaaaggagatcctgtctcaaaagaaaaaaagccctgaaagaattcactgccaccagacccatcttacaagaaatgttcaagtgacttcttcagtctga

SEQ ID NO: 8321 - DNA, 201 bp, Homo sapiens
caggaagctcagagaagccagggaacgctactcccagactacagggagccgttctgtagacatgcagtggagacagatgtgaatagagtatcccaccaatwgccgtctcccctcatttttaggaaatggatctcctcttcaacgctgtggttggggcaggtctgtttgacccccgaggtactcagatctgcttgcccctga

SEQ ID NO: 8322 - DNA, 201 bp, Homo sapiens
aggtggtgatattaactttatcactttgtatggcactgctctataacaaatatttctttctaactgtttaactttaaaatattttcatgctggttttgttyttttgccacaaatgcaccctaaggtcctagcagtgttgctctatctccgatttcttttaaattatctgaatgagtagtaaatcagtggacacatactagt

SEQ ID NO: 8323 - DNA, 201 bp, Homo sapiens
catgcatcacaatttcttggaaggctatttcaaaacacaaaccttaaacttcttgccaatttacacccaataatcaagctgaatatattcaccttagcatrtctacttaaaaagagttccttggttttctgtgtgaataaatgtaaaagagtactcacaacccaggccatacaatcaacaaagaaatatctactgcatctt

SEQ ID NO: 8324 - DNA, 201 bp, Homo sapiens
ccagcactttgagaggccaaggcgggcggatcacgaggtcaggagatcaagaccatcctggccaacatggtgaaatcccgtctactaaaatacacacacamaaaaaaaattagatgggtgtggtggtgcgccctgtagtcccagctactcaagaggctgaggcaggggaatcacttgaaccctggaggcagaggttgcagt

SEQ ID NO: 8325 - DNA, 201 bp, Homo sapiens
ctcaaaaggaactgcttgagttttctaattcatataaataaatctgcagaacaggcatgggaatggatattaagggtgtgggataatggtggaaagaacayaaagtttgatcaggctgaatttattgatttgagtccactaagtacggactctgcattcaatgttgccacttgggtagttaaaaaaggttctaagagttta

SEQ ID NO: 8326 - DNA, 201 bp, Homo sapiens
agaacataaagtttgatcaggctgaatttattgatttgagtccactaagtacggactctgcattcaatgttgccacttgggtagttaaaaaaggttctaakagtttatttgcttggttagctaaaatacagataagaagatgatccactgtgagcaagctggatatgcctcatctcccttggtttaatgtagaggaaggga

SEQ ID NO: 8327 - DNA, 201 bp, Homo sapiens
tgtctcaaaaacaaacaacaaaaacaaacaaaaaaacaaactagagaatcacaacccctcaatcaatttccagacttgagccagtttacagatccagaacyccttgaatgaaggggagaccaggtccccttgaggaagaaccctactacattaccgacaatttacatagtgactctttctcccatccttccacaaggagac

SEQ ID NO: 8328 - DNA, 201 bp, Homo sapiens
aaactctgtctctattaaagatacaaaattagccaggcatggtggcgcatgcctataatcccagctacttgggaggctgaggcagaagagtcacttgaacycaggacgcagatgtcacagtgagctgagattgcaccactgcactccagcctgggcaacaagaacaaaaactctgtctcaaagaaaaaaaaaaaaaagaaa

SEQ ID NO: 8329 - DNA, 201 bp, Homo sapiens
gagactgtggagattagtgctactaccaaggacttgaaagacgctggggtggtgattcccaccacatccccattcagctctcccatttagcctgtgcagaygacagatcttggagaatgaccatggattattgtaagcttaacaaagtggtgactccaattgcagctgctgtaccagatgtggtttcattgcttgagcaaa

SEQ ID NO: 8330 - DNA, 201 bp, Homo sapiens
taaagatacaaaattagccaggcatggtggcgcatgcctataatcccagctacttgggaggctgaggcagaagagtcacttgaacccaggacgcagatgtyacagtgagctgagattgcaccactgcactccagcctgggcaacaagaacaaaaactctgtctcaaagaaaaaaaaaaaaaagaaaaagaaaaacctgggg

SEQ ID NO: 8331 - DNA, 201 bp, Homo sapiens
tttcattgcttgagcaaattagcacatttcctggtaggtggtatgcagccattgtcttggcaaatgtcttttcctccattcctgtccataaggcccaccaraagcaatttgccttcagctggcaaggccagcaatatacctttactgtcctacctccagggtatatcaattctctggctttgtgtcataatcttattcgga

SEQ ID NO: 8332 - DNA, 201 bp, Homo sapiens
acttgagccatatgacccaacagatccaatggtgctggaggtgtcagtgacagacagggtgctgtttggagcctttggcaggcccccataggtgaatcacratggaagcttctaggattttggagcaaggccctgccatcttctgcagataactactctccttatgagagacagttcttggcctattactgggctctggtg

SEQ ID NO: 8333 - DNA, 201 bp, Homo sapiens
ctgagggaggcatcccaagagaaggaagcaaggtggtcaaagccagcttctgacagttccaacagtgctcatggaaaccaacaagtaaaagctgagggctsaggggatgtgcgactcctcccttgagcaggttcttcctgcatgcctgtcctgctccctcctccaggcctagcctctgctcactccacccttcatgtcacc

SEQ ID NO: 8334 - DNA, 201 bp, Homo sapiens
agttcctttacctcttctggtttgttcagaaaagaaaggtctgaaatgtgaaatagaattacaggcacaaatgccagagagtgtaactgcgaactgtctayactaccccataaatacagcctaaatggggaaaaaaaatgatttactgaaatagtctgaagatgcacttgatttcttcctccagatactctacattttatc

SEQ ID NO: 8335 - DNA, 201 bp, Homo sapiens
aaagaagattaacatttgagtcagtgggctgggaaaggcagacccaccttaatctgggtgggcacaatctaatcagctgacagcgaggctagaatatatayaggcagaaatacgtgaaaagagagactggcctagcctccccgcctacatctttctcccatgctggatgcttcctgccctcgaacattggactccaatcct

SEQ ID NO: 8336 - DNA, 201 bp, Homo sapiens
ccatactaagcaaagcccaggtgcactggctaggggttttgcatggggaaagcagttgagctacattctccagcaggagaggctggtaccaaatgctcctkctattttttcatcagcccctgggttgtgggctacaacagatttgcaccttcatgctcttagacaccaggagagcacgctgaacagaagcaggggaagcaa

SEQ ID NO: 8337 - DNA, 201 bp, Homo sapiens; identical to SEQ ID NO: 7469

SEQ ID NO: 8338 - DNA, 201 bp, Homo sapiens
tgcactggctaggggttttgcatggggaaagcagttgagctacattctccagcaggagaggctggtaccaaatgctcctgctattttttcatcagcccctsggttgtgggctacaacagatttgcaccttcatgctcttagacaccaggagagcacgctgaacagaagcaggggaagcaacagcacaagtgccaggcaagg

SEQ ID NO: 8339 - DNA, 201 bp, Homo sapiens
atccatggtgccatgtttaattctccctggagtagtggtcttctttcttcctttccgctaacctcaggaagggcagacctgtcccagggggtgggtgcacratcacaaataacatctgtatagctcccccaggtagccagtgatggttcacagagtagacacagcaacaaaagagatctggcctgactcgtggtaagctga

SEQ ID NO: 8340 - DNA, 201 bp, Homo sapiens
gtagcctcaacctcctgggcccaagtgatcaccctgcctcagcctcccaagtagctgggactacaggtgtgcatgccctattaatttttcaattttttgtrcaaagtctcactatgttacccaagctggtcttgaactcctgggctcaagcaatcctcccaccttgacctcccaaagtgctgggattataggcatgagcca

SEQ ID NO: 8341 - DNA, 201 bp, Homo sapiens
agctactcaggaggctgaggcaggagaatcacttgaatccgggaggcagaggttgcagtgagccaagatcacaccactgcactccagtctaggtgacagargaagactctgtctcaaacaaaaaaaaaatgtaaatatgacataataacttaagggggacagagctatataggagaaaaatttttgtatactataaatatc

SEQ ID NO: 8342 - DNA, 201 bp, Homo sapiens
cttcaacaataatcttagtttaccataacactttttactttaacattttgactcttttgtaatcattgtatagctgtacaaaaatattttctttatatccktattctccaagcttttttctatctatatatctatttgtttatttttactttttaaatgtttcattaaaaactaagacacacacatacacattagcccagg

SEQ ID NO: 8343 - DNA, 201 bp, Homo sapiens
atccagtctatcattgatggacatttgggtggttccaagtctttgctattgtgaatagtgccgcaataaacatacatgtgcatgtgtctttatagcagcakgatttataatcctttgggtatatacccagtaatgggatggctgggtcaaatggtacctctagttctagatccttgaggaatagccacacattgtagtatt

SEQ ID NO: 8344 - DNA, 201 bp, Homo sapiens
  misc_feature (1)...(201): n = A,T,C or G, or insertion/deletion polymorphism (see Tables 1-2)
ccaagctggaatgcagtggcactatctcagctcactgcaacctctccacctcctgggttcaaaagattctcctgcctcagcctcccaagtagctgggactncgcatgccactatgctcagctaatttttgtattttcagtagagatggggtttcgccatgttgaccaggctggcctcgaattcctgacctcaggtgatctg

SEQ ID NO: 8345 - DNA, 201 bp, Homo sapiens
accattgtgttacaattgtctacagtattccatacagtaacatgctgtacaggtttatagcccaggagcaacaggctatatcgtatagtctagatgtgtgrtaggctataccatctaggtttgtgtaagtacacactctatgatgtttgcacagcaatgaagttgcctaacatgtcccagagtgtatccttgtcactaagc

SEQ ID NO: 8346 - DNA, 201 bp, Homo sapiens
tcagcctcccaaagcactgggattacagtgccactgtgcctggcctcacccatggaattataaatggatatagcatccatgaagatcattatggggcacartgaaagtatgtaagattgtagtaagaaggtgggtggcacaagacattttagcatcttttgacacagcatttggataccagaatgtttgaaaacatttaga

SEQ ID NO: 8347 - DNA, 201 bp, Homo sapiens
gctgcaaatcatttcagttctgctgggtccaacccagttccttcttagcttctcgtcttgcattctggtaacaaatgtgaggacatccaagaagaaggctrttttactcaaaatcctggtgctacaaacaagaatattgcatacacttgtctagtggatagagcttgtgacttaagccctctcactcaggcattgtaaagg

SEQ ID NO: 8348 - DNA, 201 bp, Homo sapiens
ttggaagttttcaaccattatttcttggagtactttttcagtatcttcttcctcctctccaggtggtaattattccatttttaatattctaccagattackttgtatcagtctataaatatgctgctagataagtatagttaattatttagaatttttatctatagttgtaagtgaaaatggtcttgttataggtttggaa

SEQ ID NO: 8349 - DNA, 201 bp, Homo sapiens
gcacccatgtttattggcagcacaattcccaattgcaaagatcaacctaaggcccaccaactgatgagtggataaagaaaatgtagtatacacataccatrgaatacttctcagccataaaaaaagaatgaaataatggcttttgcagcaacttgcatggaactggaggccactgtcctaagtgaagtaactcaggaacag

SEQ ID NO: 8350 - DNA, 201 bp, Homo sapiens
agagttgtttccccactggtttttgtcagccttgccaaagatcagatagttataagttatggctttatttctgagttttctgttctgttccattggtctaygtgtctgtttgtaccagaactatgctgttttggttactgtgcccttatattgtagtttgaagtcaggtagtgcgatgcctctggctttgctctttttgcc

SEQ ID NO: 8351 - DNA, 201 bp, Homo sapiens
tctggggcttggagggaagaaagtagtaggtggttaggtggggaaccaaaatggaagatcccaattacatgccaagaccaaagtgtaaacaggagtgactrttaacttgggattggcaggaagagatatatgtttatgtgttctctgctttcccacatcctgcttcctcctagactcatttgtgtgtggtcctggtacctt

SEQ ID NO: 8352 - DNA, 201 bp, Homo sapiens
ccatattgatctcgagttggaagaggtgagtcctgtctcaaaatggaggtaaaaccgccgcctggttgcccccagcccgactccggcagtcgccgtcgccrctggggggaggagggccatgatccaaaggaaccagagcagctgagaaaactgtttattggtggtctgagctttgaaactacagatgatagtttaagagaa

SEQ ID NO: 8353 - DNA, 201 bp, Homo sapiens
tttggaagttttcaaccattatttcttggagtactttttcagtatcttcttcctcctctccaggtggtaattattccatttttaatattctaccagattaytttgtatcagtctataaatatgctgctagataagtatagttaattatttagaatttttatctatagttgtaagtgaaaatggtcttgttataggtttgga

SEQ ID NO: 8354 - DNA, 201 bp, Homo sapiens
tttagtagagacggggtttcaccttgttagccaggatggtctcgatctcctgacctcatgatccacccgcctcggcctcccaaagtgctgggattacaggygtgagccaccgcgcccggccgggggtgcattttaactgcaacccatcacataaggtctggtgtagaattttgtacctgttggtgctcagacaaattttgg

SEQ ID NO: 8355 - DNA, 201 bp, Homo sapiens
agggatgctgaagcaagaatgtaacgttgaagacagggccacaggaactgcagctagtcctaggactgagggggatcacttctgccaaggcctgccccccsacttcccagacagggtgctgtgccctggaataagagagctcataaccaccttctcccagccgccgggtcttcccattaggtctcggccctcgcttgctct

SEQ ID NO: 8356 - DNA, 201 bp, Homo sapiens
caccaaattttggaagttttcaaccattatttcttggagtactttttcagtatcttcttcctcctctccaggtggtaattattccatttttaatattctaycagattactttgtatcagtctataaatatgctgctagataagtatagttaattatttagaatttttatctatagttgtaagtgaaaatggtcttgttata

SEQ ID NO: 8357 - DNA, 201 bp, Homo sapiens
tacctagtgtcctttcattttatcctgaaggactccctttagcattgtgggggggcaggtctactaatgacaaacttcatctcttaaatttacctgagaaygtcttaatttcatctctgtttttgaagaatgattttgctgtatataaaatttttggttgacatacttttttcccccacatcagagtttgatttagtactg

SEQ ID NO: 8358 - DNA, 201 bp, Homo sapiens
tctcatgtttttgacatctggggccttgctgaccccaaaggggctgcccctcccagcgttagccagttcctaaagattggaaacagctcgaccgtacacamctttcacgtgcaaagcagccaatccagagtccataccccaacccctccttcatggggctgtcctgcaacattgctgagctcactttgtttctaggagggt

SEQ ID NO: 8359 - DNA, 201 bp, Homo sapiens
agactgaggagacatgagggctgtgtgcaaggtgggatcctggaagagaaacaggatcacagcgtgaaaagcgctggaatctgataaaggctgccattcaytcaatgatactgcactgttcatctcttagttttcattatcgtgctaaggggggtctctaaaatgtacatactgtattggtgaaaactctctgtactttat

SEQ ID NO: 8360 - DNA, 201 bp, Homo sapiens
atacatacacattcacacactcacatgtgcactcacatacaaatacacacacatgcactcacatgcaaatacattcacacacatgcactcacaaatacacycacacatgcactcatatgcaaatacacacacattcacacacatgcactcacatacaaatacacacacatgctttcacaatcaaatacacatacattctct

SEQ ID NO: 8361 - DNA, 201 bp, Homo sapiens
attaattattaccatgatgcctttgggaagccgagatgggtggatcatgaggtcaggagttcaagaccagcctgaccaacatagtgaaaccccgtctctaytaaaaatacaaaaattagctgggcatggcagcgggtgcctgtaatcctagctactcgagaggctgaggcaggagaatcacttgacctgggaggcagaggt

SEQ ID NO: 8362 - DNA, 201 bp, Homo sapiens
ccagcacctgaagctgggcacacccacagggcaggcaaattcctgtggccactgaaaggcctcaagcagggagctcaagttcttgaggtggggagccctcracatacagggacattggccaccaaagcacaaggtgagctcaagagatgtcaggggcgctaccagcagctgctgcgtgccatgttttatgaagtgtcagag

SEQ ID NO: 8363 - DNA, 201 bp, Homo sapiens
aagggatctcttgtatgctgttggtgcaaatgtaaattggtatggccattatggaaaatggtacagaggttctttgaaatattaaatataggactaccacrtgacccagcaatccctctgctgagtgtatacacaaaggaaatgaaatcagcacttcataaagatatctgtgtcccatattccttgtggcattatttacaa

SEQ ID NO: 8364 - DNA, 201 bp, Homo sapiens
gagacagatgtgaatagagtatcccaccaatagccgtctcccctcatttttaggaaatggatctcctcttcaacgctgtggttggggcaggtctgtttgayccccgaggtactcagatctgcttgcccctgaagtctgtgaaagcaacaaccagctcttccttgatctgactggggagctgaggggactcaaaggaaacca

SEQ ID NO: 8365 - DNA, 201 bp, Homo sapiens
cattaaatccccagcacctgaagctgggcacacccacagggcaggcaaattcctgtggccactgaaaggcctcaagcagggagctcaagttcttgaggtgrggagccctcgacatacagggacattggccaccaaagcacaaggtgagctcaagagatgtcaggggcgctaccagcagctgctgcgtgccatgttttatga

SEQ ID NO: 8366 - DNA, 201 bp, Homo sapiens
actgccgtagatgtgcacccacacattttgatatgttgtgttttcattttccctcagttcagtgtattttttaattccttcaagatttcctctttgtcccrtgggatttttacaagtatgctgttgcgtttccatgtgttcggaaattttctgatcatttttctgtattgatttcgagtttgattccataacattagataa

SEQ ID NO: 8367 - DNA, 201 bp, Homo sapiens
cgttgacttgaccgcagccatgcgcctgcaaatactttctctcccaaacgcagcctagttcacccgtgaggacgtgcttcctttgactggagttgaggcaktggctgctcaggcgactgctatagcccaggttaaactgcactttccaagggatgggctgatcgtggtcttcaacctggaggagattcctatctctcactg

SEQ ID NO: 8368 - DNA, 201 bp, Homo sapiens
agtaaagacccaaatctgtttcatctacctagaatgtcgataattaagaaaatgtatatatgtaggggtgtgtgtgtgtgtgtgtgtgtgtgtgtgtgtgkctgtagagctgatcttcattattcatacattccattcttacaaatatacctacttgctaagttttatttgtaaccctcgaatcaatttactgtgcttttg

SEQ ID NO: 8369 - DNA, 201 bp, Homo sapiens
aagagcaaggcctccagagtcaggagtggaatgggtagggaggagaggcttttccaacacgagaagccatggggctatttgagagcaccagcagaggaggygcagagctgaatgtatgttttaaaagtcttaccatagctactatgtagagaagacattgcaggggctgactgcgagggaagaattgggagacagcgctgc

SEQ ID NO: 8370 - DNA, 201 bp, Homo sapiens
accacatcctttattttctgtattctcatgtttttgacatctggggccttgctgaccccaaaggggctgcccctcccagcgttagccagttcctaaagatyggaaacagctcgaccgtacacacctttcacgtgcaaagcagccaatccagagtccataccccaacccctccttcatggggctgtcctgcaacattgctga

SEQ ID NO: 8371 - DNA, 201 bp, Homo sapiens
catgtaacagacaagtaactaaaaatgtgaaggctgtgaatgaaacaaacagggtgctgcttggagtatgatgtgggtgggggcatctgggctgcatggtyccccagaagctgtctctgaaaaggtgacaattaagctgagaccggcaggatgaagaaaagccagccatcagtgagcctggatgtagtaaccacatccttt

SEQ ID NO: 8372 - DNA, 201 bp, Homo sapiens
ccacagagccttgctcactgctaaggcagcagtctgagattgatctgtgaggcagcagcctggctgggggaggggcgtctgccattgctgaggcttgagtwggtaaacaaagtggcccggaagctcaaaccgggcacagcccaccacagctcaacaaggcctattgcctctaggctccatctctgtgcgcaaggcgtagct

SEQ ID NO: 8373 - DNA, 201 bp, Homo sapiens
ggcctacagaatcaaatatgttttgagcccttgggatgggcttaatctgaaatttcacacaagtctgactggtcatcagtggggactagggggccctggtraggggacagcagttctgttccagaccctctgcagagctgcacagcctccctcagaatcaggggactcagcccctcacacccaatgggaccaggcagtgcc

SEQ ID NO: 8374 - DNA, 201 bp, Homo sapiens
gtaaacaaagtggcccggaagctcaaaccgggcacagcccaccacagctcaacaaggcctattgcctctaggctccatctctgtgcgcaaggcgtagctgmacaaaaggcagcagaaacttctgcagacttaaacgtccctgtctgacagctgtgaagagagcagtggttctcccagcacagtgtttgagttctgagaacg

SEQ ID NO: 8375 - DNA, 201 bp, Homo sapiens
ggtggtcagtgagttatcctgcgagaaaccatctgctaatctcattaaatgtctgaagactacaactagcttctaatgtagtccctttcagccacacgttkctgtgctgggtaccatgaaaacccaggttccactgggctcaagacggagatgcggcccagaagccacagactcaccagactcactaagatggggtcagga

SEQ ID NO: 8376 - DNA, 201 bp, Homo sapiens
actattcacaataataaagacttggaaccaacccaaatgtccatcaatgatagactggattaagaaaatttggcacatgtacaccatggaatactatgcarcaataaaaaatgatgagttcatgtcctttgcagggacatggatgaagctggaaaccatcattctcaaaaaactatcacaaggacagaaaagcaaacacca

SEQ ID NO: 8377 - DNA, 201 bp, Homo sapiens
aaggcagaccaacattcaaattcaggaaataaagagaacaccacaaagatactctgcgagaagagcaaccccaagacacataattgtcagattcaccaagrttgaaacaaacgaaaagatgttaaggcagccagagagaaaggtcaagttacccacaaagggaagcccatcagagaacagacctctcggcagaaaccctgc

SEQ ID NO: 8378 - DNA, 201 bp, Homo sapiens
ttgtttatcttcttttctttgtgatcaaagtttagttgtcatctgtttaaaataacttgttatatctgtaagatacattttttggtttcctcacaggaacyacaatgcaaaaaaaaagaaaatagattcactgcaagtaaaaaaaacaacgaattaaaacatactaccaaagaagatcacgtagccacaaaagaagacaac

SEQ ID NO: 8379 - DNA, 201 bp, Homo sapiens
aatcatgaaggctgaaatgttgttttcttagattctgaattcctctggggcttggagggaagaaagtagtaggtggttaggtggggaaccaaaatggaagrtcccaattacatgccaagaccaaagtgtaaacaggagtgactattaacttgggattggcaggaagagatatatgtttatgtgttctctgctttcccacat

SEQ ID NO: 8380 - DNA, 201 bp, Homo sapiens
cgtatcgtctacatttcaaggatcaggctgcctgctgtatcggcagtagctacaaggagacaagagtggaggcaaggaggaccataaagaggccattgcartgatccagggagaggcgatgcagacttgggaaagctcagggagagtggcggaaacagtgagaagggactggatcctgaacatcgtttgaggatctctcca

SEQ ID NO: 8381 - DNA, 201 bp, Homo sapiens
tttcagtatttaatacctgtagttcagttagtaattttttcatatataacatgttgcctgtatgcaattgaaccataaagttcattgcaagaccgggcgcrgtggctcacgtctgtaatcccagcactgtgggaggccaaggcaggcgaatcacctgaggtcagtagttcgagaccagcctggccaacatgttgaaactcc

SEQ ID NO: 8382 - DNA, 201 bp, Homo sapiens
actacagataactggagagctgattggctccaaccaatcatgaaggctgaaatgttgttttcttagattctgaattcctctggggcttggagggaagaaartagtaggtggttaggtggggaaccaaaatggaagatcccaattacatgccaagaccaaagtgtaaacaggagtgactattaacttgggattggcaggaag

SEQ ID NO: 8383 - DNA, 201 bp, Homo sapiens
aggtgcctctgatggacttcgggatgggctggtggtgccgttaaagaccagtggctgcctctgctgtgttcgtgttgtccacatcactgctgggatgacaracctgcagaggctccatctgcacacagttttgatgaagctggaaattctccctctctccttgcacctctttctcagactttcttcagggatttttatggt

SEQ ID NO: 8384 - DNA, 201 bp, Homo sapiens
gccttgaaggaggtgagggagtgagctatagtttggatatttgccccgcctccaaacctcatgtcgaaatttgattccgatgctgaaggcagggcctggtrgaggtgttcgggtcttgggagaggatccctcgtgaatggcttgtcactggcctagaggtaatgggtcagttctcacatgagagctggctattaagaagag

SEQ ID NO: 8385 - DNA, 201 bp, Homo sapiens
agaagccagggaacgctactcccagactacagggagccgttctgtagacatgcagtggagacagatgtgaatagagtatcccaccaatagccgtctccccycatttttaggaaatggatctcctcttcaacgctgtggttggggcaggtctgtttgacccccgaggtactcagatctgcttgcccctgaagtctgtgaaag

SEQ ID NO: 8386 - DNA, 201 bp, Homo sapiens
atggctgaaaatttccaaattcaatcagagctataaacccatagatcaaaaaaactcagcaaactccaagcccaagaaacttaaagaaaactacaagacayctcagtattaagttgctcaaaaacagtgataaagagacaatcttaaaccagagtaaaaagacatattacatacagagacagagatgaggatgacagaaga

SEQ ID NO: 8387 - DNA, 201 bp, Homo sapiens
attagcccatagttggggtaatttttgagaatgggtgatgggtctgtgggtgggggttcattataaattatgaaactcataattttaatacagtttttttwaacaaaacttatactaattcaacaatgtgtcttttctcattacaaaataattcacatacactgtagatatttgaaaaatattagaaagtacctataatga

SEQ ID NO: 8388 - DNA, 201 bp, Homo sapiens
acttgcaccgagcaatcagtccctaacacctaaatatgtactatttggtttgtgaccataggaatatggtaatttacaatcttttagcttaaaaaaaatgytgtgcaactgttgtaagtactttccagtttaaaatccttcagtggcttcccttggcctgcaagataaaaatccaccttctttcttagcatcaagaatctc

SEQ ID NO: 8389 - DNA, 201 bp, Homo sapiens
gccccccaccatgtcagctggaccacgagatcaatactctctgggtaggtctccctacatccaggccacacccctccaattatccccactacagacaacakgaacctttttaaaaagcaaaatcaggattctagttcaagagcatgaaattgaaatctataggaaggtataagaggtataaaaacagtaagaacctataac

SEQ ID NO: 8390 - DNA, 201 bp, Homo sapiens
gcaccccatgcttaggtgaccaacttgcagtgaaacccctagaaaccagggctgagactgcctggctgccggtcctccatgtgttgtcactcgtcattgcrgggagaagtaagtgcttctgtgcagacccactgagagagggcaactggaagctgactcccagcctcccctcctcctttcactgtaataaaccataaccac

SEQ ID NO: 8391 - DNA, 201 bp, Homo sapiens
attcctcaaggatcttgaactagaattaccatacgacccagcaatcccattactgggtatatacacccaaaggattataaatcatgctactataaagacayatgcacacatatgtttattgtggcactattcacaataataaagacttggaaccaacccaaatgtccatcaatgatagactggattaagaaaatttggcac

SEQ ID NO: 8392 - DNA, 201 bp, Homo sapiens
aagatactctgcgagaagagcaaccccaagacacataattgtcagattcaccaaggttgaaacaaacgaaaagatgttaaggcagccagagagaaaggtcragttacccacaaagggaagcccatcagagaacagacctctcggcagaaaccctgcaagccagaagagagtgggggccaatattcaacattcttaaagaaa

SEQ ID NO: 8393 - DNA, 201 bp, Homo sapiens
ttctccccatctactaaagggactcctacattttcagagaccttcactccctctttggtaacagcagcaatatcttggggttgggttatctagaaaggatrtaagtgttattactgaacccagacttgtagtttgtagtcaataatgaacttccactttccaacaatactatcctcttcctcctgcacacacaccaagaaa

SEQ ID NO: 8394 - DNA, 201 bp, Homo sapiens
cattccatcctttctagtggatcctataaatcagtggtccccaacctttttggcaccagggaccagtttcataaagacaattttcccacagagggggatgrttttgggatgatccaagcacattacatttattgtgcactttattattattacattgaagtatataatgaaacaattataaggtactcaccataaggtaga

SEQ ID NO: 8395 - DNA, 201 bp, Homo sapiens
ccccgcgcgcacagcagcccggccgagcctgggcgccaagcctgggccgggctccacatggctccccttggccccagggaactgtcgcccctgggttccgmcgcggctgtcctctcggccctctgctggcgcatcagcacagtggttttccgaggcaggggttgggtccagcctgtgctgcttctgagccgcaggaagtcg

SEQ ID NO: 8396 - DNA, 201 bp, Homo sapiens
ctctattatttataaattacccagtttgtggtattttttatagtagcacaaatggactaagaaaactgctgtctcttcctcttcttctcaggacatcagcrctgtggcattaggtccctgtcctcatggcctcatttaaccttaattacctgttcaaagtcctcatcccaaaatacagtcacattggggattagagcttca

SEQ ID NO: 8397 - DNA, 201 bp, Homo sapiens
gggtttctctcctgtgtgggttctctgatgtactgtgagggatgacttgtggtaaaaagttttgctgcattcattatatttatgaagtttctctcctgagytctttgatgtttagtaagtgctgatttctggttaaatgttttgctgcattgaatacatttatatggcttctctttttatgtcttttttgatgtacagtaa

SEQ ID NO: 8398 - DNA, 201 bp, Homo sapiens
ccacattcattacattcacagggcctttctccagtatgagttctctgatgataagtgaagtctggcttttgtgagaatgttttcccacattcgttacattmatagggtcttacacctatgtgtatcctttgatgtactatgaggaatgaattgtaaacaaaggtttttccacattctttaccctcatgggatttctcccct

SEQ ID NO: 8399 - DNA, 201 bp, Homo sapiens
ttctttctttgtgcaattgtcatcatagaaattacatctttttgtacacccattaacactgtgttataattattactttattgcattgacttttaaatcaraaatgagaaaaaaaagaaaaaacattataccatattttatatttacctatgaggtgcttgtatttcttcgtgtggatttgacctactacctagtgtcctt

SEQ ID NO: 8400 - DNA, 201 bp, Homo sapiens
cgaacacacagaatctgaaaaaaatccaatgcaaacagaatagatttcttgggatctaatattttttaattgcctgacaacctaccctctaagaaaatctrtttaaggggggcaaattattttcgaaagatgagtataagaggcagttggaggaaggtaaggaaaattaccactacatattgcagaaacatactggaaggc

SEQ ID NO: 8401 - DNA, 201 bp, Homo sapiens
gatgtactatgaggaatgaattgtaaacaaaggtttttccacattctttaccctcatgggatttctcccctgtgtgagttctctgatgtacttggagataygacttctcacagaattttttcccacattcactacactcattgggtttatcacctgtgtgtgttctctgatgtactgatgtactgtaaggactgacttata

SEQ ID NO: 8402 - DNA, 201 bp, Homo sapiens
aagctttcccacactcaaggtattcaaaaatttgcttcagagtttgaatatcctgatgctgaaataagtcctcattctaacagatggctttctcatttctrtcacactcaaaatgtttctctctggcataaggatgctcatgtcatatgaaggagcaatttcgcatgtgcactgagctcatcaagcttccttccaaaggag

SEQ ID NO: 8403 - DNA, 201 bp, Homo sapiens
gttttctgtgtgaataaatgtaaaagagtactcacaacccaggccatacaatcaacaaagaaatatctactgcatcttacctagtaaaggaaggaagagtraaagagggatctttctctctgggggtagaaaaatttaagtggaaaaaaaaactagtcaagaacttaatctggtcaggtatcagataatcaggtattagat

SEQ ID NO: 8404 - DNA, 201 bp, Homo sapiens
ataaaaattatgacatactttggtgatagcaaatgaaaataaacttaattttaagttttgcttgggacagaaaaagaataagaaggcaagaagcaagaagrgcagatcatttgtgtgtccctacagttatcttgcagtttaccatcattgctaccaacagattttattttcttctttaaaatgagaaaatgccacagattc

SEQ ID NO: 8405 - DNA, 201 bp, Homo sapiens
gaactagacaactgtctaatgtaagagcatacattttggatccagaaagtcttggatttgaacctttgctccactttgactccttattttctgtgggtttytgggcaagttacttaacctagttggagtgccttgggcttggagtccagagtaggtctttcttttccaagaattgacaagtgtttacacttggtcagaact

SEQ ID NO: 8406 - DNA, 201 bp, Homo sapiens
ctccaataataagccaattatttggaggacctcacttttttggggggggcggggggaaggagtctcgctctgtcgcccaggctggagtgcagtggtgtgayctctgctccctgcaagctctgcctcctgggttcacaccattctcctgcctcagcctcccgagtagctgggactacaggcacccgccaccatgcccagcta

SEQ ID NO: 8407 - DNA, 201 bp, Homo sapiens
ctatctcttcccagtaattctggccagcctgcctagtttttcttgattttactgattatactccttttatgttttcaggccactaacctccctagctttgycatagtccgagatggcgactgtaatcaatacatctcattcaacacaagctacagatgtgatggaaaaacttgttttactattaccgtaacctttcaggaa

SEQ ID NO: 8408 - DNA, 201 bp, Homo sapiens
gaaggccgaggtaggcggatcacctgaggtcaggagttcgagaccagcctggccaacatggtgaaactccgcctctacttaaaaaaaaaaaaaaaaattasctggacatggtggcaggtgcctgtaatcccagctacttgggtggctgaggcaggagactagcttgaacttgggaggtgcaggttgcagggaggcagaggt

SEQ ID NO: 8409 - DNA, 201 bp, Homo sapiens; identical to SEQ ID NO: 7462

SEQ ID NO: 8410 - DNA, 201 bp, Homo sapiens; identical to SEQ ID NO: 7464

SEQ ID NO: 8411 - DNA, 201 bp, Homo sapiens; identical to SEQ ID NO: 7467

SEQ ID NO: 8412 - DNA, 201 bp, Homo sapiens; identical to SEQ ID NO: 7470

SEQ ID NO: 8413 - DNA, 201 bp, Homo sapiens; identical to SEQ ID NO: 998

SEQ ID NO: 8414 - DNA, 201 bp, Homo sapiens
aagagaaacagagagagcctctattgtcccagaatacatatgtcaacatgaacacaatgttcatagatatgtggatgtgaaaggccattctggtgaggcckaaacagaaatgaggaccgtgttactggaaactggaggaaaggcaatccttgttataaggtggcaaagctggctgagttgtgttctagttttgtggaaagt

SEQ ID NO: 8415 - DNA, 201 bp, Homo sapiens
ctatagaaccaaagcccacttgagagaacttgaatagtcctattaaattgaatttttagctgataaccttcccccaaagaaaagtcatgagaccaacattrcccagataccaaagccaaaaaggacatcataggaaaaactcatagatcaatatctcttaatatagatgtaaaaatcctttttaaaataccaagttgaaca

SEQ ID NO: 8416 - DNA, 201 bp, Homo sapiens
gatggcacccaggcgctaagctgtacttgtgcagtcttaacatctgagctccctctcctggacccactgagcacgaggcagggggcacacattagacaagyaataatggtttgttcaaggcttagttccactcttccagatatagataattctacccacttatagatgaagagatagaggctccaatgggaggagaaaagg

SEQ ID NO: 8417 - DNA, 201 bp, Homo sapiens
catctacaggagcaaagtggggagtagaactgtggctactccatcatgagtaaatgttcctgacaagaaatgctaaaaatccttcacggcaaagtgaaagyacaccagacagtaactcaaatccaaatgaaaaggaaaagaacactggtaaaggtaatcacacaggcaaacataaaagtcagtattcatgcatttttgaca

SEQ ID NO: 8418 - DNA, 201 bp, Homo sapiens
caggtgcactggctaggggttttgcatggggaaagcagttgagctacattctccagcaggagaggctggtaccaaatgctcctgctattttttcatcagcycctgggttgtgggctacaacagatttgcaccttcatgctcttagacaccaggagagcacgctgaacagaagcaggggaagcaacagcacaagtgccaggc

SEQ ID NO: 8419 - DNA, 201 bp, Homo sapiens; identical to SEQ ID NO: 1079

SEQ ID NO: 8420 - DNA, 201 bp, Homo sapiens
cccagacttgatggaggcttggctgcccaccctgctgctacttcgtgactataagattcctacattgattactgtttacaggttttgacctcatcctattkgtgatacttccctgactttacatctctctttatatagatgagctcatttttgcccccctcttgctcatctaccttctggtgaggatgttcttttccgcat

SEQ ID NO: 8421 - DNA, 201 bp, Homo sapiens
aacctggcacaattcagcttagtgcccacaggggcctctaccatgacttctgggaggagcaagtagagaccgggcagacacaccatccagatttggtggcrgcattccatccaggtaagagtcattggttcaggggaatagagggtggctcccctgagaattttccatcctgaatcttctgtctttggaaccccattcatt

SEQ ID NO: 8422 - DNA, 201 bp, Homo sapiens; identical to SEQ ID NO: 1082

SEQ ID NO: 8423 - DNA, 201 bp, Homo sapiens
agtagagtaatttttcttctctctcttctacagccatcaggagttggtatcctctttgcagattctggtggaactggatacacacatcactgcctttgggkctaatcctttcatgtccctcaaacctgaacaggtctattccagtcccaacaagcagccagtatactgcagtgcatactatatcatgtttcttggaagctc

SEQ ID NO: 8424 - DNA, 201 bp, Homo sapiens; identical to SEQ ID NO: 1084

SEQ ID NO: 8425 - DNA, 201 bp, Homo sapiens
gtctggttggcagggcacacttaatcactgagactcagcatttcagcagtttgcaaaggaaagtgatatgaagggacagctgcaagtaagccacaacctasatctgaagagatcaagcactcatttcacttggaggaaagagagaaggaaggaagctgaggacttagcagggtaagtttttttttccgtcaacctgtctgc

SEQ ID NO: 8426 - DNA, 201 bp, Homo sapiens
cctgtagtctcagctactcgagaggctgaggtgggagaattgcttgaacccaggaggcagaggttgcagtgagccaagattgcacactgcactccagcctrgatgacagagcgagactctgtctcaaaaaaaaaaaaaaaaaaaaaaaagcaatgaccttctactacaacctcattccaagaggaaagatctgaaagtttt

SEQ ID NO: 8427 - DNA, 201 bp, Homo sapiens
ctgtattagccgggcatgatgactcatgcctgtaattccagcaccttgggaggccgaggcaggtggatcacatgaggccaacctggccaacacagcaaaaycctgtctctactaaaaatacaaaaattagcctggtgtggtggcacacacctgtagtctcagctactcgagaggctgaggtgggagaattgcttgaaccca

SEQ ID NO: 8428 - DNA, 201 bp, Homo sapiens
tctctcttctacagccatcaggagttggtatcctctttgcagattctggtggaactggatacacacatcactgcctttgggtctaatcctttcatgtcccycaaacctgaacaggtctattccagtcccaacaagcagccagtatactgcagtgcatactatatcatgtttcttggaagctcctgtcagctggataatagg

SEQ ID NO: 8429 - DNA, 201 bp, Homo sapiens; identical to SEQ ID NO: 1087

SEQ ID NO: 8430 - DNA, 201 bp, Homo sapiens
ctggcttttcacagagcacctcaacttcacccctggaacctggcacaattcagcttagtgcccacaggggcctctaccatgacttctgggaggagcaagtrgagaccgggcagacacaccatccagatttggtggcggcattccatccaggtaagagtcattggttcaggggaatagagggtggctcccctgagaattttc

SEQ ID NO: 8431 - DNA, 201 bp, Homo sapiens; identical to SEQ ID NO: 1080

SEQ ID NO: 8432 - DNA, 201 bp, Homo sapiens
tatttgtgatacttccctgactttacatctctctttatatagatgagctcatttttgcccccctcttgctcatctaccttctggtgaggatgttcttttcygcatatggcttttttatccccttggaacagtcctttgctagttaatggaatatttaatgagacatttgggagggaaagatagcccttgcctagtccagcc

SEQ ID NO: 8433 - DNA, 201 bp, Homo sapiens
gatagagagtaaggtatcactctgtctggcagaataattatattcccaatccctcctgccttgtctgccaaatgtagtccccaaaattggtgcatcagctstcattcctctccctaccttccttacccattcaccatcctaggtgcaggaatatcagttcctttcctccgataaccccaatcatatttatagtataagaac

SEQ ID NO: 8434 - DNA, 201 bp, Homo sapiens
ctcattaaacacaatatgatgacaacttttctttttttttttttctttttttttttttgagacggagtctcgctctgtcgcccaggctggagtgcagtggygcgatctcggctcactgcaagctccacctcccgggttcacgccattctcctgcctcagcctcccgagtagctgggactacaggcgcctggctaatttttt

SEQ ID NO: 8435 - DNA, 201 bp, Homo sapiens; identical to SEQ ID NO: 1086

SEQ ID NO: 8436 - DNA, 201 bp, Homo sapiens
atgtccacgtaacttttttcaggaggttgtgttgttgtgtgtttaggggtgcgtgttggccgacaggtgagacagattcttaccctgcctgggcggagctrtcagtaatgtgtaaaactgaaggcctctaagtgactgtgccgcgtgtggctgagaaacacacacaggtccgtctccccgggaatggccaccgtgagggct

SEQ ID NO: 8437 - DNA, 201 bp, Homo sapiens
ctaagaccctggatctcgggcctgctggtccatctcccccaaggccaattaaggtgacagcaaaagaattaaaaaggcaaaaccccttaggggcaaagagaaggagagaggcgaaaactggggggctcgggaatggaggcccaggtttcctgggtacgggcgtctggagggctgaaacggacctggggcggccttcatggg

SEQ ID NO: 8438 - DNA, 201 bp, Homo sapiens
gggacgagacctgctttgatcctggctgagctcagttttctcatctgggagatgggcacgcctctttcatgaaggcggagggaatagtgtgcagaggcctygtgggctccctgacccttccccaagagctggcgtggggagcctctgcctctgttggggaaggacccgcgatctgctgtgggctgagttgtttccccccaa

SEQ ID NO: 8439 - DNA, 201 bp, Homo sapiens
gggataggtaggggctgaggcagatgaggtggcactgggagcaaggaggagacaggcgtggccaggaggggactgtggcttttagtgattttttttttttttaagacagagcttcactcttgttgcccaggctggagtgcaatggtgcgaccttggctcactgcaacctctgcctcccgggttcaagcatttctcctgcct

SEQ ID NO: 8440 - DNA, 201 bp, Homo sapiens
acggccgccctgggctccgtccgcggctctgcaaatccttgggccacggacaccagcacgaatgagtccaggacctgtgtggggggcccaccctgcccccsttggtcctgtggtccaggggtccccagggagcagttggggaagcagcgggggttggggctctggcccctgctctggccctgggtgcccaccgccttcccc

SEQ ID NO: 8441 - DNA, 201 bp, Homo sapiens
gcccccgcccgcccgctccggtgcgtctgtgaacgggcgggtttgctggcgagcgttctggcctccaccactccgggtgcagcagatgcggggccttcccrgtcacaggaccctgggacgctgggaggcagtgttggctccgcacctctctcggagcctgacggcctggctggggctgccccgtcgggtccccgcagcgcg

SEQ ID NO: 8442 - DNA, 201 bp, Homo sapiens
ccctcacccttccgttcatccaccgcctcctctgaggccatctgcgggccccgggcctgcacctgtgtgggatgaggccctgttacctcccctggagaccrccgtcagggccggggagcgcatgggaccctgggttcgcctcagcacagagctgactctccctgcacaggcacccacaggcttctacagcctcttctccac

SEQ ID NO: 8443 - DNA, 201 bp, Homo sapiens
cctttttatgcagccttgcgtaagcagactgaaggagaagggtgaccctcgtaagtgtagataagggttttgcatcaaaaacactcccaggggccaggcgyggtggctcacgcctgtagtcccagcactttgggaggctgaggcgggtggatcacctgaggtcaggagttcgataccagcctgaccaacatggggaaaccc

SEQ ID NO: 8444 - DNA, 201 bp, Homo sapiens
acaccagcacgaatgagtccaggacctgtgtggggggcccaccctgcccccgttggtcctgtggtccaggggtccccagggagcagttggggaagcagcgrgggttggggctctggcccctgctctggccctgggtgcccaccgccttcccccgggggtgctggcccagccctctgtgggtcagagcccactgtgccggac

SEQ ID NO: 8445 - DNA, 201 bp, Homo sapiens
ccttatcacgtcccccgccctgcctgcagctgagcacaggcagatgtgggtggaatctgagaccagagacggttgggctggagggggtggccccatctcakctgcccccggacgccagaaggccaccaggagacagactcatggcagagggacggaggccccagtgcgtggtgggtgggcgtggcctctcaggacacgcct

SEQ ID NO: 8446 - DNA, 201 bp, Homo sapiens; identical to SEQ ID NO: 1092

SEQ ID NO: 8447 - DNA, 201 bp, Homo sapiens
ttttctttttcttttctttttcttttttttttcctttttccttgccttttattttctttcttttcctttccttttcttttcttttctttcttttctttttyttttttggaaacagggtcttgctctgtcacccaggctagaatgcagtggcccaatcttgggtcaccgcagccttgacctcctgggctcaagcggtcctcc

SEQ ID NO: 8448 - DNA, 201 bp, Homo sapiens
cagatgtgggtggaatctgagaccagagacggttgggctggagggggtggccccatctcagctgcccccggacgccagaaggccaccaggagacagactcrtggcagagggacggaggccccagtgcgtggtgggtgggcgtggcctctcaggacacgcctgcgggaggtgccatggggtctctgaggggagctgaggccg

SEQ ID NO: 8449 - DNA, 201 bp, Homo sapiens
ggtctctgaggggagctgaggccgtgggctggccctttctgctgtccgtgggcggtcagaggactgacccaggcggggtgctgtgctgatagcaggtgccyggacccgtggacatgcaggtcaccacagcgcgtggggtctggtctgggcggccgggctcttctacactcactgccgcggggtctgatgctgctggcaggt

SEQ ID NO: 8450 - DNA, 201 bp, Homo sapiens
cgtcctcccgtcggccggcgcgggggtgtcagctggggagccgtcctggggacagatggtggagccgtcctggccgcctctgcctggacaccctcaggccraccccacagagttcctgagccctcccaggcacgttttggggagggtggctgggggggaagccagtgtgggcaccaggctctggtgctgggcagggaccat

SEQ ID NO: 8451 - DNA, 201 bp, Homo sapiens; identical to SEQ ID NO: 1091

SEQ ID NO: 8452 - DNA, 201 bp, Homo sapiens
agagatagtgtctcaccacgttggccaggctggtctcgaactcctgacctcaaatgatccacctgcctcggcctcccaaagtgctgagatgacagccggcygggttttgttttgcatgagctgcttttgttacatttctcccagggaatctgacattgctgatgctgttgtaagtgatttttgaaatggccatttctgttt

SEQ ID NO: 8453 - DNA, 201 bp, Homo sapiens
ttctgtgtaatcaatcacattgtcggccggtcctgatgtttctgttttccttctgcattggatgccacctgcttgggacggctccaggccgggctgtggcrtccttacgtgctgccctgagcaccacgtctcacgctcgcccatggcttttacccagttcagggcgctccctgcccgtcccaggcgagttatttcttaaat

SEQ ID NO: 8454 - DNA, 201 bp, Homo sapiens
ctggtcatgaactcctgacctcaggtgaactgcccgcctcagcctcccaaagtgctggcattacaggagtgagccactgtacccggctctcattttctctkgccaccaccatgtaagaagtgcctttcgcctcccaccatgattctgaagcctccccagccacgtggaaccataagtccaattaaacctctttttgttccc

SEQ ID NO: 8455 - DNA, 201 bp, Homo sapiens
caggccgggctgtggcgtccttacgtgctgccctgagcaccacgtctcacgctcgcccatggcttttacccagttcagggcgctccctgcccgtcccaggygagttatttcttaaattttgagctgaactgaattttagaacacttgctctgtgtctaccgaaagggccacgtggttctctcctccgttccggtcctgggc

SEQ ID NO: 8456 - DNA, 201 bp, Homo sapiens
ccttacgtgctgccctgagcaccacgtctcacgctcgcccatggcttttacccagttcagggcgctccctgcccgtcccaggcgagttatttcttaaattktgagctgaactgaattttagaacacttgctctgtgtctaccgaaagggccacgtggttctctcctccgttccggtcctgggctgaatcataaccttggac

SEQ ID NO: 8457 - DNA, 201 bp, Homo sapiens
ggccacgggccacagggaaggaacagggtgggtgctgccgcagctggcaggtgtgttgtgtgtgtgccagacagaggtgggggagggttcccggcccccckggtccagaggagccccaggcattgcgggtcagtgggagggacttcccggcgggctgtgcgatagcccctgcacctgcctctccctcccacggctgttatc

SEQ ID NO: 8458 - DNA, 201 bp, Homo sapiens; identical to SEQ ID NO: 1093

SEQ ID NO: 8459 - DNA, 201 bp, Homo sapiens; identical to SEQ ID NO: 1095

SEQ ID NO: 8460 - DNA, 201 bp, Homo sapiens; identical to SEQ ID NO: 1094

SEQ ID NO: 8461 - DNA, 201 bp, Homo sapiens
cacgtccacctggttcggggtttccaggcggcgcttgagccttccttgggaaattcagagtcccacagacggcattaaactgcagctgggcaccagggccrgcggtcggcgaggcggggcggggcggggcagggaggccggccctctggcagaggcagcagctccaggaatcaccagggccggcgggcggtggggtggggc

SEQ ID NO: 8462 - DNA, 201 bp, Homo sapiens
cctgcctcagcctcctgagtagctgggattacaggcacccaccaccatgcttgggtaatttttgtatttttagtagagacggggtttcgccatgttggccmggctggtctcgaactcctgacctcaggtgatctgcccgcctcggcctcccaaagtgctgggattacaggcatgagccactgtgccgggtctgttactttt

SEQ ID NO: 8463 - DNA, 201 bp, Homo sapiens
gacagagtctcgctctgtcacccaggccggagtgcaatgtcgcaaccttggctcactgcaacctccacctcccaggttcaagtgattctcctgcctcagcytcctgagtagctgggattacaggcacccaccaccatgcttgggtaatttttgtatttttagtagagacggggtttcgccatgttggccaggctggtctcg

SEQ ID NO: 8464 - DNA, 201 bp, Homo sapiens
gggctgctctgcacctgcagctgaaagatgaggcccagctcccagggctgagcgtggttgaagtgctgctgggcggactcagctggatgggcggccacggrccacagggaaggaacagggtgggtgctgccgcagctggcaggtgtgttgtgtgtgtgccagacagaggtgggggagggttcccggccccccgggtccaga

SEQ ID NO: 8465 - DNA, 201 bp, Homo sapiens
gggtttctccatgttggtcaggctggtctcaaactcccgacctcaggtgatccgccctcctcggcctccccaagtgctgggattataggaatgagccaccrtgcccggcccagaatggctgtatgtactgaatacctgtacccccattgtatctaggaagtaactaacttgcttttgattttacaggctcataggcggaag

SEQ ID NO: 8466 - DNA, 201 bp, Homo sapiens
ctggggagccgtcctggggacagatggtggagccgtcctggccgcctctgcctggacaccctcaggccaaccccacagagttcctgagccctcccaggcaygttttggggagggtggctgggggggaagccagtgtgggcaccaggctctggtgctgggcagggaccatgattcagccccccagagagaagcagcccagct

SEQ ID NO: 8467 - DNA, 201 bp, Homo sapiens
gccggagagcgggtctgggaggtccctcggtgtcagctccaagccccacccgcccttctcggaccccgtgcccctgcgtggtatccctgagttggggtgcrtggggtgctgtgtgctgagtggggtgtgtcccccagggctctcccaggcaccctgtcctctcactgctgagccctggggctcacagagctcgcttgtctt

SEQ ID NO: 8468 - DNA, 201 bp, Homo sapiens
agggtttctccatgttggtcaggctggtctcaaactcccgacctcaggtgatccgccctcctcggcctccccaagtgctgggattataggaatgagccacygtgcccggcccagaatggctgtatgtactgaatacctgtacccccattgtatctaggaagtaactaacttgcttttgattttacaggctcataggcggaa

SEQ ID NO: 8469 - DNA, 201 bp, Homo sapiens
cacagacgccccattcccctcggccccaggcaacggtcaccgtcacccgcaaaccccgtacccctcacacagacgcccccattcccctcggccccaggcawcggtcaccgtcacccacaaaccccgtacccctcacacagacgccccattcccctcggccccaggccccagtcaccgtcacccacaaaccctgtacccctc

SEQ ID NO: 8470 - DNA, 201 bp, Homo sapiens
gggctcacagagctcgcttgtcttcttcgttcagacagaagccgcccctggacatcctgtttttcttctgttgtatgaacaggaagccagcaattgtgtgrgatgagtgtcagcatggccgtgtctgagcccggcacggcagacacttgtcccgccacacctgccatgggtccctccagctctggcccgagagactcaggg

SEQ ID NO: 8471 - DNA, 201 bp, Homo sapiens
ccctgtgctgtgtgcagtctagggacttggtgccccatgtcccagacactccagccgtggctgaaagaggccaacatagagctcgggctgtggcttcagarggtggaagccccaagccttggcagcttccacgtggtgttgagcttgtgggtccacagaagtcaggaaatgaggtttgggaacctctgcctagatttcaga

SEQ ID NO: 8472 - DNA, 201 bp, Homo sapiens
tggatgaggcaagtgagtaggactgagggtgaggggacccatgaccgatgagagacggtgctgtgctggggttgtgggccgctgtgttgatagagcaagggctccgtgccagatgctggacctccgggagccccttcacctcactccccagacacgggcggtcctctgcggcgagccgaggtggagggcacacgctgtccg

SEQ ID NO: 8473 - DNA, 201 bp, Homo sapiens
ggctggccctggaatggctggggcgggcaccgtggagtgtccatcgtgcaccggccatggcctggaaggagacccaggcggtcactgccctggggctcagygttgaggccacagtgaagcgacaggggcagaagggcaggggccgggggccaggcagggagcgggggccgagggccaggcagggaacagaggcgctgaggg

SEQ ID NO: 8474 - DNA, 201 bp, Homo sapiens
gttcctgaggacagaactgagggcgtggagggcaggacaccatcgggaagccacatgcagaagggtggccacggagcccccaggggaccacaccatgtccrtcctgctgggatccggccacggccccggggtctccccagaagatgctggcactcgagtcagggggcatcagatttctcagcaacccctgaggctagaaga

SEQ ID NO: 8475 - DNA, 201 bp, Homo sapiens
acgggcggatcacgaggtcaggagttcaagaccggcctgaccaatatggtgaaaccacatctctactaaaaatacaaaaattagccgggcgtggtggcacrcacctgtaatcccagctactcaggaggctgaggcaagagaatcacttgaaccagaaaggcagaggttgcagtgagccgagatcacaccactgcactccag

SEQ ID NO: 8476 - DNA, 201 bp, Homo sapiens
tcggcgaggcggggcggggcggggcagggaggccggccctctggcagaggcagcagctccaggaatcaccagggccggcgggcggtggggtggggcgggtwggccggccctctggcagatgcagcagctccaggaagcctgccggcctgggttccctttccctccacatccgccgctcctccccatcttgctgggctccgg

SEQ ID NO: 8477 - DNA, 201 bp, Homo sapiens
ccacagccacgcacagccaggcttccagtggaggtgcagtgtgcgtgtgtcatggggacgtggatgcgcctgtgccacagggacagtctgtgtatgtcacrgggatgtcggtgtgcacgtgttacgaggatgttggacgcgtgtcacggggacatggttgcctgtgtgtcttggggatgtgtcttggggacgcgggtgcac

SEQ ID NO: 8478 - DNA, 201 bp, Homo sapiens
ggctttttcctggacagaccagccgggaggagacgcgttcgggtctgcatcttctggggcccctcaggtcactcacagtggggccccactcctggggtgcycccaacccatttccaagcagatgactagtgcctcactttcagatatgcatagcagtccccacactgccatggaggggagaggggtcagcgccggggatcc

SEQ ID NO: 8479 - DNA, 201 bp, Homo sapiens
gtcggcgaggcggggcggggcggggcagggaggccggccctctggcagaggcagcagctccaggaatcaccagggccggcgggcggtggggtggggcgggktggccggccctctggcagatgcagcagctccaggaagcctgccggcctgggttccctttccctccacatccgccgctcctccccatcttgctgggctccg

SEQ ID NO: 8480 - DNA, 201 bp, Homo sapiens
ctgggaggccgggcttagggaagcggaggctgggaggccggggttagggaagcggaggctgggaggccggggttagggaagcggaggctgggaggccgggsttagggaagcggaggctgggaggccggggttagggaagcggaggctgggaggccggggttagggaagcggaggctgggaggccggggttagggaagcgga

SEQ ID NO: 8481 - DNA, 201 bp, Homo sapiens
ctgggaggccggggttagggaagcggaggctgggaggccgggcttagggaagcggaggctgggaggccggggttagggaagcggaggctgggaggccgggsttagggaagcggaggctgggaggccgggcttagggaagcggaggctgggaggccggggttagggaagcggaggctgggaggccggggttagggaagcgga

SEQ ID NO: 8482 - DNA, 201 bp, Homo sapiens
ctgggaggccagggttagggaagcggaggctgggaggccagggttagggaagcggaggctgggaggccggggttagggaagcggaggctgggaggccgggsttagggaagcggaggctgggaggccggggttagggaagcggaggctgggaggccggggttagggaagcggaggctgggaggccgggcttagggaagcgga

SEQ ID NO: 8483 - DNA, 201 bp, Homo sapiens
ggcgggctgtgcgatagcccctgcacctgcctctccctcccacggctgttatcttatctccacaggccaggaccccctcctgctcctgcaggccctgcagrccctgtggtccacgcgggagcggaagcaggtgagtggacgtggcagccaccacgtgccaagtcacagccagcagaactgactgttgggcagagactggcc

SEQ ID NO: 8484 - DNA, 201 bp, Homo sapiens
caggcattgcgggtcagtgggagggacttcccggcgggctgtgcgatagcccctgcacctgcctctccctcccacggctgttatcttatctccacaggccrggaccccctcctgctcctgcaggccctgcagaccctgtggtccacgcgggagcggaagcaggtgagtggacgtggcagccaccacgtgccaagtcacagc

SEQ ID NO: 8485 - DNA, 201 bp, Homo sapiens
tcaggtgaactgcccgcctcagcctcccaaagtgctggcattacaggagtgagccactgtacccggctctcattttctctggccaccaccatgtaagaagygcctttcgcctcccaccatgattctgaagcctccccagccacgtggaaccataagtccaattaaacctctttttgttcccagtttcaggtatgtctttat

SEQ ID NO: 8486 - DNA, 201 bp, Homo sapiens
acaggagtgagccactgtacccggctctcattttctctggccaccaccatgtaagaagtgcctttcgcctcccaccatgattctgaagcctccccagccaygtggaaccataagtccaattaaacctctttttgttcccagtttcaggtatgtctttatcagcagcgtgaaaatgaactaatatgggggttaggaagagaa

SEQ ID NO: 8487 - DNA, 201 bp, Homo sapiens
ctgaaacggacctggggcggccttcatggggtgctgccagaccctgcggcccccgaccctcggagaccctgggccagggtgtgctggctgctgctgctgctgggctgggggtggggagggctacagaggaacggggtctgcagctccctgcctgtgcccccaaactcagtggctggcaggtgcggctgggagggctttttc

SEQ ID NO: 8488 - DNA, 201 bp, Homo sapiens
gccggtctttcccatgctgttctcatggtagtgaatatgactcacgagatctgatggctttatcagggtttccacttttggttcctcattttctcttgctrccaccatgtaagaagtgcctttcgccttccaccgtgattctgaggcctccccagccatgtggaaatgtgagtccaattaaacttgtttttgttctgagtc

SEQ ID NO: 8489 - DNA, 201 bp, Homo sapiens
gctgaaacggacctggggcggccttcatggggtgctgccagaccctgcggcccccgaccctcggagaccctgggccagggtgtgctggctgctgctgctgctgggctgggggtggggagggctacagaggaacggggtctgcagctccctgcctgtgcccccaaactcagtggctggcaggtgcggctgggagggcttttt

SEQ ID NO: 8490 - DNA, 201 bp, Homo sapiens
agaccctggatctcgggcctgctggtccatctcccccaaggccaattaaggtgacagcaaaagaattaaaaaggcaaaaccccttaggggcaaagagaaggagagaggcgaaaactggggggctcgggaatggaggcccaggtttcctgggtacgggcgtctggagggctgaaacggacctggggcggccttcatggggtg

SEQ ID NO: 8491 - DNA, 201 bp, Homo sapiens
tgtcctcacccacatctcaacttgaattgtatctcccagaattcccacctgttgtgggagggacccagggggcagtaattgaatcctggggccggtctttyccatgctgttctcatggtagtgaatatgactcacgagatctgatggctttatcagggtttccacttttggttcctcattttctcttgctgccaccatgta

SEQ ID NO: 8492 - DNA, 201 bp, Homo sapiens
agcagaggggcccagagaccggcccggacgcgcggcggtcggcgtggggtgcccgggactggctgctccgcaggccgcccccgcccgcccgctccggtgcstctgtgaacgggcgggtttgctggcgagcgttctggcctccaccactccgggtgcagcagatgcggggccttcccggtcacaggaccctgggacgctggg

SEQ ID NO: 8493 - DNA, 201 bp, Homo sapiens
cacaacctgtgcacctcttctggtttcagaatggttcatcgcttcagaagcaaaccccgtacccctcacacagacgccccattcccctcggccccaggcawcggtcaccgtcacccgcaaaccccgtacccctcacacagacgccccattcccctcggccccaggcaacggtcaccgtcacccacaaaccccgtacccctc

SEQ ID NO: 8494 - DNA, 201 bp, Homo sapiens
taagaccctggatctcgggcctgctggtccatctcccccaaggccaattaaggtgacagcaaaagaattaaaaaggcaaaaccccttaggggcaaagagaaggagagaggcgaaaactggggggctcgggaatggaggcccaggtttcctgggtacgggcgtctggagggctgaaacggacctggggcggccttcatgggg

SEQ ID NO: 8495 - DNA, 201 bp, Homo sapiens
aggggctcttcggagagcctagggcctttctcaagcctcctaagctgggtgggactcaaccttctccagctttcacgggcttggtctggatctgtcctccrgctttcgtgggcttggtctggatctggcgagaggctctggagcaggccttcctctcagcatggtcttcggctgtggccgtctggtcctggttgtgtgttg

SEQ ID NO: 8496 - DNA, 201 bp, Homo sapiens
ctgttcctacagatcgagaccctgcaagttgaagactgggccagggttagggaagcggaggctggaaggccgggattagggaagcggaggctgggaggccrgggttagggaagcggaggctgggaggccagggttagggaagcggaggctgggaggccggggttagggaagcggaggctgggaggccgggcttagggaagc

SEQ ID NO: 8497 - DNA, 201 bp, Homo sapiens
aggtaattagatacacatttatttatttatttatttttatttattttttgagatggagtctcgctctgtcgccctggctggagtgcaataatgtgatctckgctcactgcaacctccacctcctgggttcaagcaattctcatgtctcaggctcctgagtagctgagtttataggcgccggccaccaagcctggctaattt

SEQ ID NO: 8498 - DNA, 201 bp, Homo sapiens
cccaacttcttggagatactacatcaacatatttaacttgaatacagaattatatgaaagtcactaggctgggtgcagtggctcatgccaaggaaggaggwttgcttgaggccaggagttcaagaccaacctggccaacatagaaagactccatttctaaaaaagtgaaaaaaatttaaaaagtcactagctaacaggtaa

SEQ ID NO: 8499 - DNA, 201 bp, Homo sapiens
ttctcagccagccatcacttatggaaaatagaaagaatctacattgaaatattgagggctgtttcccccgatatttttccttccttctttcttttctttcycttttttctctctctttcttctttctttctctctccttcctttccttcccctccttctcttctcttctctttctttttttcagagtcttgctctgtctca

SEQ ID NO: 8500 - DNA, 201 bp, Homo sapiens
cagaggcccagctgtaaaattcctctctttgtactctttcctttatttctcagccagccatcacttatggaaaatagaaagaatctacattgaaatattgrgggctgtttcccccgatatttttccttccttctttcttttctttctcttttttctctctctttcttctttctttctctctccttcctttccttcccctcc

SEQ ID NO: 8501 - DNA, 201 bp, Homo sapiens
aaaccagagtttcaatttctcagagaatgtgaacaaagggaaacatgccctgcttgagaataaatataaagttcttgccgttaaaatgctgggtagaacawgtagttgaattgtaaagtacagacacttttactctacccatctgagaaacaagaacaatccattcattgtacagcataacaaagtgcttgatacttaaat

SEQ ID NO: 8502 - DNA, 201 bp, Homo sapiens
cgcagtgtacaatcatagtttagagggggctaatcaggactggaaagaagtatgaaaaacacaaggcacaaaatttgaagagaaaccagagtttcaatttmtcagagaatgtgaacaaagggaaacatgccctgcttgagaataaatataaagttcttgccgttaaaatgctgggtagaacaagtagttgaattgtaaagt

SEQ ID NO: 8503 - DNA, 201 bp, Homo sapiens
aagagtggaactaagccttgaacaaaccattattgcttgtctaatgtgtgccccctgcctcgtgctcagtgggtccaggagagggagctcagatgttaagrctgcacaagtacagcttagcgcctgggtgccatcatgttctgtggtctcagagtaacattctgttaaagagaaagggaaattgagagagattaggaacca

SEQ ID NO: 8504 - DNA, 201 bp, Homo sapiens
aatggtgtgaacccaggaggcagagcttgcagggagcagaggtcacaccactgcactccagcctgggcgacagagcgagactccttccccccgcccccccmaaaaaagtgaggtcctccaaataattggcttattattggagttagggctttggaaggaaggatacagatactgaaatcttgaaaacttaggcaaacacca

SEQ ID NO: 8505 - DNA, 201 bp, Homo sapiens
tcctcaggtctctcttcttcctctcttgccatgtgatgcgctggctcaccctttgccttccagcatcattggaagcttcctgaagccctcagcagaagctragcagatgctggcaccatgcttcctgtacagcctgcagaaccatgagccaagtaagcctcttttcataaattaccagcctcaggtgttcctttatggcaa

SEQ ID NO: 8506 - DNA, 201 bp, Homo sapiens
gccctcagcagaagctaagcagatgctggcaccatgcttcctgtacagcctgcagaaccatgagccaagtaagcctcttttcataaattaccagcctcagstgttcctttatggcaatgcgataatgggctaacacagtggccctgggctcaggattaacaaggctgtgctagcactaagcaatcatactggaaggctgaa

SEQ ID NO: 8507 - DNA, 201 bp, Homo sapiens
atttggtaccagcctctcctgctggagaatgtagctcaactgctttccccatgcaaaacccctagccagtgcacctgggctttgcttagtatggctgcttrccaagaagccagagggctaagcttgtaatggcacagcttgttggctcccacctgggccataaacaaaatgaccttcctggatgtggatcctaaccctgga

SEQ ID NO: 8508 - DNA, 201 bp, Homo sapiens
tttagtaatttataatttcctaaaaagcatccagtaattcaaggtcataagttacttgtgttgaacaaagtagctttttataactcttagtaatattctcyacatctttggttacttttccctgatttcttactttgtcttttttccatttcctatattttcctatttcccctttattagctctgttttatttttttgaac

SEQ ID NO: 8509 - DNA, 201 bp, Homo sapiens
atctaggcatattggatgcagaggtggaaggaaatcatgcatttctttttttttttgtgagtcagggtcttactctgttgcccgtgctggagtgcagtggygcaatcatagctcactgtagcctcaacctgccaggcctgagcgatcctcccacctcagccttctgagtagctgagactacaggtgagcaccaccacgcct

SEQ ID NO: 8510 - DNA, 201 bp, Homo sapiens
tatatatatatttgtgtgtgtgtgtgaatatatgtatgtatgtatgtgtgtatatatatatacacacatatatacacatatatatgtgtgtatatatatawaaatttgtactgatgaggtcttgctgtgttgctcagactggtcttgaactcctgaccttaagcaattcttccacctctgcctcccagagtgctggtttag

SEQ ID NO: 8511 - DNA, 201 bp, Homo sapiens
tagtctcagttttgggaggctgaagtgggaggatcgcttgagcccaggagtttgaagctgcagtgagctatgatcatgccactgcattccagtctggatgwcagagtaagagcctgtctgtaaaaacaaaacaaaaatcaagctatatggagtttgagaatcatatatgaaatgtgaacatgaaaccttagaatataaaag

SEQ ID NO: 8512 - DNA, 201 bp, Homo sapiens
tgaactggggcagcagacgttggagtgagcagagatcgcactattgtacttcagcctgggtgacaagagcgagactccatctcgaaaagaaaaaaaaaaaatgaaaaagtggggaaaggcaggtaaaaattagaaaaactggaaactcttaagtgaaaaagagaaaaccaatccagatattttagaaatcataatacagtt

SEQ ID NO: 8513 - DNA, 201 bp, Homo sapiens
gcgtcacgaagttctcgtgccatggttttcaactccatcaggttatttaaggtcttctctacactgtttattctagttagccatttgtctaatttttttttaacgtttttagcttccttgcgatgggtttgaacatcctcctttagctccgagaagtttgttattaccgaccttctgaagcctacttctgtcaactcgtca

SEQ ID NO: 8514 - DNA, 201 bp, Homo sapiens
ggcatgatcttggctcactgaaacctctgcctcctggttcaagtgattcttctgtctcagcctcctgggtagctgggattacaggtgtgtgccaccatgcycggctaattgtttgtatttttattttatttattattattatttttttttattgatcattcttgggtgtttctcgcagagggggatttggcagggtcatag

SEQ ID NO: 8515 - DNA, 201 bp, Homo sapiens
catatatcaaaagccaagacaggcctaaattaggcctcttgtgccgaacagcccaaatgtaaatgcaaaggaaaactttttttttcttttttttttttttkttttgagacaacgtctcactgtgtcacccaggctggagtgcagtggcatgatcttggctcactgaaacctctgcctcctggttcaagtgattcttctgtc

SEQ ID NO: 8516 - DNA, 201 bp, Homo sapiens
gatctttattctgccttttgtcctttgaagcatgtgatctttgtgacctactccctattcgtacaccccctccccttttgaaatccttaataaaaacttgstggttttgtggctcaagtggacatcacagtcctatcgatatgtgatatcacccccagaggcccagctgtaaaattcctctctttgtactctttcctttat

SEQ ID NO: 8517 - DNA, 201 bp, Homo sapiens
tgggtaacttgacctttctctctggctgccttaacatcttttcgtttgtttcaaccttggtgaatctgacaattatgtgtcttggggttgctcttctcgcrgagtatctttgtggtgttctctttatttcctgaatttgaatgttggtctgccttgctaggttggggaagttctcctggataatatcctgaatagtgtttt

SEQ ID NO: 8518 - DNA, 201 bp, Homo sapiens
gcttttttttcttttttcttttttctttttttaacaattaaaagtttgtggaaacccggcattgagcaaatctgtagacaacattttttttttttttttttgagacagagtctccctctgtcaccaggctggagtgcagtggcgtgatctcagctcactgcaaccttggcctcctgggttcaagcgactcttctgcctcag

SEQ ID NO: 8519 - DNA, 201 bp, Homo sapiens
tatagctgatttattaatattgaatttatggccaatggcactacatctcatgaataaagctaatttaacacacatatattctccacaggcacatcacagcyttcttgcacttaggaacacgagagacagtacttcagtcctacactagcggactattttaaacagtgaaatcaccagcaaaacccacaaaactgaaaaatg

SEQ ID NO: 8520 - DNA, 201 bp, Homo sapiens
aaaattgaattttaatgtgactactagaaaatttaaatttacatatgcggcctacatgtatggttcgcatgttgctatcagacaacacaactgaaggctcyatcacaaattgggtggttgatgctgttggctgggacctcagctagggcagttgcatatgaacacctacatgtgacctttttatgtggctgcataggcctc

SEQ ID NO: 8521 - DNA, 201 bp, Homo sapiens; identical to SEQ ID NO: 1112

SEQ ID NO: 8522 - DNA, 201 bp, Homo sapiens
tgctgcaatttcatctttgttggtcaattctcttttaattttccatttttttacattctatgtaaatgtagtttttatgaactagagagtctgactccatrttttatctttgactactgtcagctctcaagccccacctcttccctccccttctgtcccacacctggatggctgattcaaaagcccaggtgcttcctcttt

SEQ ID NO: 8523 - DNA, 201 bp, Homo sapiens
gttacctcttcagcagaactggtcctttttttcagttgcatttttatttacttagaaattaaagtcatagagtatgaataaaaatctcctgcctaaaaaawgtttgattaaaaatgtccagtttattatacatatttaaatattatgaatgtggctgttagactgatttttttttctctgcaagtttttatacaggctaaa

SEQ ID NO: 8524 - DNA, 201 bp, Homo sapiens
atatacatctgtgttaccaccaccgcaaacatatattgcagcggttggcaaacgttttctgtaaagggccacatagtaaatgctttaagttttgcatgacrtccagtctctgtcacaactactcaactctgcaactgtagtgcaaaatacatatatgaacaaatccttattccaataaaacttacaaaaccaggtggcagg

SEQ ID NO: 8525 - DNA, 201 bp, Homo sapiens
taccaaaacctccttgatgtaggatggagccacacccgagccctctggcatactccatctgtgggaggggtggctttctttgttctcagtttcttggcaartaccatggtactggaggaggtccttggctacctgaggatccctgtgagattaactgaacagaaataggagtttctagactatacatgctggagctcggtg

SEQ ID NO: 8526 - DNA, 201 bp, Homo sapiens
cttttcataaattaccagcctcaggtgttcctttatggcaatgcgataatgggctaacacagtggccctgggctcaggattaacaaggctgtgctagcacyaagcaatcatactggaaggctgaagtgggaggatcacttgagctgcggaggtcaaggctgtgatgagtttcctggagtcaaatgattctcatgcctcagc

SEQ ID NO: 8527 - DNA, 201 bp, Homo sapiens
gtgttcctttatggcaatgcgataatgggctaacacagtggccctgggctcaggattaacaaggctgtgctagcactaagcaatcatactggaaggctgargtgggaggatcacttgagctgcggaggtcaaggctgtgatgagtttcctggagtcaaatgattctcatgcctcagcctcttgagtagctgggattatagg

SEQ ID NO: 8528 - DNA, 201 bp, Homo sapiens
atatcctatattttgacatttagacaacttctgcttttgctcgtgtaggggattattccattaaaagtagacaagataattttgatcaacctgtgtaataragaaaatggacaaagctgaaaaaaatattttaggctgggtgcagtggctcttgcctgtaatatcagcactttgggaggccgaggcaggcggatcacatga

SEQ ID NO: 8529 - DNA, 201 bp, Homo sapiens; identical to SEQ ID NO: 1107

SEQ ID NO: 8530 - DNA, 201 bp, Homo sapiens
ccagctaattttttgtatttttagttagagacagggtttcaccgtgtcagccaggatggtctcgatctcctgacctcatgatctgcccgccttggcctcccaaagtactgggattataggcatgagccaccgtgcccggccgttgaattattattatttttttagctaatagaccagaagaatgaatttaattattattga

SEQ ID NO: 8531 - DNA, 201 bp, Homo sapiens
cccagctaattttttgtatttttagttagagacagggtttcaccgtgtcagccaggatggtctcgatctcctgacctcatgatctgcccgccttggcctcccaaagtactgggattataggcatgagccaccgtgcccggccgttgaattattattatttttttagctaatagaccagaagaatgaatttaattattattg

SEQ ID NO: 8532 - DNA, 201 bp, Homo sapiens
cgcccagctaattttttgtatttttagttagagacagggtttcaccgtgtcagccaggatggtctcgatctcctgacctcatgatctgcccgccttggcctcccaaagtactgggattataggcatgagccaccgtgcccggccgttgaattattattatttttttagctaatagaccagaagaatgaatttaattattat

SEQ ID NO: 8533 - DNA, 201 bp, Homo sapiens
ttttgtttaagatgtttatcaagacaatatgtgcacagctgaacatagatccttatcagtagttctgattttgcccttgtcctgtttcctcaaaagcatgygatctttattctgccttttgtcctttgaagcatgtgatctttgtgacctactccctattcgtacaccccctccccttttgaaatccttaataaaaacttg

SEQ ID NO: 8534 - DNA, 201 bp, Homo sapiens
tgagttctaatttgattgcactgtgatctgagacacagtttgttgtgatttcttttacatttgctgaggagtgctgtacttccaattatgtggtcactttyagaataagtgctatgtggtgctgagaagaatgtatattctgctgctttgggctggagagttctgtagatgtctattaggtctgcttgttgcagagctgag

SEQ ID NO: 8535 - DNA, 201 bp, Homo sapiens
gggtcttgtgtcacccaggctggcgtgcagggccctgatcacagctgccagtagctggaaccacgggggtgtgccaccacgcctggctaattttttaattwttttttgtagagatgaggagtgccactgtgttgcccaggctggtctcaaaactcctgagctcaagtgatcctctcttggcttggcctcccaaaatgctgg

SEQ ID NO: 8536 - DNA, 201 bp, Homo sapiens
aggcatgtgccaccacgcccagctaattttgtatttttagtagagacggggtttttccatgttggtcagactgcttgtgaactcccgacctcaggtgataygcttgcctcggccttccaaagtgctgggattacaggcgtgaaccaccatggatggcctattattattattattagagatggagttttgctcttgttgccc

SEQ ID NO: 8537 - DNA, 201 bp, Homo sapiens
aaaaagctagagaaaattcacatagtacacccattgattggtaattttttttttgttttttgagacagagtcttgctctgtcacctaggctggagtgcagkggcatgatctcagctcactgcaacttctgcctcccgggttcaagcgattctcctgcctcagcctcccgagtagctgggattaaaggcatgtgctaccatg

SEQ ID NO: 8538 - DNA, 201 bp, Homo sapiens
ctgtcgcccagtctggagtgcagtggcactatttcagctcactgtaacctccgcctcctgtgttcaagtgattttcctgcctcagcctcccaagtagctcraattacaggcacccaccaccactcctggctaatttttgtattattagtagagacggggtttccccatgttggccaggctggtctcgaactcctgacctca

SEQ ID NO: 8539 - DNA, 201 bp, Homo sapiens
ggaggctgagacaggagaatcgcttgaaccttggagatggaggttgcagtgagccaagatcttgccactgtactccagcctaggtgacagaggaagactcygtttcaaaaaaataaatatataaaaataaaaaaaatgagctgggcattgtggcagatgcccatagtcccagctactggagaggatgaagcaggaggatca

SEQ ID NO: 8540 - DNA, 201 bp, Homo sapiens
tcataactcatggtggccacaaattgcccatgagcccctgacgcaagaaactgccctctttgacattgcactgtacatcattagagcagcaactgttggtyacatactggggtctcttggaaatagaggcttttacaggtcctgagcttgtgaccctccataccagctgcccattgttccttgggtcacagaagcagggcg

SEQ ID NO: 8541 - DNA, 201 bp, Homo sapiens
tttcctatctcttagggattactctctgttttctgatgttcagggtcttggaaaccatttttttttttttttttttttttgagacggagtctcactctgtygcccaggctggagtgcagtggtgcgatctcggcttactgcaagttccacctcccgggttcacgctattctcctgcctcagcctccggagtagctgggact

SEQ ID NO: 8542 - DNA, 201 bp, Homo sapiens
tttagaatctgtccacattgcaatatgacaggaatcccatgagtctcctcaaagactcctttaccataggggctttagcagccttctctcataactcatgrtggccacaaattgcccatgagcccctgacgcaagaaactgccctctttgacattgcactgtacatcattagagcagcaactgttggtcacatactggggt

SEQ ID NO: 8543 - DNA, 201 bp, Homo sapiens
gtctttgttctctcagagcggtgttccattcttcacaggacttactgaccgtatagtaacactccaaagaatgacatcataaatgatgtttaaaggagacwagtgtacctgcaacatctaacttgagcttgaaaaacgatggcaacaatctgactaatttttaccctattttaagcgttaaacagaatgactttagggcaa

SEQ ID NO: 8544 - DNA, 201 bp, Homo sapiens
tcagataggaaatgcaacaggaagaggctgaagtagggaaggcagcagaactgccttgtataatctgtggtgttggtggaacattcttgcagtactggtcmgtaagctgtgagatatatataggtctggaactcctgtgagagaactgtgctaggaatacagagtttagacttactggtatattaaaaaacaaaaacaaaa

SEQ ID NO: 8545 - DNA, 201 bp, Homo sapiens
agcccttcccacacttgtcacatttataaggtttttcgcctgtatggacggcatgatggatgagcagacttgagctcctggtgaagcccttcccacacttstcacacttataaggcttctcatctgtgtggactgcctgatggataagcagactcgagctccttgtgaagcccttcccacattgctcacatttgtagggtt

SEQ ID NO: 8546 - DNA, 201 bp, Homo sapiens
tgaattgggcctgtgcactgtagtttgttgacatgatatagaatctttccatcactgcaaaaatgtccttatgccactttgtaattatttctttttcacayccccacccactggcaacaactggtctgctgcttatcactagttttgtcttttctacagtttcataaaagtagaattgtaatcatgcagtgtgtattcttt

SEQ ID NO: 8547 - DNA, 201 bp, Homo sapiens
tgatactaaatatttaacagtttttacagtatgagcgctgtgaagacctgaatgggctaatgtcagttagcgaggatctttcttgtgaacccgctggtggmtgtgaaggttggagctctggctgaagcccttcccacacttgctgcactcatagggcttctctccagtatgtactctctggtggatgaggagtttggaact

SEQ ID NO: 8548 - DNA, 201 bp, Homo sapiens
tgtaaatggtattcagcctttaacctcagttttcacataatcattgctagcacacagaaatgcagttgatattggtatgctgatcttgtattctgtgatcytgatgaactcatttattctcgtcgtgtgtgtatgcatgtatccctttgaattttctgtgtagataattgtgtcatttgcaaacagtgacagtttttaaaa

SEQ ID NO: 8549 - DNA, 201 bp, Homo sapiens
aagaaaaaaatcttaaaaaattgttttgactttgtaggtccttgaggtttataactcatgcatacagtgtatctatttatttttaggacttatttactttyttctagcattagtacatgttttgtagctttagtacaggtctagtaactttgtccctacatttcataattttgatgccgttttcatactttcaacttttta

SEQ ID NO: 8550 - DNA, 201 bp, Homo sapiens
attagtgatgcattggaaacatatgtattagtgagtattttacagcaggagataaaaacctacatttgcctcctccaaacttaatttttcctttgccgtcrcccctcaaacactatcacctgattttttttctggcaattttacctactattcaatgctttcgatgattccccttcatgcctctaccattcatcctaaaat

SEQ ID NO: 8551 - DNA, 201 bp, Homo sapiens
gtaatgaatgtgagaagactttctaccagaagtcatcacttatagcacatcagaaaacacacagaaggcagaaatcctgtgaatctacaaatgtggagagmcttttatcagaattcactaatctgagaaagtatagagagaagtccctgttagcatcttctgaaagtccagaaaccttttcttacttaacctactcagttt

SEQ ID NO: 8552 - DNA, 201 bp, Homo sapiens
ttttatagctataagaaaaaatgtatattttaaataaaatatttgtagagagtaaattgatgtgttgaaatcttgttacattctactcatacataaataartgttagcatttgatatggtttggctctgtgtgcccacacaaatctcatgttgaattgtaatccccatgtgtcaggggaggggccgggtgggaggtgatta

SEQ ID NO: 8553 - DNA, 201 bp, Homo sapiens
tgctaggaccttagggtgcatttgtggcaaaaaaacaaaaccagcatgaaaatattttaaagttaaacagttagaaagaaatatttgttatagagcagtgmcatacaaagtgataaagttaatatcaccaccttttaactgtaaagatttatgaagattttttgggatattatgggataatagctatttcttgaaggcatc

SEQ ID NO: 8554 - DNA, 201 bp, Homo sapiens
ctttggtcactactcgtgctttttctgttttggtggggaaagcctcaacctatcctgaaaagatgcaaataagcagtagcatatactgacagcctccagcrcggggcagttcggtaaagtctataagcaagttttcacaaggcgtggctcctacttcctgaattcctgggggccaagtgggcccctgtcatgggttgttct

SEQ ID NO: 8555 - DNA, 201 bp, Homo sapiens
gtctctcagaatgaggacttatttaggcatcagtatattcaaactcttaagcagtgttttgaatacaatcagtgtgggaaggcttttcatgaagaggcagyctgcagtacccataagagagtgtgctcatgggagaccctgtgaatataatgaacatgtgagagccttttccgatagaccaatattcattgttcatcagag

SEQ ID NO: 8556 - DNA, 201 bp, Homo sapiens
tttggtcactactcgtgctttttctgttttggtggggaaagcctcaacctatcctgaaaagatgcaaataagcagtagcatatactgacagcctccagcasggggcagttcggtaaagtctataagcaagttttcacaaggcgtggctcctacttcctgaattcctgggggccaagtgggcccctgtcatgggttgttctg

SEQ ID NO: 8557 - DNA, 201 bp, Homo sapiens
ttcatgaagaggcagcctgcagtacccataagagagtgtgctcatgggagaccctgtgaatataatgaacatgtgagagccttttccgatagaccaatatwcattgttcatcagagaactcacataaggaagagtcaccatgaattcaatgaatgtgagaggaggtctggtgagaggccacctgtaaataaacaccacagg

SEQ ID NO: 8558 - DNA, 201 bp, Homo sapiens; identical to SEQ ID NO: 1141

SEQ ID NO: 8559 - DNA, 201 bp, Homo sapiens
ggaaagtcttccctaactaatcctatagaaggctgtaagtcctatatccttgctaacaataacatttcatctcatctcacttcatttttttttttgagacrgagtttcactctgctgcccaggctggagtgccgtggtgtgatctggtctcactgtagcctccacctcccaggttcaagcaattttcccacctcagcctcc

SEQ ID NO: 8560 - DNA, 201 bp, Homo sapiens
ttccatgttgaccaggctggcctccaactcctggcctcaagtgatccatccgcgtcagcctcccaaagtgctgggattacaggcatgagtcaccacacccrgcctactttcctttaagtaaatttgcatttaattggtattctgctttcataggtgtggggaatacaaggaagaaaatataaatccttttgcttaacaagc

SEQ ID NO: 8561 - DNA, 201 bp, Homo sapiens
gccgggaagaggcgctcctcacttcccagactgggctgccgggcagaggggctcctcacatcccagatgatgggcggccaggcagagacgctcctcacttsctagaccgggtggcggctgggaagaggctgcaatctcagcactttgggaggccaaggcaggcggctgggaggtggtggttgtagtgagcggagatcacgc

SEQ ID NO: 8562 - DNA, 201 bp, Homo sapiens
cggggcggccgggcagaggcactcctcagttcccagacagggtcgccgccgggcagaggcgctcctcacctcccagatggggtggtggccgggcagaggcrctcctcacctcccagacggggtggcggccgggtagagatgctcctcacctcccagacggggcggccgggcagaggcgctcctcacatcccagacagggcg

SEQ ID NO: 8563 - DNA, 201 bp, Homo sapiens
cgtcgtcatcatggcccgttctcaatgagctgttgggtacacctcccagacggggtggtggccgggcagaggggctcctcacttcccagacgtggcggccrggcagaggcgccacccacctcccagacggggtggctgctgggcgggggcgccccccacctcccagacggggtggccgggcggagactctcctcacttccc

SEQ ID NO: 8564 - DNA, 201 bp, Homo sapiens
ttttattttgttttaatttttttttagtatttattgatcattcttgggtgtttctccgaggggggatttggcagggtcataggacaatagaggagagaagktcagcagataaacatgtgaacaaaggtctctggttttcctaggcagaggaccctgcggccttccgcagtgtttgtgtccctgggtacttgagattaggga

SEQ ID NO: 8565 - DNA, 201 bp, Homo sapiens
ttggaatagtttcagaaggaatggtaccagctcgtctttctagctgtggtagaattcagctgtgaatccgtctggtcctggactttttttggttggtaggytattaattattgcctcaatttgagagcctgttattggtctattcagagattcaacttcttcccggtttagtcttgggagagtgtatgtgtccaggaattt

SEQ ID NO: 8566 - DNA, 201 bp, Homo sapiens
ctttgtttcttacacttcagtttagattttagggtatatgtatacttataaaaaaatgagatcatgtcttaaatattctttcttttttgagacagagtctygctctgttgcccagtgcccaggctggagtgtattggtgtggtctcggttcactgcaacctctgccctctgggttcacgcgattctcctgcctaagcctcc

SEQ ID NO: 8567 - DNA, 201 bp, Homo sapiens
gtctctaaaacaacaacaacaacaacaacaacaacaacaaaaaaaaaacaaagaaaaaaactcttgctgtgaatttgataggaaaaatgttcaatttatayattgtttcggaattttggagagcactgacgtctttattctattgagtcttttaatccattaacatagtacgtctcttcatttgcttagattttcctgaat

SEQ ID NO: 8568 - DNA, 201 bp, Homo sapiens
tcttacgaaggagataaaaacagtaagagtggtgaagaatgtgccacggaggggaagtaagaggacagagcaaagggcttagtgtctaataataaggaccytggggctaaaccctgaagggattgaaaactattaaagaattttaattcagagtgaaatgactgactttgtgacaataaacaccactggaaagcaagactt

SEQ ID NO: 8569 - DNA, 201 bp, Homo sapiens
tatagtaacaccactaacactgtaccctagcctggtctacagagggagaccctgtctctaaaacaacaacaacaacaacaacaacaacaacaaaaaaaaaacaaagaaaaaaactcttgctgtgaatttgataggaaaaatgttcaatttatatattgtttcggaattttggagagcactgacgtctttattctattgagt

SEQ ID NO: 8570 - DNA, 201 bp, Homo sapiens
cctgcctcagcctcctgagtaccttggattataggtgcatgccactgtgcttggctgatttttgtatttctagttgagacggggtttcaccatgttggccrggcatgtcttgaactcctgacctcaagtgatccacccgcgttggcctcccaaagttctgggattacaggcgtgagccaccatgcccagccttcccctgtc

SEQ ID NO: 8571 - DNA, 201 bp, Homo sapiens
tgtgggtttgtcataaatagctcttatcattttgagatatgctccatcaacacctagtttattgagagtttttagcatgaagggctgttgaattttgtcaraggccttttctgcatctattgagataatcatgtggttttttgttgttggttctgtttatgtgatggattatgtttattgatttgcatacgttgaaccagc

SEQ ID NO: 8572 - DNA, 201 bp, Homo sapiens
gtttgtcgattttatcttttcaaaaaactaattgttttgttgatattctgtatatatatatatatattttacctcaacttcatttatttctgctctgatasttattgtttcttcccttctaattttggattaagtgtgttcttgcttttctagttccttggggcacattgttagattttttatttgaagtctgtctactct

SEQ ID NO: 8573 - DNA, 201 bp, Homo sapiens
tgctaaaggtttgtcgattttatcttttcaaaaaactaattgttttgttgatattctgtatatatatatatatattttacctcaacttcatttatttctgytctgatacttattgtttcttcccttctaattttggattaagtgtgttcttgcttttctagttccttggggcacattgttagattttttatttgaagtctg

SEQ ID NO: 8574 - DNA, 201 bp, Homo sapiens
actattccctctgatctttttagatggttcttttgacagatgtgggtaatgcccttatactcatgtactgatcaatacactgctgagctctcaagtgggaygctgcaggtctctggggttttctctccatgcagctctttcttctctggtgctgtgttctgtgaattctagctgcctgtgtctccccagactatcaaatct

SEQ ID NO: 8575 - DNA, 201 bp, Homo sapiens
aacataaagaacatttgaatttttaaaattttctttcagtcgaggattactggtttgaaacaaagatgtcagccctaaagcaaagcacttctgaagcatcygttctgggagagcgaacgaaaagtgtcatgatggaaaaaggcctggactgggagggcagaagctccacagagaagaactataagtgcaaggaatgtggga

SEQ ID NO: 8576 - DNA, 201 bp, Homo sapiens
tcttcatggatgctatatccatttataattccatgggtgaggccaggcacagtggcactgtaatcccagtgctttgggaggctgaggcaggaggatcactkgagtctaggagtttcagtttgcagtgagatatgatcacgccactgcactgcagcctgggtgacagatccagaccttttctcaaaaaaaaaatccatagtt

SEQ ID NO: 8577 - DNA, 201 bp, Homo sapiens
cggtcttcctgtagatgacttagtagagagtcttcagtctttcagtgagtaccagaaatcagtgcagtctgctgcttgtaattgagtacttcgtgtgggtsgagtactcagtcagtacatttctagggatggaggcaccttggtcccatagacctctttctgatggtcctgcttgatccaggcatagaagctgggatagct

SEQ ID NO: 8578 - DNA, 201 bp, Homo sapiens
gtctttaaagctcacactggaaagagaaaccagacatgctgaaataaataaatggttaaaaaattatatatgtatattcatatatgtaatatacacacacrtatatattatatattatatgtatatgaaaagtaaaggatgactttatatatacaaaaatagggttgtgtgaggtacaagactgtttatgaaataaattga

SEQ ID NO: 8579 - DNA, 201 bp, Homo sapiens
accttctgttctctcttacagcaattctctcaaaacattattcacaactctcttatacattctcaagacttaaagcttgtgattctcaaattttatcactytctcacttgtcccgtttgctctagactcctacagtattttacctacttacgttaaattcttcttgggttttaattctaactttctcaatacagcaaaagc

SEQ ID NO: 8580 - DNA, 201 bp, Homo sapiens
gggttgtgtgaggtacaagactgtttatgaaataaattgataaatagggaaattttatgatttgatggctatgacagcttcattaatgacaactgtggtaraagaaaatgaagatacaacagcagaataaaactacatacctgatcttgtttccatagcctacatgtatgctttctctggacattggcttttggtgtgaat

SEQ ID NO: 8581 - DNA, 201 bp, Homo sapiens
aactatggtctttaaagctcacactggaaagagaaaccagacatgctgaaataaataaatggttaaaaaattatatatgtatattcatatatgtaatatayacacacatatatattatatattatatgtatatgaaaagtaaaggatgactttatatatacaaaaatagggttgtgtgaggtacaagactgtttatgaaat

SEQ ID NO: 8582 - DNA, 201 bp, Homo sapiens
atgactttatatatacaaaaatagggttgtgtgaggtacaagactgtttatgaaataaattgataaatagggaaattttatgatttgatggctatgacagsttcattaatgacaactgtggtagaagaaaatgaagatacaacagcagaataaaactacatacctgatcttgtttccatagcctacatgtatgctttctct

SEQ ID NO: 8583 - DNA, 201 bp, Homo sapiens
ccttgggagacgaaggcaccaaggcaggaggattgcttgagcccaggattttgagaccagcctaggcaacatgatgagaccctgtctctatattaaaaagktattattaaaaaagaatccacatagtgtgactgtaaactcagagtcagccaaatggaataataaactatgcaacagttaaatacaaaattatttaaagga

SEQ ID NO: 8584 - DNA, 201 bp, Homo sapiens
gttgcagtgagccgagatcatgccactgcattgcagtctgggtttcagagtgaaacactgtctcgaaaaaaaaaaaaaattttttttttttggtggaaatktggtctcactatgttgcccaggttggtcttgaactcctggcatcaagtgatcttcccatcccaccttggtcccccagagctctgggactgtaggcacgag

SEQ ID NO: 8585 - DNA, 201 bp, Homo sapiens
cttgccaaatggtgcattcgtcatcttttataggaggagttactcctcgaggattggaacctaattctttttagcaaatggacatcacacatgttccctcrtttgggagactagcttatgtacatgtatgtgtggacaccttttctcactttgggctatatgccaatcaggagagtcttctgcctgtgttaaatgtcacct

SEQ ID NO: 8586 - DNA, 201 bp, Homo sapiens
ggttgcagtgagccgagatcatgccactgcattgcagtctgggtttcagagtgaaacactgtctcgaaaaaaaaaaaaaattttttttttttggtggaaaygtggtctcactatgttgcccaggttggtcttgaactcctggcatcaagtgatcttcccatcccaccttggtcccccagagctctgggactgtaggcacga

SEQ ID NO: 8587 - DNA, 201 bp, Homo sapiens
tagagatgaggtctcactgtgtttgtccaagctgatatcgaactcttggcctcaagcagacttcccacttcggcctcccaaagtgccgggattacaggcakgagtcactgtgcctggcctgtctttctgcttttttggtgaaggtgtttattgctaaaaacttccctcttagtactgctttttctgtgttcaatagatttt

SEQ ID NO: 8588 - DNA, 201 bp, Homo sapiens
caaagaaaagaattagtgatgcattggaaacatatgtattagtgagtattttacagcaggagataaaaacctacatttgcctcctccaaacttaatttttyctttgccgtcgcccctcaaacactatcacctgattttttttctggcaattttacctactattcaatgctttcgatgattccccttcatgcctctaccatt

SEQ ID NO: 8589 - DNA, 201 bp, Homo sapiens
actgcctgggtagtccccttgcccatgtatccagctacaaaacaattcaaattttttctttttcccaaaataaaacctcagctagctctgccaactgtcaaaaaaaaaaaaaaaaaaaaaaaggcctataatatccaccatctggattcttattacctccctccctagcccaatcagcagaagtgtcccctaaagtaaaac

SEQ ID NO: 8590 - DNA, 201 bp, Homo sapiens
agtagaaaattgacaagaggaagactcttcacaattattaggcaaatcagaagatgaagcagaaccactgtagactctaataattacagtataattgatcrcataagtgaaatctcagactatgagttagatgatgatattctagatgaataaaggtatgcatatgatcctgttataagaacagcctgggccgggtgcagt

SEQ ID NO: 8591 - DNA, 201 bp, Homo sapiens
tttgtaaacagaattggacctggtcagaaatagtgaatgtacttgtttgggaacactgcatttgcagaacaggcagaggtgctgcgcaatgattcctatgraatcattattgattggtcccctaaggggatgtttaggttgaattgcacctctcagtctgcataccacggccacactatgttcagctggtgtaaacgaaat

SEQ ID NO: 8592 - DNA, 201 bp, Homo sapiens
ctcaccaccatgcccggctaatttttgtatttttagtagagttggtagagacagggtttcaccatgttggccatgctggtctcaaactcccgacctcaagwgatccacctggctcagcctcccaaagtgctaggattacaggggtgagccactgtacccagccaatgttcttgtgtaacttgcatttaaaattttgtgata

SEQ ID NO: 8593 - DNA, 201 bp, Homo sapiens
cagcactttgggaggtcgaggtgggtggatcagagggtcaggagtttgagaccagcctggccaatatggtgaaaccttgtctctactaaaagtacaaaaawattagccgggcatggtggcacatgcctgtaatcccagctacttgagaggctgaggcagaagaattgcttgaatccgggaggccgaggttgcagtgagccg

SEQ ID NO: 8594 - DNA, 201 bp, Homo sapiens
gggcggatcacgaggtcaggagatcaagaccaacctggctaacacggtgaaaccccgtctctactaaaaatacaaaaaattagccgggcgtggtggcgggsgcctgtagtcccagctactcgggaggctgaggcaagacaatggcgtgaccctgggaggcggagcttgcagtgagctgagatcgcgccactgcactccacc

SEQ ID NO: 8595 - DNA, 201 bp, Homo sapiens
gctacacacttttaaacaaccggatctcatgagaactcactcactctcatgagaatagcaccaaaggggaaatctgtccccacaacccaatcacctcccamcaggccccacctccaacactgggattacaacttgacatgcgatttgggacacagattcaaaccatatcactaactcaacatcaagcagaacaagaattaa

SEQ ID NO: 8596 - DNA, 201 bp, Homo sapiens
ttttcttctagggtattttatggttttaggtctaacatttaagtctttaatccatcttgaattaatttttgtataaggtgtaaggaagggatccagtttcmgctttctacatatggctagccagttttcccagcaccatttattaaatagggaatcctttccccatttcttgtttttgtcaggtttgtcaaagatcagatg

SEQ ID NO: 8597 - DNA, 201 bp, Homo sapiens
tcctgggctcacaaaaaaatggtggggggcaggtgggaattttgatgcttaaattccttggttccttctgtagtggatttcttcttttttttttttattayactttaagttctagggtacatgtgcacaatgtgcaggtttgatgcataggtatacatgtgccatgttggtttgctgcatccatcaactcatcatttacat

SEQ ID NO: 8598 - DNA, 201 bp, Homo sapiens
attgagaagatttcattttaatatggacatttatcaattccccaataatacttttataatttcttatgcctgtctttaatctcttaatcctgttatcttcrtaagctgagaacatacgtcacctcaggactattgtgataattttgttaactgtacaaattgattgtaaaacgtgtgtttgaacaatatgaaatcagtgca

SEQ ID NO: 8599 - DNA, 201 bp, Homo sapiens
gccactgcgcgccctagtggggactacggggacgcttcgcgctccaggaaggaggcgggcaccgcccgctctagcacagtccgggagctggacctcggggytcaccgctctgcttgcccactaaaagcccattcggcggaagtccagcgttgcatggttacagtactgagccccagacatcgttgccaagtataatgcagg

SEQ ID NO: 8600 - DNA, 201 bp, Homo sapiens
ctggatggctgattcaaaagcccaggtgcttcctcttttggctctaaaggcaagttcaagccatgcaggccccagcatgtgcattggagccttcatttccsccccactccttaaccttaataacacccaaagccagtctctcttccctgctctcaagccatttttttttcttctttttctggagacagggtcttgtgtcac

SEQ ID NO: 8601 - DNA, 201 bp, Homo sapiens
ccagcctcagcgacagagcgagactctgtctccaaaaaaaaaaatcaactgtatatctaatggtactgaaaagagagaaaccacaagacactggtatataytgacatacacaagtcacagagaatagaaatggactggatgttgaagcacagtgatgcatatattattattcaagtcaactcactatttaaagctaatttc

SEQ ID NO: 8602 - DNA, 201 bp, Homo sapiens
ccttgtgggagcctagtccaggtgaactgtgtagcttctttgtcctattgaaatgcaaagataggctgactaattggtgccaagtggatacaaaagaaagygccctttaattctaagactgtaaaccaggtagcacttgctggaataagtcctattaaagtatacaggttgggtaccactggatggatggttactgtggcc

SEQ ID NO: 8603 - DNA, 201 bp, Homo sapiens
acactatcacctgattttttttctggcaattttacctactattcaatgctttcgatgattccccttcatgcctctaccattcatcctaaaataccatttgytgtatttgtttattccactttatccagttttgaaggtcacatttctaaagtgccagattactgtgtttttatttgcagattcctctccttttttcatatt

SEQ ID NO: 8604 - DNA, 201 bp, Homo sapiens
gcatgggttgaggacacactccaatatcatgctgagaacacaagaattttgaaaaaatatataaggagaccaacagaatttaaaaggtacataattaaaawcccagaaaaactggagaggatatcacatttaaacacaatctaataataaaatataaacatattgctatgaaaaataataattctaaataaaatgactgaa

SEQ ID NO: 8605 - DNA, 201 bp, Homo sapiens
catcacttatagcacatcagaaaacacacagaaggcagaaatcctgtgaatctacaaatgtggagagacttttatcagaattcactaatctgagaaagtayagagagaagtccctgttagcatcttctgaaagtccagaaaccttttcttacttaacctactcagtttacattaaaaacagtgaaggggagaaactttgta

SEQ ID NO: 8606 - DNA, 201 bp, Homo sapiens
ttgaagatggggcatcaagcattcatttcatctcttattgaattctaataataaaagtacagttgacccttaaacaaaatgggtttgacctgtgtgggtcyatgtatatgtggatttttttcttttttaaggagatggggtcggctgggtgcggtggctcctgcctgtaatcccagcacattgggaggccgaggcaagtgg

SEQ ID NO: 8607 - DNA, 201 bp, Homo sapiens
tgcaggtgagtgggtggggaacatcccagcagaagctgagcacacggagcagtacgggggttcctgagtggaagctcatctttgagtgccctgttggtgcrgaaaggcactggtttcctcttttgatgtcatcctcctgtcaagtggctggccgcttttctccccagtctttctgcacttgggagggctgctgccttcctg

SEQ ID NO: 8608 - DNA, 201 bp, Homo sapiens
ttattttttaaaaataaatttaatgtgtatttttgaggcttacaacatgttatgggatatgtatagatagtaaagtgtttagtgaagcagattaatggatytgtcatctcacatagttgcttttgttgtgacaagagcagctacagtttacttaataaaaatctctaatagaattttactaattttagtccttatgttgta

SEQ ID NO: 8609 - DNA, 201 bp, Homo sapiens
tagacaaatccattgagcttgtggcacagacgggttgaagtgtgttacctcttcagcagaactggtcctttttttcagttgcatttttatttacttagaarttaaagtcatagagtatgaataaaaatctcctgcctaaaaaaagtttgattaaaaatgtccagtttattatacatatttaaatattatgaatgtggctgt

SEQ ID NO: 8610 - DNA, 201 bp, Homo sapiens
ctcactatgaaacctagatatttaacctcttcatggcaaatttgggctttctttttagatactttgtaacctgctttctacaggagatagaggagatcctsgtttccctgataacagtcctctcggtttggggctgccacaagaaggtcatccaagtactgtaacaaggggcagttatcatttggtggggtataggccttg

SEQ ID NO: 8611 - DNA, 201 bp, Homo sapiens
ttgcccagaaataaagggccatcttagtgagcagcagatatttgatatttgaaacatcttacgaatattttgaataagttgtaactttgaaaatgattcakttttggttatacatgagagattttagctcactggaaatgtcagtttggtaattgagactaaaaacttcctttagaaatattatactaaaattcttgtttc

SEQ ID NO: 8612 - DNA, 201 bp, Homo sapiens
tcagactgaagaagtcacttgaacatttcttgtaagatgggtctggtggcagtgaattctttcagggctttttttcttttgagacaggatctccttttctyacccaggttggagtgcagtggtgcaatgttggctcactgcagcctcagcctcctgagctcaagagaccctcccacctcagtctctctagtagctgagact

SEQ ID NO: 8613 - DNA, 201 bp, Homo sapiens
tttgtttgagatggagttttactcttgttgccctggctggagtgcaatggtgcaatctcagctcactgcaacctcagcttcccaggttcaagcgattctcstgcctcagcctcccgagttgttgggattacaggcatgcaccaccacgcccagctaattttgtgtttttagtagagatggggtttctccatgttggtcagg

SEQ ID NO: 8614 - DNA, 201 bp, Homo sapiens
gggcgacagagtgagactctgtctcaaaaaaaaaaaaaaaaaaaaggcagacctttatgctacatgctttcattttgatttttcaaatgttcagtttgcarcttacaatacaagcgctgtaagggaataatatcttgtgggactcaatacagaacttcaatgtcaaagcaatttttcattgtgttaaagcacagaagtgtg

SEQ ID NO: 8615 - DNA, 201 bp, Homo sapiens
atgctttcattttgatttttcaaatgttcagtttgcaacttacaatacaagcgctgtaagggaataatatcttgtgggactcaatacagaacttcaatgtyaaagcaatttttcattgtgttaaagcacagaagtgtgaataaggccagtataatgggaagaaataattctacccaaatacatcctatagtaataaatctg

SEQ ID NO: 8616 - DNA, 201 bp, Homo sapiens
tgcagcggcagtgaatacttaatcattagggagcaggcagaagcgaaggaaggaaaatgtattgattctactaaggttaatctcccttgaagtcctcaatyacttttcagggcacagagaagccatgctctcagtacctcaagtcagcttactgtcctctaaacagattttttctaagagctcatgtgtgtgagggctgta

SEQ ID NO: 8617 - DNA, 201 bp, Homo sapiens
actagtatgtgtccactgatttactactcattcagataatttaaaagaaatcggagatagagcaacactgctaggaccttagggtgcatttgtggcaaaaraacaaaaccagcatgaaaatattttaaagttaaacagttagaaagaaatatttgttatagagcagtgccatacaaagtgataaagttaatatcaccacct

SEQ ID NO: 8618 - DNA, 201 bp, Homo sapiens
aagatgcagtagatatttctttgttgattgtatggcctgggttgtgagtactcttttacatttattcacacagaaaaccaaggaactctttttaagtagayatgctaaggtgaatatattcagcttgattattgggtgtaaattggcaagaagtttaaggtttgtgttttgaaatagccttccaagaaattgtgatgcatg

SEQ ID NO: 8619 - DNA, 201 bp, Homo sapiens
gtgatcttggctcaccgcaacctctgtctcctggattcaagcaattctcctgcctcagcttcccaagtagctgggattacaggcatgcgccaccatgcccrgctaattttgtatttttagtagagacggggtttcaccatgttggtcaggctgctcttgaactcccgacctcaggtgtccacccgccttggcctgccaaag

SEQ ID NO: 8620 - DNA, 201 bp, Homo sapiens
actgcaacctctgcctccagggttcaagtgattcccctgcctcagcctcttgagtagctgggactacagggcgcaccaccacacccatctaattttttttktgtgtgtgtattttagtagacgggatttcaccatgttggccaggatggtcttgatctcctgacctcgtgatccgcccgccttggcctctcaaagtgctgg

SEQ ID NO: 8621 - DNA, 201 bp, Homo sapiens
taaactcttagaaccttttttaactacccaagtggcaacattgaatgcagagtccgtacttagtggactcaaatcaataaattcagcctgatcaaactttrtgttctttccaccattatcccacacccttaatatccattcccatgcctgttctgcagatttatttatatgaattagaaaactcaagcagttccttttgag

SEQ ID NO: 8622 - DNA, 201 bp, Homo sapiens
tcccttcctctacattaaaccaagggagatgaggcatatccagcttgctcacagtggatcatcttcttatctgtattttagctaaccaagcaaataaactmttagaaccttttttaactacccaagtggcaacattgaatgcagagtccgtacttagtggactcaaatcaataaattcagcctgatcaaactttatgttct

SEQ ID NO: 8623 - DNA, 201 bp, Homo sapiens
gtctccttgtggaaggatgggagaaagagtcactatgtaaattgtcggtaatgtagtagggttcttcctcaaggggacctggtctccccttcattcaaggrgttctggatctgtaaactggctcaagtctggaaattgattgaggggttgtgattctctagtttgtttttttgtttgtttttgttgtttgtttttgagaca

SEQ ID NO: 8624 - DNA, 201 bp, Homo sapiens
tttgctcaagcaatgaaaccacatctggtacagcagctgcaattggagtcaccactttgttaagcttacaataatccatggtcattctccaagatctgtcrtctgcacaggctaaatgggagagctgaatggggatgtggtgggaatcaccaccccagcgtctttcaagtccttggtagtagcactaatctccacagtctc

SEQ ID NO: 8625 - DNA, 201 bp, Homo sapiens
tccgaataagattatgacacaaagccagagaattgatataccctggaggtaggacagtaaaggtatattgctggccttgccagctgaaggcaaattgcttytggtgggccttatggacaggaatggaggaaaagacatttgccaagacaatggctgcataccacctaccaggaaatgtgctaatttgctcaagcaatgaaa

SEQ ID NO: 8626 - DNA, 201 bp, Homo sapiens
aagaacatttgaatttttaaaattttctttcagtcgaggattactggtttgaaacaaagatgtcagccctaaagcaaagcacttctgaagcatctgttctrggagagcgaacgaaaagtgtcatgatggaaaaaggcctggactgggagggcagaagctccacagagaagaactataagtgcaaggaatgtgggaaagtct

SEQ ID NO: 8627 - DNA, 201 bp, Homo sapiens
caccagagcccagtaataggccaagaactgtctctcataaggagagtagttatctgcagaagatggcagggccttgctccaaaatcctagaagcttccatygtgattcacctatgggggcctgccaaaggctccaaacagcaccctgtctgtcactgacacctccagcaccattggatctgttgggtcatatggctcaagt

SEQ ID NO: 8628 - DNA, 201 bp, Homo sapiens
aataattacagtataattgatcgcataagtgaaatctcagactatgagttagatgatgatattctagatgaataaaggtatgcatatgatcctgttataaraacagcctgggccgggtgcagtgtctcatgcctgtaatctcagcactttgggagccgaggcaggtggatttcttgagcccaggaggtcaaggctgcagtg

SEQ ID NO: 8629 - DNA, 201 bp, Homo sapiens
ggtgacatgaagggtggagtgagcagaggctaggcctggaggagggagcaggacaggcatgcaggaagaacctgctcaagggaggagtcgcacatcccctsagccctcagcttttacttgttggtttccatgagcactgttggaactgtcagaagctggctttgaccaccttgcttccttctcttgggatgcctccctcag

SEQ ID NO: 8630 - DNA, 201 bp, Homo sapiens
acatctgtgttaccaccaccgcaaacatatattgcagcggttggcaaacgttttctgtaaagggccacatagtaaatgctttaagttttgcatgacatccrgtctctgtcacaactactcaactctgcaactgtagtgcaaaatacatatatgaacaaatccttattccaataaaacttacaaaaccaggtggcaggctga

SEQ ID NO: 8631 - DNA, 201 bp, Homo sapiens
ttctagttaagaggagaagcttctcgggatggatttcggttgcccaagacgccttccccgacctcattctcaggagcctggctcgttcctgcggtgcgggrgctcagatgcaagctcttttcagcgaaggcagtgctgcggacagaaacctcagtctcttacaggagcccccgtccgtcgcctaacgtccaccgaaaaccc

SEQ ID NO: 8632 - DNA, 201 bp, Homo sapiens
aggcttcggtgtggccgcagcccggccccgggggcgcagcagctcggaaatgcggcgccgggacacacgtgccgccgcgggccgcgcctccgctggtcgcrtgccctaccatcgccgccctcccggcttccgcagctcggcggcccagcgccttacccgcggcacacccatttcctgacccctgaacgcctctgccagcgg

SEQ ID NO: 8633 - DNA, 201 bp, Homo sapiens
ctcctgacctcgtgatccacctgcctcagcctcccaaagtgctgggattacaggcgtgagccaccatgcctggccaattggaaaccatttttgtccttacrttttgtcaaaaaatgttttttttttccaatgtaacctggtccctgttactcaattcatcttgcgctgaagtggagaattgaagatggggcatcaagcatt

SEQ ID NO: 8634 - DNA, 201 bp, Homo sapiens
gccatataaatttcagagtaagcctgcatacatcaacaaaaaaatcttgctgagattttgataggaattatgttaaaactacagatcagtttgaagagaaytgacatctcaaatatcaatgaatatgtatgtctcgacttatttagatcttcttcgatttcttttattagtgttttgtaattttcagcatacaagtcctat

SEQ ID NO: 8635 - DNA, 201 bp, Homo sapiens
tctctttctggtaagtgcttcctggcttctggattgctgccttctcactatatcctcacatggcacttcctcatggcttgcagggtgggggatggggagakagagcatgtgctctagtatctcttatttgaaagacatattctattagatcagggcccactcctactaccttattgaaccttccctgctgccaaagaggcc

SEQ ID NO: 8636 - DNA, 201 bp, Homo sapiens
aacaacaacaacaacaacaacaacaacaacaaaaaaaaaacaaagaaaaaaactcttgctgtgaatttgataggaaaaatgttcaatttatatattgtttyggaattttggagagcactgacgtctttattctattgagtcttttaatccattaacatagtacgtctcttcatttgcttagattttcctgaatttatttat

SEQ ID NO: 8637 - DNA, 201 bp, Homo sapiens
tattaatatggtggattaatatattgaactattcttgccttcgtggaataagcctcacttagttgtagtgcatgattctgttgatatatttttgggttcartttgctaatttttttttttttgagatggagttttgctcttgttgcccaggctggagtgcaatgttgcgatctcggctcactgcaacctccacgtcccacg

SEQ ID NO: 8638 - DNA, 201 bp, Homo sapiens
taaaatacaattctacggaagagattgcttaactaacagaaacttattctctcacagttctgaaggctagaagtcccagactgagttcctggaagattaastttcttgtgagtgctctctttgttcctggcttacagatggccaccttcttgctatgtcctcacatagccagccagccagccttccttccttcctttcttc

SEQ ID NO: 8639 - DNA, 201 bp, Homo sapiens
agcaaatatggccagtcttatgattggcacagcttcttgtcagaaggaaattcctagactatggcatagatagagataactccaaacatattcttattctwtgaagcataaatatttcagagttcaagaagtttaaggcagctgtagtatgtggactagcatactggaaagggagctagcagagacaatttgagaaatctg

SEQ ID NO: 8640 - DNA, 201 bp, Homo sapiens
gataaaatgtagagtatctggaggaagaaatcaagtgcatcttcagactatttcagtaaatcattttttttccccatttaggctgtatttatggggtagtrtagacagttcgcagttacactctctggcatttgtgcctgtaattctatttcacatttcagacctttcttttctgaacaaaccagaagaggtaaaggaact

SEQ ID NO: 8641 - DNA, 201 bp, Homo sapiens
tcctgcctggggtggtggcctcaacccccatggccctaggtggttgttccaccacatactctgtcgggtggacctgcccacaaggccctaggcagggttarcctggcctgtttaaactgaagaaatggtggctttattctttgaaaccaaggagggagcctttatgatctttggggtcattcttccctttcaaagaatagt

SEQ ID NO: 8642 - DNA, 201 bp, Homo sapiens
gattttggctcactgaaacctccacctcctggcttcaagcaattctcctgcctcagcctcccaagtgacgagggttacaggcacgtgccaccacacccggytaatttttgtatttttagtagagacagggttttgccttgttggccaggctggtctcgaattattgacctcaggtgatccacctgcctcagccccccaaag

SEQ ID NO: 8643 - DNA, 201 bp, Homo sapiens
aggattggagtccaatgttcgagggcaggaagcatccagcatgggagaaagatgtaggcggggaggctaggccagtctctcttttcacgtatttctgcctrtatatattctagcctcgctgtcagctgattagattgtgcccacccagattaaggtgggtctgcctttcccagcccactgactcaaatgttaatcttcttt

SEQ ID NO: 8644 - DNA, 201 bp, Homo sapiens
ctcctttctggtcatatccttaaatacattttgcactaattccttttgaaacctcatcatggagagaacttgaatttagcagattaggggtgagtgcaggyttttgtcttaggttccatatatatatatattttgaggtggagtctccctctgtcgcccaggctggagtgcagtggcgtgattttggctcactgaaacctc

SEQ ID NO: 8645 - DNA, 201 bp, Homo sapiens
ttgcttcccctgcttctgttcagcgtgctctcctggtgtctaagagcatgaaggtgcaaatctgttgtagcccacaacccaggggctgatgaaaaaatagmaggagcatttggtaccagcctctcctgctggagaatgtagctcaactgctttccccatgcaaaacccctagccagtgcacctgggctttgcttagtatgg

SEQ ID NO: 8646 - DNA, 201 bp, Homo sapiens
aaaacaaaacacttaacaggccccaacagaactcctgctccagcaatatccatcagcatctgctcttccccagtcatccccattttagtaaacagccacaygaaccactcaattgctcaaaccaaaatccccgatgtcatttcattctcatcctcacatctcacctatcacccacctcctttaccgctaaagcatatcggc

SEQ ID NO: 8647 - DNA, 201 bp, Homo sapiens
tattttctgtataactttaagtacataaagatttatttccacaggatcaggaaatgggtagaaatcacaggacaatctctcttcccaccaaaaaagttgcrtattttggtaagtgtttgtcctagagggaaaaaactgaaatttacattagcagtgctgtgcaagattcttacataaatcaagacctaaaagcagcttgca

SEQ ID NO: 8648 - DNA, 201 bp, Homo sapiens
ccttgcctggcacttgtgctgttgcttcccctgcttctgttcagcgtgctctcctggtgtctaagagcatgaaggtgcaaatctgttgtagcccacaaccsaggggctgatgaaaaaatagcaggagcatttggtaccagcctctcctgctggagaatgtagctcaactgctttccccatgcaaaacccctagccagtgca

SEQ ID NO: 8649 - DNA, 201 bp, Homo sapiens
tcagcttaccacgagtcaggccagatctcttttgttgctgtgtctactctgtgaaccatcactggctacctgggggagctatacagatgttatttgtgatygtgcacccaccccctgggacaggtctgcccttcctgaggttagcggaaaggaagaaagaagaccactactccagggagaattaaacatggcaccatggat

SEQ ID NO: 8650 - DNA, 201 bp, Homo sapiens
tggctcatgcctataatcccagcactttgggaggtcaaggtgggaggattgcttgagcccaggagttcaagaccagcttgggtaacatagtgagactttgyacaaaaaattgaaaaattaatagggcatgcacacctgtagtcccagctacttgggaggctgaggcagggtgatcacttgggcccaggaggttgaggctac

SEQ ID NO: 8651 - DNA, 201 bp, Homo sapiens
gatatttatagtatacaaaaatttttctcctatatagctctgtcccccttaagttattatgtcatatttacattttttttttgtttgagacagagtcttcytctgtcacctagactggagtgcagtggtgtgatcttggctcactgcaacctctgcctcccggattcaagtgattctcctgcctcagcctcctgagtagct

SEQ ID NO: 8652 - DNA, 201 bp, Homo sapiens
cctgggctaatgtgtatgtgtgtgtcttagtttttaatgaaacatttaaaaagtaaaaataaacaaatagatatatagatagaaaaaagcttggagaatamggatataaagaaaatatttttgtacagctatacaatgattacaaaagagtcaaaatgttaaagtaaaaagtgttatggtaaactaagattattgttgaag

SEQ ID NO: 8653 - DNA, 201 bp, Homo sapiens
aatactacaatgtgtggctattcctcaaggatctagaactagaggtaccatttgacccagccatcccattactgggtatatacccaaaggattataaatcmtgctgctataaagacacatgcacatgtatgtttattgcggcactattcacaatagcaaagacttggaaccacccaaatgtccatcaatgatagactggat

SEQ ID NO: 8654 - DNA, 201 bp, Homo sapiens
  misc_feature (1)...(201): n = A,T,C or G, or insertion/deletion polymorphism (see Tables 1-2)
cagatcacctgaggtcaggaattcgaggccagcctggtcaacatggcgaaaccccatctctactgaaaatacaaaaattagctgagcatagtggcatgcgnagtcccagctacttgggaggctgaggcaggagaatcttttgaacccaggaggtggagaggttgcagtgagctgagatagtgccactgcattccagcttgg

SEQ ID NO: 8655 - DNA, 201 bp, Homo sapiens
gcttagtgacaaggatacactctgggacatgttaggcaacttcattgctgtgcaaacatcatagagtgtgtacttacacaaacctagatggtatagcctaycacacatctagactatacgatatagcctgttgctcctgggctataaacctgtacagcatgttactgtatggaatactgtagacaattgtaacacaatggt

SEQ ID NO: 8656 - DNA, 201 bp, Homo sapiens
gaaatgtgctaatttgctcaagcaatgaaaccacatctggtacagcagctgcaattggagtcaccactttgttaagcttacaataatccatggtcattctmcaagatctgtcatctgcacaggctaaatgggagagctgaatggggatgtggtgggaatcaccaccccagcgtctttcaagtccttggtagtagcactaat

SEQ ID NO: 8657 - DNA, 201 bp, Homo sapiens
tttagctctgtatcatctcctgttctacttgctttggatgatttctgttctttttctcatttcgtaaggtggaagtttagactatcgaattgaaatctttwtctctgatttcacctctaagcactgctttagctacatttcacaaattctgacatattcattcagttcaaaatattttcaaatttttcttactttctcttt

SEQ ID NO: 8658 - DNA, 201 bp, Homo sapiens
gaataggcccccaaatctggccataaacaaaatctctgcaggcctgtgacatgttcacaagggcaatgacacccatgctgaaggttgttggtttactgggdcatttccggctgaggccactccctcacccctgtacaatatctgtcccccaacacagccggtagtgctgcagtagatttatgctgcacaaaagctgtgagc

SEQ ID NO: 8659 - DNA, 201 bp, Homo sapiens
gaaagaaatttaaaggtttgctagatacaggagtggacaattcaatcatttctctacagcactggctgtccatgtggccaattcaacctgctcaatttaacatggttggagttgataaagcccctgaaatatatcaaagtagttatattttgcattatgaagggcctgatggacaacctgggactattgaaccaattgtaa

SEQ ID NO: 8660 - DNA, 201 bp, Homo sapiens
ccatgagtaatctattttctatccttagaggagattctagtctcactagcccttgacaattaacaaaggaggctgaggcagagttacagcgaattgaaaarcatgtccataaagcccaaataaatagaatagacccagagaagactctagatttgctaatttttccaactcagcattcacctacccgtattattgtccagg

SEQ ID NO: 8661 - DNA, 201 bp, Homo sapiens
tttcttactgttgaattttgaaagttcttacttgatacaatcctttgtcagatatggtttataaacattttcttccagtatgtagcttgagacagagtctrgctctgtcacccaggctggagtacagtggcacgatctcggctcactgcaacctctgcctccctgcaacctgcacctcccaagttcaagctagtctcctgc

SEQ ID NO: 8662 - DNA, 201 bp, Homo sapiens
gtggagaaatagaagacctttttgatgaggtgacatgaagggtggagtgagcagaggctaggcctggaggagggagcaggacaggcatgcaggaagaaccygctcaagggaggagtcgcacatcccctcagccctcagcttttacttgttggtttccatgagcactgttggaactgtcagaagctggctttgaccaccttg

SEQ ID NO: 8663 - DNA, 201 bp, Homo sapiens
ttgttaaattacatggatatgatcctggaaaaattattgtcccactcacgaagacacaaatacagcaagcttttataaaatagtcttacttggcaaatccrtttagctgactttgtgggtattctcaataatcattttcctaaaatgaaactgtttcaatttttgaaattaactaattggattctgcctaaaataactaaa

SEQ ID NO: 8664 - DNA, 201 bp, Homo sapiens
gtgcaatggcacgttcttggctcactgcaacctccgcctctcgggttcaagtgattctcctgcatcagcctcccgagtacctgggattattggcatgtgcyaccacacccggctaggctaattttgtatttttagtagatacagggtttctccatgttggtcagtttggtctcgaactcccaacctcaggtgatccatccg

SEQ ID NO: 8665 - DNA, 201 bp, Homo sapiens
tctaaatgttttcaaacattctggtatccaaatgctgtgtcaaaagatgctaaaatgtcttgtgccacccaccttcttactacaatcttacatactttcaytgtgccccataatgatcttcatggatgctatatccatttataattccatgggtgaggccaggcacagtggcactgtaatcccagtgctttgggaggctga

SEQ ID NO: 8666 - DNA, 201 bp, Homo sapiens
agtgagctatagtaacaccactaacactgtaccctagcctggtctacagagggagaccctgtctctaaaacaacaacaacaacaacaacaacaacaacaamaaaaaaacaaagaaaaaaactcttgctgtgaatttgataggaaaaatgttcaatttatatattgtttcggaattttggagagcactgacgtctttattct

SEQ ID NO: 8667 - DNA, 201 bp, Homo sapiens
cagcttctattaaaacagataatgcctcaggctatactagccaagctctagctacatttttctctatgtggaatattaagcacattactggcatcccatawaattctcaaggacaagccatagtagaaataatgaatctctccctgaaacagcagttgaaaaagcaaaagaggagaaacagggactacaggacaccccata

SEQ ID NO: 8668 - DNA, 201 bp, Homo sapiens
atgtggaatattaagcacattactggcatcccataaaattctcaaggacaagccatagtagaaataatgaatctctccctgaaacagcagttgaaaaagcmaaagaggagaaacagggactacaggacaccccatatgcagttgaatctagcattattgactttaaattttttgagcctgcctaaaggccagatgctatcg

SEQ ID NO: 8669 - DNA, 201 bp, Homo sapiens
tctcttccaaaccaaaactaattactcagttggagcaaggggcagagccctggactgaggtgcgagaggctccatcaggcacacatgcaggtgagtgggtrgggaacatcccagcagaagctgagcacacggagcagtacgggggttcctgagtggaagctcatctttgagtgccctgttggtgcagaaaggcactggttt

SEQ ID NO: 8670 - DNA, 201 bp, Homo sapiens
catctttcacatccctctactatagctattaagtctctcccaagttggctggaagattctgaaggataggggctacactcaactcatctttgttgtttgaracagagtctcactctgttgcccaggctggagtgcagtggcatgatctcagctcactacaacctccacctcccgggttcaagagattctcctgcctcagcc

SEQ ID NO: 8671 - DNA, 201 bp, Homo sapiens
gccgcttttctccccagtctttctgcacttgggagggctgctgccttcctgagggcctcaggcccatctgtgccatctcccagccttctgaaatcctcaarctctttatgtgatttttctctctctctttccaggcattcaccaggtatcttttgtttctttctacttctgttccattttctttctttcttttttttatat

SEQ ID NO: 8672 - DNA, 201 bp, Homo sapiens
ctatagaataaattcctataagaattgttaaaggttaaaatttttaaatccaccaaatttggtgggtatttccgctattcataaagataatacatgtttayactcctaatgacaacatatgagtgccacttttatagcttgtcagcagtgtcttatatgctttgatccttgcaaatctgagaggtgaaaatattttattat

SEQ ID NO: 8673 - DNA, 201 bp, Homo sapiens
ccctgcagagttctttattcagcaggttctcaggcatgctgatgctggtgctgtggggctggagcccatgcttggaaaatcactgttctagagtgactcaytgtgtgactctactgcagtttctctcttacattcagatgcatatatggcattttccagcttttggctattgcaagtgctgtaaacattcttatactttat

SEQ ID NO: 8674 - DNA, 201 bp, Homo sapiens; identical to SEQ ID NO: 1105

SEQ ID NO: 8675 - DNA, 201 bp, Homo sapiens
gtttacctgtatgtgtagcctagatccagtaccatactatcttgatcactatatctttagttttgaaaaaagtctgtaatcccagcactttgggaggctgrggcaggtggatcacctgaggtcaggagttcaagatcagcctggtcaacatggtgaaacctcgtctctactaaaaatacaaaaaaaaattagctggatgtg

SEQ ID NO: 8676 - DNA, 201 bp, Homo sapiens
gagccaccatgcctggccaattggaaaccatttttgtccttacattttgtcaaaaaatgttttttttttccaatgtaacctggtccctgttactcaattcrtcttgcgctgaagtggagaattgaagatggggcatcaagcattcatttcatctcttattgaattctaataataaaagtacagttgacccttaaacaaaat

SEQ ID NO: 8677 - DNA, 201 bp, Homo sapiens
tgatcctgaggctcattcttacagaacttcactgaagagtcttgtgtgtctatttggcttgagactttcaaaggcaaatatgtttcactttcaatgttttygaaacaaccactttgaagagtcatcacactgtccctgtttctggaaataggagaagatgcttctccccactgttgacaaggggaaatatctagttcaggc

SEQ ID NO: 8678 - DNA, 201 bp, Homo sapiens
ccttcccacactcatagcattggtaaggcttctctcctgtgtggatgcaccggtgaatgtgaaggttcgagctctgactgaagcccttcccacactcaccwcacttgtagggcctctctcctgtgtgtactcgctggtggatgtgcaggtttgagcgctgactgaagctcataccacactcctcacactcatagggcttct

SEQ ID NO: 8679 - DNA, 201 bp, Homo sapiens
gcttacttcacctctttattggctccctgttacccacagctgtgatcttgaagtggtgggttcgagatataccttagggagtgcttaagaaaatcagtacwcttgaggctgggcgtgaggctcacacctgtaagcccagcacttgaggtcaggagtttgagaccagcctggccaacatggtgaaaccctgtctctactaaa

SEQ ID NO: 8680 - DNA, 201 bp, Homo sapiens
ccttctctccactattatcctatgaccctgccacatccccctctctgagaaacacccaagaatgatcaataaatactaaaaaaacaaacaaacaaacaaamaaaaagaggcagcagggcactgtggctcactgtaatcccagaactttgggaggctgatgtgggtggattgtctgaggtcaggagttcaagaccagcctgg

SEQ ID NO: 8681 - DNA, 201 bp, Homo sapiens
aaacattgctgattcttttcatgttttgttttgcggaatcaagaaaactttatttcttttgagctacttgtaagtcacagaaattgggtaaaatatactgttttttttttttttttttgaaacagagttttgctcttgttgcccaggctggagtacaatggtgtgatctcggctcactgcaacctctgcctcctgggttca

SEQ ID NO: 8682 - DNA, 201 bp, Homo sapiens
gactgggggaggccgactgaacaaaatctcatatggtgaattcttagttgtttggtgggggtgcatctgactcagaggaggaccataggctagacctgatmctatctcagatgagttttttggcaatatttcttcagtagctgcttgagtgtccagttcatgcgttccacttttcctgaactttgcggccaacaggctgtg

SEQ ID NO: 8683 - DNA, 201 bp, Homo sapiens
aacattgctgattcttttcatgttttgttttgcggaatcaagaaaactttatttcttttgagctacttgtaagtcacagaaattgggtaaaatatactgttttttttttttttttttgaaacagagttttgctcttgttgcccaggctggagtacaatggtgtgatctcggctcactgcaacctctgcctcctgggttcaa

SEQ ID NO: 8684 - DNA, 201 bp, Homo sapiens
tgcagtggtgtgatcatggctcactgcattctcaacttcctgggctcaaatgatcctcccaaatagctgggactacaggcatgtgccaccatgcccaggawttttttttttttttttttttttttttgtagagatagggtctgttgtccagttgcccaggctggtctcaaactctttgactcaagcaatcctcctgccttg

SEQ ID NO: 8685 - DNA, 201 bp, Homo sapiens
tgcctcctgggttcaagtgattctcctgcctcagcctcccaagtagctggcattacaggtgactgccgccatgcccagctaatttttgtatttttatcagkggggtttcaccatgttggccaggctggtctcgaactcctgacctcaagtgatctgccctccttggcttcccaaagtgctgggattacaggcatgagccac

SEQ ID NO: 8686 - DNA, 201 bp, Homo sapiens
gcaatcctcctgccttggcctcccaaagtgttgggattataggcatgaggcactgcacctaacacgaaattcctttaaagatatcaaggagtgtgtccccygttagcagcaagaaaaattcctctggaggaggaaacatcatcttaggtctctctctcttcttttttttttttttttgagacggagtctcgctatgtcatc

SEQ ID NO: 8687 - DNA, 201 bp, Homo sapiens
ctgtgtcatggaaaaggcgggactgttgctaaggatagtttcagtccacccaccactgggccatgggccttgcaggtttccactgcagtactttgctgccygagcctccattgcaagaaaaatcctcctctgtagggtcatagggaaaagccaccctatggcaccctgtggcattgtgagggggttaattcaaacccagct

SEQ ID NO: 8688 - DNA, 201 bp, Homo sapiens
gaccagcctggccaacatggcaaaatcccgtctctactaaaaatacaaaaatacaaaaaacaaaaacaaaaacaaacaaacaaaaaaactagccaggtgtrgtggtgcatgcctgtaatcccagctactcgggaggctgaggcaggagaatcgtttgaacccgggaggcggaggttgtagtgagctaagattgcatcactg

SEQ ID NO: 8689 - DNA, 201 bp, Homo sapiens
taggtctctctctcttcttttttttttttttttgagacggagtctcgctatgtcatccaggctggagagcagtggtgtgatctcggctcactgcaacctcygcctcccaggttcaagcaattctctgcctcagcctccagagtagctgggattacaggagcccactactatgcttggctaatttatttttatttttattta

SEQ ID NO: 8690 - DNA, 201 bp, Homo sapiens
aaaaacaaaaacaaacaaacaaaaaaactagccaggtgtggtggtgcatgcctgtaatcccagctactcgggaggctgaggcaggagaatcgtttgaaccygggaggcggaggttgtagtgagctaagattgcatcactgcacttcagcctgggtgacaagagtgaaactacacctcaaaataaataaataaataaaatta

SEQ ID NO: 8691 - DNA, 201 bp, Homo sapiens
aggtctctctctcttcttttttttttttttttgagacggagtctcgctatgtcatccaggctggagagcagtggtgtgatctcggctcactgcaacctctrcctcccaggttcaagcaattctctgcctcagcctccagagtagctgggattacaggagcccactactatgcttggctaatttatttttatttttatttat

SEQ ID NO: 8692 - DNA, 201 bp, Homo sapiens
aatgagaacacttggacacaggaaggggaacatcacacactggggcctgtcgtggggtggggggggatagcatcaggaggtatacctaatgtaaatgatgmgttaatgggtgcagcacaccaacatggcacatgtatacatatgtaacaaacctgcacattgtgcacatgtaccctagaacttaaagtataataaaaaaaa

SEQ ID NO: 8693 - DNA, 201 bp, Homo sapiens
aagaattagtgatgcattggaaacatatgtattagtgagtattttacagcaggagataaaaacctacatttgcctcctccaaacttaatttttcctttgcygtcgcccctcaaacactatcacctgattttttttctggcaattttacctactattcaatgctttcgatgattccccttcatgcctctaccattcatccta

SEQ ID NO: 8694 - DNA, 201 bp, Homo sapiens
ttgtctaatcctaagggagtgagatgtatgccttcaggattactttcagaccagatgcctgggctatcctagagcatttgcatgttacatcccctttccayatgaaatgtgttaatatttataagatatggtaaactattctcatttctagaattctggaaagttgacctgatggagaagaaccaggaaaaccaagaccag

SEQ ID NO: 8695 - DNA, 201 bp, Homo sapiens
aaatctgcaatcaagaaatccacttgggtgttggagtaaatggccttgaacagaaagaactagtatctaggaaatgcataatcatataaataaaaatttcyaaaataaagcaaaaggttacatttctaagccttaaagtatttttctttcttcacacttgaatttttattctaagtgactgaacaaaaaatacaccatcaa

SEQ ID NO: 8696 - DNA, 201 bp, Homo sapiens
ttcccacattgctcacatttgtagggtttttcttctgtgtggtctctctgatgaagtagtagctctgagctttgactgaagttcttaccacactgactacmttcgtattgtttctctgcagtgtggattttctcatatggatgaccatctgggctggtgttaagtattttcccacagttattatggtcacagggtttctcc

SEQ ID NO: 8697 - DNA, 201 bp, Homo sapiens
actcaccacacttgtagggcctctctcctgtgtgtactcgctggtggatgtgcaggtttgagcgctgactgaagctcataccacactcctcacactcatarggcttctctccagtgtggactcgctggtggatgtgcagtttggagctctgactaaagcccttcccacacttgtcacatttataaggtttttcgcctgtat

SEQ ID NO: 8698 - DNA, 201 bp, Homo sapiens
ctggggtaagagtccggccagcggacaagagggcagctggtagcagggtgggatgcccgtggcatagggccgagcccccgctaggcacgcgggagcagcarggcttccggaagcgcagggagcgctggactggcgggcgcccgggattcgcgcaggccccgcccctcggcggccccgcccagggagcgctgcggcagtttc

SEQ ID NO: 8699 - DNA, 201 bp, Homo sapiens
tgagaaaattcttttgcaccctggatgttaaatgctttctcatgaatgaggtccttctctctcttctgtatttcaagattttcattctgtactgaattatyagcatactaatgaatacactgtaatattgtccataaaataaataaaaccccttaccttgcaccctatttctctccagccactacctcatttctctgcttt

SEQ ID NO: 8700 - DNA, 201 bp, Homo sapiens
atccacctgcctcagcctcccaaagtgctgggattacaggagtgagccaccatgcccggcccgttttttttgttttaatcaattttttttgtagagatggrggtctcactatgtcacctagggtggtctcaaactcctagcctcaagcaattccccccaactcagcctcccaaagtgttgggagtacagacacgaaccact

SEQ ID NO: 8701 - DNA, 201 bp, Homo sapiens
ttgataaatgggctggagtaacacacccagatgaggaatgctttgcctccaaaatccaaataggcctactaggcattgtgcctctttcttggttgaaggartggtcaaatgcagcaacttattcttcaccttagaaggaatatctcaacaggccccacaccactggacccctagaaattttactgaggtagaagttccctg

SEQ ID NO: 8702 - DNA, 201 bp, Homo sapiens
ttcatgtacatcagagaacacacacaggagagaaaccctatggatgtaatgaatgtcagaaagcctttggtgataggtcagctctaaaagtacatcagagratacatactggcgagaaaccctatgagtgtaaggaatgtgggaaaactttctcccagaagccaaacttcattaatcatcagtgaactcacacaggagaga

SEQ ID NO: 8703 - DNA, 201 bp, Homo sapiens
tcttattacctccctccctagcccaatcagcagaagtgtcccctaaagtaaaacacatatgcatgccaaagtgggtcaagcatgggttgaggacacactcyaatatcatgctgagaacacaagaattttgaaaaaatatataaggagaccaacagaatttaaaaggtacataattaaaatcccagaaaaactggagaggat

SEQ ID NO: 8704 - DNA, 201 bp, Homo sapiens
tgaatctttctgtgtcactctcttcttgtgtcattgctgagttgtcatcttcaccccattcccaccattatcctgacaaccttaacactcgcaggaacaayttacccaacactctgacctcacatttcttaatctccacagtgccaatgatctcagccacatttcatcaaactgtaataaccataatcgggactagtccac

SEQ ID NO: 8705 - DNA, 201 bp, Homo sapiens
tcccctgccctgcactgtcacctctctaggcctaggcagcacttgctctcacccacatcaacctcctggttggtctgactctactcctgctcccccaaacrtgagttttccacatgacagccaaggtgatcttttaaaacaaaaacaaggccaagcatgaaaccctccaaaggcttttcagtggccatccagtaaaatcca

SEQ ID NO: 8706 - DNA, 201 bp, Homo sapiens
agctacgccttgcgcacagagatggagcctagaggcaataggccttgttgagctgtggtgggctgtgcccggtttgagcttccgggccactttgtttaccwactcaagcctcagcaatggcagacgcccctcccccagccaggctgctgcctcacagatcaatctcagactgctgccttagcagtgagcaaggctctgtgg

SEQ ID NO: 8707 - DNA, 201 bp, Homo sapiens
tattttggatattgtgaatattgttgcagtaaacatgggaatgcagatagctctttagtatattgattccttttctttgggatatatacccagtagtggawttgctggatcatatggtaattctatttttagttttctgaggagcctccatactgttctccatagtggttgtactaatttacattcccatcaacagtgtac

SEQ ID NO: 8708 - DNA, 201 bp, Homo sapiens
cgttctcagaactcaaacactgtgctgggagaaccactgctctcttcacagctgtcagacagggacgtttaagtctgcagaagtttctgctgccttttgtkcagctacgccttgcgcacagagatggagcctagaggcaataggccttgttgagctgtggtgggctgtgcccggtttgagcttccgggccactttgtttac

SEQ ID NO: 8709 - DNA, 201 bp, Homo sapiens
tggttttatgtatttgggtcttctctcttttttccttagacttgctaaaggtttgtcgattttatcttttcaaaaaactaattgttttgttgatattctgwatatatatatatatattttacctcaacttcatttatttctgctctgatacttattgtttcttcccttctaattttggattaagtgtgttcttgcttttct

SEQ ID NO: 8710 - DNA, 201 bp, Homo sapiens
ctgatctcacatgatctgcccgccttggcctcccaaagtgagccaccacgcctggcctaatagaagtttttaagagccagacgcttgaacttgtgggcatyggtttgggggaaaagtcagtcagagtaaaattatcttgtggcattgactcttttgcttcctaaggccactggtctcccatgttagttcctccacaaacat

SEQ ID NO: 8711 - DNA, 201 bp, Homo sapiens; identical to SEQ ID NO: 1106

SEQ ID NO: 8712 - DNA, 201 bp, Homo sapiens
tactctcctgtgttcctcagtgttaaacagtgtgagaagaagctgcctgcagtttggccaggttagattgtgtgtcagaaggatggactgcatcagatctrtaagagcttggggattctccatataggagggagtatggtgtttccagtttaagagatcagtggttgaaaagggctgatagatgcaagtccgttgcccccc

SEQ ID NO: 8713 - DNA, 201 bp, Homo sapiens
tcatttctgcaggctaggtcaccacgacctgtctatacccttgcctgcagcagagaaaaacttgtgtttctcacttcacctttaattactgcatttattcrcttttcttggagtgaataaatgcagtacttattgttattattatttttaaatttctgtctcatgcctattgggctccatagtagaattgtgagtggattg

SEQ ID NO: 8714 - DNA, 201 bp, Homo sapiens
tggtgtttgcttttctgtccttgtgatagttttttgagaatgatggtttccagcttcatccatgtccctgcaaaggacatgaactcatcattttttattgytgcatagtattccatggtgtacatgtgccaaattttcttaatccagtctatcattgatggacatttgggttggttccaagtctttattattgtgaatagt

SEQ ID NO: 8715 - DNA, 201 bp, Homo sapiens
gcagggtttctgccgagaggtctgttctctgatgggcttccctttgtgggtaacttgacctttctctctggctgccttaacatcttttcgtttgtttcaaycttggtgaatctgacaattatgtgtcttggggttgctcttctcgcagagtatctttgtggtgttctctttatttcctgaatttgaatgttggtctgcctt

SEQ ID NO: 8716 - DNA, 201 bp, Homo sapiens; identical to SEQ ID NO: 1108

SEQ ID NO: 8717 - DNA, 201 bp, Homo sapiens; identical to SEQ ID NO: 1109

SEQ ID NO: 8718 - DNA, 201 bp, Homo sapiens
gatcgagaccatcctggctaacaaggtgaaaccccgtctctactaaaaatacaaaaaattagccgggcgcggtggcgggcgcctgtagtcccagctactcrggaggctgaggcaggagaatggcgtgaacctgggaagcggagcttgcagtgagccgagattgcaccactgcagtccgcagtccggcctgggcgacagagc

SEQ ID NO: 8719 - DNA, 201 bp, Homo sapiens
tgtaaatttagcatctaaatttaagtggctgtgaagtataaaataacagtagataccaatgacttagaagaaaaaaaagccttgacatctctatttcctcrtctctaaaggtgataacacttgcactatggtgatcctactagtaatacatttggagccacgttgtaaacttcagagtttgcaccattattattatttttt

SEQ ID NO: 8720 - DNA, 201 bp, Homo sapiens
gttgtcttcttttgtggctacgtgatcttctttggtagtatgttttaattcgttgttttttttacttgcagtgaatctattttctttttttttgcattgtrgttcctgtgaggaaaccaaaaaatgtatcttacagatataacaagttattttaaacagatgacaactaaactttgatcacaaagaaaagaagataaacaa

SEQ ID NO: 8721 - DNA, 201 bp, Homo sapiens
ctgagatgacagtctctttctccattagtatggatttttgaagatcccatggatatattgggagtgggcaaggattgggcatgtttgagatgctgtattgrtctgcttgggctgccataacaaaataccacagacttggtggcataaacaacagacatttatttttgcataattctgtaggcttgaagtccatcatcaagg

SEQ ID NO: 8722 - DNA, 201 bp, Homo sapiens
gttcttggtcagttctctggagagctgagtgccggttgttttaaagagtttggcccctccttcctcaggtctctcttcttcctctcttgccatgtgatgcrctggctcaccctttgccttccagcatcattggaagcttcctgaagccctcagcagaagctaagcagatgctggcaccatgcttcctgtacagcctgcaga

SEQ ID NO: 8723 - DNA, 201 bp, Homo sapiens
ggaagattctgtacaggtagcatgaacaaaaagaacatcagccttccttcccacaaattgcagtggacttcaagatgtttggaaagcccagaacattcttmagccctgaaatctccttttatttttattttttttttgagatatggtcttgctctgttgcccaggctggagtgcagtggtgtgatcatggctcactgcatt

SEQ ID NO: 8724 - DNA, 201 bp, Homo sapiens
agataatttaaaagaaatcagagatagagcaacacctgctaggaccttagggtgcggtggctcatgcctgtaatctctgcactttgagaggctgaggtggktggtttacctgaggtcaggagttcgagaccagcctggcaaagatggcgaaaccctgtctctactaaaaatacaaaaatcagccaggcacggtggcgggtg

SEQ ID NO: 8725 - DNA, 201 bp, Homo sapiens
agaagcaaggctgctgctgctgtgctggccgggttccctgaggttcttggtaagtgaggccaggccttggaggctcagcattatttcttccactaaagccyccagtgtgtgccccacagtagagcctgtagcaatgccagctgcagtggttgccatttgggccatcagagctagctaccaaggtgcagcagcacaaaagcc

SEQ ID NO: 8726 - DNA, 201 bp, Homo sapiens
tcccttgattcctggacccatgaatcctggctatgggagaaacagtaccatatattggatgctgattcagagcatacacagccttctggagaactttgccycagccttgcaaaatattgtcacctagttggtgttatatttgtgacttcaaaaggccattccactgttctgtcaatccagctgcttcaggatgatggggaa

SEQ ID NO: 8727 - DNA, 201 bp, Homo sapiens
tccctgaggttcttggtaagtgaggccaggccttggaggctcagcattatttcttccactaaagcccccagtgtgtgccccacagtagagcctgtagcaatgccagctgcagtggttgccatttgggccatcagagctagctaccaaggtgcagcagcacaaaagccagttgcagagggtggggctgctgctgggggctga

SEQ ID NO: 8728 - DNA, 201 bp, Homo sapiens
agtgttcaggtggcaatcttccagtttaatggaattgttgttgggtctcctggtggcagtgttcctccctatggaactaagacctctaggccagcagaacrtaattttgcgggaacaggaagcaaaaattttgcttgtggaacactaggggtgatggtaactggtgccactttcacttccatcccttgattcctggaccca

SEQ ID NO: 8729 - DNA, 201 bp, Homo sapiens
agccttcagagctgagagccccgaacagagatttacccacatatttattagcagcaaaccagtcattagcattgtttctatagatgttaaattaactaaawgtatcccttatgggaaacgaagggatgggccgaattaaaggaacaggttgccctagttaactgcagcaggagcatgtcctaaggcacaggtcgctcatgc

SEQ ID NO: 8730 - DNA, 201 bp, Homo sapiens
ttctcttgggatgcctccctcaggggttcccggatgagcagaattgggtttggttttgcagggaccgctgacatttggggatgtggctgtggcctttaccyggattgagtggagacacctggatgctgctcagcgggccctgtacagggatgtgatgctggagaactatgggaatctggtgtctgtgggtgaggatggctt

SEQ ID NO: 8731 - DNA, 201 bp, Homo sapiens
aatccacctgcctctacctcccaaagtgctgggattacaggtgtgagccactgtgcttcagcctttttatctttcacgctgtatacttactatgccttttytatgtttagacacacaaatacttaccattgtgttacacttgcctacagtattcagtatagtcacatgctatacaggtttgtagcgtaggagcaataggcc

SEQ ID NO: 8732 - DNA, 201 bp, Homo sapiens
gtgccaaattttcttaatccagtctatcattgatggacatttgggttggttccaagtctttattattgtgaatagtgccacaataaacatatgtgtgcatrtgtctttatagtagcatgatttataatcctttgggtgtatatacccagtaatgggattgctgggtcgtatggtaattctagttcaagatccttgaggaat

SEQ ID NO: 8733 - DNA, 201 bp, Homo sapiens
tttctttaagaatgttgaatattggcccccactctcttctggcttgcagggtttctgccgagaggtctgttctctgatgggcttccctttgtgggtaactygacctttctctctggctgccttaacatcttttcgtttgtttcaaccttggtgaatctgacaattatgtgtcttggggttgctcttctcgcagagtatctt

SEQ ID NO: 8734 - DNA, 201 bp, Homo sapiens
gacctatttttgtgcaggcacacctttgtcctccgcaggctatctggcccacgtcctgtgtcattttcattcacaggatattgcattaccaaaccagaggkggtttgcaagttggagcatggacaggtgctgtggatattagaggaagagtccccaagtcagagccacctaggtgagttaataaatatataggaagctata

SEQ ID NO: 8735 - DNA, 201 bp, Homo sapiens
ttgattgatcccttctgggcactgtaaagaatatctgtggtgttttctgtaatgaaatgctcaagtggacctatttttgtgcaggcacacctttgtcctcygcaggctatctggcccacgtcctgtgtcattttcattcacaggatattgcattaccaaaccagaggtggtttgcaagttggagcatggacaggtgctgtg

SEQ ID NO: 8736 - DNA, 201 bp, Homo sapiens
tgaatatgagttaaaggcttgagactcaggagttgaagcttgattgatcccttctgggcactgtaaagaatatctgtggtgttttctgtaatgaaatgctsaagtggacctatttttgtgcaggcacacctttgtcctccgcaggctatctggcccacgtcctgtgtcattttcattcacaggatattgcattaccaaacc

SEQ ID NO: 8737 - DNA, 201 bp, Homo sapiens
aggattcaggaataccagactccttggaatggagtgttgtttttcctttttttttttttcatctctgtaggaaggtgctgggcagggatcccagagaaagmaagggttgaatactcctttaactgccctggatgaagggcactgctacagcagctagtaccggagactctcctatctcatggttgaggcagacccaggata

SEQ ID NO: 8738 - DNA, 201 bp, Homo sapiens
ggttttgtcatgttggctaggctggtctcaaactccttgcctcaagtgatccatctgcctcagcttcccaaagtactgggattacaggtgtgagccaccaygcctggctccaaagggcttttaagaagaaactttcctatgcatttatttactagacaaatccattgagcttgtggcacagacgggttgaagtgtgttacc

SEQ ID NO: 8739 - DNA, 201 bp, Homo sapiens
ttttttttttcatctctgtaggaaggtgctgggcagggatcccagagaaagaaagggttgaatactcctttaactgccctggatgaagggcactgctacarcagctagtaccggagactctcctatctcatggttgaggcagacccaggatagaatagtgaataaaaggaatgcttataggaaacaattttgcgtggaatg

SEQ ID NO: 8740 - DNA, 201 bp, Homo sapiens
atctctgtaggaaggtgctgggcagggatcccagagaaagaaagggttgaatactcctttaactgccctggatgaagggcactgctacagcagctagtacyggagactctcctatctcatggttgaggcagacccaggatagaatagtgaataaaaggaatgcttataggaaacaattttgcgtggaatgctagatggcca

SEQ ID NO: 8741 - DNA, 201 bp, Homo sapiens
ttactgtacatcaaaaaagacataaaaagagaagccatataaatgtattcaatgcagcaaaacatttaaccagaaatcagcacttactaaacatcaaagarctcaggagagaaacttcataaatataatgaatgcagcaaaactttttaccacaagtcatccctcacagtacatcagagaacccacacaggagagaaaccc

SEQ ID NO: 8742 - DNA, 201 bp, Homo sapiens
ctttcactgacagctgacagctgattaaacaacttgctgcctcggttcttctcccaaaaggttatcacttctttgatctgctctgagataggtgccaacaratcggaaagcttattacctgccggctattgacactgagaagctgtaaccaagagagctcactccaacttcaaaactgtgtgtaccatctccacatctttc

SEQ ID NO: 8743 - DNA, 201 bp, Homo sapiens
gataatttaaaagaaatcagagatagagcaacacctgctaggaccttagggtgcggtggctcatgcctgtaatctctgcactttgagaggctgaggtgggwggtttacctgaggtcaggagttcgagaccagcctggcaaagatggcgaaaccctgtctctactaaaaatacaaaaatcagccaggcacggtggcgggtgc

SEQ ID NO: 8744 - DNA, 201 bp, Homo sapiens
ttcacaactctcttatacattctcaagacttaaagcttgtgattctcaaattttatcactctctcacttgtcccgtttgctctagactcctacagtatttyacctacttacgttaaattcttcttgggttttaattctaactttctcaatacagcaaaagctaaaaagtaaaattatatctcacaaatttaaaattttcac

SEQ ID NO: 8745 - DNA, 201 bp, Homo sapiens; identical to SEQ ID NO: 1115

SEQ ID NO: 8746 - DNA, 201 bp, Homo sapiens
gtatatcttctgggccctcccagctgggatgagtaggtctaaagtgactaatccactccaccatcccaatctccctaagcctttgtatcccttcctctacrttaaaccaagggagatgaggcatatccagcttgctcacagtggatcatcttcttatctgtattttagctaaccaagcaaataaactcttagaaccttttt

SEQ ID NO: 8747 - DNA, 201 bp, Homo sapiens
tgagtaatctattttctatccttagaggagattctagtctcactagcccttgacaattaacaaaggaggctgaggcagagttacagcgaattgaaaagcaygtccataaagcccaaataaatagaatagacccagagaagactctagatttgctaatttttccaactcagcattcacctacccgtattattgtccaggagc

SEQ ID NO: 8748 - DNA, 201 bp, Homo sapiens
tgtggtgtttgcttttctgtccttgtgatagttttttgagaatgatggtttccagcttcatccatgtccctgcaaaggacatgaactcatcattttttatkgctgcatagtattccatggtgtacatgtgccaaattttcttaatccagtctatcattgatggacatttgggttggttccaagtctttattattgtgaata

SEQ ID NO: 8749 - DNA, 201 bp, Homo sapiens
agattgtgcccacccagattaaggtgggtctgcctttcccagcccactgactcaaatgttaatcttctttggcaaccccctcacagacacgcccgggatcmatactttgtatccttcaatacaattaagttgacactcagtattaaccatcacaagtccaccggttgtcaacttgaacccatacacatctcctgagatcat

SEQ ID NO: 8750 - DNA, 201 bp, Homo sapiens
tgtctttatagtagcatgatttataatcctttgggtgtatatacccagtaatgggattgctgggtcgtatggtaattctagttcaagatccttgaggaatygccacactgtcttccacaatgtttgaactaatttacactcccaccaacagtgtaaaagtgttcctatttctccacatcctctccagcatctgttgtttcc

SEQ ID NO: 8751 - DNA, 201 bp, Homo sapiens
aaatcacaggacaatctctcttcccaccaaaaaagttgcgtattttggtaagtgtttgtcctagagggaaaaaactgaaatttacattagcagtgctgtgsaagattcttacataaatcaagacctaaaagcagcttgcagtggaggttttggtcccctgttcaggtgcttggacagaagccataagctggtgagtgtgac

SEQ ID NO: 8752 - DNA, 201 bp, Homo sapiens
aggaataccagactccttggaatggagtgttgtttttcctttttttttttttcatctctgtaggaaggtgctgggcagggatcccagagaaagaaagggtygaatactcctttaactgccctggatgaagggcactgctacagcagctagtaccggagactctcctatctcatggttgaggcagacccaggatagaatagt

SEQ ID NO: 8753 - DNA, 201 bp, Homo sapiens
cagatcaagaagctgtcacagatggtggaagagaacctgaggaaagtgtgacaaccagtcataatgcgtaatttaatgatagctatgatagcggtgatcamcattgccatgagtattcctttagcaagggctgacacagagaacaattatacttattgggcatatttatcaatcttggctggcaataatgcctggatgtaa

SEQ ID NO: 8754 - DNA, 201 bp, Homo sapiens
tttagctgctgattacagatggtttctttgtatgaatatgagttaaaggcttgagactcaggagttgaagcttgattgatcccttctgggcactgtaaagratatctgtggtgttttctgtaatgaaatgctcaagtggacctatttttgtgcaggcacacctttgtcctccgcaggctatctggcccacgtcctgtgtca

SEQ ID NO: 8755 - DNA, 201 bp, Homo sapiens
tcccaaagtgctgggattacaggcgtgagccaccatgcctggccaattggaaaccatttttgtccttacattttgtcaaaaaatgttttttttttccaatrtaacctggtccctgttactcaattcatcttgcgctgaagtggagaattgaagatggggcatcaagcattcatttcatctcttattgaattctaataataa

SEQ ID NO: 8756 - DNA, 201 bp, Homo sapiens
ggtgagttaataaatatataggaagctataatcccagggagaaatttgatcctagggagatacttcacatattgacatctttgaaatttttcagagatatrtttttagagttaccagaactttggaagtgactaagaagagttggcctgcttgcctcagatgtatatgttattacacactagcagataacagctaaatggt

SEQ ID NO: 8757 - DNA, 201 bp, Homo sapiens
aaaacaaatgtactgttctagggatcagtgtccttcagtgatgtggctgtgggcttcacccaggaggagtggcagcatctggactctgctcagaggacccsgtacagagacatgatgctggagaactacagcctcctcctctcagtgggtaaggattatgtaatttgcagcttcaaataacatttatttcctttttagctg

SEQ ID NO: 8758 - DNA, 201 bp, Homo sapiens
aatagtaggcatcctatgtagcattttctcttcaactatcaacagtgaacatgacaaggtgttagatctcacacatgttgtatgctctccacttctgatcmctgtagaatgaaaacaaatgtactgttctagggatcagtgtccttcagtgatgtggctgtgggcttcacccaggaggagtggcagcatctggactctgct

SEQ ID NO: 8759 - DNA, 201 bp, Homo sapiens
accatctccacatctttctgcacgtcttccccaatctctttactgatcttcaagtactctgccacagggcaggcaagcagcgagtcaaatgcctgcgcatrtggagctgctcctgcttttgaaggactatctccatatccacggtgcatgtcagaggtatgggatactgcctccaggcggcccactgccctgtccaatttt

SEQ ID NO: 8760 - DNA, 201 bp, Homo sapiens
tataagtcagtccttacagtacatcagtacatcagagaacacacacaggtgataaacccaatgagtgtagtgaatgtgggaaaaaattctgtgagaagtcrtatctccaagtacatcagagaactcacacaggggagaaatcccatgagggtaaagaatgtggaaaaacctttgtttacaattcattcctcatagtacatc

SEQ ID NO: 8761 - DNA, 201 bp, Homo sapiens
ctcctttggaaggaagcttgatgagctcagtgcacatgcgaaattgctccttcatatgacatgagcatccttatgccagagagaaacattttgagtgtgayagaaatgagaaagccatctgttagaatgaggacttatttcagcatcaggatattcaaactctgaagcaaatttttgaataccttgagtgtgggaaagctt

SEQ ID NO: 8762 - DNA, 201 bp, Homo sapiens
cagctacttgggaggctgaggtggcagaatcgcttgtgccccagtggtcaaggttgcagtgagttgtgatcatgccacagcactctagcctgagtgatagygcaagaccccgtctgaaaaaaaaaaaaaattaatataccggcagagtcctcataccaggatttctcattttcctacaatgtataatatcaatagtaggca

SEQ ID NO: 8763 - DNA, 201 bp, Homo sapiens
tcaattcctgctgcaaagacttttgtattcactaccaggtcccttgtggatttttattagggacagtccctaagtgataattttgccataagaagtgaggycctggctgggcgtggtggctcacacctgtaatcccagcactttaggaggccaaggtgggcagatcacgaggtcaggagatcgagaccaacctggctaaca

SEQ ID NO: 8764 - DNA, 201 bp, Homo sapiens
aaaggattttcaatttttccccattaagtatgatgttggctttgggtttgtctaatatatggcttgtattactttgaggtatgggatacccccagtttgtygagcatttttatcataaagggatgttaaattttattgaatgctttctcagcatctattgaaattatatggcttctgttcttggttctgtaaatgcaatgt

SEQ ID NO: 8765 - DNA, 201 bp, Homo sapiens
atctaatacctgattatctgatacctgaccagattaagttcttgactagtttttttttccacttaaatttttctacccccagagagaaagatccctctttyactcttccttcctttactaggtaagatgcagtagatatttctttgttgattgtatggcctgggttgtgagtactcttttacatttattcacacagaaaac

SEQ ID NO: 8766 - DNA, 201 bp, Homo sapiens
tgtctgccaacaagtctaacttgacttcttcctttctagttcagatgccctttattttttctctcagctaattgctctagccaggacttccagaattataytgaataaaagtggtgaaagtggggatctttgtctggctccagatgttagagaaaggattttcaatttttccccattaagtatgatgttggctttgggttt

SEQ ID NO: 8767 - DNA, 201 bp, Homo sapiens
cccaagctcaacatgattaaaactggcctcttggattttctctcccaaacccacaacctctggagcattccttccccttcttgtttgatagcagacccctwggaattatttttgaactgtttttttcttgtcttacacatcttatttgtcagaaaaacctctggggcatacatccagaatatatccacagagtctgacctc

SEQ ID NO: 8768 - DNA, 201 bp, Homo sapiens
tagctgggcatggtggcgggtgcctgtagtcccagctactcgggaggctgaggcaggagaatggtgtgaacccaggaggcagagcttgcagggagcagagrtcacaccactgcactccagcctgggcgacagagcgagactccttccccccgccccccccaaaaaagtgaggtcctccaaataattggcttattattggag

SEQ ID NO: 8769 - DNA, 201 bp, Homo sapiens
acttgtaatcccatttactcgagaagctgaggtgggagcatcacctgagcctgggaggttgaggctgcagtgagccatgatcacaccactgcacaatccakcctgggtgacagagccagacactgtgccaaaaaaaaaaagaaaaaaaaagcatgtgaatatgtctctttttcatgaaaaatatgttaacatttataatct

SEQ ID NO: 8770 - DNA, 201 bp, Homo sapiens
acctctgcctccctgcaacctgcacctcccaagttcaagctagtctcctgcctcagccacccaagtagctgggattacaggcacctgccaccatgtccagstaatttttttttttttttttaagtagaggcggagtttcaccatgttggccaggctggtctcgaactcctgacctcaggtgatccgcctacctcggccttc

SEQ ID NO: 8771 - DNA, 201 bp, Homo sapiens
tctcaagaaaaaaaaaaaaaaaaaaaaaaaaaaagaaaaagaagccagagaatctgcagagcaaaggactaagagagaagctggaggaaacagaaaaactrtgatttcatgcatgacaaagaatttcaagagaaggtcaacactatagaaaccatcaataaaactgataatggtaaatatgctgaaataaaaattaaaaaa

SEQ ID NO: 8772 - DNA, 201 bp, Homo sapiens
tcttcccctccctagccacctgtttaaactattgatcccttagctcccagtttaatgtcacttcagaggctctccgtaagacacatacacaacccgcattmcatcacgtctttgttctctcagagcggtgttccattcttcacaggacttactgaccgtatagtaacactccaaagaatgacatcataaatgatgtttaaa

SEQ ID NO: 8773 - DNA, 201 bp, Homo sapiens
gagaaaggaggcaccaagcctgttccttgggattcctgcctgagtgacggtatggtggtgctatataatcagataggaaatgcaacaggaagaggctgaartagggaaggcagcagaactgccttgtataatctgtggtgttggtggaacattcttgcagtactggtcagtaagctgtgagatatatataggtctggaact

SEQ ID NO: 8774 - DNA, 201 bp, Homo sapiens
gattcacaatacaatcctgacttccagtaattgtactggccatgccttccaaaactagccaggaggaaagctcatgtaacagatcctgaagtgttttctgytgaagattctccacagaattttcattcaagtctcctagggaacaaagacaattcagtggtaagaacaaagggtagacttcaagatttcagagtgagagtg

SEQ ID NO: 8775 - DNA, 201 bp, Homo sapiens
tttctctgcagtgtggattttctcatatggatgaccatctgggctggtgttaagtattttcccacagttattatggtcacagggtttctcctctgtatgasctctctgctgactacaactgaccacctgtgatttccatccatgaatgtctttgcagttacagtcaatgggatccaaagattcttttaactggccattctg

SEQ ID NO: 8776 - DNA, 201 bp, Homo sapiens
actttccacaaaactagaacacaactcagccagctttgccaccttataacaaggattgcctttcctccagtttccagtaacacggtcctcatttctgtttmggcctcaccagaatggcctttcacatccacatatctatgaacattgtgttcatgttgacatatgtattctgggacaatagaggctctctctgtttctctt

SEQ ID NO: 8777 - DNA, 201 bp, Homo sapiens
tgttcaacttggtattttaaaaaggatttttacatctatattaagagatattgatctatgagtttttcctatgatgtcctttttggctttggtatctgggyaatgttggtctcatgacttttctttgggggaaggttatcagctaaaaattcaatttaataggactattcaagttctctcaagtgggctttggttctatag

SEQ ID NO: 8778 - DNA, 201 bp, Homo sapiens
ccttttctcctcccattggagcctctatctcttcatctataagtgggtagaattatctatatctggaagagtggaactaagccttgaacaaaccattattrcttgtctaatgtgtgccccctgcctcgtgctcagtgggtccaggagagggagctcagatgttaagactgcacaagtacagcttagcgcctgggtgccatc

SEQ ID NO: 8779 - DNA, 201 bp, Homo sapiens
tgtcaaaaatgcatgaatactgacttttatgtttgcctgtgtgattacctttaccagtgttcttttccttttcatttggatttgagttactgtctggtgtrctttcactttgccgtgaaggatttttagcatttcttgtcaggaacatttactcatgatggagtagccacagttctactccccactttgctcctgtagatg

SEQ ID NO: 8780 - DNA, 201 bp, Homo sapiens
gcctggcacttgtgctgttgcttcccctgcttctgttcagcgtgctctcctggtgtctaagagcatgaaggtgcaaatctgttgtagcccacaacccaggrgctgatgaaaaaatagcaggagcatttggtaccagcctctcctgctggagaatgtagctcaactgctttccccatgcaaaacccctagccagtgcacctg

SEQ ID NO: 8781 - DNA, 201 bp, Homo sapiens
accgcgcctggcgtaggacactatttaactctgttttgggactttttcttttcactggggtatttttctttttattagaggagttcataataaacagtaayatctagcaagataagcccatttataatttttgtttttgacataccttttttcccttttttcttttttttgagatggagtcttgctttgttgcccaggctg

SEQ ID NO: 8782 - DNA, 201 bp, Homo sapiens
cactggcaggagcaagctccgtgtccagaatggccagccagatcccacacttgctcgcacacttggatggcggtgccaaggcgagggtgcccactaccccmaaaccctagagggagtgttacggtgctctgttagttttgctgtctgcagacagctgtgtgtttgcagctcagttggccccttgtctcgttgcatggggtg

SEQ ID NO: 8783 - DNA, 201 bp, Homo sapiens
gaaacggccagatattttaataattacaggaagtgaaaattgactaaattctcctgataaaagacaaagataagttggattttgagggttttttttgttaytttattttatttgtttggagacagagtcctactctgatgcccaggctggagtgcagtggtgtgatcacagctcactcaagccttgaccttctaggctcaa

SEQ ID NO: 8784 - DNA, 201 bp, Homo sapiens
tgaacaaatgctaaaataagcaaaacactatcactttcaaacctgcaaatgagagaaagtggaaaattaaaaccaaccattgtaaacaaattgaatcagayccaaaaagggtaataaagtattggagagtaaagagtggaaagtgtggaacacctaaaagctgcacccctgaccaaaaaaataaagaaacggccagatatt

SEQ ID NO: 8785 - DNA, 201 bp, Homo sapiens
tcttaatatagctctatcctttcaccaacaaacagtactatttgtagttctattaacctgccctgtgttttcagtgtccccaggcttttttttttttttttgctttgtctttggcccataatacattgttattattattattagagacggagtcttgctctgtctcccagtttggagtacaatggcatgatctcggctcac

SEQ ID NO: 8786 - DNA, 201 bp, Homo sapiens
ttgagcctgggaggtcgaggctgcagtgagccatgattgtgccactggacagcctgggagacagagcaagacccttcctcaaaaaaaaaaaaaaaaaaaaatatatatatatatatatatggcttccaaataagctgtgatgaaatattccagctaattagataagaaaactacccacactccgctgtgccttaaaaatct

SEQ ID NO: 8787 - DNA, 201 bp, Homo sapiens
ggtcaggctggtctcgaactcccaacctcaggtgatttccccgcctcagactcccaaagtgctgggattacaggcatgagccaccatgcctggcctttttytttcttttttttttttttgagacagagtctcactctgtctcctgggggcatgatctcggctcactgctacctctgcctcgcaggttcaagcgattctcct

SEQ ID NO: 8788 - DNA, 201 bp, Homo sapiens
gagcagtcctgtggccctcccagcagattgcaggcatctggggacctgctacagcctgatggggaattcccagggaggccccagagtcaggcagaagacaygcagcaggccctcttgccctcccagccttctgaatttgcagggaagggcaggaaggatgtgcagaagaccgggttcaggagctccggaaggttctctgac

SEQ ID NO: 8789 - DNA, 201 bp, Homo sapiens
ctagaggggagtatgggttcagaaatggctgggaacgaggcatggcttgagagtgagagcatgtccccaggagacccctgtagtagcagagccctgcaagwgctcagcatagggtcccagtgggcaagggctgaagatgccctgcaggcactgaaagtgggggagaagcccccaacttgggaagtcaccttgggagccagt

SEQ ID NO: 8790 - DNA, 201 bp, Homo sapiens
cgcagcaggccctcttgccctcccagccttctgaatttgcagggaagggcaggaaggatgtgcagaagaccgggttcaggagctccggaaggttctctgasaaggggtgcttagggtccaaactagggccggacccaagccgggatcaaggctcaggaaggacctcagtgaaggctctggacgaagacaaggaggcagaag

SEQ ID NO: 8791 - DNA, 201 bp, Homo sapiens
tggactcagaggagcagctgccaggccgtgccccgggcatcctcctccaggacggcgccacaggcctgtgccttccaggccgccacatggacatgctcacygccgcagacaggctgcccactcaagcccctctgtccacctcccagagtgtgtctggtaagaacatgacagcttcccaggggccatgtgccctcctatgga

SEQ ID NO: 8792 - DNA, 201 bp, Homo sapiens
aacaagaaaggaaatacaaccagcttcagctggagaagggacagacaccaccagaaagccacttccagagaaagatcagtcaccatccacagggtctacaycccaggaaaggaggcacacggtgggaagatgtcctgcagaaaggcaagcctggggcagatgctttccagagctgggggtctggcccaccaaggcagttta

SEQ ID NO: 8793 - DNA, 201 bp, Homo sapiens
gcaagggcgaggcccacaggaggcccagaacaggggagcagggacacaggtccaagggacccaggacctctgaagccagtgggaggagccaccctgcccamgccagggaaataggagacaaacaagaaaggaaatacaaccagcttcagctggagaagggacagacaccaccagaaagccacttccagagaaagatcagtc

SEQ ID NO: 8794 - DNA, 201 bp, Homo sapiens
gggctctggggaccactggtaacccctcagcgtcttcagtctgtgttgctcaggatccagagcagctgcacctgaaagcgcaggtggtcagtgagattgcrctcatagtgcaggtggactcagaggagcagctgccaggccgtgccccgggcatcctcctccaggacggcgccacaggcctgtgccttccaggccgccaca

SEQ ID NO: 8795 - DNA, 201 bp, Homo sapiens
gtcaccagccctgagctcccagagcactggtggcaaggaaggaatgccatccaccaggagcagtcctgtggccctcccagcagattgcaggcatctggggmcctgctacagcctgatggggaattcccagggaggccccagagtcaggcagaagacacgcagcaggccctcttgccctcccagccttctgaatttgcaggg

SEQ ID NO: 8796 - DNA, 201 bp, Homo sapiens
cagcctgatggggaattcccagggaggccccagagtcaggcagaagacacgcagcaggccctcttgccctcccagccttctgaatttgcagggaagggcargaaggatgtgcagaagaccgggttcaggagctccggaaggttctctgacaaggggtgcttagggtccaaactagggccggacccaagccgggatcaaggc

SEQ ID NO: 8797 - DNA, 201 bp, Homo sapiens
tcccagagtgtgtctggtaagaacatgacagcttcccaggggccatgtgccctcctatggaagggaggggacagtccagggcagcaggagcctgggagccmaaaagcaaaggccccacagaagagtcagaagacgctgggctgtgcgggcaagggcgaggcccacaggaggcccagaacaggggagcagggacacaggtcc

SEQ ID NO: 8798 - DNA, 201 bp, Homo sapiens
cagaggcctttccgactggacacaagggcagggggtgttctcagcccccaacatgcagccttgtgggcagaacctggcagagcaggactgtcctggaatcygggaaacccaaacccagactagaggggagtatgggttcagaaatggctgggaacgaggcatggcttgagagtgagagcatgtccccaggagacccctgta

SEQ ID NO: 8799 - DNA, 201 bp, Homo sapiens; identical to SEQ ID NO: 1155

SEQ ID NO: 8800 - DNA, 201 bp, Homo sapiens
tgctacagcctgatggggaattcccagggaggccccagagtcaggcagaagacacgcagcaggccctcttgccctcccagccttctgaatttgcagggaakggcaggaaggatgtgcagaagaccgggttcaggagctccggaaggttctctgacaaggggtgcttagggtccaaactagggccggacccaagccgggatc

SEQ ID NO: 8801 - DNA, 201 bp, Homo sapiens
tgcatggctgacaaagcctggaccatcagcagagttgtgggacaaatcctggtggacaaactggggcttcagtggggacgaggtccctcagaggtcaatcrccacaaaggtgacttccacgcccaggagaatgtgccttcctgctgccacaggggtcactgccaccaagaacgtagcagagagatgagagctctggcctgc

SEQ ID NO: 8802 - DNA, 201 bp, Homo sapiens
tggaccatcagcagagttgtgggacaaatcctggtggacaaactggggcttcagtggggacgaggtccctcagaggtcaatcgccacaaaggtgacttccrcgcccaggagaatgtgccttcctgctgccacaggggtcactgccaccaagaacgtagcagagagatgagagctctggcctgcagccctaaagccaccccc

SEQ ID NO: 8803 - DNA, 201 bp, Homo sapiens
gcaggagcctgggagcccaaaagcaaaggccccacagaagagtcagaagacgctgggctgtgcgggcaagggcgaggcccacaggaggcccagaacagggragcagggacacaggtccaagggacccaggacctctgaagccagtgggaggagccaccctgcccaagccagggaaataggagacaaacaagaaaggaaata

SEQ ID NO: 8804 - DNA, 201 bp, Homo sapiens
ctggtggcaaggaaggaatgccatccaccaggagcagtcctgtggccctcccagcagattgcaggcatctggggacctgctacagcctgatggggaattcycagggaggccccagagtcaggcagaagacacgcagcaggccctcttgccctcccagccttctgaatttgcagggaagggcaggaaggatgtgcagaagac

SEQ ID NO: 8805 - DNA, 201 bp, Homo sapiens
tctgacaaggggtgcttagggtccaaactagggccggacccaagccgggatcaaggctcaggaaggacctcagtgaaggctctggacgaagacaaggaggyagaaggtgacttacggaggtcctggaagtaccaatcagtaagttccacacccagggacccagacaaggagcatctggaaaacaagctgcaaatccatctg

SEQ ID NO: 8806 - DNA, 201 bp, Homo sapiens
gccctcctatggaagggaggggacagtccagggcagcaggagcctgggagcccaaaagcaaaggccccacagaagagtcagaagacgctgggctgtgcggrcaagggcgaggcccacaggaggcccagaacaggggagcagggacacaggtccaagggacccaggacctctgaagccagtgggaggagccaccctgcccaa

SEQ ID NO: 8807 - DNA, 201 bp, Homo sapiens
gttcccattttcctgggaaaacgtcctcagaatggtccaggagacaacagaacaacaagcaagtcagtcccgaccgtgagtggccctctcgctgccccacygcctgagcaggagggagtccagaggcccccgagagggtcccagtcagctgatacccatgggcgatcagaggcctttccgactggacacaagggcaggggg

SEQ ID NO: 8808 - DNA, 201 bp, Homo sapiens
tcccaggggccatgtgccctcctatggaagggaggggacagtccagggcagcaggagcctgggagcccaaaagcaaaggccccacagaagagtcagaagaygctgggctgtgcgggcaagggcgaggcccacaggaggcccagaacaggggagcagggacacaggtccaagggacccaggacctctgaagccagtgggagg

SEQ ID NO: 8809 - DNA, 201 bp, Homo sapiens; identical to SEQ ID NO: 1158

SEQ ID NO: 8810 - DNA, 201 bp, Homo sapiens
ccccagctggtccccaccaccacaggccaagaatggcaagcacctcgggcggcccccatccacagctgcaggaactgatgtctgcacagaggtgtcttgcytcctgaactagaccagtcttcttgcatgtctcctgggggagacagggggttctactcaaataaaactgatgcctacacaataaacctgtcctgcgtgggt

SEQ ID NO: 8811 - DNA, 201 bp, Homo sapiens
catctggggacctgctacagcctgatggggaattcccagggaggccccagagtcaggcagaagacacgcagcaggccctcttgccctcccagccttctgamtttgcagggaagggcaggaaggatgtgcagaagaccgggttcaggagctccggaaggttctctgacaaggggtgcttagggtccaaactagggccggacc

SEQ ID NO: 8812 - DNA, 201 bp, Homo sapiens
acaacagaacaacaagcaagtcagtcccgaccgtgagtggccctctcgctgccccaccgcctgagcaggagggagtccagaggcccccgagagggtcccartcagctgatacccatgggcgatcagaggcctttccgactggacacaagggcagggggtgttctcagcccccaacatgcagccttgtgggcagaacctggc

SEQ ID NO: 8813 - DNA, 201 bp, Homo sapiens
ctgaatttgcagggaagggcaggaaggatgtgcagaagaccgggttcaggagctccggaaggttctctgacaaggggtgcttagggtccaaactagggccrgacccaagccgggatcaaggctcaggaaggacctcagtgaaggctctggacgaagacaaggaggcagaaggtgacttacggaggtcctggaagtaccaat

SEQ ID NO: 8814 - DNA, 201 bp, Homo sapiens
tcaggcagaagacacgcagcaggccctcttgccctcccagccttctgaatttgcagggaagggcaggaaggatgtgcagaagaccgggttcaggagctccrgaaggttctctgacaaggggtgcttagggtccaaactagggccggacccaagccgggatcaaggctcaggaaggacctcagtgaaggctctggacgaaga

SEQ ID NO: 8815 - DNA, 201 bp, Homo sapiens
ccaaatgtgctgttcccaagtctgacacccacaggaaacctgggaagctggcatcctggaggggtgggaaagcccacgtgaacacctcccaggagctttcyttcctccatccctgcacccagcagatactggaagtacatcttgtaaggttctgtgtgaggcacagctggggtacagacctccagtccctggagcccataa

SEQ ID NO: 8816 - DNA, 201 bp, Homo sapiens; identical to SEQ ID NO: 1153

SEQ ID NO: 8817 - DNA, 201 bp, Homo sapiens
agctctgctacccctcaccggctgagcggtggatggagaagtggttctgggccccttgagctgggtcatatgaaacattgtgattaaggaaatatgatctccttcatttgaatgccttctgcctctttctttctctctttctctctttcttcctttcttcctttttttctttttgagatggagtcttgctctgttgcccag

SEQ ID NO: 8818 - DNA, 201 bp, Homo sapiens
tgtaagtaattgccaaacaacttgaaatcattttaagcctttgcatactctgtgcttatctgtgaccatagatggtcattctggaggcattatagaatgtygtagttgagggaccgtggggactattgagccacttctcactttacagggaagccaggaggtaggtttggagagggaaatccagggtcggcagagtccggg

SEQ ID NO: 8819 - DNA, 201 bp, Homo sapiens
aatgaagacctgacaatcctgggcaaagcttcctgcagagccgcaatgcttcgttcggcatcaggaggcactacttaatttagacagggcacagttttccrcgtcgcctccgcctctcctgccctacgactgcagtggtgccagctgatggtttccagcatctgctctgatgagtctggcctgtgccttccagcttgttaa

SEQ ID NO: 8820 - DNA, 201 bp, Homo sapiens
gaatgctggcagctgtgccaatagaaaagggaaacctggaagccaggtatgttcaacatggaggttccctcttcccttttctttgtcgccacgtgtgcggkcgtcatggtgccagccaagtaaagactccatttgcataataaaagattagagtgggatagccagcctcttccgggctatgtaaatggcatatctggtcca

SEQ ID NO: 8821 - DNA, 201 bp, Homo sapiens
actgtgccaggccacgaagcattttactagaatttttatagagagagctattgcgtattgaatgggagaatttctgattcaaaatatgattaaaatgtgcmttttccccaacaatcttgaaacagaagctggcctgaggatgcctctatgtgcaagtcaggcgtctgttttctacgttgaatggactagcgtcatctgcac

SEQ ID NO: 8822 - DNA, 201 bp, Homo sapiens
gatccgcctgcctcggcctcccaaagtgctgggattacaggtgtgagccaccgcacccagccccagtccttcctttttgtcttctcttccgacatctcagrctctgctcacctcgtttcctgctgaaaagccgcatccctggctgtctgtgtgaagcagaatctaggggcctccttcatgctccagcttccatccttgagg

SEQ ID NO: 8823 - DNA, 201 bp, Homo sapiens
ttatttctgaagaactgtggtgatgtgggctgaaaatacccctttttctctctgccctttcctctctctctctctcgttctttctcttcctccccaccccwcctccattttctctctggctctgtcccctgctacttgttttgcaggctggggttgttttggagtcctcaaatgggccatggttttgcttggctggctgac

SEQ ID NO: 8824 - DNA, 201 bp, Homo sapiens
tcctatccaatcctttctttttttttttgagacagactctttctctgtcgcccaggctggagtgcaatggcatgatctcagctccctgcaacctctgcccsctgggttctagtgactctcctgcctcagtcacccgagcagctgggactacaggcgcccgtgaccaaggctggctaatttttgtatttttagtagagacgg

SEQ ID NO: 8825 - DNA, 201 bp, Homo sapiens
atggaaaattaaagttaatttaaaaatacctcatcaaacatttgatttcttataaacattaaaatcagcatttcgtctgtagctggactttaaaaaaatcrttaaaagctgtttgtgaaacatatacccacaagaatcatagttaaattattgtcttatctgataacctccagagcctacatggctcaacatgaagctcaa

SEQ ID NO: 8826 - DNA, 201 bp, Homo sapiens
tggtggaggctgggggacgtgaggtccgaagagaaagtccagggtgctcttggatgaaagagcccctcctggtgcctgctgcaggttgagagatatgttgktcccatttgtcttttgtctcactcacttgctgtgctttttctttttgttgtttcacccagcgtcccgaacccacaagctcactgtgcttccttcccgtaa

SEQ ID NO: 8827 - DNA, 201 bp, Homo sapiens
ccatgtggtagcaaagatctctgagcgattatgaccccagttaacagtaaatcctactcgctcctgatttttacagtcttcacttatctattctgtaaacsatttaccccacacactcaccatcagataccctggccatgggaacgggacacaagatgattggacggggcagtgcccctcgggatttgcggccagctgggc

SEQ ID NO: 8828 - DNA, 201 bp, Homo sapiens
tagcctgttaggaactgggctgcacagcaggaagtgagtggtgggtgagtgagtgaagcttcacctgtatttacagctgctccctatcgctcacattaccrcccgagctccacctcctgtcagatcagcagcagcattaaattctcttgggagcacaaaccctactgtgaactgcacatgtgagggatctaggttgcatgc

SEQ ID NO: 8829 - DNA, 201 bp, Homo sapiens
ggccagctgggcttgtcacccacaggctctcctgggactatgcaaaatgttactcggggttttcctcctggcgcctgaaaatgggttctgctaaaatcccraatctacctgtccaggttcaggggatttcaattaaaactcaaaaggagaaggagttcagctgtagcttcacgttcacacttgcactgaaacgttccactt

SEQ ID NO: 8830 - DNA, 201 bp, Homo sapiens
gcaaatatcacaattatcacatcatcatacgatatgatatgcaatatgaaatccatatgcaaaggtctgtatgcatttgtatataatacatgcatattatrtacaaatacattaatatcatttaatattaaatttttatctgacatacacattaataatttacaatttaattactaataatattactgatgctatgaatat

SEQ ID NO: 8831 - DNA, 201 bp, Homo sapiens
ggcatccagttttcttttttcaaggcctttattttaaagccatggaaagggggtcatttcaccaagtggaaatgccttcttgaaacagctcactgttccargacccagcaactaaaatgctaggagttttttcaaacaaaagcttgaataactgtcagtgtctttctctcttcacccctatacctgaactcattgtggtgg

SEQ ID NO: 8832 - DNA, 201 bp, Homo sapiens
gacttctgcttatgatacagagcccacacgcattctcacacatgcacatgtgtccacatgccccccatgctacatgtctacatgtgtcaacatatgcccamatgcaccaacacaaatcacacacatccacacatggtgacacatatgcatacacacacacaccagatgtctacatgtgtcaacatatggccacatgtgcca

SEQ ID NO: 8833 - DNA, 201 bp, Homo sapiens
ggcatcgtcgcctcgccaccacctccattcaccaactcgggggtggggacgctgccacttctgtttcgtccacatgcatagggagctccttttaaaaaggygtggaagctgtgagtttccacacattcccctctcctcagccaaatcgctgaatgaaacaagggctcctgtggcttgggaacgaataaacatgcccagcgc

SEQ ID NO: 8834 - DNA, 201 bp, Homo sapiens
cattctccctgacccatgtggtagcaaagatctctgagcgattatgaccccagttaacagtaaatcctactcgctcctgatttttacagtcttcacttatytattctgtaaacgatttaccccacacactcaccatcagataccctggccatgggaacgggacacaagatgattggacggggcagtgcccctcgggatttg

SEQ ID NO: 8835 - DNA, 201 bp, Homo sapiens
ggaacgggacacaagatgattggacggggcagtgcccctcgggatttgcggccagctgggcttgtcacccacaggctctcctgggactatgcaaaatgttrctcggggttttcctcctggcgcctgaaaatgggttctgctaaaatcccaaatctacctgtccaggttcaggggatttcaattaaaactcaaaaggagaag

SEQ ID NO: 8836 - DNA, 201 bp, Homo sapiens
catatccacgtgtctacacacatgaccacacagtcacagactacacacatccacatgcatccacacacatccatacatttctacacacatgcatacacgtrcacacattcacaaaagtccacgtgtctacacacatctgcacatgctcgcacatctctacacacatgcacatacatacacacatgctcacacacgtacacc

SEQ ID NO: 8837 - DNA, 201 bp, Homo sapiens
gcatccacacatatgcacacacctgcatgcatcaacatgtgtccacatgcatccacacatgtgtccacacaattcacatgtgtagacacacatgcacacayatacacatccatgcacacacccacacccacatgtgccaacacatgtctacgtgcatcaacatacatgtatttacacatgttcacacatgtccacacatat

SEQ ID NO: 8838 - DNA, 201 bp, Homo sapiens
gcagctctgctacccctcaccggctgagcggtggatggagaagtggttctgggccccttgagctgggtcatatgaaacattgtgattaaggaaatatgatctccttcatttgaatgccttctgcctctttctttctctctttctctctttcttcctttcttcctttttttctttttgagatggagtcttgctctgttgccc

SEQ ID NO: 8839 - DNA, 201 bp, Homo sapiens
cagctctgctacccctcaccggctgagcggtggatggagaagtggttctgggccccttgagctgggtcatatgaaacattgtgattaaggaaatatgatctccttcatttgaatgccttctgcctctttctttctctctttctctctttcttcctttcttcctttttttctttttgagatggagtcttgctctgttgccca

SEQ ID NO: 8840 - DNA, 201 bp, Homo sapiens
gagtgcagtggccgcaacctctgcctcccgggttcaagcaattctcctgcctcagccacctgagtagctgggatcacaggtgtgcaccactacacccagctttttttttttttttttgtatttttagtagagacagggtttcactatgttggccaggctggtctcgaactcctgatttcaggtgatccgcccgccttggcc

SEQ ID NO: 8841 - DNA, 201 bp, Homo sapiens
agtgcagtggccgcaacctctgcctcccgggttcaagcaattctcctgcctcagccacctgagtagctgggatcacaggtgtgcaccactacacccagctttttttttttttttttgtatttttagtagagacagggtttcactatgttggccaggctggtctcgaactcctgatttcaggtgatccgcccgccttggcct

SEQ ID NO: 8842 - DNA, 201 bp, Homo sapiens
gtgcagtggccgcaacctctgcctcccgggttcaagcaattctcctgcctcagccacctgagtagctgggatcacaggtgtgcaccactacacccagctttttttttttttttttgtatttttagtagagacagggtttcactatgttggccaggctggtctcgaactcctgatttcaggtgatccgcccgccttggcctc

SEQ ID NO: 8843 - DNA, 201 bp, Homo sapiens
gcgcagtggctcattcctggaatcccagcactttgggagcctgagccaggaggatcacttgagcccaggaattcaagaccagcctgggcaacatagtgagwccccacctttataaaaaataaacattcagctgagcatggtggtgcatgcctctagtcccagctacttgggaggctgaggtgggaggatcacttgagtcca

SEQ ID NO: 8844 - DNA, 201 bp, Homo sapiens
tgcagtggccgcaacctctgcctcccgggttcaagcaattctcctgcctcagccacctgagtagctgggatcacaggtgtgcaccactacacccagctttttttttttttttttgtatttttagtagagacagggtttcactatgttggccaggctggtctcgaactcctgatttcaggtgatccgcccgccttggcctcc

SEQ ID NO: 8845 - DNA, 201 bp, Homo sapiens
aaagaccagctttggggccaggcgcgttggctcacgcctgtaatcccagcattttgggaggctgaggcaggtggatcacctgaggtcaggagttcgagacyagcccggccaacatggtgaaaccccgtctctactaaaaatacaaaaattgccgggcatggtggtcggtgcctgtaatcccagctacttgggaggctgagg

SEQ ID NO: 8846 - DNA, 201 bp, Homo sapiens
ctcactctgtcacccaggctggagttgagtggtgagatctcagtctcggctctctgctacctctgcctcccgggttcaagcgattcttgtgcctcagcctyccaagcagctgggattacaggcccatgccaccacgcctggctaatttttgtatttttagtagacacaaggttttgccatgttggccaggctggtctcgat

SEQ ID NO: 8847 - DNA, 201 bp, Homo sapiens
ttctctctcactttgtttcctgtctcattttcttttttccatttccctccctcatttccttccctccctcccccctccctccatcctatccaatcctttctttttttttttgagacagactctttctctgtcgcccaggctggagtgcaatggcatgatctcagctccctgcaacctctgccccctgggttctagtgactc

SEQ ID NO: 8848 - DNA, 201 bp, Homo sapiens
tttccttccctccctcccccctccctccatcctatccaatcctttctttttttttttgagacagactctttctctgtcgcccaggctggagtgcaatggcrtgatctcagctccctgcaacctctgccccctgggttctagtgactctcctgcctcagtcacccgagcagctgggactacaggcgcccgtgaccaaggctg

SEQ ID NO: 8849 - DNA, 201 bp, Homo sapiens
tctttttttttttgagacagactctttctctgtcgcccaggctggagtgcaatggcatgatctcagctccctgcaacctctgccccctgggttctagtgaytctcctgcctcagtcacccgagcagctgggactacaggcgcccgtgaccaaggctggctaatttttgtatttttagtagagacggggtttcaccatgttg

SEQ ID NO: 8850 - DNA, 201 bp, Homo sapiens
gtgtctcacactgtggtcttttgtgcgcaggtgcgtggcgtctactccagatcgcaggaccatccaggtaagagtgtttccttctcactctgagcaccgcyctccccctgcctagtgcaggtatctcaggaacagcccacttgttcatctctgaggcatcagcgaatggcccttgttgggctcctggtccccgacctcact

SEQ ID NO: 8851 - DNA, 201 bp, Homo sapiens
gtgtgtctcacactgtggtcttttgtgcgcaggtgcgtggcgtctactccagatcgcaggaccatccaggtaagagtgtttccttctcactctgagcaccrctctccccctgcctagtgcaggtatctcaggaacagcccacttgttcatctctgaggcatcagcgaatggcccttgttgggctcctggtccccgacctca

SEQ ID NO: 8852 - DNA, 201 bp, Homo sapiens
aaattcagcagccatcacgccctggtgtgggaactgagtggggccactggagtggccgagctgctgaccaaagtaaacaagggtggtggaggctgggggaygtgaggtccgaagagaaagtccagggtgctcttggatgaaagagcccctcctggtgcctgctgcaggttgagagatatgttggtcccatttgtcttttgt

SEQ ID NO: 8853 - DNA, 201 bp, Homo sapiens
gtttcaccatgttgaccaggctggtctcaaactcctgacctcaggtgatccgcctgcctcggcctcccaaagtgctgggattacaggtgtgagccaccgcrcccagccccagtccttcctttttgtcttctcttccgacatctcagactctgctcacctcgtttcctgctgaaaagccgcatccctggctgtctgtgtgaa

SEQ ID NO: 8854 - DNA, 201 bp, Homo sapiens
ataggtgtccctcagcaaaaatgggataaaatttaaaaatgagtttaaaagcagtaaggaaaaacactgaggtcccttgagtcggttatccatgtgacaayatagctggaaagcctgagctggggttggggtcaggtccacagaccctgttagctctcccgtgtgtcttcagctgggctgacggctgccgggggctcagac

SEQ ID NO: 8855 - DNA, 201 bp, Homo sapiens
cggctgccgggggctcagacattctccctgacccatgtggtagcaaagatctctgagcgattatgaccccagttaacagtaaatcctactcgctcctgatktttacagtcttcacttatctattctgtaaacgatttaccccacacactcaccatcagataccctggccatgggaacgggacacaagatgattggacgggg

SEQ ID NO: 8856 - DNA, 201 bp, Homo sapiens
acttctcactttacagggaagccaggaggtaggtttggagagggaaatccagggtcggcagagtccgggcccctccccacatctggaagcttttccagggmctcaggcggcccaatttcttgcctctgctccccaggggacagccttatgaagctgtgatggttgattaatctgaatccataaatggcactggccaataaa

SEQ ID NO: 8857 - DNA, 201 bp, Homo sapiens
tcacgccctcgcaccgcgggtggagaagcgtgtctttcagacagaccaagcgatttgctcaaggtcacagggctcagaggacacaatattaagcccaagargctcacagcgtgaggggaattaggggagacagacacagacagagattcttggaaaacagcagccgagtggtcagtaccgggacataggttcgctcaggtg

SEQ ID NO: 8858 - DNA, 201 bp, Homo sapiens
cagctatgaaaagcggccagtttgtctgcacgttgggcctttcaatgattttacatcatccttgcgagagccctgcggtggtgtcacgccctcgcaccgcrggtggagaagcgtgtctttcagacagaccaagcgatttgctcaaggtcacagggctcagaggacacaatattaagcccaagaggctcacagcgtgagggg

SEQ ID NO: 8859 - DNA, 201 bp, Homo sapiens
ttacagtaattatcattccttagatctccatcatgccttagagtttctaaagaactgtcagaactgctaggccatggcagaaactggattcttcatcttcrtagtatttataatagaattttaaaaaaacaatgtttatatccgattgaagaaatggaaatttggcaaatagagattttctaaatactagaattatacaga

SEQ ID NO: 8860 - DNA, 201 bp, Homo sapiens
ataatagaattttaaaaaaacaatgtttatatccgattgaagaaatggaaatttggcaaatagagattttctaaatactagaattatacagataattataytctatgtttattgatttatttatttatttttgcattttatcattcattctacctgtatagttagtttttaaattgctaacattaaaaatttgggagattt

SEQ ID NO: 8861 - DNA, 201 bp, Homo sapiens
gctctctgctacctctgcctcccgggttcaagcgattcttgtgcctcagccttccaagcagctgggattacaggcccatgccaccacgcctggctaatttytgtatttttagtagacacaaggttttgccatgttggccaggctggtctcgatctcctgacctcgggtgatccaaccacctcggcctcccaaagtgttggg

SEQ ID NO: 8862 - DNA, 201 bp, Homo sapiens
aagcatccacacatatgcacacacctgcatgcatcaacatgtgtccacatgcatccacacatgtgtccacacaattcacatgtgtagacacacatgcacayatatacacatccatgcacacacccacacccacatgtgccaacacatgtctacgtgcatcaacatacatgtatttacacatgttcacacatgtccacacat

SEQ ID NO: 8863 - DNA, 201 bp, Homo sapiens
gctccagccccagagccacattccattggccattgtgacacccaaccaggaagcatcaggacggggcttctctcgggaagacagggaggcacacacccttygctgttaagagtgtgggcacacgttctggtcagccaggggcagggatgggaagacgaggctttctgggagcagcaggcagtcactgggctgttgctccct

SEQ ID NO: 8864 - DNA, 201 bp, Homo sapiens
cagatgtctacatgtgtcaacatatggccacatgtgccaacacacatcacatgtccacacaccactcacatccatacacatcagacatgttgacacacatrcatacacatgcaaaagcatccacacatatgcacacacctgcatgcatcaacatgtgtccacatgcatccacacatgtgtccacacaattcacatgtgtag

SEQ ID NO: 8865 - DNA, 201 bp, Homo sapiens; identical to SEQ ID NO: 1159

SEQ ID NO: 8866 - DNA, 201 bp, Homo sapiens
gtgtccacatgccccccatgctacatgtctacatgtgtcaacatatgcccacatgcaccaacacaaatcacacacatccacacatggtgacacatatgcayacacacacacaccagatgtctacatgtgtcaacatatggccacatgtgccaacacacatcacatgtccacacaccactcacatccatacacatcagacat

SEQ ID NO: 8867 - DNA, 201 bp, Homo sapiens
tctcctgacctcgggtgatccaaccacctcggcctcccaaagtgttgggattacagatgtgagccactgggcctggctgggaaccagcctttaatgatcarccacaaatggactcaggccagcactgtgggcagatcccagggcgatacccaggcctccagggagagcccctttcctggatggagcaccaggagcctgctg

SEQ ID NO: 8868 - DNA, 201 bp, Homo sapiens
gactctttctctgtcgcccaggctggagtgcaatggcatgatctcagctccctgcaacctctgccccctgggttctagtgactctcctgcctcagtcaccygagcagctgggactacaggcgcccgtgaccaaggctggctaatttttgtatttttagtagagacggggtttcaccatgttgaccaggctggtctcaaact

SEQ ID NO: 8869 - DNA, 201 bp, Homo sapiens
gaggcaggagaatggcgtgaacccgggaggcggagcttgcagtgagccgagatcgcgccactgcactccagcctgggcgacagagccagactccgtctcamaaaaaaaaaaaaaaaaaaagaaagaaaaattcaaattcaaatagaacagaaagataatgcaatgtaaatcttcttcttacatctcgcactcagcttttcg

SEQ ID NO: 8870 - DNA, 201 bp, Homo sapiens
caggaggtggggaggagaccctgctagtgcctgaacccctgctgggaagcctgttgtgagcacagcctctgcccccgccccaccagagcttggctgggcayccccccgagcgctattgtatggccctgcctgtctctgatgggaaatcagccttttttaaaaaattatttttgtttttattttttgagacaaagtctcact

SEQ ID NO: 8871 - DNA, 201 bp, Homo sapiens
acccgggaggcggagcttgcagtgagccgagatcgcgccactgcactccagcctgggcgacagagccagactccgtctcaaaaaaaaaaaaaaaaaaaaagaaagaaaaattcaaattcaaatagaacagaaagataatgcaatgtaaatcttcttcttacatctcgcactcagcttttcgatttcttcactcccaaaaca

SEQ ID NO: 8872 - DNA, 201 bp, Homo sapiens
agggatgggaagacgaggctttctgggagcagcaggcagtcactgggctgttgctccctgctggaagttgcaggaggtggggaggagaccctgctagtgcytgaacccctgctgggaagcctgttgtgagcacagcctctgcccccgccccaccagagcttggctgggcacccccccgagcgctattgtatggccctgcct

SEQ ID NO: 8873 - DNA, 201 bp, Homo sapiens
ccagctttttttttttttttttgtatttttagtagagacagggtttcactatgttggccaggctggtctcgaactcctgatttcaggtgatccgcccgccktggcctcccagagtgctgggattacagatgtgagccaccacacccatctcatgtcttcagggcagattcactggtggggagttggagctctggcccatag

SEQ ID NO: 8874 - DNA, 201 bp, Homo sapiens
gggaggcggagcttgcagtgagccgagatcgcgccactgcactccagcctgggcgacagagccagactccgtctcaaaaaaaaaaaaaaaaaaaaagaaakaaaaattcaaattcaaatagaacagaaagataatgcaatgtaaatcttcttcttacatctcgcactcagcttttcgatttcttcactcccaaaacagcag

SEQ ID NO: 8875 - DNA, 201 bp, Homo sapiens
ttggccaggctggtctcgaactcctgatttcaggtgatccgcccgccttggcctcccagagtgctgggattacagatgtgagccaccacacccatctcatrtcttcagggcagattcactggtggggagttggagctctggcccatagcagggtctcgggacctccagcctcagagtgctgaccagcttagcctggagcag

SEQ ID NO: 8876 - DNA, 201 bp, Homo sapiens
ggaggcggagcttgcagtgagccgagatcgcgccactgcactccagcctgggcgacagagccagactccgtctcaaaaaaaaaaaaaaaaaaaaagaaagwaaaattcaaattcaaatagaacagaaagataatgcaatgtaaatcttcttcttacatctcgcactcagcttttcgatttcttcactcccaaaacagcagt

SEQ ID NO: 8877 - DNA, 201 bp, Homo sapiens
gaggcggagcttgcagtgagccgagatcgcgccactgcactccagcctgggcgacagagccagactccgtctcaaaaaaaaaaaaaaaaaaaaagaaagamaaattcaaattcaaatagaacagaaagataatgcaatgtaaatcttcttcttacatctcgcactcagcttttcgatttcttcactcccaaaacagcagta

SEQ ID NO: 8878 - DNA, 201 bp, Homo sapiens
gaggctgaggcaggtggatcacctgaggtcaggagttcgagaccagcccggccaacatggtgaaaccccgtctctactaaaaatacaaaaattgccgggcrtggtggtcggtgcctgtaatcccagctacttgggaggctgaggcaggagaattgcttgaacccaggaggcggaggttgcagtgagccgagatcgcgccat

SEQ ID NO: 8879 - DNA, 201 bp, Homo sapiens
ctcaaagcaaaaggggtagtagcaactgaggcatttattagatcagcatagaagccagttctgaccctgtcaatcttaccctgtgatccttttcaacacaraaactgactgctctttcaactgtaaggtgattggcttccaaaattaatgtttccagtcaagcagtctgacttaggggtttatacagcctagctcaattac

SEQ ID NO: 8880 - DNA, 201 bp, Homo sapiens
tggcctcaaccctgctcttctcatcactggccacctatgaactctggctggctttggggtgaacgagacaccatcactttactctgtcagcctttctgccrggactgattgtggccatttgtaaatggaaagaatgggaagggctttatcgtccacagggtttattttataaagatgaggattctgaagacacatctgttc

SEQ ID NO: 8881 - DNA, 201 bp, Homo sapiens
gacctgaaagaaagagtggatggtggtggcgacgaaggggtggcatgaggggaggggtcctgtgaactgagacctgaatcaggatgagctacacaaaacgyggggatcagcattccaggcagtgggaacagcaggcaaagttatgcaggaaaaatgagctccatgtgttggaggccaaggaggatggagccacgaagccag

SEQ ID NO: 8882 - DNA, 201 bp, Homo sapiens
aagttatgcaggaaaaatgagctccatgtgttggaggccaaggaggatggagccacgaagccagcccgaccatcggcaggggccggcattcctctgtgtgrtatagattccagctggaccaagtcagtgcaacactgaagattatttccctgcaggaaaccaagggataaaggtttccctggacgcacacaaggagtaagt

SEQ ID NO: 8883 - DNA, 201 bp, Homo sapiens
gccggcattcctctgtgtggtatagattccagctggaccaagtcagtgcaacactgaagattatttccctgcaggaaaccaagggataaaggtttccctgracgcacacaaggagtaagtaacagggaaggaagaagaatagggaaatctggaagaaaaatggaaaaggaaaaattaaaggttttattaagttgttttgag

SEQ ID NO: 8884 - DNA, 201 bp, Homo sapiens
gagcacagcctctgcccccgccccaccagagcttggctgggcacccccccgagcgctattgtatggccctgcctgtctctgatgggaaatcagcctttttwaaaaaattatttttgtttttattttttgagacaaagtctcactctgtcacccaggctggagttgagtggtgagatctcagtctcggctctctgctacctc

SEQ ID NO: 8885 - DNA, 201 bp, Homo sapiens
caccacacactgtgaccctgggcagctctgctacccctcaccggctgagcggtggatggagaagtggttctgggccccttgagctgggtcatatgaaacaytgtgattaaggaaatatgatctccttcatttgaatgccttctgcctctttctttctctctttctctctttcttcctttcttcctttttttctttttgaga

SEQ ID NO: 8886 - DNA, 201 bp, Homo sapiens
atcatacgatatgatatgcaatatgaaatccatatgcaaaggtctgtatgcatttgtatataatacatgcatattatatacaaatacattaatatcatttmatattaaatttttatctgacatacacattaataatttacaatttaattactaataatattactgatgctatgaatattatcatagaataatatatgatgt

SEQ ID NO: 8887 - DNA, 201 bp, Homo sapiens
aatctctctgcaactgtaggtgagcatttatgtacttttgttcttcgttctgtcaagtttggatctacgatgaattctaaggccaattctgtttggtagtrtctgaattcactatgtcttggctagcaagtgagcaaatgtcccagtcaagacagcagatccaaggtgttaaaaaataaccactagggttaagtctaaagg

SEQ ID NO: 8888 - DNA, 201 bp, Homo sapiens
ccctcacacattcacacacatcccacatccacacacatgtacacctatttacacagctcacatatccacacacgtacacatatgtacacacacatgcacaygtgcacttgcatttttgtatctaaacttgaaggagcagtttgaactcagtctttgttccatatagaagctttgttcttccaagtctggatttagggtaga

SEQ ID NO: 8889 - DNA, 201 bp, Homo sapiens
tataggtgtccctcagcaaaaatgggataaaatttaaaaatgagtttaaaagcagtaaggaaaaacactgaggtcccttgagtcggttatccatgtgacarcatagctggaaagcctgagctggggttggggtcaggtccacagaccctgttagctctcccgtgtgtcttcagctgggctgacggctgccgggggctcaga

SEQ ID NO: 8890 - DNA, 201 bp, Homo sapiens
gaacttttccttttttctcttccttcctccttccttcctttttagaataatggtgaaggtggacacatttgctgaatatttaggtgccctccatgaacaamacatcctgctgcctgccttccttcccttcctcctcactgttcccctcctccccttctccccttctcctgccttctctctcactttgtttcctgtctcatt

SEQ ID NO: 8891 - DNA, 201 bp, Homo sapiens
cagctgggctctggttatatggtcattgaggaaaatatgggaaaaaatgtttccatactcttcataggcaaaggtattctcttagtgacattaagataackggatgatcatctggaggaaaacaagctgctgcaagtgtaccttactaattatagaaacattagtttgaaatttatatattgaccaaatacacaaatttta

SEQ ID NO: 8892 - DNA, 201 bp, Homo sapiens
aaatatgcaaaaagaaaactaacaggctgggcacagtggctcatgcctgtaatcctagcactttgggaggcagaggcaggcgggtgaccagaggtcaaaarttcaagaccagccttgccaacatggtgaaatctcatctctactaaaactaccaaaattagccaagtgtgggggcaggcgcctgtagtcccagctactcgg

SEQ ID NO: 8893 - DNA, 201 bp, Homo sapiens
ttttaactttggatgatttcttcttgctcagtaacattattttctttcagattttagaactccccttagcatttcttacaggacagtcctggtgtaaatamaatcccccagttttttttttttttttaatctgggaaggtctttatttcttatttatctttgaattatatttttgctggacataatattctagggaaaaag

SEQ ID NO: 8894 - DNA, 201 bp, Homo sapiens
ccccttagcatttcttacaggacagtcctggtgtaaatacaatcccccagttttttttttttttttaatctgggaaggtctttatttcttatttatctttkaattatatttttgctggacataatattctagggaaaaagtttttttctttctttatccttcacctttgagtgttgggttattaagtgccttgaggtactc

SEQ ID NO: 8895 - DNA, 201 bp, Homo sapiens
gagatttgagatatcctcttctcttgttggtttaattgatggaagcttcgaaataggtagctttttattttctattttaataaccatacttgcatatgttaaaaaaaaactgtttttaacacttggctctcagccaggtgtaaatttgtccctcatgagcaatttggcaatatctgaaggcatttttagttgccataaata

SEQ ID NO: 8896 - DNA, 201 bp, Homo sapiens
attttctgtatcttttaggtgtgcattgttctttattcttttgtctcttgtgactgtgcagtttcaaacagcctatcttcaagcacattattctttctttkgcttgatcagttctgctcgtaagagactctgaagcattctttagtatgtcagctgaatttttcaactcttaaatttctgcttcatggattttaataattt

SEQ ID NO: 8897 - DNA, 201 bp, Homo sapiens
tctagttctatgaagaatgatggtggtattttgacaggaattgcattgaatttgtagcttgcttgtggcagtatggtcattttcacaatattgattctacmcatccctgagcatgggatgtgtttccatttgtttttgtcatctatgatttctttcagcagtgttttgtagtttttcttttagaggtctttcacctccttt

SEQ ID NO: 8898 - DNA, 201 bp, Homo sapiens
actgctggtgtatagcagagctactgatttgtatacatagatttttgtatcctgaaactttgctgaattcattcaccagctctaggggctttttggatgartccttagggctttctatgtttacaatcatatcatcaccagtgacagtttggcttcctttttaccaatttggatgcccttgatttttttctcttgtctgat

SEQ ID NO: 8899 - DNA, 201 bp, Homo sapiens
atttgttaatacttgttgtgtgttgtaacatgtgatctatcttaaaaattgttccatttctgtttgagaagaatatatattctactgttaatgaataaagkgctcactgacaattgggtccagttgatctgtaatgttctccatttcctcattgatattctctctggttgttctattataactaaaagtggacatattaag

SEQ ID NO: 8900 - DNA, 201 bp, Homo sapiens
aacaattcttttttgaattcctgatagaattcagctgtgaatctgtctggttctggactttttttgttgttgttgttggcagtttttagattaccatttcratctcactggtttttattggtctgttcagagtttctatttattcctggttgtttatttccaggaatttatccatcacctttagattttctagtttatgca

SEQ ID NO: 8901 - DNA, 201 bp, Homo sapiens
taatgtcctgatgattttcaccaatattttcttgtagtagtttcatagtttgaagtcttagatgtatgtctttaatcacttttgatttgatttttgcatayggtgagagacaggggcctggttttattcttctgcatatggatatcctgttttctcagcaccatttattaaacagactgtcttttcctcagtgcatgcttt

SEQ ID NO: 8902 - DNA, 201 bp, Homo sapiens
tttatataaatttgggagctccagtgttaggtgcatatatatttaagactctgatatgttcctataggactagttcttttatcattatataatgtgcccctttgtctttttaaactgctgttgctttaaagtttgttttgtctaagaatagctactcttgctcacttctagtgtccatttatgtggaatatctatttccac

SEQ ID NO: 8903 - DNA, 201 bp, Homo sapiens
acccttataagaactttcttcttaatggtactgctctaatactcatcatagtccatatcttgattcatttttctacctttgtggcctcttcatcatgcccrtcctttttctctacttctgacaccataatttcagtgtcccataattccttctaatcttcttactatcttattcttcatgatttttaaggagaacatgctt

SEQ ID NO: 8904 - DNA, 201 bp, Homo sapiens
agttgtcctggaacaaacatcctactatatatgtcaagggatgactgtaatatatatgaaggatatatttaggtagatgagaaaagagaaaaaatttaatyggtaactggcaaaaaacgtacacatttaaaatttaaaaagcaggaagtggcagaaatatgtgaatagtgtaactttgctcttcataaaaaatgcaaaata

SEQ ID NO: 8905 - DNA, 201 bp, Homo sapiens
tatttgttagtgaatagaaaggcaaacatttcttatgaattttttatcctgcaactttccagaacttgttcatttaatttaacagatgtgtatgtgtgtgygcgtgtgtgtgtgtgtgtgtgtgtgtgtgtgtgaagtctagggttttctatgtataaggtcatatcatctgcaaatggagataattttacttcttccttt

SEQ ID NO: 8906 - DNA, 201 bp, Homo sapiens
agccttgtgtattcacttatgagagtggattgttcaatttcaactgcattggtagcttgaaattgtccatggtaggagaatttaccaccatacgttaccaytgaaattgagaaatcctacaaatcaggtttcccaaccaacaaatcagttgttaaacatttaccagcacaccactgttttaaaagttttttaataagcatt

SEQ ID NO: 8907 - DNA, 201 bp, Homo sapiens
ttgaattaattctacacccagaagtgaggttgctgcatcatgtggtagttctatatttaattttttcaggaatcttcatactgttttttatactaggtgcrtcattttgcattctactaacagtttgtaagtgttcagatatttccacatccatgccaacatttttcttattcttttttttgataacacctatcctaacgg

SEQ ID NO: 8908 - DNA, 201 bp, Homo sapiens
gccttgtgtattcacttatgagagtggattgttcaatttcaactgcattggtagcttgaaattgtccatggtaggagaatttaccaccatacgttaccackgaaattgagaaatcctacaaatcaggtttcccaaccaacaaatcagttgttaaacatttaccagcacaccactgttttaaaagttttttaataagcattc

SEQ ID NO: 8909 - DNA, 201 bp, Homo sapiens
tggattgttcaatttcaactgcattggtagcttgaaattgtccatggtaggagaatttaccaccatacgttaccactgaaattgagaaatcctacaaatcwggtttcccaaccaacaaatcagttgttaaacatttaccagcacaccactgttttaaaagttttttaataagcattctaaaaatagcatatcaaggaattt

SEQ ID NO: 8910 - DNA, 201 bp, Homo sapiens
tgaatttgtagcttgcttgtggcagtatggtcattttcacaatattgattctacacatccctgagcatgggatgtgtttccatttgtttttgtcatctatratttctttcagcagtgttttgtagtttttcttttagaggtctttcacctcctttgttaggtatattcctaagaattattttatatttttgcagctattgt

SEQ ID NO: 8911 - DNA, 201 bp, Homo sapiens
tattttgaggtatatttcttctatgcctagtttagtaatggtttttatcataaaggaatgcttgattttatgaagtgctttttttgtatcagttgattttrtatgctttttggttttaattatgttaatttgatgaatcacatatattgatttgcatatgttgaaccatctttgcatttcaggaataaagaccacttcatc

SEQ ID NO: 8912 - DNA, 201 bp, Homo sapiens
cacattattctttctttggcttgatcagttctgctcgtaagagactctgaagcattctttagtatgtcagctgaatttttcaactcttaaatttctgcttsatggattttaataattttagtctctttgtttttaagatttttttatttttaatttttatgagtatataataggtgtatgtatttatggggtacataagat

SEQ ID NO: 8913 - DNA, 201 bp, Homo sapiens
gtctatgtgtctgtttctatgcccgtagcatactgcatgttgttttggtctctatggctctgtagtaaaatttgaagtcaggtaataggattcctccagctttttttttttttttccttaggatagctttggctattctgtgtcgttgtgttacatatgaacttctggtttgatttttctatttctatgaagaatattatt

SEQ ID NO: 8914 - DNA, 201 bp, Homo sapiens
ttctattttttcttggttcaaattcgggaggttgtatgtttccaggaatttatcaattttctctaggttttctagtttgtgtatgcagagaggtacatagyagtctctggtgatcttttgtatttctgtggtaatagttttaatgtcacctttatcatttctgattgtgcttatttgaatcttcttccttttaatggttaa

SEQ ID NO: 8915 - DNA, 201 bp, Homo sapiens
ttcaaattgttcactgttagcatatagaaatggtactggtttctatgttgtttttgtactgtgcaacttaactaaatttgtttatcaggttgagtagcttycttgtagcatctttaggtttttctacatattagatcatatcatatacaaacaactataatttgacttcttcctttccaatttggatgccttttgtatctt

SEQ ID NO: 8916 - DNA, 201 bp, Homo sapiens
tatggcttttatataaagaggataatgaagatacaaaaatggtacaatagtaacattgtctatgttgggctatgtttcttctatccccagttttttaaagttttttttttattatggaggaatgttaaattttatcaaatgttttttcatcaattgaaatgaccacatgatttttatattttattccattgatacaatgtg

SEQ ID NO: 8917 - DNA, 201 bp, Homo sapiens
cagtatagatagaaactagatcctaggaccaacacctagcactctaactttagagatcaataatagaagaagccagtgaaggaaattgaggaagtcccatragttatgagaaaaactgagaaaagatcatgttcttgaagcataatgaagaatatatgaagtagtgagtaaagcaactatgtcaagggccgctgagagttc

SEQ ID NO: 8918 - DNA, 201 bp, Homo sapiens
atagtaacattgtctatgttgggctatgtttcttctatccccagttttttaaagttttttttttattatggaggaatgttaaattttatcaaatgtttttycatcaattgaaatgaccacatgatttttatattttattccattgatacaatgtgctcagttgatttatttccatatattgaaccatccttgccttcctgg

SEQ ID NO: 8919 - DNA, 201 bp, Homo sapiens
gttgggctatgtttcttctatccccagttttttaaagttttttttttattatggaggaatgttaaattttatcaaatgttttttcatcaattgaaatgacyacatgatttttatattttattccattgatacaatgtgctcagttgatttatttccatatattgaaccatccttgccttcctgggataaatcccacttgat

SEQ ID NO: 8920 - DNA, 201 bp, Homo sapiens
tatttattgtagtttttgcagtctgggtttgcttctacccatcaatcttgaatatgcttcctagttgtttgaagtgacttatgccccatgatgattaataytgtggtttgtgcagtgttatagaggtactgtcttggtggcctcagataagatccagaagaattttctcgattactagacaaagactcttgttcttttgcc

SEQ ID NO: 8921 - DNA, 201 bp, Homo sapiens
gttcttttgccctacattctccaaaacaatggaatctctctctttctgtactgagctacctagaatttgaggttcagtgatgcaagcacccttgtgcccascacattttcagacaacaatgaggattcatattttttccatgagtagttattaaatggtccttggggttaagactccaatgatgacagctgtcctgtcatg

SEQ ID NO: 8922 - DNA, 201 bp, Homo sapiens
cagacaacaatgaggattcatattttttccatgagtagttattaaatggtccttggggttaagactccaatgatgacagctgtcctgtcatgaaacctgaraaaacaccaagtgcacacaagctccagaaatgagaacaacgtcatgactgatttctggcctacagcaactgcaagatgtcatcaaatgttagactgattc

SEQ ID NO: 8923 - DNA, 201 bp, Homo sapiens
ctgtataccagggaaaaaagaagtctgagccctcatactaattttgtctttaaaatttttgaacatcagagattttatttctgtatctcagattatgctgyctttaatttaaatttatatttaacaattttattttaatgtaataattatattattaagtgctgatacataagggacatcacatttcttttcttttcttct

SEQ ID NO: 8924 - DNA, 201 bp, Homo sapiens
tttgttagtgaatagaaaggcaaacatttcttatgaattttttatcctgcaactttccagaacttgttcatttaatttaacagatgtgtatgtgtgtgtgygtgtgtgtgtgtgtgtgtgtgtgtgtgtgtgaagtctagggttttctatgtataaggtcatatcatctgcaaatggagataattttacttcttcctttct

SEQ ID NO: 8925 - DNA, 201 bp, Homo sapiens
agcagtaattgagagaatgatctgacagcagtcagagcaaaatatttgaaatggtaaggtattgacagcagttttcagattgggacaaaatggtgaaatcrtaaaacctgaagtagtgcaaccaacacctaaactcagcaaatgtttcaagtttttattgaagtaaggttacaaatttcccagggtaacctatgctctcct

SEQ ID NO: 8926 - DNA, 201 bp, Homo sapiens
tatacatgataagtagaatgacctgggttaacatctaattatacttttaaaacatactacctgatcacagtcatggtcagccaacagcatgacgtggtagaaaaaaaaatgtgtttttaaattttgttaacatgaaaataaacctgtaaactaaatttacagttgttaaattttgactctgactgcaagttttatcaaatt

SEQ ID NO: 8927 - DNA, 201 bp, Homo sapiens
tgacacatgcaggcaaatgaatattctgagttcttaaaaaaagaagaaacgagatatgtattttctaatatggaccctattcacaatatattgttacattaaaaaaaaggacaaagcaggaagaatacgtggagcatgctattgtttatgtaaagtggggaatgtttcttagttcaggtgaaatccctggagaaaactccc

SEQ ID NO: 8928 - DNA, 201 bp, Homo sapiens
tgtattgtgtaatattacttttaaaaacatgttgaataaaaaccaagtatttgcggtatctgattaaattgttttgtaataccgacaggtactgtgaatgyaatgggaatgactggtctagtttttgcctttatgctgggatctctgtttgctaaaatgtatgtggatatcggatatgtggatctgagtaagtacaatcgg

SEQ ID NO: 8929 - DNA, 201 bp, Homo sapiens
aatataattggtgagaatagtcatcctttcccttttcctaaaagctttccttttttcactcttgaatttgatgttcgctatgggtttctcatgtatggccrtgattatgttgagcaaatttccctttatttgtagcttgttggaagtttttgtcatgagagtgttgaattttatcaagtgcttttttgaattttactgata

SEQ ID NO: 8930 - DNA, 201 bp, Homo sapiens
attgatctgtttattaaaaataagtaatacgtcacaattgtatagaagttcagaccagatgacatccaaattgctgtctgccacaaaaatttaacagtttkgttaatctacacgtttcattccttttgaccaaagatcacgactctcttagaaggcctcacaaatcagtggtgattcttactcacaggggagaccaataga

SEQ ID NO: 8931 - DNA, 201 bp, Homo sapiens
tgaatattctgagttcttaaaaaaagaagaaacgagatatgtattttctaatatggaccctattcacaatatattgttacattaaaaaaaaggacaaagcmggaagaatacgtggagcatgctattgtttatgtaaagtggggaatgtttcttagttcaggtgaaatccctggagaaaactccctgggtcaaatttactag

SEQ ID NO: 8932 - DNA, 201 bp, Homo sapiens
ctggtctagtttttgcctttatgctgggatctctgtttgctaaaatgtatgtggatatcggatatgtggatctgagtaagtacaatcggaacgaggtaccrtgatagtgctttttaagtgcaggacaccattcttccaaataattaaatttactttttcaatagtactttgcttactactttccaaaagttacaggtagga

SEQ ID NO: 8933 - DNA, 201 bp, Homo sapiens
ttccttttgaccaaagatcacgactctcttagaaggcctcacaaatcagtggtgattcttactcacaggggagaccaatagagggaagtttagcactttgrcctaacaattttaaatattgtttattcttactatacattttcttacctcttttctgttctgtgccatttctcaaaatgtattttgttttattataatcag

SEQ ID NO: 8934 - DNA, 201 bp, Homo sapiens
gtggagcatgctattgtttatgtaaagtggggaatgtttcttagttcaggtgaaatccctggagaaaactccctgggtcaaatttactagaaccttctctyacttaatatgtaaattcactatcaaacattcccaacaagtaatgatccagcttttcctggaattgtagtaaagcagcattcactaccccacattctccta

SEQ ID NO: 8935 - DNA, 201 bp, Homo sapiens
tcccacacatgcatagccttgcccgttatcaacatctcccatcagggtggtagatttgttacaattgacaacccatattgacatatctttatcactcatgrtctgttccattggtctatatctctgttttggtaccagtaccatgctgttttggttactgtagccttgtagtatagtttgaagtcaggtagggtgatgcct

SEQ ID NO: 8936 - DNA, 201 bp, Homo sapiens
tgagtacatgagaaaataataattagaaaatgaatgtacagaagcactagaccaggcacctggatgatctccctgttgaacctaaaagtttaaacttaaargttaaattttggctcccaataacttgatctgaagtttttgttagaggaaacttcatctttaataactcttacaggacaatgaaatggtaaaattgtagga

SEQ ID NO: 8937 - DNA, 201 bp, Homo sapiens
atataagccattttaacttctgtgagatatcttactgtagttttaattttcatttatctgatgatcagtgatgttgagtaccttttcgtatgtttgtttaycatttgtatgccttcttttgagaaatgtccattcaaacatttaaaaattggcccatttttaaatggattattaaattttttcctatagcattgtttgaac

SEQ ID NO: 8938 - DNA, 201 bp, Homo sapiens
ttagcctagaatcagaatagattttttttaaagccacctacctacaaacactgcctgattaaatctctcaaatcatttgatcctaatgttcgccttctgtrctcttaccattagtcaggacattctgttgtgttggacctctctggtaataatattatctatgttattatctgtcattatggtcttgaatgctgctttcgc

SEQ ID NO: 8939 - DNA, 201 bp, Homo sapiens
atctctcaaatcatttgatcctaatgttcgccttctgtgctcttaccattagtcaggacattctgttgtgttggacctctctggtaataatattatctatkttattatctgtcattatggtcttgaatgctgctttcgcctgcttaaatagaattctggcatccatgcccatctctatttcttctgtactctgtcctattt

SEQ ID NO: 8940 - DNA, 201 bp, Homo sapiens
tccaggtgccgtctgtcacccctttctttgactaggaaagggagctccctgatccattgcccttcccgagtgaggcaatgcctcaccctgctttggctcaygcacggtgtgctgcacccactgtcctgtgcccactgtctggcactccctagtgagatgaacccggtacctcagatggaaatgcagaaatcaccagtcttc

SEQ ID NO: 8941 - DNA, 201 bp, Homo sapiens
gtctggcactccctagtgagatgaacccggtacctcagatggaaatgcagaaatcaccagtcttctgcgtcgctcatgctaggagctgtagcccggagctsttcctattcggccatcttggctgctctccgatgatgtctttatttcaacttgacttttgagagataattgcacagggtacataattgtaagttggaggtg

SEQ ID NO: 8942 - DNA, 201 bp, Homo sapiens
atattttaagtggggcatttaggtcagttacattcaacgttagtattgagatgtgaggtactattctattcatcgtgctagctgccagaataccttgggttgtgtgtgtgtgtgtgtgtgtgtgtgtgtgtgtgttattgttatacaggtcctgtgagatttatgcttcaaggaagttccattttggtgtcttttgaggat

SEQ ID NO: 8943 - DNA, 201 bp, Homo sapiens
tattttaagtggggcatttaggtcagttacattcaacgttagtattgagatgtgaggtactattctattcatcgtgctagctgccagaataccttgggttgtgtgtgtgtgtgtgtgtgtgtgtgtgtgtgtgttattgttatacaggtcctgtgagatttatgcttcaaggaagttccattttggtgtcttttgaggatt

SEQ ID NO: 8944 - DNA, 201 bp, Homo sapiens
cttctccttttccttcttcctcttcctcctactcttcctcttcttcttcactgtgacagggtctggctccgtcccctaggctaaaacgcagtggcatgtattatgacttgctgcagcctcaatttcccaggctcaagttattctccctcatcagccctccaagtagctgaagtgatgggagcatgccaccatgccagtcta

SEQ ID NO: 8945 - DNA, 201 bp, Homo sapiens
attttaagtggggcatttaggtcagttacattcaacgttagtattgagatgtgaggtactattctattcatcgtgctagctgccagaataccttgggttgtgtgtgtgtgtgtgtgtgtgtgtgtgtgtgtgttattgttatacaggtcctgtgagatttatgcttcaaggaagttccattttggtgtcttttgaggattt

SEQ ID NO: 8946 - DNA, 201 bp, Homo sapiens
tcttcctcctactcttcctcttcttcttcactgtgacagggtctggctccgtcccctaggctaaaacgcagtggcatgtattatgacttgctgcagcctcratttcccaggctcaagttattctccctcatcagccctccaagtagctgaagtgatgggagcatgccaccatgccagtctaatttttgtatattttgtaga

SEQ ID NO: 8947 - DNA, 201 bp, Homo sapiens
agttattctccctcatcagccctccaagtagctgaagtgatgggagcatgccaccatgccagtctaatttttgtatattttgtagaggggtgattttgccrtgtttcccagtctggtctctaacttctgggctcaagcaatctgcgtgcctctgccacccaaagtgtagggattacagacattagccactgcaccctgtga

SEQ ID NO: 8948 - DNA, 201 bp, Homo sapiens
cagtctggtctctaacttctgggctcaagcaatctgcgtgcctctgccacccaaagtgtagggattacagacattagccactgcaccctgtgaacatcacmtttctgattcagttttttttctttctgggacgcttagtgtattgcctagtacccaattgaaaaccaaacatttgtggaatgaataaataattaatctgta

SEQ ID NO: 8949 - DNA, 201 bp, Homo sapiens
cagttttttttctttctgggacgcttagtgtattgcctagtacccaattgaaaaccaaacatttgtggaatgaataaataattaatctgtatgtaatagtrtggtagagtgccaaggataataaaatgttaagtgaacaaagtaagtcacaaaacagcatttatgcatgatcctatttggaagtaaaatgaactaaaccaa

SEQ ID NO: 8950 - DNA, 201 bp, Homo sapiens
tttttccagtctttgaaaagcatccttaccaatcccctgtatgttatatttgtaatttttacattgttacacatgagcagctacattgcttctcttacttrtatcattaaaatggtggagcaacagtatggttggtctgcatctaagactaactttttgttgggtaagacatactttttacgtgtttacttgataaatgca

SEQ ID NO: 8951 - DNA, 201 bp, Homo sapiens
tcaattccctcatggaactcgtaatctaatgatagcaaataataaaatcaatgtattcaacatttatgaaatcttagtcactaggacttgttttataagtmaaattagtgcaggggtctccgaattatccctgattatctctaagggtccttgagactttatcaaggggtccacaaattctaacctatttttataatgata

SEQ ID NO: 8952 - DNA, 201 bp, Homo sapiens
catttgatcctaatgttcgccttctgtgctcttaccattagtcaggacattctgttgtgttggacctctctggtaataatattatctatgttattatctgycattatggtcttgaatgctgctttcgcctgcttaaatagaattctggcatccatgcccatctctatttcttctgtactctgtcctattttcaagagtggc

SEQ ID NO: 8953 - DNA, 201 bp, Homo sapiens
attactttattctgccagtttagggtatgggttgttcttgactttctagttccatagggcataatattagccatttaatgctacaaacttcccttttagcrctgatttgctgcatctcagaggttttgacatgctgtctttattttcattcattttgatttttaaaaataattctgccttgatttcatcattgacccaata

SEQ ID NO: 8954 - DNA, 201 bp, Homo sapiens
tttttttttttttttttgagttggagtctcactctgtcaccaggctggagtgcagtggcgcaatctcggctcactgcaacctccacctcctggcttcaagygattctcctgcctcagcctcctgagtagctgagactacaggtgtgcgttcttcattgactatataaaagattttattgtgtttagaatccaccgctggag

SEQ ID NO: 8955 - DNA, 201 bp, Homo sapiens
tttccttttggatgccctttatatctttcacttgtctaattgctctagctaggtcttccactactatgttgaataacagtggtgaaactgggtgtcctggwcatattccagatattagaagaaagatttcagtttttgcccactcggtatgctactagctctgtgggcctgttataagtggcttttattacatttgggtat

SEQ ID NO: 8956 - DNA, 201 bp, Homo sapiens
aatgaaagaggtttaattgactgacagttcttcaggtctggggaggcctcaggaaacttacaattatggcagaaagggaagccaacacatctttctttacrtggcagcagcaaggagaagtgcagagtgaaggaaaagaagagccccttataaaaccatctgatctcgtgagaactcattcactttcatgagaagagcatg

SEQ ID NO: 8957 - DNA, 201 bp, Homo sapiens
tagctaggtcttccactactatgttgaataacagtggtgaaactgggtgtcctggtcatattccagatattagaagaaagatttcagtttttgcccactcrgtatgctactagctctgtgggcctgttataagtggcttttattacatttgggtatattccttgtatacccagcttttttatggtttttaccatgaagcat

SEQ ID NO: 8958 - DNA, 201 bp, Homo sapiens
tggtcatattccagatattagaagaaagatttcagtttttgcccactcggtatgctactagctctgtgggcctgttataagtggcttttattacatttggrtatattccttgtatacccagcttttttatggtttttaccatgaagcattgttgaattttatcaaatgattttttagctttaatcgaaatgattatatgga

SEQ ID NO: 8959 - DNA, 201 bp, Homo sapiens
tatatatagatgctaaactattttataatttgctataataaaatatgcacaaatctattattaaaagttaaaatttgtccaactttatacagaaaaactcttataggttttacatgatgccatttgcagtcaagagaaatgcaaccaaatataacgatacagtattaagtcataactgaataaaattaactgtagtgcata

SEQ ID NO: 8960 - DNA, 201 bp, Homo sapiens
tttggtttgctagtactacgttgaggacttctgaatcaatattcatcagagatactggcttgtagttttctttttttgatgtatgtttgtctggtttgcayagcaggataattccgaccttgtcttaggttggttttgccattaaaaccaatggcaaatactgcagttacttttgcaccaacctaatagaatgagtttaga

SEQ ID NO: 8961 - DNA, 201 bp, Homo sapiens
atatatagatgctaaactattttataatttgctataataaaatatgcacaaatctattattaaaagttaaaatttgtccaactttatacagaaaaactcttataggttttacatgatgccatttgcagtcaagagaaatgcaaccaaatataacgatacagtattaagtcataactgaataaaattaactgtagtgcatat

SEQ ID NO: 8962 - DNA, 201 bp, Homo sapiens
ttttctttttttgatgtatgtttgtctggtttgcatagcaggataattccgaccttgtcttaggttggttttgccattaaaaccaatggcaaatactgcarttacttttgcaccaacctaatagaatgagtttagaaatattttctccttatctacattttagaatagtttgagcaggattgatattaattcttctttaaa

SEQ ID NO: 8963 - DNA, 201 bp, Homo sapiens
ttttaagtggggcatttaggtcagttacattcaacgttagtattgagatgtgaggtactattctattcatcgtgctagctgccagaataccttgggttgtgtgtgtgtgtgtgtgtgtgtgtgtgtgtgtgttattgttatacaggtcctgtgagatttatgcttcaaggaagttccattttggtgtcttttgaggatttg

SEQ ID NO: 8964 - DNA, 201 bp, Homo sapiens
ggcatttaggtcagttacattcaacgttagtattgagatgtgaggtactattctattcatcgtgctagctgccagaataccttgggttgtgtgtgtgtgtstgtgtgtgtgtgtgtgtgtgttattgttatacaggtcctgtgagatttatgcttcaaggaagttccattttggtgtcttttgaggatttgtttcaagatt

SEQ ID NO: 8965 - DNA, 201 bp, Homo sapiens
ggagacttttaattacagcttcaatttcattacttgttattggtctgttcaggtcttggatctcagttcaatcttaataggttttatatatttaggaattyattcatttcctcttgattttccaatttattgacatatgtttgctcatagtagcctctagtggacctttaaatttcagcaatatcattcgtaatgtattct

SEQ ID NO: 8966 - DNA, 201 bp, Homo sapiens
gttcctgctcattttgtagattatgacagagggaagatctggagctcaagggctgctgttcagatttttttgtcccatagggtgctcctttgatgtggcawtctacccattcccctaggggtggggcttcctgatagttgaactgcagttgttgtttttactcttttgggtctagccacccagtggagctactgggctctg

SEQ ID NO: 8967 - DNA, 201 bp, Homo sapiens
attagaatttaatccacttaggatttctgagaagcatctgatttgactgaagcacaagatttcaattaatttggaattaatttatccatcagaagttaggrgaaagtcctgattaacctgttgtcagaactacctactttactaggacaacaatctatgtgcattttcatatatatacctcctgatgagtttagctaggga

SEQ ID NO: 8968 - DNA, 201 bp, Homo sapiens
gaggattaaaggaagcttggtggaaccataaaagtatagatttaaattcttttaaaattcttccttcaataattagtctttagcactagtaggttaaaggmaaacttcccttaaacttttgtttagcctagaatcagaatagattttttttaaagccacctacctacaaacactgcctgattaaatctctcaaatcatttg

SEQ ID NO: 8969 - DNA, 201 bp, Homo sapiens
cctaaaagtttaaacttaaaagttaaattttggctcccaataacttgatctgaagtttttgttagaggaaacttcatctttaataactcttacaggacaawgaaatggtaaaattgtaggaggaattaaccatttttaatcctgtatattgatctttttttattatagcagggtatatatgttttgatgaataaggatgag

SEQ ID NO: 8970 - DNA, 201 bp, Homo sapiens
tattcttcttttattaagaatcttaagacacacactgattgacaattgcctcaattgtaaaagaatctctatatgattcaaaaagaacttttaattttcarttgccttggatcctaatgggccagttagagaaaatcatctgttgatttcattgaaagaaaacgttttgcaacaagatataaatataaacttcagtgtgta

SEQ ID NO: 8971 - DNA, 201 bp, Homo sapiens
tatgtctttaatcacttttgatttgatttttgcatacggtgagagacaggggcctggttttattcttctgcatatggatatcctgttttctcagcaccatktattaaacagactgtcttttcctcagtgcatgcttttggcacctttgtctaaaatgagttcactgtagttgtatggattctgggttctctattttgttcc

SEQ ID NO: 8972 - DNA, 201 bp, Homo sapiens
ttcttttcttttcttcttcttcccctcctcctccttatccttcttgcttcttctccttctccttttccttcttcctcttcctcctactcttcctcttcttyttcactgtgacagggtctggctccgtcccctaggctaaaacgcagtggcatgtattatgacttgctgcagcctcaatttcccaggctcaagttattctcc

SEQ ID NO: 8973 - DNA, 201 bp, Homo sapiens
ttgtttaatttccatgtgtttggatagtttccaaaattcctctattattgatttctagttttattccattgtggccagagaagatgcttgatatgatttctttttttttttcttaatgttttaagacttcttttgtgacctaatatatcatctgtctttaagaatgattcatatgctgatgagagaaaatgtttattctgg

SEQ ID NO: 8974 - DNA, 201 bp, Homo sapiens
aagaaaaagtcaagttgtttaatatgtactgtagtttgagctctgcagccggccactgtttcaatataaatgtatccagtagaaggaccattgtaaacagmcacacacacacacacacagagagagagagagagagagagagacagggagagagagaaagagaaatggagcaacatgaagcctcactgcagctacaccagt

SEQ ID NO: 8975 - DNA, 201 bp, Homo sapiens
tgaaatctattttgtctgatgtaagtatagtaactccttttggtttcattggcatgtaataatatcttttgctgtcccttcattttcagcctgtgtttatytttatggggaattgcgtttcttgtaggcaacagatcattaggtcttgttttatcacccattcagacactctatttcttttgattggagactgtagttgat

SEQ ID NO: 8976 - DNA, 201 bp, Homo sapiens
accagtgtttgttattgcttgtctttgggataaaagccattttaacaggggtgagatatatcattcatcagatatctcattgtagttttgaattgcatttmtctaatgattaacaatgttgagcaccttttcatttgcatgtttgtcatttatttgtctccttttgggaaatgtctattcaagtgttttgcccttgttttg

SEQ ID NO: 8977 - DNA, 201 bp, Homo sapiens
ttccttgtgtctggaatagtatccattatttcttctataccattctttttcttgcctctaaatccaaataaaccacagaaagaaaggaaagtttcactatwtttgcatgtgctaaaaactaatgataaaaggaatcaaatagctaatttgaccaaccgaagaaaatatattaccaaaaatgtgactggtaagtattttaca

SEQ ID NO: 8978 - DNA, 201 bp, Homo sapiens
cattttgcaattccaccaaaatatttttcattttcagaagtcatgtctgtttttctcaataaaatctatattttcttttatatgctacatcatttttctcrtgtatttgtgatggctttcaactttggatctcaaccttaaataatcctgtatttcttaaaggccttatttctgggaggcttctttagaattctttagaat

SEQ ID NO: 8979 - DNA, 201 bp, Homo sapiens
atctgaaaggctgtattgaagaggatcaagaaaaaatgctagaaaggaaagtgtagcagtcagtatggaaagttcttttcaggagaagtgttagaagaagmagcagagaaaagatgtggtagttagcatgattgtgtcatcaagagttctgtttatgttcaatgctagaaatcataccatgcttgcatactaatgagaatt

SEQ ID NO: 8980 - DNA, 201 bp, Homo sapiens
agatgtggtagttagcatgattgtgtcatcaagagttctgtttatgttcaatgctagaaatcataccatgcttgcatactaatgagaattagcagtacagrtgaaggaaactgataatgcaggagagagggaaagtaattacagaggaagatgaaaagagatgttaacaaggacacagagtttttctctgtagaagggaaa

SEQ ID NO: 8981 - DNA, 201 bp, Homo sapiens
ctttttttatctaattgcttctactttctctgttataaaaaagcaatgtaatcagatgagaaggacgataaagaaaagaaagagtgttcatatcagaaaawgttacctagtaatcttgaagattggagaaatatactgactggcaaaatggactagtaaaatattggacaattgcactggaggtcccctgaatattttggc

SEQ ID NO: 8982 - DNA, 201 bp, Homo sapiens
tctaattgcttctactttctctgttataaaaaagcaatgtaatcagatgagaaggacgataaagaaaagaaagagtgttcatatcagaaaatgttacctaktaatcttgaagattggagaaatatactgactggcaaaatggactagtaaaatattggacaattgcactggaggtcccctgaatattttggcttatgaatt

SEQ ID NO: 8983 - DNA, 201 bp, Homo sapiens
gatggcctgtgaagaggtcagaggagtcataagcctaaagagctagggctggggtatattgcagcagacgtatgaaacggagtaattttaaaatttgagakgtggtcatgaggagtgggatgctcaaaatagagaattttaaaagtgggtactgatgaactgattgtgggtgaaagaaatacgactttccagagaaaaggc

SEQ ID NO: 8984 - DNA, 201 bp, Homo sapiens
agcataatctatatgaatattaaaataactaagaaaaggggcagaaatcattttgacaaaaacgacagagagcctagaatgaaaattgtcaagaaatgatragagttgtggtgtgccagtctacagctaacttcaacaaggaggttagagaatagtatattagtgtggtgcacctcttactgggatctagaggtctttcag

SEQ ID NO: 8985 - DNA, 201 bp, Homo sapiens
ggatagctttggctattctgtgtcgttgtgttacatatgaacttctggtttgatttttctatttctatgaagaatattattgttattttgatagagattgyattgaatcagtagattgctttgggtagtatggacattgaaacaacattaatcttccaatccatggacatagaatattttttcaatttttgttgccctcct

SEQ ID NO: 8986 - DNA, 201 bp, Homo sapiens
gacagagagcctagaatgaaaattgtcaagaaatgatgagagttgtggtgtgccagtctacagctaacttcaacaaggaggttagagaatagtatattagkgtggtgcacctcttactgggatctagaggtctttcagaggagagactcaggtatggaagtggtaaaaacaaaagatcaataaggacttccacatttcagg

SEQ ID NO: 8987 - DNA, 201 bp, Homo sapiens
tgtaatcttttgctcctctatacataaggtttgttttttttctggcttcttacaggatgttttcttcatctttgattttctacagtctgaaaataacaaamctatgcataatttttctggcaattttccttcttggtgttttctgagcttcctgggtctgtagtttagtgtctgacattcattcaagaaaaattttcagtg

SEQ ID NO: 8988 - DNA, 201 bp, Homo sapiens
aaggaaagagtgttaatgggagttagatttcatttagaacaagaaagtaaaagagctaaaaagaatgtaggaagttggccaggcacggtggctcatgcctrtaattctaacactttgggaagccgaggcaagcggatcacttgaggtcaggagttcaaaaccagcctggccaacatggtgaagccccatctctactaaaaa

SEQ ID NO: 8989 - DNA, 201 bp, Homo sapiens
gcaccctgtgaacatcacatttctgattcagttttttttctttctgggacgcttagtgtattgcctagtacccaattgaaaaccaaacatttgtggaatgaataaataattaatctgtatgtaatagtatggtagagtgccaaggataataaaatgttaagtgaacaaagtaagtcacaaaacagcatttatgcatgatcc

SEQ ID NO: 8990 - DNA, 201 bp, Homo sapiens
atatgactttttcatcagttctttttgtagagattttttacctcttaggttaaatgtattcctatttattttattttttatctattatatatatcagtaaraaaatcttgttatagacaactatattatctatcagttatctatcagatagataactgtattgggattcatttgttgatttggttctcagctagatcatta

SEQ ID NO: 8991 - DNA, 201 bp, Homo sapiens
caccctgtgaacatcacatttctgattcagttttttttctttctgggacgcttagtgtattgcctagtacccaattgaaaaccaaacatttgtggaatgaataaataattaatctgtatgtaatagtatggtagagtgccaaggataataaaatgttaagtgaacaaagtaagtcacaaaacagcatttatgcatgatcct

SEQ ID NO: 8992 - DNA, 201 bp, Homo sapiens
accctgtgaacatcacatttctgattcagttttttttctttctgggacgcttagtgtattgcctagtacccaattgaaaaccaaacatttgtggaatgaataaataattaatctgtatgtaatagtatggtagagtgccaaggataataaaatgttaagtgaacaaagtaagtcacaaaacagcatttatgcatgatccta

SEQ ID NO: 8993 - DNA, 201 bp, Homo sapiens
ccctgtgaacatcacatttctgattcagttttttttctttctgggacgcttagtgtattgcctagtacccaattgaaaaccaaacatttgtggaatgaataaataattaatctgtatgtaatagtatggtagagtgccaaggataataaaatgttaagtgaacaaagtaagtcacaaaacagcatttatgcatgatcctat

SEQ ID NO: 8994 - DNA, 201 bp, Homo sapiens
ataaggcttcagccactgacaaaacatatgatattgacgttttttaaaaaagaatcaatttaaatgcctcacaaaatatgcatgattcaaaaaaaatcatrgaatttttttctacagtatctattttcagtgtcatattgagacctgcccattaagaagttataacactttgtagtaactattctacaaatctatctattg

SEQ ID NO: 8995 - DNA, 201 bp, Homo sapiens
tcatttcttccttgtttctttggtagaatttggctgtgatgccaactgttcttgcactttttatagttgttaggagatttcttttttattactgattcaawttcattactcattatttgttcagtatttctattttttcttggttcaaattcgggaggttgtatgtttccaggaatttatcaattttctctaggttttcta

SEQ ID NO: 8996 - DNA, 201 bp, Homo sapiens
ccttagtctgccaccctccttttaaagaagtgataagatgggatgaatttggttcacccagcctcatactgtgtttcatataaaaacacatatccaaaaawatatatatatatttttatatatatatttatttaaatatatatttaaatatgcatatatatttttatatatttaaatgtgtatatatatttaaatatacat

SEQ ID NO: 8997 - DNA, 201 bp, Homo sapiens
tgacaaaacatatgatattgacgttttttaaaaaagaatcaatttaaatgcctcacaaaatatgcatgattcaaaaaaaatcatagaatttttttctacastatctattttcagtgtcatattgagacctgcccattaagaagttataacactttgtagtaactattctacaaatctatctattgtacaaaactatctatc

SEQ ID NO: 8998 - DNA, 201 bp, Homo sapiens
atatatttttatatatatatttatttaaatatatatttaaatatgcatatatatttttatatatttaaatgtgtatatatatttaaatatacatatttaartgtgtgtgtgtgtgtgtgtgtgtgtgtgtgtgtgtgtgtgtatatatttacagcttttttctcttatttctaggagtcctcgccctacctgctgttgcaa

SEQ ID NO: 8999 - DNA, 201 bp, Homo sapiens
catatttaaatgtgtgtgtgtgtgtgtgtgtgtgtgtgtgtgtgtgtgtgtatatatttacagcttttttctcttatttctaggagtcctcgccctacctrctgttgcaattggcatgttttcaggaggatatatcattaaaaaattcaaattgtctttagttggacttgccaaattggcattttgttctgcaacagtgca

SEQ ID NO: 9000 - DNA, 201 bp, Homo sapiens
cccagagaagatctaaaaatcttggcattctgctggtgacaacggtgtgaggcatgatgtaagctgatgacaaacaaagcatcaatctacagtgaaaaatrtctttcatgataacagtgtgtgtgtgcatgcaagtgagcatgtgagtgtgagcatgcaaggagtagtgtgaatgtgcatgcatgtaaatgtaggagtgag

SEQ ID NO: 9001 - DNA, 201 bp, Homo sapiens
gtccctaatacttagtagagattgtcaaagtgagtaaaaatgcatattttaggaagtaagtgtgggtgaaagagcaatattgaaaacaatttatattaatkagaaaattatatacactttcatacactaatttcttaaattatttcccaattttaaaattaagaatttattaaatgttaatattcaataacattatcttat

SEQ ID NO: 9002 - DNA, 201 bp, Homo sapiens
aatgcaaaataattttatttcacttgatatatactaagttatcacagggttggtagtgtaatcagtttattgaacacagaaaaatggaattggggaaatgyaagagtgagttagtttctaagtgaggatacaagtatagtcttaccttcagtatgacagttaaatacacaagacactagaatacagaaaagttttttgacc

SEQ ID NO: 9003 - DNA, 201 bp, Homo sapiens
tattaagcaactgtattttcataatatttttaaaactgtaaatattttagtttgagacttctttaaatataatggaatgtattcatagcccagttgcatgyggcaaatgtatttggtaatatttcaaaaattatttttaggtgttttataactgtagctgtgtggaagtaattggtctccagaacaaaaattactcagcgc

SEQ ID NO: 9004 - DNA, 201 bp, Homo sapiens
acaggattgttcaacctgaattgaaagcacttgcaatcggcttccattcaatgattatgcgatcgctaggtatgataaatatacagattagaaatttaacwtgtaaatattcatgttaaggcttaaagacaatgtaattaattttcaactatgagaatgtataaaaaaggaataagtaagaatcatttccattgttgtgat

SEQ ID NO: 9005 - DNA, 201 bp, Homo sapiens
attttagtttgagacttctttaaatataatggaatgtattcatagcccagttgcatgtggcaaatgtatttggtaatatttcaaaaattatttttaggtgytttataactgtagctgtgtggaagtaattggtctccagaacaaaaattactcagcgcacttgggtgaatgcccaagagatgatgcttgtacaaggaaatc

SEQ ID NO: 9006 - DNA, 201 bp, Homo sapiens
tgagatttatgcttcaaggaagttccattttggtgtcttttgaggatttgtttcaagatttaaagctcttttagcagttcttgtagtgctggcttgatagyggcaaattctctcagcatttgtttgtctggaaaatactgtatctttccttcatttatgaagcttagttttgctggggacaaaattcttgccgataacttt

SEQ ID NO: 9007 - DNA, 201 bp, Homo sapiens
ttgaggatttgtttcaagatttaaagctcttttagcagttcttgtagtgctggcttgatagtggcaaattctctcagcatttgtttgtctggaaaatactktatctttccttcatttatgaagcttagttttgctggggacaaaattcttgccgataactttcttgtttaaggaggctaaaaataggaactcaatccctcc

SEQ ID NO: 9008 - DNA, 201 bp, Homo sapiens
aataaaataaaaaaataaagtttgttttatgtaaaccacaaaaaaaaaggattgtcaatactgtagaagagaacccctatagagagaacattataaaagtmtgaaaggattacaccgttgaagttgccatcatctttatagaaaaagccacaaaaagccgtcaagcaggaaacaaatttctactggagaaaactgtcctga

SEQ ID NO: 9009 - DNA, 201 bp, Homo sapiens
ttaaagtttaattcactgaatgtctccttttgttaataaattgatccttcatatttttgttaaactttgcacctgtttaacagcacttatttgaacatcaytatcagttttgtttctttgcttacctctgtttcttgaatcttgtgacttcaaatctcatctttagtctttctggaatatagcttcatgtgtagatgacct

SEQ ID NO: 9010 - DNA, 201 bp, Homo sapiens
attcaaggaaattacaaagagattgtggatatggcaaacaaagatgtgaagaatttcaaaatatggatcttggagacattcaagagctaattggcaccacrtcagaggagtcggcagaagacaacttgatgaagataagtgctgaaccagtctcagatgatgaggaaaaaacatagaagaatcagtgtcagaaacaaattg

SEQ ID NO: 9011 - DNA, 201 bp, Homo sapiens
cagttttgtttctttgcttacctctgtttcttgaatcttgtgacttcaaatctcatctttagtctttctggaatatagcttcatgtgtagatgaccttctstatacacagttcccacatccatggattcagccaaccgtggatgcaagatatattcaaaaaatataaaaattaaaaagtagcaatacaattgtaaaaataa

SEQ ID NO: 9012 - DNA, 201 bp, Homo sapiens
taagaaattaatgccattgtaatttttatgcactgatatgaatctcttatctctaaatctctgaaaatataccagcatatatctgagactgtctctgtctrtattaattctgctggacaaaagcagaaactttcatcttaagtcttcctctaacacagggaatttcttctctttttcttttttctttcttttttttttttg

SEQ ID NO: 9013 - DNA, 201 bp, Homo sapiens
tttctaatctgtgaaagcaaatcagttgccggcctaaccttgacctatgatgggtttgtatatataattggataatatgttaaccatccaatcaaaagactatgtgtaaggaaaatagggtagaaaacaattgtaattaaattttcttttcactgagagaaatttcatttttgaaattcttaaaatgttcactccttaaga

SEQ ID NO: 9014 - DNA, 201 bp, Homo sapiens
ttctaatctgtgaaagcaaatcagttgccggcctaaccttgacctatgatgggtttgtatatataattggataatatgttaaccatccaatcaaaagactatgtgtaaggaaaatagggtagaaaacaattgtaattaaattttcttttcactgagagaaatttcatttttgaaattcttaaaatgttcactccttaagac

SEQ ID NO: 9015 - DNA, 201 bp, Homo sapiens
catttggggatgatgggaactatagtttaagatgagatttgggtggggacacaaccaacccataacaccaagtatgacccaaatgccccaaatgataattaaaaaaaaaaaatggtggaaggatttttattgctttgggtttatacccagtaatacaattaatgggctgaatggtaattttgttttacattctctgataaa

SEQ ID NO: 9016 - DNA, 201 bp, Homo sapiens
aataatactttttcacattgtacttaattctccttttttgcaagctaatatttttttcttctggtagtctacaatggaaatagcattaagatatattctgyttataattgtatgttagaccttgggatatctttacttttccattattatcatgttttgtcaagtatttttagtactacagtctctaccccaaatcgagag

SEQ ID NO: 9017 - DNA, 201 bp, Homo sapiens
attcaggagggttcgtcctcatgaccagatcacatcctgacagccctatctcttaataccttcacataggagattagatttcaatctatgaatttgggggkgcacaaatatttagaccatagtaatcataaaccattctccataactactcccagtaggatgtcctcaagcagaataattagatgactttaaataaaatta

SEQ ID NO: 9018 - DNA, 201 bp, Homo sapiens
attagatttcaatctatgaatttgggggggcacaaatatttagaccatagtaatcataaaccattctccataactactcccagtaggatgtcctcaagcakaataattagatgactttaaataaaattattaataatgtgttttctaaattaccgatctacttttttcttaatttaaatgcatactcattcaaaggtactt

SEQ ID NO: 9019 - DNA, 201 bp, Homo sapiens
ttttttcttaatttaaatgcatactcattcaaaggtacttcatcaatcctcaatcataaacaaatttttgcaaaacaaagtagcttttaaaatcttgaagsagaaaatgtatacaaataatatgctttataattttagccatgattaaaattatatttaacaatttatagccatattgtaaagtaaatcagtttaaaaaca

SEQ ID NO: 9020 - DNA, 201 bp, Homo sapiens
ccaacctaatagaatgagtttagaaatattttctccttatctacattttagaatagtttgagcaggattgatattaattcttctttaaatgtttggtagawttcagcagtgaacccagcaggtccttggcttttctttcctgggagacttttaattacagcttcaatttcattacttgttattggtctgttcaggtcttgg

SEQ ID NO: 9021 - DNA, 201 bp, Homo sapiens
tctaagtcttatctaatctcttatttcttttttaagttttactttttctaagtaacaaatcatgttttggtaaagaaggagagttacaagcattaaaaaawttaaaagcatttttaaaaacctattttggcatcatcagatcaaatttcttgatctaattgaagaaaatcctttatttcatttctcttttctttccctcac

SEQ ID NO: 9022 - DNA, 201 bp, Homo sapiens
attcatgctcacttgactgccaaattctcaatttcctatgttgatttcctcacagatggcgcttctcttacccaggataatttagtatcctgcccacttaytcccaacatatccatttgaaattccattgttttcttcactcaaatgggtttttttccatgtgagccatgggtttttcctaatatcctgggtaactcccaa

SEQ ID NO: 9023 - DNA, 201 bp, Homo sapiens
tggaagtgtgtaaatttgtaactttttctggagattaatttttaatatatattaaagaacaaaaatatacttgcctactttagtgataaatcttaagaaamtaatcaggaatgtgcacaaggacttatttacaattatagccatgacatctgtgtttaacagaataaaaaatggaaatattttgtaactaaaaaagaagag

SEQ ID NO: 9024 - DNA, 201 bp, Homo sapiens
agataaagaaaaggaacaaataataaaatattttaaaaactgcatcaccaaaacttattttaagtgaaattcaacagcaaaagataaattagaagaatttytaagtcagacacagacataggcaaatgtcctatgtatataaaaagctcttaaaaattaacaaaaacaccaccaaatgctggcaagaatgagataacagga

SEQ ID NO: 9025 - DNA, 201 bp, Homo sapiens
agaagacaacttgatgaagataagtgctgaaccagtctcagatgatgaggaaaaaacatagaagaatcagtgtcagaaacaaattgacattagacaatctrgcagaagtgttctgattattcaagactgttttggtatattttacaacgtggaaccttctgtaatgtgggcactgaaacaaaagcaaacagtggaagaagg

SEQ ID NO: 9026 - DNA, 201 bp, Homo sapiens
ggaaaaaatgtttccatactcttcataggcaaaggtattctcttagtgacattaagataactggatgatcatctggaggaaaacaagctgctgcaagtgtrccttactaattatagaaacattagtttgaaatttatatattgaccaaatacacaaattttacatgtgaaattataagtattagaactactcacataggat

SEQ ID NO: 9027 - DNA, 201 bp, Homo sapiens
taagtgagcctatggaacagaaaatcaaataccacatgttctctcttttaagtgggagctaaacattgagtacatatggacacaaataagggaacaagagrcactggggtctgcttgtgggtggagggtgagaggagggtgaagatacaaagctacctataagtgactatgattattacctgggtgacaataagtctgtac

SEQ ID NO: 9028 - DNA, 201 bp, Homo sapiens
acagagtcaaagttttttaaaagcaaaagatagatttactgtatgattaagcaatcatgctcccagatatttacctaaattaattggaaacatgtccacamaaaaaaaccctgcatttgaatgttaaaaagtggaagcatttaagatgtcctttaataggtaaacaaataattgaactgtggtacattcatacaatggaat

SEQ ID NO: 9029 - DNA, 201 bp, Homo sapiens
ttttttctattttattctgtaacatatatgatataaataatatattttctgggtatttttgcttttaaatttttttcttctaaatttctacctattttccytatgtttcatcaatcttctctgatgccatcttattatatcaagttctaatttgtaaatttttaataatattttaaatttataacaatactttatcattct

SEQ ID NO: 9030 - DNA, 201 bp, Homo sapiens
gcactgtgtgtacctgcctttcctgtcttcctttttaccccatccactgcctccacctctactaccctacagaaagcaagaacaatgccttccctccctcstccacctactcaatgtgaagagatgaggatgaaaaactttatgagacccacttctatttaatgaatagtaaatatatttcctcgtgattttctaaacatc

SEQ ID NO: 9031 - DNA, 201 bp, Homo sapiens
attctgtaacatatatgatataaataatatattttctgggtatttttgcttttaaatttttttcttctaaatttctacctattttccctatgtttcatcartcttctctgatgccatcttattatatcaagttctaatttgtaaatttttaataatattttaaatttataacaatactttatcattcttttgttactttta

SEQ ID NO: 9032 - DNA, 201 bp, Homo sapiens
ttatatttctgactctgagcaccatggtaggtatatagtataaatttaaagaatgctggaaataaattttaataatgcctgaatgatgataaaaagatttytcagattaggaagacatttttccatcccaacgcaatgcagtaatctccaaactttcaagaacattttgcttctctcatattgccaaattacctaagtgtt

SEQ ID NO: 9033 - DNA, 201 bp, Homo sapiens
gaaggtgttcataagagaaaactggaaatagctaaaacttaaataagacagagcttattttttacataaaagttaatgtagttagtccaaggatgatatgrttctattcttttcatcatagtgctatgccttgcatggccttggcctcgtggtacaaattgtggcaatgtattttctggcagcaggatagaagaagggaag

SEQ ID NO: 9034 - DNA, 201 bp, Homo sapiens
gaggcttaaggagcattttcagaagcaaaatgtttccactggcttcacatttaccagaaattggttacattttacacatagatatatagatactggggggraaaaggctttattccaggacgcggtttccagctaaaaaccccaacttcttttactatggaaggagagaaaaaaggataccgagagacaatgagcagtccc

SEQ ID NO: 9035 - DNA, 201 bp, Homo sapiens
aggcttaaggagcattttcagaagcaaaatgtttccactggcttcacatttaccagaaattggttacattttacacatagatatatagatactggggggaaaaaggctttattccaggacgcggtttccagctaaaaaccccaacttcttttactatggaaggagagaaaaaaggataccgagagacaatgagcagtccct

SEQ ID NO: 9036 - DNA, 201 bp, Homo sapiens
cctaacaataaaaaaattaaggtatttgtcatatctgttacagtattttttaatctttagtgattctttttggctcttagaatttttatctccttgcttayattgctcccctgttcttgcatgctctctacattattcattagagcccttagcaaattaataatagttgttttaaatttccattttgataattccaacgtc

SEQ ID NO: 9037 - DNA, 201 bp, Homo sapiens
aaatgtttccactggcttcacatttaccagaaattggttacattttacacatagatatatagatactggggggaaaaaggctttattccaggacgcggttwccagctaaaaaccccaacttcttttactatggaaggagagaaaaaaggataccgagagacaatgagcagtccctgttagagatgccaattacttactcat

SEQ ID NO: 9038 - DNA, 201 bp, Homo sapiens
acacaatttaataatctattttctttattctcttttcacagaagagccttcttcggcttgaaggtagccctaatatttccagtacttgttttacttactgkatttatttttgttgtaaggaaaaaatcccatggaaaggataccaaagtattagaaaatgaaagacaagtaatggatgaagcaaacttagaattcttaaac

SEQ ID NO: 9039 - DNA, 201 bp, Homo sapiens
agagtatgtcatctctttgcacctgttgtttctacagccttgaatacttttcttcctttgtctaccagttaaacttctatccatcttcaatattcattttwtctgtcactcacattgcgaagtcttctttgatctacccaccacctccaagcaaagctgatcatctcttctgtgtgtgtatgtgacaacttgggaccttgc

SEQ ID NO: 9040 - DNA, 201 bp, Homo sapiens
aatgtgaagagatgaggatgaaaaactttatgagacccacttctatttaatgaatagtaaatatatttcctcgtgattttctaaacatcattttctctagcttactttatagtaagaatacagtctataatacatataacatggaaaatatatgttgaccgtttatgctattggtaaggtttctggtcaacagtaggctat

SEQ ID NO: 9041 - DNA, 201 bp, Homo sapiens
aaaaagtatctatctttagctaatattaatcaatccaactggggtttagatttcatctttctgcctcttgttcatctgcatcccctctttttctcagcaarcactctcaagtctctcccatctatttacatatatacattttttatatccccaaatgacttcccagttgattaactgtttcctcaattcatcttcaaagcc

SEQ ID NO: 9042 - DNA, 201 bp, Homo sapiens
tttccaaacccactttgttccctatattccttctcttgctgagtatctgtaccttaattcaatgattgactgaatttctgtaccctgtaatctcacactcycctttatttaaaattggaaaaacttttctctcttttattttcatagttcttaaagtctctttcaacatgtggctttcctcagataacccttacttaatca

SEQ ID NO: 9043 - DNA, 201 bp, Homo sapiens
atttttctccctttgaaactgtgactgtaatgtgtgctgcatagaatctgaaaggctgtattgaagaggatcaagaaaaaatgctagaaaggaaagtgtarcagtcagtatggaaagttcttttcaggagaagtgttagaagaagaagcagagaaaagatgtggtagttagcatgattgtgtcatcaagagttctgtttat

SEQ ID NO: 9044 - DNA, 201 bp, Homo sapiens
tgttggaagacagagtcaaagttttttaaaagcaaaagatagatttactgtatgattaagcaatcatgctcccagatatttacctaaattaattggaaacrtgtccacaaaaaaaaaccctgcatttgaatgttaaaaagtggaagcatttaagatgtcctttaataggtaaacaaataattgaactgtggtacattcata

SEQ ID NO: 9045 - DNA, 201 bp, Homo sapiens
accaaaaaagtcctcaaaattacatttctggcaggtgataaataaatacttagcatgtatatggagttactgatttaaccaatcatttcctgaattcagtmtgtgttgttgattataaaacaatatgattataaaacaatatgatcacataaatcaattttagagacagattcattatggaaaataatttatttctagata

SEQ ID NO: 9046 - DNA, 201 bp, Homo sapiens
taatgtattctttttcatctctgattttacatatctgggtcttttctcttcacattagtctggataaatttctgtcagttgtatttatgttttcaaaaaacagattgtattattcatcttttgcactgttttatctcagatttatttatttcttctttcatctttattatttattctactaattttgggtttagtttgttc

SEQ ID NO: 9047 - DNA, 201 bp, Homo sapiens
atgtgaagagatgaggatgaaaaactttatgagacccacttctatttaatgaatagtaaatatatttcctcgtgattttctaaacatcattttctctagcttactttatagtaagaatacagtctataatacatataacatggaaaatatatgttgaccgtttatgctattggtaaggtttctggtcaacagtaggctatc

SEQ ID NO: 9048 - DNA, 201 bp, Homo sapiens
tgtgaagagatgaggatgaaaaactttatgagacccacttctatttaatgaatagtaaatatatttcctcgtgattttctaaacatcattttctctagcttactttatagtaagaatacagtctataatacatataacatggaaaatatatgttgaccgtttatgctattggtaaggtttctggtcaacagtaggctatca

SEQ ID NO: 9049 - DNA, 201 bp, Homo sapiens
gtgaagagatgaggatgaaaaactttatgagacccacttctatttaatgaatagtaaatatatttcctcgtgattttctaaacatcattttctctagcttactttatagtaagaatacagtctataatacatataacatggaaaatatatgttgaccgtttatgctattggtaaggtttctggtcaacagtaggctatcag

SEQ ID NO: 9050 - DNA, 201 bp, Homo sapiens
gaagaagaacaaggagaagaaccaaaaatgcacacagactgaggcttaaggagcattttcagaagcaaaatgtttccactggcttcacatttaccagaaawtggttacattttacacatagatatatagatactggggggaaaaaggctttattccaggacgcggtttccagctaaaaaccccaacttcttttactatgga

SEQ ID NO: 9051 - DNA, 201 bp, Homo sapiens
tacaggtattctaaagaaaccaatattgatccatcagaaaattcaacatcaaacttaccaaactgtttaattaatcaaatgttatcactcaatagaacacygtctgagataatagaaagaggtaagaattaatactgacagttaaaaagtataaaatttgtatatctaattacatctataaaatgtgattttttagcaaaa

SEQ ID NO: 9052 - DNA, 201 bp, Homo sapiens
cagtcaagtagtatttgttttatgaatctgagtgctacaatgttcgatgcatacttttagaattgttatatcttcttgttgaattgagcctttataaaatrtaataacctttttcattttttgactgtttttgattggaagtttgatctaacacaagtatagctatagttggtttatgttatcatgggatatctttttgca

SEQ ID NO: 9053 - DNA, 201 bp, Homo sapiens
ggcttcacatttaccagaaattggttacattttacacatagatatatagatactggggggaaaaaggctttattccaggacgcggtttccagctaaaaacyccaacttcttttactatggaaggagagaaaaaaggataccgagagacaatgagcagtccctgttagagatgccaattacttactcattgccatatccagc

SEQ ID NO: 9054 - DNA, 201 bp, Homo sapiens
ctgaacatatctggcacactatgagctgccctcagagctcacagagctccttagtacttttggatatcagcatctgtctctaattcagcaccatctctttkgtccttattaagttcttcctcataaagttaaaataggttagaaatttttaattgagttttgaagagtcaagcattagtgtgtgtgtgttcatgaaagaaa

SEQ ID NO: 9055 - DNA, 201 bp, Homo sapiens
gaattgtttatctggttcttcctcatttggataagctatctctccttattttgaatttattttgttttaacaggatttttctccctttgaaactgtgactrtaatgtgtgctgcatagaatctgaaaggctgtattgaagaggatcaagaaaaaatgctagaaaggaaagtgtagcagtcagtatggaaagttcttttcag

SEQ ID NO: 9056 - DNA, 201 bp, Homo sapiens
attgagttttgaagagtcaagcattagtgtgtgtgtgttcatgaaagaaaatcagacagacttactatctttggcgataactcaaagggataaatagatayagttaacagactaaaaaaaaaacaggtgaaacaggatattttacatcttgaccagaatataagcactcctaggattatagaaaagtgataacccacttta

SEQ ID NO: 9057 - DNA, 201 bp, Homo sapiens
gtgctactataaacatgcatgtgcaagtatctttttcatataattacttctttttctctggctatatacctagtatgggattgctggatcaaatggtagakctacttttatttctttaagaaatctccacattgttttccatagtggttgtactagtgtaccttccctcaagcagtgtaaaagtgttcccttttcaccata

SEQ ID NO: 9058 - DNA, 201 bp, Homo sapiens
tagatggcaggctcaaaatctcataggaaaaaagattttgttttattgttgttgatttccagaaaaaaagaacgtgcttcatagaaataatctgttcagayatacaaatattcttagccattgccttttgctcttgaagaaaccaaaccctcataactgggaggaagaaattatttttgtctctcttacatggtacactgg

SEQ ID NO: 9059 - DNA, 201 bp, Homo sapiens
cactcctaggattatagaaaagtgataacccactttatccatggtgtgttgaattatctgtcttagtagatgctcccattcccgccccacccccacccccwcttatcacctcctcttctgacatacatcctgggaaattgacaaagagaagtccggtaattcaaagacagtgtcaataaaggggaaaatttttctgcattt

SEQ ID NO: 9060 - DNA, 201 bp, Homo sapiens
atatgaagtgctggaagtgctcccagaagcacagaaaagtcatgacattacaagaaaaagtcaagttgtttaatatgtactgtagtttgagctctgcagcyggccactgtttcaatataaatgtatccagtagaaggaccattgtaaacagacacacacacacacacacagagagagagagagagagagagagacagggag

SEQ ID NO: 9061 - DNA, 201 bp, Homo sapiens
atgtgcaagtatctttttcatataattacttctttttctctggctatatacctagtatgggattgctggatcaaatggtagatctacttttatttctttargaaatctccacattgttttccatagtggttgtactagtgtaccttccctcaagcagtgtaaaagtgttcccttttcaccatatccacatcaacatttatt

SEQ ID NO: 9062 - DNA, 201 bp, Homo sapiens
caacatggtcattcaaggaaattacaaagagattgtggatatggcaaacaaagatgtgaagaatttcaaaatatggatcttggagacattcaagagctaaktggcaccacatcagaggagtcggcagaagacaacttgatgaagataagtgctgaaccagtctcagatgatgaggaaaaaacatagaagaatcagtgtcag

SEQ ID NO: 9063 - DNA, 201 bp, Homo sapiens
cagtggcatgtattatgacttgctgcagcctcaatttcccaggctcaagttattctccctcatcagccctccaagtagctgaagtgatgggagcatgccamcatgccagtctaatttttgtatattttgtagaggggtgattttgccatgtttcccagtctggtctctaacttctgggctcaagcaatctgcgtgcctctg

SEQ ID NO: 9064 - DNA, 201 bp, Homo sapiens
tttttttgtatctaggaatttattcattccttcccagttatttaattttttatgtataattgtgcatagtaatctcttatgattactttatttctgtggtrttagttataatttctctgctttcttttcttactttagttgaaacttctctcttagtctagattaaagttcatcaattttgttcacttttcgaaaaacatc

SEQ ID NO: 9065 - DNA, 201 bp, Homo sapiens
aatgaagggctttcagggagagggtctaagtgctgcttccttaagacaggaaagcgctggtgtgtttgaagaccaaaaagaatccagttcattggaacatrctgagtgagaggggtgtggtataagagaagtttggaaaattagggaggaagcagataatgtgtgccctactggccaatataataattcaatcacctaaaa

SEQ ID NO: 9066 - DNA, 201 bp, Homo sapiens
aaatgtatctctcacagttctggaggctggaacatacaagatcaaggtgctgagagatttggtatctggtaaaggcacacttgctagttcatagattgtgycttctagctgtgtttagtcatggtggaatatgcaaggggtcattaactccattcaggagggttcgtcctcatgaccagatcacatcctgacagccctatc

SEQ ID NO: 9067 - DNA, 201 bp, Homo sapiens
ttcccagttatttaattttttatgtataattgtgcatagtaatctcttatgattactttatttctgtggtgttagttataatttctctgctttcttttctkactttagttgaaacttctctcttagtctagattaaagttcatcaattttgttcacttttcgaaaaacatctcaactcttagttgtgttgatttttttcta

SEQ ID NO: 9068 - DNA, 201 bp, Homo sapiens
ttttatcaatctataatggttctctctctttggatgtttggatgaaaatgggatcaacgtaaattgaacatggaatcacttattcttacaagttaaatttktcaaactgtaaggcacataaatgacatgaaatgtaatcatttttgaatttgggaccctacagggtgcacgttgattgaagaaaaaacaagcagatgttgc

SEQ ID NO: 9069 - DNA, 201 bp, Homo sapiens
cccttcaacccccaatggtccaatcttcacgcagcagccagagtaagcctttttaaaccaaaatcatgtagtgtcactcctctagtctatcgtccaagggsttcctctcacacttggggtaaaattcaaagtcctaccacagtggcccttggggccattccttatctgtcctctggctgtctctgacctgctgcttaccac

SEQ ID NO: 9070 - DNA, 201 bp, Homo sapiens
tttgcccactttttgatggggttgttttttttcttgtcaatttgagttcattgtagattctggatattagccctttgtcagatgagtagattgcaaaaatkttctcccattctgtaggttgcctgttcactctgatggtaatttcttttggtgtgcagaagctctttagtttaattagatcccatttgtcaattttggctt

SEQ ID NO: 9071 - DNA, 201 bp, Homo sapiens
tatgtcccgaatggtattacctaggttttcttctagggtttttatggtttcaggtctaacatttaagtctttaatccatcttgaattaatttttgtgtaargtgtaaggaagggatccagtttcagctttctacatatggctagccagttttcccagtgccatttattaaatacagaatccttgcctcatttcttgttttt

SEQ ID NO: 9072 - DNA, 201 bp, Homo sapiens
tggctagccagttttcccagtgccatttattaaatacagaatccttgcctcatttcttgtttttgtcaggtttgtcaaagatcagatggttgcagatatgyggcattatttctgagggctctgttctgttccattggtctatatctctgttttggtaccagtaccacactgttttggttactatagccttgtagtatagtt

SEQ ID NO: 9073 - DNA, 201 bp, Homo sapiens
taggcatctgtgttatttccactttggggctgtatatataatgctgctctaaacatttatatatatgttcttgtgtgaaaatatgtctccaatctcttggscattgaatggaattgctgtcatatggtaattccatgttcatctttttgaagacctgtcaaattattttccaaagtgactcaatattatacattcttgcca

SEQ ID NO: 9074 - DNA, 201 bp, Homo sapiens
cacaacctgaggacggcactctgccagaaagttgcaggtgctggatttgggaatgaagtcacacctggagctaatatgggagtgggagatcaggggaataygggcagagcattccagcatcttgtagagatgggaattaccattgttcttctcttcaatcgtcatgattgttgaatctgaagatatatgtcatttagaaaa

SEQ ID NO: 9075 - DNA, 201 bp, Homo sapiens
ttcctactcaaatatgcccaaagtgccatctcttttcatgacatttactgagttttaaagttaatcctctaggtattaaactccaggtcacaacagtatctttttttttttttttttttggatttttagtagagacagggtttcaccatattggccaggctggtctcgagctcctgacctcaggtgatcagcctgactcgg

SEQ ID NO: 9076 - DNA, 201 bp, Homo sapiens
cctagaagcccagccctttgggaggttgaggccggaggatcacttgaggccaggagttggaaagcagccaggtcaacatagtgagacctcttatctctacaaaaaaaaaaaaaaaaaaaaaagcttcctcacccctgattttagacagatagacagaaacatctccatgctatacaataaggaataaaatcatggattttt

SEQ ID NO: 9077 - DNA, 201 bp, Homo sapiens
ctacaaaaaaaaaaaaaaaaaaaaaagcttcctcacccctgattttagacagatagacagaaacatctccatgctatacaataaggaataaaatcatggattttttttttttttttttttttttttttgagacggagtctcgctctgtcacccaggctggagtgcagtagcatgatctcggctcactgcaagctccacctc

SEQ ID NO: 9078 - DNA, 201 bp, Homo sapiens
ttttgtattaatagtaatttgtacatattcaacaaatgtgtgtgaaacaagacagtagctagtactcactgtggacccatcactattcttacagcttctamatatatgtggaatttatggaatgtagaatattctatggaatatagaatatatatttagaagctctaaatataaacaaccctaggaggtagctgcaatggt

SEQ ID NO: 9079 - DNA, 201 bp, Homo sapiens
tacaaaaaaaaaaaaaaaaaaaaaagcttcctcacccctgattttagacagatagacagaaacatctccatgctatacaataaggaataaaatcatggattttttttttttttttttttttttttttgagacggagtctcgctctgtcacccaggctggagtgcagtagcatgatctcggctcactgcaagctccacctcc

SEQ ID NO: 9080 - DNA, 201 bp, Homo sapiens
aaaaacatgttgaatttcagttcaaagttttaaccttatttctttaaaacaatgccttcaaatggtaacctaaggcacctctaaaacaatataatgagtaygtcatgtatacaggtgattgcagagggaagcagattcctttacttcatttctaaagagtaggggaaaaatcttctgcaattgggcagatatagtggaagg

SEQ ID NO: 9081 - DNA, 201 bp, Homo sapiens
ctaaaccatgccagcagtctcagagagtaccatgagtatgaggataattacaattttctgagtcctcacccattattgcattgttattcctggattcctamtttcctccccttccccaaggcctctcctaacttgaggatgccaatagcttacaatgtaccttgaaaatgtgttgtgtggcttggctgatgccaaaggccc

SEQ ID NO: 9082 - DNA, 201 bp, Homo sapiens
ggcatcattaacaaggagagaaagccaggtagataaaaatcatgcttttcttcttgttcagctaaaaagatttcagggatcagattattgtcaaggaggcrtctgcttttgagagttgagaacaagctgctggaaggtttctgacatgaagctgatttacaatgggttaaacctagagaagcagacagcctcatagcaaaa

SEQ ID NO: 9083 - DNA, 201 bp, Homo sapiens
aaaactggttaaaaacatgttgaatttcagttcaaagttttaaccttatttctttaaaacaatgccttcaaatggtaacctaaggcacctctaaaacaatrtaatgagtatgtcatgtatacaggtgattgcagagggaagcagattcctttacttcatttctaaagagtaggggaaaaatcttctgcaattgggcagata

SEQ ID NO: 9084 - DNA, 201 bp, Homo sapiens
atcatgaatggcaaatctccacaggcaaggatcttctgcatctaaaatttttacttttgggagatgccaacaaaaaactatgttccaaaagagccatggtkgcctacatgtatattgctgtgactcgcatgtttcacatgcaaatttcacatcttgaaactcaccttcatggtagttatttggagaggagctgatgataac

SEQ ID NO: 9085 - DNA, 201 bp, Homo sapiens
gcagtctcagagagtaccatgagtatgaggataattacaattttctgagtcctcacccattattgcattgttattcctggattcctactttcctccccttccccaaggcctctcctaacttgaggatgccaatagcttacaatgtaccttgaaaatgtgttgtgtggcttggctgatgccaaaggccctgctgattctgta

SEQ ID NO: 9086 - DNA, 201 bp, Homo sapiens
tctgataaagttttgaattttcatttagtgactatttcaatgtcttttttgaaaatcaaatatcaaaatttttagtttttgttcaatgccctaatttactrgtgtccaaaacatatctttaaaggttaattggatagtccatcactgtatgggggctatattaatatactttacaataccagaaactatatatataaaaca

SEQ ID NO: 9087 - DNA, 201 bp, Homo sapiens
gcgatgcttatccaaaatagtacgcctgccttcagtctcatttccctaaaatccattctcccttcagccagaattaacttaataactaatatatatatatrtgtgtgtgtgtgtgtgtgtgttatatgtttacatgtatgttgtgtacaatcaccaggcaattttctatggctggagatggcttgaaaaaactaaaagagt

SEQ ID NO: 9088 - DNA, 201 bp, Homo sapiens
ttctcaggaaaccaaaatttttatttgcttttacatcattcagaatttcttagttcctgaccctatctctcatttctgtttgtggcaaactgcattttccraagacggacatgctagcatacaactctcgtcctacaggctctatttacagtgtgactgctgcccctcccaccaagaggtgggggccatgttccctccaaa

SEQ ID NO: 9089 - DNA, 201 bp, Homo sapiens
ggaaacagaaggaacaacacaagaaaagggcacccgggtcagcatgctgacaaaaataatcaagtacgacaggccataatccaatcttcgaatgtttggcrtggtgctagttatgagaatctgcagccaagaggaaagaaaactattattaagcaaagaaattatctggctttctagaattcactattacatgttcactag

SEQ ID NO: 9090 - DNA, 201 bp, Homo sapiens
taatctgttacaatgtcaatttaattccaggaccctaagaggatggaggtggagtttttctgctcctacacctggataggcaagaccaaccacttaccagrtggggaatcttccagtgctaatagttcagactgtgcatacaagaaactgagagaaggaccagtactgttttgtggttgcaggttgttccatgatgagaat

SEQ ID NO: 9091 - DNA, 201 bp, Homo sapiens
ttttggattgaattttattacagtgaacagttttagtaggtataatattgctgattggaaataatgagattttaaataagtttataacctatattttcttraagtctttagtacctaaatgattacttttctcctaataaaattctaagacaatccaatgaaaataatatggcctataaaatacctgaagcatctgcctag

SEQ ID NO: 9092 - DNA, 201 bp, Homo sapiens
atagtaggctgtagtttccatcatgcagtagtagtcttaatggccacttttgaattccattcatctttacactcgccacaaaaacatttggagactaaaayaaagattaagatggtgacttggttaaaaatgcttaaagttttgagttttagcatgaaatatcagacccagatggctggcatttttaaagtagtgaaattc

SEQ ID NO: 9093 - DNA, 201 bp, Homo sapiens
acaaaaaaaaaaaaaaaaaaaaaagcttcctcacccctgattttagacagatagacagaaacatctccatgctatacaataaggaataaaatcatggattttttttttttttttttttttttttttgagacggagtctcgctctgtcacccaggctggagtgcagtagcatgatctcggctcactgcaagctccacctccc

SEQ ID NO: 9094 - DNA, 201 bp, Homo sapiens
caaaaaaaaaaaaaaaaaaaaaagcttcctcacccctgattttagacagatagacagaaacatctccatgctatacaataaggaataaaatcatggattttttttttttttttttttttttttttgagacggagtctcgctctgtcacccaggctggagtgcagtagcatgatctcggctcactgcaagctccacctcccg

SEQ ID NO: 9095 - DNA, 201 bp, Homo sapiens
tccacaggcaaggatcttctgcatctaaaatttttacttttgggagatgccaacaaaaaactatgttccaaaagagccatggttgcctacatgtatattgytgtgactcgcatgtttcacatgcaaatttcacatcttgaaactcaccttcatggtagttatttggagaggagctgatgataaccttcagcagctccaaat

SEQ ID NO: 9096 - DNA, 201 bp, Homo sapiens
cattttatagtgatactatgctaggtgctattctagacactttacgtatgttgattcattttctcctaagatttccatgtggtaagtactattattttacyttatacacataaggaaattaaggcaaagagaagttatgaaatttgcctgaggtcactcagctagtgaatcgaaaagctggtattgtaatccaggcagtgt

SEQ ID NO: 9097 - DNA, 201 bp, Homo sapiens
tgcccctcccaccaagaggtgggggccatgttccctccaaatctgagtgggggcttctgtctgctccaacccgtaaggtagggcaacagtaacttcttccrtttgtgtctctcccttaggatacatggcttctgatggccctgctggggagaccatgtggagagatggcatagagccagagattcacgttccaggagccct

SEQ ID NO: 9098 - DNA, 201 bp, Homo sapiens
attctatggtgtacatgtactacattttctttatccagtctgtcactgatgggctttaaggctgactccatgtctttgctattgtgaatagtgctgcaatsaacattgatgtgcatatatctttatggtagaaagctttctattcctctgggtatttccccagtaatgagattgctgtgttgaatggtagctctctgcttt

SEQ ID NO: 9099 - DNA, 201 bp, Homo sapiens
agtgtgaacacagagtccgtactattgactactagacttgcataaagaggaactcaatttctttcactttctcatgttaaatttaaaataagatgacaaayaaatcagaatgacagttcatcaaatgtgaattgtgatcttgaagtccccttgtgagttgattagcacaagtttttcatatcaaaatcttcttgggaaacc

SEQ ID NO: 9100 - DNA, 201 bp, Homo sapiens
cctttacttcatttctaaagagtaggggaaaaatcttctgcaattgggcagatatagtggaaggacgaacatcacagtcaagagttggtgccctgcttttyctttcccccatgttcctcatggatagctgagtgcctcttgcagggagatgggaggaaaggcatgggcatcattaacaaggagagaaagccaggtagataa

SEQ ID NO: 9101 - DNA, 201 bp, Homo sapiens
tttattctgcctcccttctgttgtagtcaggaaagtgagttgtcttaaagttaaacgtcttgtgatcagcctacatgaagggcactgcacaagtcccatcrtctgattgatgagatactctcctccctggtctgttttcctagccactggaacttagaggaatgggactcgaattgcagtacacaatttgttttgattatg

SEQ ID NO: 9102 - DNA, 201 bp, Homo sapiens
gtgggctgggggtattaatttgggagtttgaaaaagatggcatctaaattattgaattgcctcaccaatgaagaaagagcacatagagaagagatttaagwatggagtcctaggacactccatactttagggatcagaaggaggaggaaactagcaaagaagacagtgagtgaccattcagttaggagtaaaactaagggc

SEQ ID NO: 9103 - DNA, 201 bp, Homo sapiens
cacaatttgttttgattatgactttatcctccccagctccttcagctcatggatcttatgtttttcatacaaatatttaaaaccaatgagacagtaattcrttcatcaagggggtcttgtcaaagttctctgttctgtattttgcatagcattatcacataacaaaacattaagattccatctcaattaatcctgacccca

SEQ ID NO: 9104 - DNA, 201 bp, Homo sapiens
gtactaggcattgtaacaggatagggtcccttcctgatgatctcctcccacctctaaattattttgacactgtctaaaggtaaagcagccctggaatgaargtatctgtctctgatcattaccattgcttaaaggaccactgatatgacatattgctgttttctgttgctaaagagttaaactttcttgtattgatgtctt

SEQ ID NO: 9105 - DNA, 201 bp, Homo sapiens
gatctcctcccacctctaaattattttgacactgtctaaaggtaaagcagccctggaatgaaggtatctgtctctgatcattaccattgcttaaaggaccrctgatatgacatattgctgttttctgttgctaaagagttaaactttcttgtattgatgtctttttcttgggggtttagaggatctctcacatgctcaggc

SEQ ID NO: 9106 - DNA, 201 bp, Homo sapiens
tgggatgactataaaccagtggaaattatccaggaaagatacaggaactggtgctgtgagagtggggagacttcttggagcctccagtgagtgggagaccrtgggcccaaatacctaagtggaggggctggctcagataggagaagctcagacaaatgactgtggctgtggttctcaaagcatggttcccagatcaacagt

SEQ ID NO: 9107 - DNA, 201 bp, Homo sapiens
gttccagatttgtcatgatttctgggctacagagaggcaactagagataaagccaatgaaattttgagaacattacttgtgagagcctggctgactgtggmgatcaggcctctaggaatgccagttttgaagaggggttaggatgcatctagagtctagacgcgatgtagcaggcccagaaatgcacagttatttgaccac

SEQ ID NO: 9108 - DNA, 201 bp, Homo sapiens
caggaaagatacaggaactggtgctgtgagagtggggagacttcttggagcctccagtgagtgggagaccgtgggcccaaatacctaagtggaggggctgkctcagataggagaagctcagacaaatgactgtggctgtggttctcaaagcatggttcccagatcaacagtatagccattacccgggagcctgttagaaac

SEQ ID NO: 9109 - DNA, 201 bp, Homo sapiens
tcttctcaggaaaccaaaatttttatttgcttttacatcattcagaatttcttagttcctgaccctatctctcatttctgtttgtggcaaactgcattttycgaagacggacatgctagcatacaactctcgtcctacaggctctatttacagtgtgactgctgcccctcccaccaagaggtgggggccatgttccctcca

SEQ ID NO: 9110 - DNA, 201 bp, Homo sapiens
aaagctatgcttatggtgttgcagtcaacatcttactttatgaacttataatctatactgatgtttattgttactatgttttcctgtttacctgagagggrccacacccaaaaggagtgtcctagaggtggaaacatgtactacatgttctattatagcatttatcatattataatatgaataatatgctgcctctctgca

SEQ ID NO: 9111 - DNA, 201 bp, Homo sapiens
aatagcaaatgaaactgtccagggtgggcaggtgaaagtttcagaacctggtgatgctaagtggcctgagtatgcccaagttaacctttgggctatggtcmagtggacaacaaagccaacacatgcaagcagatattccagtctccagacattatcttctattcttgttcttctcaggaaaccaaaatttttatttgcttt

SEQ ID NO: 9112 - DNA, 201 bp, Homo sapiens
gtgcaattgttctcacatggactactgcagtggccttccaactagtgtctctgcttttctcccttcaacccccaatggtccaatcttcacgcagcagccasagtaagcctttttaaaccaaaatcatgtagtgtcactcctctagtctatcgtccaagggcttcctctcacacttggggtaaaattcaaagtcctaccaca

SEQ ID NO: 9113 - DNA, 201 bp, Homo sapiens
ttggcttctgtttccccactcaaaaggagaaaatagaggttccttctgtatcagaaactctatttaaatagagaggcaagaggaataataattgttaaaaycttttcacagtttaaaaaaggcatataaataggaaaaggcctgttactgtgcttaagaagtctgtacagtatgtggtggtccctaaaggagcgttccaac

SEQ ID NO: 9114 - DNA, 201 bp, Homo sapiens
catcagctcactggttctcaggctctcagattcagaatgaattataacactggtattctaattctccagtttgcaagtggtattttgtgggacttctcagyctccataattgcatgagccaattcccataattaatgccctctttatctatctatctatctatctatctatctatctatctatctatctatctaatctctc

SEQ ID NO: 9115 - DNA, 201 bp, Homo sapiens
ccttcatcaaggtgcaattgttctcacatggactactgcagtggccttccaactagtgtctctgcttttctcccttcaacccccaatggtccaatcttcaygcagcagccagagtaagcctttttaaaccaaaatcatgtagtgtcactcctctagtctatcgtccaagggcttcctctcacacttggggtaaaattcaaa

SEQ ID NO: 9116 - DNA, 201 bp, Homo sapiens
ttcactgtgttagccaggatggtctcgagctcctgacctcgtgatccgcacgccttggccttccaaagtgctgggattacaggcgtgagccgccgcgcccsgctctattttctttcatttacactttgtcctacagtttttctagttcctccctcttcaatttgattttcatttattctccccttcttttctcatttttct

SEQ ID NO: 9117 - DNA, 201 bp, Homo sapiens
tgaggagattaacatctcagcatatctatctatagcccatctacccaccttacaaggagtgaaaagctctgtgatgtgcagtagtctttataatgaagcaycaaattacatcttgctatcaacttttaaattactctataccaattgggtccaaaaacatttaagtagttcatttctaattctatgttatttacctttatc

SEQ ID NO: 9118 - DNA, 201 bp, Homo sapiens
ctgtaatcccaggactttgggaggcagagatgggaagatcacttgagaccaggagtttgagcccaggctggtcaacatagcgagacgctcatctctatttaaaaaaaaaaagtatgtatttaaaaagtaagatatttgcgttaatgttgcttcttacccaatagcctcttcaaatccttgaagttctcacctcaatgacct

SEQ ID NO: 9119 - DNA, 201 bp, Homo sapiens
cctgaagttcagcagaggtgacaacccaggctttcctggctgacccaaggaggggtgaggagattaacatctcagcatatctatctatagcccatctaccyaccttacaaggagtgaaaagctctgtgatgtgcagtagtctttataatgaagcatcaaattacatcttgctatcaacttttaaattactctataccaatt

SEQ ID NO: 9120 - DNA, 201 bp, Homo sapiens
tgatgatggtaagcttttgttcatatgtttattggccacataaaagtcttcttttgagaagtgtctgttcatgtccttcacccgctttttgatagggttgtttttttttttcttgtaaatttgtttaagttccttgtagattctggatatcagaccttgtcagatggatagactgcaaaaattttctcccattctgtaggt

SEQ ID NO: 9121 - DNA, 201 bp, Homo sapiens; identical to SEQ ID NO: 1171

SEQ ID NO: 9122 - DNA, 201 bp, Homo sapiens
tacaagggatgtgaaggacctcttcaaggagatctacaaaccactgctcaatgaaataaaagaggatacaaagaaatgaaagaatattccatgctcatgartaggaagaatcaatatcatgaaaatggccatactgcccaaggtaatttatagattcaatgccatctccatcaagctaccaatgactttcttcacagaatt

SEQ ID NO: 9123 - DNA, 201 bp, Homo sapiens
aaaatgtatgaaggatgcagttgtaaaagaaaaacacagcagtcttaaacaattgctgctaaaacatcataatttggcacgttttaaatttgatgaaggaracacattgccagggcccttctcaagttcctggagggttccatgtaagagagagttcataaagttgtttcattagcttccaggtaattctgcctctgtacg

SEQ ID NO: 9124 - DNA, 201 bp, Homo sapiens
aattcataaggaagtgtgcataggctgaggtcattatttccctcattctgagaatgaatcacagctcagagctttccccggagtgcaccgtgcattgtttrcttggtgcttcccttcacagaattctgtgcttcataaaaaatatacactttatatctgtgtggtgctttaacaatcatttcctcatgaaagactgatatg

SEQ ID NO: 9125 - DNA, 201 bp, Homo sapiens
tagtgttgtaaaaaaatataactagagcctagaaaaatgtgagatattatgtttaagtgaacattttcaaaactcttgttttttgaaattctctccaacawcttatctatattttaaccaaagaaacatgggtcagcacttgcattggttattaatctacatgatccaaccacattgtgtgccttgtcaacacaaggagtg

SEQ ID NO: 9126 - DNA, 201 bp, Homo sapiens
atgttctattatagcatttatcatattataatatgaataatatgctgcctctctgcacttcagcttaacccatgacctctctgagaacaagtaacatgtckcattgacctttacattactccccagcaccacttcttcactctgccctatcccaagtccttcgactttgccttatacatgtgatcctctctgaaatttgtg

SEQ ID NO: 9127 - DNA, 201 bp, Homo sapiens
tttaaataagtttataacctatattttcttgaagtctttagtacctaaatgattacttttctcctaataaaattctaagacaatccaatgaaaataatatrgcctataaaatacctgaagcatctgcctagaacactgcccacggttattcaacgtcttcagggcgcacaggatgaggcaatggatttcttgtcagtgtct

SEQ ID NO: 9128 - DNA, 201 bp, Homo sapiens
atatttttttaaagataaagaggaaacaagaatactaagtattatgaataagtctttggcctttaatgaagataacttcaggttaaattcttcagaaatawtggctatcttttttacaaaggaacttcaaagagcattcacttttttaattgaccattttttgtgtttctaactactccatgtattaaatttaaaatatga

SEQ ID NO: 9129 - DNA, 201 bp, Homo sapiens
tcaattcaccttccaaagggattgtagttttctcctaagaatcagaaagctcaattttgaaaagattctcttgtggcaaaagggtctttgaaatgtaaacmaacaatccccttttattttagggacaagaaaacagagatctggtatgtcagtttaagattcttagcatatgctgattgattgtggttagactatgactaa

SEQ ID NO: 9130 - DNA, 201 bp, Homo sapiens
aaatacctgaagcatctgcctagaacactgcccacggttattcaacgtcttcagggcgcacaggatgaggcaatggatttcttgtcagtgtctctggaagkcgctttcctcacattgtaagcgtctccatcgggctctctgttgttgacccagacatactctatgactgttctgtatttgctatagccgaattgcttgtac

SEQ ID NO: 9131 - DNA, 201 bp, Homo sapiens
aatacttatacatggaaggtttgttttacttctggtttttcagtattccattaatatagcatcaaaacataacatgaattgctttgatgatgtaaaaaaamggtattgtctgcatctaagcaaccatgttgtctttccatctgaactcttttaaagctgcttagttttgtgggagatttgctcgtaagtcaggttttatga

SEQ ID NO: 9132 - DNA, 201 bp, Homo sapiens
ttccattaatatagcatcaaaacataacatgaattgctttgatgatgtaaaaaaaaggtattgtctgcatctaagcaaccatgttgtctttccatctgaaytcttttaaagctgcttagttttgtgggagatttgctcgtaagtcaggttttatgaatcaagaaaactctgtatggtcttgctaaagcagcttgagctgct

SEQ ID NO: 9133 - DNA, 201 bp, Homo sapiens
ctaatttctttttacacttctgctctctgagacacatgcacacacttgtggatataagcacataccctattagctttttacacttaatagggcccttggcrtttttgagtcttcaactaatttgttttattctgcctcccttctgttgtagtcaggaaagtgagttgtcttaaagttaaacgtcttgtgatcagcctacat

SEQ ID NO: 9134 - DNA, 201 bp, Homo sapiens
aaagatagggctactgtgtcaatttccttggaaatcgagatacgactggattgtgcttttctcaagaatacactgcatctgatttttctggtgaattgggrtcacattctgctgataagagttaagagttaatagtatttagtaatcactcactcatcaggtattatttagagactctgcctcagttctctatttcatctt

SEQ ID NO: 9135 - DNA, 201 bp, Homo sapiens
agttctctatttcatcttttagtggcctaaaagagctaattcagtgctttacttaagcaaaaggcatgacttaatcactggaataaattaacaatagagtaaaaataggatttacctgcatttctgtgtcagtgttgagctcattgaattgtccttggtaaaaataaaaattaatataaaagtgaattataccatgtaaat

SEQ ID NO: 9136 - DNA, 201 bp, Homo sapiens
caatcctccctcttttggcctcccaaagtgctgggattacaggtgtgagccattgtgcccatccagtatagtagattctatatgtatgtgcgtgtgtgtgwatatatatatatgtgtgtgtgtgtgtgtgtgtgtgtatatatatgtgtgtgtatatatatatacacacacattaaaagtatatttatatattatttgcta

SEQ ID NO: 9137 - DNA, 201 bp, Homo sapiens
tttggcctcccaaagtgctgggattacaggtgtgagccattgtgcccatccagtatagtagattctatatgtatgtgcgtgtgtgtgtatatatatatatrtgtgtgtgtgtgtgtgtgtgtgtatatatatgtgtgtgtatatatatatacacacacattaaaagtatatttatatattatttgctataatatataaata

SEQ ID NO: 9138 - DNA, 201 bp, Homo sapiens
catagcagtaatcatagaccacccaagcatagtttttacaaggccaaatttacaaaagaatgttattgcttgaggttatcagaagaaaaataagtggctayttattaggttataatgatgaaaataaaggtagtcagtcatgctaggtttcataagaataagtatactcaactatgactcatgatcgtttttatcaaagta

SEQ ID NO: 9139 - DNA, 201 bp, Homo sapiens
aaccccatctctactaaaaatacaaaagttatctgggcatggtagtgggtgcctgtaatcccagctacttgggaggctgaggcaagagaatcgcttgaacrcggagagcaaaggttgcagtgagccaagatcatgccactgctctccagtctgggtaacagagtgagactccatctcaaaaaaacagaaaacaaaaaaaaa

SEQ ID NO: 9140 - DNA, 201 bp, Homo sapiens
tcaaaataaagtcttggaatttcactgggaccagggtcctggatgccaaggttagtcctgggttttcattctgactacaataggaaggcagtaaagagttmagcagagaagagatgttatctggtttacatttgaaatatctcaaagaaatgaagggaggcagaggggaagtagggattaattatggaggccaattcagta

SEQ ID NO: 9141 - DNA, 201 bp, Homo sapiens
ctccatgccatcaatttcctacagacaaaaagtgagttgagaaaactacttagatgcagtcatgggctatttctttcttacagaaaaagaaggatctctcrgaggctaagcaaaccatccagagtgtggacccaaaatccaaaaaacaaaattaattagagagccactccaagagataagaaataggccctaatcagggaa

SEQ ID NO: 9142 - DNA, 201 bp, Homo sapiens
tgattgtctatgaatccagacccatcactcaaataggcccatcatccaaattagagagaggcctaccttgacaagaatagtaagcctggctgtcatctaayagagtagaatttaatctgatccatagaaatcccataaggaattttaaaggaactatattgatttggattaaaagggacagagacagttcaagaagactcc

SEQ ID NO: 9143 - DNA, 201 bp, Homo sapiens
ggtaagatcaaatagaaggatgtggctgttaggccctaacaaaataacccagaatgatttcttatagagtatttagtagacctctcatctaaacaaatgaytgtctatgaatccagacccatcactcaaataggcccatcatccaaattagagagaggcctaccttgacaagaatagtaagcctggctgtcatctaacaga

SEQ ID NO: 9144 - DNA, 201 bp, Homo sapiens
tcatctcactgcaacctccatctcctgggttcaagcaattctcctgcctcagcctcccaagtagttggaattgcaggcacccgacatcacacccggctaatgttagtatttttagttgagacagggttttgccatgttggctaggctggtcttgaactcctgtcctcaggtaatccacctgcctcagcctcccaaagtgct

SEQ ID NO: 9145 - DNA, 201 bp, Homo sapiens
caatccacagtcaacagtatgaatggaacaattcacactgttgtacatagatatagaggttaaacccaaacacatgaaaaagtgatgctggaagcacttgkgaacagctgggccagatgaataactcaattggatgccatgaggaacaaattaaacaactgactggagaccaggctgctcctgtgacagacactttaatca

SEQ ID NO: 9146 - DNA, 201 bp, Homo sapiens
tagccttctaggttacaaccttccctttctcttattaattaaaacagatccccaaatacctctcactttgtgacttctcactctataaaaagtagaatttyaaaacattatttgtaatgaaaaatgtaatgtgtttttattttttatatatgtattttatttatttaacagaagagaaacacatctgtcaaaggacctagc

SEQ ID NO: 9147 - DNA, 201 bp, Homo sapiens
acaggcgtgagccacacaacagtatcttctaacacaggcacttgctggattttagattcatttttacttctaacatccaggtatttctttgtgtttgtatrtgtgagtttgtgtgtgtgtgtgtgtgtgtctatgtatttttcctcatatatctatttagaaagattgaggaaggttctggaatacttagcgcatcatgca

SEQ ID NO: 9148 - DNA, 201 bp, Homo sapiens
ctttccagcagaaccctaacatcattccttggcttatggaataacagctattatggtaggaaaagccaagtggagtggctccagtggtgcagttggttagygcgtggtgcttatgaggaaggccaagtggaagctcacagatggccccactcaccttcgccaagatgataaattagaagcaatatgacatcctgggtggaa

SEQ ID NO: 9149 - DNA, 201 bp, Homo sapiens
tttgttcaaaacgccttaaatgatccctgttatctgtaagggttcaaatgcttttagtctggctttcaagacccaccacaatctgaccctactgtgaattkctcctgctgctgaatcctgtactgtaaataagaaagattaaggagacagtttcctcaaaagtgatcaattttctaattgggccttcaatggttcggtata

SEQ ID NO: 9150 - DNA, 201 bp, Homo sapiens
catgaagtagtaaatcccgtgggcagttgagactccttggtaaatttaaacatagtactacatccagaataatatagtgatctctcaccatgctgggtacratcatcagcagcaatgatttagaaaatgagaatgatttatatttttatttttgaacagtaaatcttttcttaaatttatggagggatttagatttatata

SEQ ID NO: 9151 - DNA, 201 bp, Homo sapiens
caaaataaagtcttggaatttcactgggaccagggtcctggatgccaaggttagtcctgggttttcattctgactacaataggaaggcagtaaagagttcrgcagagaagagatgttatctggtttacatttgaaatatctcaaagaaatgaagggaggcagaggggaagtagggattaattatggaggccaattcagtag

SEQ ID NO: 9152 - DNA, 201 bp, Homo sapiens
ctatgactgttctgtatttgctatagccgaattgcttgtacatgtcgattgcaatttggttagataccaaagagattgaccaaaatatccacctgtctgtygttgaagcagaaaaggtcattgcaagtgaaacccggaggatggtcatcactctaccaccactgaggccagcgtcccaggacctgtaactgtcctgccaga

SEQ ID NO: 9153 - DNA, 201 bp, Homo sapiens
agaagtatatgtaaataaactacacatttctaagcatagtgatgctgggtgaggagtaggctgggtcaatctgaaataaataaataaataaataaataaawaataaataaataaataaataagccagagcatcctccaaagtcttactctgagtgattttcttctgtcctgtgtttaccttccctcaatatccaatttaca

SEQ ID NO: 9154 - DNA, 201 bp, Homo sapiens
gaagtatatgtaaataaactacacatttctaagcatagtgatgctgggtgaggagtaggctgggtcaatctgaaataaataaataaataaataaataaataataaataaataaataaataagccagagcatcctccaaagtcttactctgagtgattttcttctgtcctgtgtttaccttccctcaatatccaatttacaa

SEQ ID NO: 9155 - DNA, 201 bp, Homo sapiens
cttttcctttctccttgtttctccttttctttccttctttcctctctgctctctttttcttctttctctctctgtatacatatatacatatatatatgtaygtatatatatgtgtatatgtatatatacaagtatatacatttttcaataaattaatctccaatcatacctagagggccttcaggacgagcatttacaaaa

SEQ ID NO: 9156 - DNA, 201 bp, Homo sapiens
atattagatgccagagctacttgccattttctctaggaagattttttaaataaggacaggaaaatgcctcataattttatgacttatttcaagtagttttmctgagaatgttaaaaaattttttcaggctaattattttgtttaatttgttttaggaattgcaggaacagcaggattaatattttaataaaatggtttaca

SEQ ID NO: 9157 - DNA, 201 bp, Homo sapiens
ctgctttccttaaaattaattgcagtttactcagagttttctgccctcatctactacttaaggtcccattctctttcaatgaggaagaatggaaacattgyattttacctctttatgggcttgatctatgtaactatgttgattttcaagactgacagagcattccctgaaaggcactcaaacccaaaatactaatgtgaa

SEQ ID NO: 9158 - DNA, 201 bp, Homo sapiens
ggtggttctctattgacatgctaaaaattccatttgaaacttagcaaacttatagttcagtctcactgtggtagaattggttgtgttattaaaatatatamagaagtaacacataaagatatggaaaaaaagcacaaatttatcagatccatctagaagaaaaagatgactaacccttatatcaacaggaagagactgaga

SEQ ID NO: 9159 - DNA, 201 bp, Homo sapiens
aaaaatctgggaagatcattcaaactttgctttggctacaaagcactagatggagttgagctttcttacgtgttgcagatttaagaagttagaaggggaatgtgtgtgtgtgtgtgtgcatgtgtttgtgtgtgtgtgtgcacatattcctatagaagtataagtttgttacaatgtaagtgggttttccaagaattcaaa

SEQ ID NO: 9160 - DNA, 201 bp, Homo sapiens
aaaatctgggaagatcattcaaactttgctttggctacaaagcactagatggagttgagctttcttacgtgttgcagatttaagaagttagaaggggaatgtgtgtgtgtgtgtgtgcatgtgtttgtgtgtgtgtgtgcacatattcctatagaagtataagtttgttacaatgtaagtgggttttccaagaattcaaag

SEQ ID NO: 9161 - DNA, 201 bp, Homo sapiens
taatcctgatcttgtaacactcaatccccgcccgctgtaactcagtcttttctggcctcatggagggttggtggcagaaggtgatagaggctattagtgargtggggaaatgtggcagattgggacaattgcatcattcacagcagtatttaaaaaaaatttatttggaatttccttcaaatatcagatgatgaaatagaa

SEQ ID NO: 9162 - DNA, 201 bp, Homo sapiens
ttgcgatgcttatccaaaatagtacgcctgccttcagtctcatttccctaaaatccattctcccttcagccagaattaacttaataactaatatatatatrtatgtgtgtgtgtgtgtgtgtgttatatgtttacatgtatgttgtgtacaatcaccaggcaattttctatggctggagatggcttgaaaaaactaaaaga

SEQ ID NO: 9163 - DNA, 201 bp, Homo sapiens
aagtgccctctgcttgttctccttcccctttgggttttccagtggacaggtattggtgagtaccttgggaagaagttaaaagttattttcattgaattttrcttggatgaattaaagtatatacacatgaatgtatagggagaaatggcatgtgatataatcctccccaggtctgccccgacaatgcttatcacattcgtt

SEQ ID NO: 9164 - DNA, 201 bp, Homo sapiens
agatatcaaacatgttcctgccttaaacctttgtagtgtggttccctttgctgaaacactcttcccagatattcacataccttgtttctttaatttattgrggtatgtaatcaaatttcactccctcagagaggccatcgccatcattttctattttcttatactgccttattttcctcttggcacttttattactgatac

SEQ ID NO: 9165 - DNA, 201 bp, Homo sapiens
gaaacactcttcccagatattcacataccttgtttctttaatttattgaggtatgtaatcaaatttcactccctcagagaggccatcgccatcattttctmttttcttatactgccttattttcctcttggcacttttattactgatactgtatttatattggcttatttttctttctaaatatttctattaaaacatgaa

SEQ ID NO: 9166 - DNA, 201 bp, Homo sapiens
ctttctagactctgtccatttccattagtttaaatgtctattctaatgccagtaccacattgtcttgattattgcagctttgtaataactttgaaatcagraagtgtgagctttctaactgtattcttcttcaagactattttggttattctgattctcttgcatgttaatataaattttaggttcaccatgtcaagttct

SEQ ID NO: 9167 - DNA, 201 bp, Homo sapiens
gtgtgcagcgactgatctggtgaatgggtaatttttttttttttttttttgagacagagtctcactctgttgtccaggctggagagaagtagtgtgatctyggctcactgcaacctccacctcctgagtgcaagcaattctcctgccacagcctcctgagtagctgggactacaaggcgcccgccaccacacctggctagt

SEQ ID NO: 9168 - DNA, 201 bp, Homo sapiens
tgaatgaatgggttcttttcctgtgaggttctgaaataaacttgcaatcacaggattaccctctccttcattggccctatatcatacagatgacctccaaraagtgttgcctagcttctaaatagcaaacacaagttggatctgaccccagttccctaaaaatgtttgtgttttatacaatccttaatttatggggaaata

SEQ ID NO: 9169 - DNA, 201 bp, Homo sapiens
gagagaaacactacagaaaacaacaacaacaacaggacatttaagggatcacattctctctgactgctctggatgaaaaagctttttataaattcctatcmgcattgtatgaattgaaactttatctaaacttgttatttttatttttaatggtcccgaataacaaccaagaattaaatagataaaaaggataatgtagtg

SEQ ID NO: 9170 - DNA, 201 bp, Homo sapiens
ggtaatatgctgttttccatatctagaattgtctgatcattcactcattccacagatatcattgatgtttatgtccctctatgtctctggcactgttatcrtttctgtacgtaaagatgcatcactgaacaaacagataaaaatccctgcagcaagggagctggtattttagtaagaggagagaggtaatacagtaagtaa

SEQ ID NO: 9171 - DNA, 201 bp, Homo sapiens
ctcagggtcacctcatttacaaagtgacatgtttcctctcttataacgactactgtttgccaggcttagaaatggaactgagtttcagcttatattaaatrcataccacatcaggggcagagcaaggtttggcaaagcttgaagcttatgtcatttggagggacagggccttctttaacaagtagaatacataattacaca

SEQ ID NO: 9172 - DNA, 201 bp, Homo sapiens
tgtgacacaaatattgttgacaatctcaggtgtgactgtcctctgtaggctagagttaataacagcagatgctgctctagaactccacttcgctccactcyactcaggggatgagacagtctgtggctgctgaggccaggtggtggcacttaacttttagaggcaaatggccataattatcataacaagtaggaaagccaa

SEQ ID NO: 9173 - DNA, 201 bp, Homo sapiens
atacattcataaatgcactatctgaagaagaatgaaataatgatcaggtgtttttttaaaaaagacagataacatagaagtttgtcactcctgggaaaaaygtgtgtatttatgcatgtttcagctctcatagcactttaatttcaatagcatataatttaccagaggagggcccagaagattaagcaccttggtggtgtt

SEQ ID NO: 9174 - DNA, 201 bp, Homo sapiens
ccctaaaggagcgttccaacagaagctgaaaaggctgcctaaaggacgatgtgtcccaaagtctgaaggcagaaaggagcatagatggaataaaaggagcragagcagcccagatcagaggagccaggcagaaccttcaagaccagctatgcacaagagacagtaaggccacttgtttagttgaagtggaaaactaggtaa

SEQ ID NO: 9175 - DNA, 201 bp, Homo sapiens
actgggttgctttcatgttttagataatgtcagtaatgctgctatgaacgtggtatacaaatatctcttccaggccctactttccattattttgtaactawtggaagatgggaattgtagaaaatacaccaaacttatttactgtttggtaggacacttctgagatgtattccaacaattcttaaaggactcccagtagga

SEQ ID NO: 9176 - DNA, 201 bp, Homo sapiens
acaattcaatgtgcaaccatcaccaccagccatctccatgactttttccaccttgtaaaaaaaactctacatccattaaacactaacttcccatttccccrccaccccaaccctggaaaccattattctactttttgtctctatgatttttgattactcttagtatctcacataagtggaatcatacagtatttatctttt

SEQ ID NO: 9177 - DNA, 201 bp, Homo sapiens
cattgcttcaaaaataaagacatgtcattatgttataacttagtaaaaatgtttaaaagtgaatggcttaacttctgctcacagaaccaaaaactaggatrtagcttacatttcttagataaagaaatgtatattaagttagtggttcccaaaactgaatatgaattgaaatcactcaatgaacttttaaaaaaattctag

SEQ ID NO: 9178 - DNA, 201 bp, Homo sapiens
gatgcttatccaaaatagtacgcctgccttcagtctcatttccctaaaatccattctcccttcagccagaattaacttaataactaatatatatatatatrtgtgtgtgtgtgtgtgtgttatatgtttacatgtatgttgtgtacaatcaccaggcaattttctatggctggagatggcttgaaaaaactaaaagagtag

SEQ ID NO: 9179 - DNA, 201 bp, Homo sapiens
gtgctgggattacaggcatgagctaccatgcctggcctgaatgtaatttcttataagatatagtttataaatgataatgaataacacaattgacagtgtaytcaacaatgatttcacagaaaatccaaaatatttcttcattgcttcaaaaataaagacatgtcattatgttataacttagtaaaaatgtttaaaagtgaa

SEQ ID NO: 9180 - DNA, 201 bp, Homo sapiens
tacgcctgccttcagtctcatttccctaaaatccattctcccttcagccagaattaacttaataactaatatatatatatatgtgtgtgtgtgtgtgtgtkttatatgtttacatgtatgttgtgtacaatcaccaggcaattttctatggctggagatggcttgaaaaaactaaaagagtagtgtcttggccgggcgcgg

SEQ ID NO: 9181 - DNA, 201 bp, Homo sapiens
catctcactgcaacctccatctcctgggttcaagcaattctcctgcctcagcctcccaagtagttggaattgcaggcacccgacatcacacccggctaatkttagtatttttagttgagacagggttttgccatgttggctaggctggtcttgaactcctgtcctcaggtaatccacctgcctcagcctcccaaagtgctg

SEQ ID NO: 9182 - DNA, 201 bp, Homo sapiens
gaaaacagagatctggtatgtcagtttaagattcttagcatatgctgattgattgtggttagactatgactaacttaagaagaaaggaatttactacaagsatatcctggggctccttgaggctcagaggccagctttgcaaggatacttggtaagggtcagaaatgaggatgccccagcagaccaagaagcaggaagcag

SEQ ID NO: 9183 - DNA, 201 bp, Homo sapiens
acgcctgccttcagtctcatttccctaaaatccattctcccttcagccagaattaacttaataactaatatatatatatatgtgtgtgtgtgtgtgtgtgwtatatgtttacatgtatgttgtgtacaatcaccaggcaattttctatggctggagatggcttgaaaaaactaaaagagtagtgtcttggccgggcgcggt

SEQ ID NO: 9184 - DNA, 201 bp, Homo sapiens
tttcctaatgacaaatgatgttgtgtgtctttttgtgtgcttatcggccatttatatatctttttctgaaaaatatttattcaaatttctcagattttaatttttttttatttctttacattatcttaatctgtctcatcagataatgagtttctttcattccatggttgtcttttttattttcttaatgttgtcttttga

SEQ ID NO: 9185 - DNA, 201 bp, Homo sapiens
gtttccttccccttctttctccccaggcctccaaagaagtctacaaattccatcagtcagtaacggcttggagttccaaagcttatgactcaaaggtgatyagagcatggacctggggctagtctggattggtaactgctaaacttggtatgttcttcagacgctgacatgagttaattcacagttttctgtccacacgtc

SEQ ID NO: 9186 - DNA, 201 bp, Homo sapiens
gccaaaatatacaacattcatttaagattgagtattaaaggccctattcaccattttttaagagaagggaaaaaaggaataagggtctttcacactttccytctgtaattatgaatgtaaaactattcttgattcatttacctagcagatggaaacattgtgaggctttactgtatagttcactcatattttccagcaaaa

SEQ ID NO: 9187 - DNA, 201 bp, Homo sapiens
gctctcttgaaaccttcacgaaaggaagccaacctaggcagcatccaacactgactgccagacatgtaagtgagaccatcttggatttccccgcccagackaccatctggctgaataagtgaaatcaagtgaaggcagaagaggagctgcccagcaacccacagaatggtgaaaacaatatattttaagccactacatttg

SEQ ID NO: 9188 - DNA, 201 bp, Homo sapiens
tttatggagcaactgagaggatgccgggttcctcacagtatggacactggaggctggagctgttgtattgatttctaatgaagggataatctgcaacagtyggtgatttgaagctatccaggcagcaggcccttgagtcttactggcccacactcaggactttgtccttgcatgtgtttacagcctcttttgtttaactct

SEQ ID NO: 9189 - DNA, 201 bp, Homo sapiens
tagattataattttctatagaagtttagttttatatctttttgtatgtgttcaattaataattattattaattatatgtggttaattatatttaacttgayctacatgcttcctatattttttgctatgtattgtttcttagattcttctcttttcttgtttaccaatttttcattaaaaatgtagttagcatttctttct

SEQ ID NO: 9190 - DNA, 201 bp, Homo sapiens
taacactggtattctaattctccagtttgcaagtggtattttgtgggacttctcagcctccataattgcatgagccaattcccataattaatgccctctttatctatctatctatctatctatctatctatctatctatctatctatctaatctctctagcctattggtttcatttctctgaaaactaacaaacctacctt

SEQ ID NO: 9191 - DNA, 201 bp, Homo sapiens
aacactggtattctaattctccagtttgcaagtggtattttgtgggacttctcagcctccataattgcatgagccaattcccataattaatgccctctttatctatctatctatctatctatctatctatctatctatctatctatctaatctctctagcctattggtttcatttctctgaaaactaacaaacctaccttc

SEQ ID NO: 9192 - DNA, 201 bp, Homo sapiens
acactggtattctaattctccagtttgcaagtggtattttgtgggacttctcagcctccataattgcatgagccaattcccataattaatgccctctttatctatctatctatctatctatctatctatctatctatctatctatctaatctctctagcctattggtttcatttctctgaaaactaacaaacctaccttca

SEQ ID NO: 9193 - DNA, 201 bp, Homo sapiens
cactggtattctaattctccagtttgcaagtggtattttgtgggacttctcagcctccataattgcatgagccaattcccataattaatgccctctttatctatctatctatctatctatctatctatctatctatctatctatctaatctctctagcctattggtttcatttctctgaaaactaacaaacctaccttcat

SEQ ID NO: 9194 - DNA, 201 bp, Homo sapiens
ccttgccacacgtgagttctgttcaatagaatgccatgaagggaactcaagagtgactcctttgagaggtagttgagattgacactctcttttttatgggytactccagtaggctctgaggtcagctttcagtctccaagaactcctgccaccacgttcctgtttaatatttttcagggggttccctattgcttagaatat

SEQ ID NO: 9195 - DNA, 201 bp, Homo sapiens
tctggaagcaattagcattttaatcagtggactgaggaaaggagagcttccctcaccaatgtaggtgggtatcatccaattctgagggcttgcatagaacwaagaggttaagaaagtgcaaattcactcttttcatgagctgggacatctatcttctcctgacctaggacattagaattccagtttctctggcttttggac

SEQ ID NO: 9196 - DNA, 201 bp, Homo sapiens
actggtattctaattctccagtttgcaagtggtattttgtgggacttctcagcctccataattgcatgagccaattcccataattaatgccctctttatchatctatctatctatctatctatctatctatctatctatctatctaatctctctagcctattggtttcatttctctgaaaactaacaaacctaccttcatc

SEQ ID NO: 9197 - DNA, 201 bp, Homo sapiens
tctaagctaagccttgccacacgtgagttctgttcaatagaatgccatgaagggaactcaagagtgactcctttgagaggtagttgagattgacactctcytttttatgggctactccagtaggctctgaggtcagctttcagtctccaagaactcctgccaccacgttcctgtttaatatttttcagggggttccctatt

SEQ ID NO: 9198 - DNA, 201 bp, Homo sapiens
gaggggagaggaatgtcactggacttcacttattgactgtgttggctcctggctcatcattcttggtgacttaagcattcttatgaatatacttttctgtrcttctcccttctcctaccatccccccaacaagtagaccccagtgtctgttgtttctttctttgtgttcctaagctcttatcatttggctcccacttaaaa

SEQ ID NO: 9199 - DNA, 201 bp, Homo sapiens
gaaaaggtaggaagagacttagtttcaccttctttgctcaaagtagtaattttgggaaccagtgcctgattgttagacctaaatattctcttccattctgrccagaggcctctttacaaaaatcagtcctcctctgacattccagggtctctgtgtctctaagctaagccttgccacacgtgagttctgttcaatagaatg

SEQ ID NO: 9200 - DNA, 201 bp, Homo sapiens
atttagtgcctaaaagcatcaggagctagtctaggcaatgaggaccagtgcaccagacacaccaacttcttactgtcatggagtttacattctagtctccrtcaaaactgtttcttctcatggacaattaattggatcacaggctgaaccatatgcctgtggggctcttagtccttaggaagcttatgttttgaaatgtgc

SEQ ID NO: 9201 - DNA, 201 bp, Homo sapiens
agtaggatagagttctatcattcatctcaataagtagtattgagcctaagtaaattaaatcaatctctctccatctgtgtctgtctccctctctatatatrcatagatgcaaatgtatgtatatgtgtaggtatagaaaataaaaattgccatacatattccaggttgcctatattttgagttatagtcctttctgtagaa

SEQ ID NO: 9202 - DNA, 201 bp, Homo sapiens
cataattgtgttgtcatttttatgggaaatgctttatcagcctaataacagagtgcttgcaaatccataactaaacactgaaaaacttcacttgctcaccraagcttctgttactatttgaaagtaatatatgtgcatgctctggctatgagaatccgagaatgaagcttattgattcacttttgaaaacacttttggctg

SEQ ID NO: 9203 - DNA, 201 bp, Homo sapiens
tgctggacgtgctacacatattaaatgttccatgcatttagagcatcaataatgttcagctgcaggaattatgcagaaataccttctatcttggcaagtayatgaagtagtaaatcccgtgggcagttgagactccttggtaaatttaaacatagtactacatccagaataatatagtgatctctcaccatgctgggtacg

SEQ ID NO: 9204 - DNA, 201 bp, Homo sapiens
aaatgtgttgtgtggcttggctgatgccaaaggccctgctgattctgtatctcctggatctcatcatttctgccagtcctttagccactccttagctgccrttttcattcccagcctcatcttcagatgcagcctctgccatcagtgctgagcaatgctgaagtaggatagagttctatcattcatctcaataagtagtat

SEQ ID NO: 9205 - DNA, 201 bp, Homo sapiens
tggcttcacaaccagtatttggtgttatctaatatattttaaagactgaggtcctatttgtcaaaacttctaccaagtttctttcacaagttagcctcaartcttcagggcagttcagggtttctcaagtagtaactaatttcagatactctgaattgaaggcattcatttatcagtttgtttttgataatttgtttatta

SEQ ID NO: 9206 - DNA, 201 bp, Homo sapiens
ataaaaagggaagtcaaagtttggcctggagcaggagagagccttataaagttagcttcaaagtactgcttgaatgaaaaagaaattacagcagacaacayacatgttaatgaagctcaaacaatattgaaaaagaacccattatcattacctagattaaaagaaaagacaagattaacagctcagacatcactaggacag

SEQ ID NO: 9207 - DNA, 201 bp, Homo sapiens
acctagattaaaagaaaagacaagattaacagctcagacatcactaggacagaataagaattaggcttatccacaagctctcaccttcctctcactttttycatcttttctaggaagcccgagaaaaagaggttgaagaaaattaactctgaaaaactttggctgtagttatgcattttggtaattacagtgaactaagag

SEQ ID NO: 9208 - DNA, 201 bp, Homo sapiens
caagttcaaatcccagataaaaatcaaacatgaacgcatctgatagatatttactctggtaggttctttaatgattacaaattccttccattccagtaagsatatccttttgcattgtgactttgctgttcctcccatccagaattagatatgttccttcactcccttgaatagggaccgatgttgtgactctctttcacc

SEQ ID NO: 9209 - DNA, 201 bp, Homo sapiens
aaatcccagataaaaatcaaacatgaacgcatctgatagatatttactctggtaggttctttaatgattacaaattccttccattccagtaaggatatccytttgcattgtgactttgctgttcctcccatccagaattagatatgttccttcactcccttgaatagggaccgatgttgtgactctctttcaccaacagaa

SEQ ID NO: 9210 - DNA, 201 bp, Homo sapiens
ttccttccattccagtaaggatatccttttgcattgtgactttgctgttcctcccatccagaattagatatgttccttcactcccttgaatagggaccgaygttgtgactctctttcaccaacagaatatggcgtaagtgacattttacaagttccagagcctgggactcaagatgtcttggagattctgtctttgcagtc

SEQ ID NO: 9211 - DNA, 201 bp, Homo sapiens
gtttagtaaggagaccagtgttactgcagagaaataagagagaagggtagtttgaaatgaggccagaaatttgggtggggtggaaaggggcagatcatatrgtgacttgtaagccatttaagagctttggatgttactttaattgcagtaatggttcccaggaattagtagagaatatgaccagcatgacgggacgctgaa

SEQ ID NO: 9212 - DNA, 201 bp, Homo sapiens
gcagcttttctcaactctgattttgtaagaattttggccctaatatcctaagaagtccattgtatgtgatgcgtaaacttctttcccatgcattgagagtkgtcctagttgtcacaagaattgagaaaaatgtcactcaaataattttctgtgttctgatgcattagcatcacctgggagtgtgctggaagtgcagaaact

SEQ ID NO: 9213 - DNA, 201 bp, Homo sapiens
tcatgaaagccaaggagctccacagagaaacctcctttgtatctggaccagaggggaagctcaaacttgtggatttccagcctgatgcaatacctgggatraaacttttgcaattattgtgataggagtaagcgtactttccatgtgcaaaaatgattaatttgtggccagaaaatggagtgtggtaaatttgtggtttga

SEQ ID NO: 9214 - DNA, 201 bp, Homo sapiens
actttaaattctgggatacatgtgctgaacgtgtaggtttgttacataggtatacatgtgccatggtggtttgctgcacctatcatctaggttttaagccycacatgcattaggcatttgtcctaaggctctccttcccctttcccccaacccctaacaggccctggtgtgtgatgttcccctccctgtgtccatgtgttc

SEQ ID NO: 9215 - DNA, 201 bp, Homo sapiens
atttctgcatttccaactgagttaccaggttcatctcactggggagtgccagacagtagttgcaggacagtgggtgcagtccactgtgtgcgagccgaagsagggcgaggcatcgcctcaccggggaagcacaaggggtcagggaattcctgttcctagtcaaagaaagcggtgacagatggcacctggaaaatcgggtca

SEQ ID NO: 9216 - DNA, 201 bp, Homo sapiens
agggtcctccgcccacggagtctcgctcattgctagcacagtagtccaagatgaaactgcaaggtggcagcgaggctgggggaggggcgcccggcattgcygaggtagttatttgattaggtaaacaaagtggcagagaagctcgaactgggcggagcccaccacagctcaaggaggcctgcctgcctctgtaggcgccac

SEQ ID NO: 9217 - DNA, 201 bp, Homo sapiens
ttcactgtagttcctgcctgcctagctcagagctcaatatatgtttttcttaatgggtgaatgaaagaatcaataagtggggaactggagaaattgcccaygtgttagatttgcatgagactttggataaggcttggaatcttattgtttcatgttctccatatgctgaaataacaatatttgtcttctctgaaatataat

SEQ ID NO: 9218 - DNA, 201 bp, Homo sapiens
aaatactttacagacaagcaaatgctgagagattttgtcaccacctagcctgccctaaaaaagctcctgaaggaagcactaaacatggaaaggtacaaccrgtaccagccactgcaaaaacatgccaaattgtaaagaccttcaaggctaggaagaaactgcatcaactaatgagcaaaataaccagctaacatcataatg

SEQ ID NO: 9219 - DNA, 201 bp, Homo sapiens
aactttaaatgtaaatgggctaaatgctccaattaaaagacacagactggcaaattggataaagagtcaagacccatcagtgtgctgtattcaggaaaccyatctcacatgcagagacacagataggctcaaaataaaatgatggaggaagatctaccaagcaaatggaaaacaaacaaaaaaaaaggcaggggttgcaat

SEQ ID NO: 9220 - DNA, 201 bp, Homo sapiens
caataccattgaggacataggcatgggcaaggacttcatgtctaaaacaccaaaagcaatggcaacagaagccaaaattgacaaatgggatctaattaaastaaagagcttctgcatagcaaaagaaattaccatcagagtgaacagggaacctacagaatgggagaaaatgtttgcaatctactcatctgacaaagggct

SEQ ID NO: 9221 - DNA, 201 bp, Homo sapiens
aactagaaataccatttgacccagccatcccattactggatatatacccaaaggattataaatcatgctgctataaagacacatgcacacgtatgtttatwgcagcactattcacaatagcagagacttggaaccaacctaaatgtccaacaatgatagactggattaagaaaatgtggcacatatacaccatggaatact

SEQ ID NO: 9222 - DNA, 201 bp, Homo sapiens
ttaatgggtgcagcacaccaacatggaacatgtatacatatgtaacaaacctgcacgttgtacacatgtaccctaaaacttaaagtataataataaaattwaaaaaaattatacatatataaaaaaatatatatattagatgccagagctacttgccattttctctaggaagattttttaaataaggacaggaaaatgcct

SEQ ID NO: 9223 - DNA, 201 bp, Homo sapiens
tgttaaaaaattttttcaggctaattattttgtttaatttgttttaggaattgcaggaacagcaggattaatattttaataaaatggtttacaatggcaaaaataaataaataaataaaataaagtaggtagggtaacacaacttcctcccatagatggttgcccagtacaaggatccagatctgactccaggccaatcag

SEQ ID NO: 9224 - DNA, 201 bp, Homo sapiens
caagattaacagctcagacatcactaggacagaataagaattaggcttatccacaagctctcaccttcctctcactttttccatcttttctaggaagcccragaaaaagaggttgaagaaaattaactctgaaaaactttggctgtagttatgcattttggtaattacagtgaactaagagcaatagctcaacataaggga

SEQ ID NO: 9225 - DNA, 201 bp, Homo sapiens
ttgtaactgatctgctttttaacctgtccattgagttttaaatttcaaaactataaatatattatttcttagtgtcattgctgctttttaatttgcttttkgatagtgttttattcttgctttatggttttattccttttgttatcactttaaacatatttacttttatatatttttcagatttttttgtaatcttaaatt

SEQ ID NO: 9226 - DNA, 201 bp, Homo sapiens
aaatcaagtgaaggcagaagaggagctgcccagcaacccacagaatggtgaaaacaatatattttaagccactacatttgggggtggtgtgttattatgtrgcaataatcaactgaaaccagttattatacaccagacaccatggtgactaaactagatacagcccacacctgtggggatttaatatggggcaagggtgtg

SEQ ID NO: 9227 - DNA, 201 bp, Homo sapiens
ggtgccaaattctgttaggtttgttttacttggaaatatatttattttacctttattcccaaataatatttttgctcggtataaaattttaggatggcaaratatttttgctggattttggagaaactattacatggccttttggctttaattgtttttattgaaaagacagcagtcagtttaaatattgttcttttgaag

SEQ ID NO: 9228 - DNA, 201 bp, Homo sapiens
cgtggagattagatcacctctaaccacttatgtttctcccactgagatgcatgattttaggtattgacttgactagattaagagatatccaaatgcctggyaaaacactatttctgggtatgtctgtgtgggtgtttctggaagcaattagcattttaatcagtggactgaggaaaggagagcttccctcaccaatgtagg

SEQ ID NO: 9229 - DNA, 201 bp, Homo sapiens
taatgccctctttatctatctatctatctatctatctatctatctatctatctatctatctaatctctctagcctattggtttcatttctctgaaaactawcaaacctaccttcatcaaggtgcaattgttctcacatggactactgcagtggccttccaactagtgtctctgcttttctcccttcaacccccaatggtcc

SEQ ID NO: 9230 - DNA, 201 bp, Homo sapiens
tcctttgcagcatgtagggcatataagtttcatcaactccactttataggtgaagaaatcaccatgtccacacattaaggaactcactaagaattttggtyagagctgagtcctcttcagggcaactccttaattttccagatagacagttacaaaaggtatttagaatagacttgctttaatctcagcatttgtagctgc

SEQ ID NO: 9231 - DNA, 201 bp, Homo sapiens
aacaatcctttgcagcatgtagggcatataagtttcatcaactccactttataggtgaagaaatcaccatgtccacacattaaggaactcactaagaattytggttagagctgagtcctcttcagggcaactccttaattttccagatagacagttacaaaaggtatttagaatagacttgctttaatctcagcatttgta

SEQ ID NO: 9232 - DNA, 201 bp, Homo sapiens
gttaaaaaattttttcaggctaattattttgtttaatttgttttaggaattgcaggaacagcaggattaatattttaataaaatggtttacaatggcaaaaataaataaataaataaaataaagtaggtagggtaacacaacttcctcccatagatggttgcccagtacaaggatccagatctgactccaggccaatcagg

SEQ ID NO: 9233 - DNA, 201 bp, Homo sapiens
ggcctcatgcgtatatcctgaattaattgaataatgtgtttaaggaagccttttatagtattctacaggtcatggggtatcttttatgcttagctaaattrgagaaccatttaatttttgcatatgtttttatacaattaggtcacatagagaagtggcaatttcttgctcaatattcaaaaaggccaaacatgagaaact

SEQ ID NO: 9234 - DNA, 201 bp, Homo sapiens
caaaggacctagccctttttctttcataacagggcttccagagggttatgttttgatgacactaacatggaacactaacattgaagcctagcttttagataatagtttcagcaactgctgctattagtgatttcaattacatatccatggaatcatgggatgccttttattacagtgtattcttttaaagaaaaaaaagga

SEQ ID NO: 9235 - DNA, 201 bp, Homo sapiens
ttaaaaaattttttcaggctaattattttgtttaatttgttttaggaattgcaggaacagcaggattaatattttaataaaatggtttacaatggcaaaaataaataaataaataaaataaagtaggtagggtaacacaacttcctcccatagatggttgcccagtacaaggatccagatctgactccaggccaatcaggc

SEQ ID NO: 9236 - DNA, 201 bp, Homo sapiens
tttttttaaagataaagaggaaacaagaatactaagtattatgaataagtctttggcctttaatgaagataacttcaggttaaattcttcagaaataatgrctatcttttttacaaaggaacttcaaagagcattcacttttttaattgaccattttttgtgtttctaactactccatgtattaaatttaaaatatgagca

SEQ ID NO: 9237 - DNA, 201 bp, Homo sapiens
agatactaaagaaaatcatctttagaaaaatggtattactatagtcaaattatttaggtcttggttcaatgatatttttaggtaatgcatacaagtttttcctcaaagtaacacatattttaatatttaaaaaattagcttaggagacaatacaaatatttaaatcaagcaacatacatttatgcttagaacataaatttt

SEQ ID NO: 9238 - DNA, 201 bp, Homo sapiens
taaaaaattttttcaggctaattattttgtttaatttgttttaggaattgcaggaacagcaggattaatattttaataaaatggtttacaatggcaaaaataaataaataaataaaataaagtaggtagggtaacacaacttcctcccatagatggttgcccagtacaaggatccagatctgactccaggccaatcaggca

SEQ ID NO: 9239 - DNA, 201 bp, Homo sapiens
cactaaatattttttaaagcttgcttggtctcccctctatccctgtcagctttctttcatgctgtctttatatatgacgcaactctcttaagtgacctctstctctgtggcccacatgctcctcagagctgtgccagtgagctgtgtgttccttctctgccaagttttctgtccttttccgtggtcccgacatgcttcctt

SEQ ID NO: 9240 - DNA, 201 bp, Homo sapiens
caggctaattattttgtttaatttgttttaggaattgcaggaacagcaggattaatattttaataaaatggtttacaatggcaaaaataaataaataaataaaataaagtaggtagggtaacacaacttcctcccatagatggttgcccagtacaaggatccagatctgactccaggccaatcaggcaaaattctgtggcc

SEQ ID NO: 9241 - DNA, 201 bp, Homo sapiens
ggcttatgatttttttcccttctgcttgctagtttctcagaaccactctaggctggagtcactcgtctcattcagagagacttctaggatgagtctctttsaagacagcacagtctgatcttcttccatagagtctgcattcagcccatgggagatgaactttcttgccttaccttaggtggagaagcagccaactcttca

SEQ ID NO: 9242 - DNA, 201 bp, Homo sapiens
gctacaattctagctgctggactaaggttgtatctttcctaagtagatctcttcagcctctgcagctttgtgtgcagcgactgatctggtgaatgggtaatttttttttttttttttttgagacagagtctcactctgttgtccaggctggagagaagtagtgtgatcttggctcactgcaacctccacctcctgagtgca

SEQ ID NO: 9243 - DNA, 201 bp, Homo sapiens
gttcaaagttttaaccttatttctttaaaacaatgccttcaaatggtaacctaaggcacctctaaaacaatataatgagtatgtcatgtatacaggtgatygcagagggaagcagattcctttacttcatttctaaagagtaggggaaaaatcttctgcaattgggcagatatagtggaaggacgaacatcacagtcaaga

SEQ ID NO: 9244 - DNA, 201 bp, Homo sapiens
aataaaatggccaatactcagctgtcctaaaacactgaaaaattggaggatctggaaacgttggacctgtattttcccatggcaacaatcagctggaagtrgttatccaaataaggtagagaatgctttgtgctgcctaactctaggagcaagtgccgaccatgatagcctttgacgctattattgacttggtggctgctt

SEQ ID NO: 9245 - DNA, 201 bp, Homo sapiens
tgattgccattctaactggtgtgagatggtatctcattgtggttttgatttgcatttctctgatggccagtgatgatcagcattttttatgtgtcttttgrctgcataaatgtcgtcttttgagaattgtctgttcataagttttgcccactttttgatggggttgttttttttcttgtcaatttgagttcattgtagatt

SEQ ID NO: 9246 - DNA, 201 bp, Homo sapiens
agttttgcccactttttgatggggttgttttttttcttgtcaatttgagttcattgtagattctggatattagccctttgtcagatgagtagattgcaaamattttctcccattctgtaggttgcctgttcactctgatggtaatttcttttggtgtgcagaagctctttagtttaattagatcccatttgtcaattttgg

SEQ ID NO: 9247 - DNA, 201 bp, Homo sapiens
gtgggattgccaggtgccaggtgcccctactgcagcctgcacggaggggaccgtcattttcagactgtccttttagcaggacttcaatgtcaggtaataaytgactcatttgctattttcttttggtatcataaccactattattttttttttaaatcatgagatgtaattgtaagtagaaaatgacttcaattcaccttc

SEQ ID NO: 9248 - DNA, 201 bp, Homo sapiens
aaaactattctcctcagaaatgcctcatggaaaacctacactgggaggcctattgaccagaacaaaaccaggaatacagactttaagctacattattcttyatgatttatgaccaccaaatattttattatttttaccagttgaagtaaaaatttaaagtttttctaattaaaaagtgaaatatattaaacttctataaat

SEQ ID NO: 9249 - DNA, 201 bp, Homo sapiens
ctagaatggtgactcctttccaggaggttttcagtttactttgcccagatccagcagagaaatcagtctatggcattgatggctttgtgaaatatatttctttttttttttttttttttgagacggagtctcgctctgtcgcccaggctggagtgcagtggcgggatctcggctcactgcaagctccgcctcccgggttca

SEQ ID NO: 9250 - DNA, 201 bp, Homo sapiens
gtgggattctgcctgagacctcattacagttcctagtttctttgttgttatagttccatcaccatctttgtcaaatagtgaaaaaacttctttgaattctrcaatctgctcctcagtcagttggtcagccatgctgcaagtgctactggtttccgagacgcaaccacacaaccactctgctcgctcacttgctccacttgg

SEQ ID NO: 9251 - DNA, 201 bp, Homo sapiens
gagtaattatttcatcattttaactaggcttgccctaagccagtatattttcttctataccttttgctcaaatttgttagtctcctcctccctacataatrcatattaatgcttattttttatgaactgtttgtgagcatatcatgcccctttactctttaatactttagtgcctcttctttatataatacatattaatgc

SEQ ID NO: 9252 - DNA, 201 bp, Homo sapiens
agctcagctccaaacacaggatcagcaccttgtataggaattcccatgaattatgacttctcattctgttttatcagagtgcatatatgtcctacttcagsaaaagtaaaacagtcatttacgaaagaaagtcaatctgtatcctaagcattttaataaaaagttaaaacaaatacgctatttccttttttttttttcatt

SEQ ID NO: 9253 - DNA, 201 bp, Homo sapiens
ttgttattacactgagtggagaagtcttgttttgaaacattaggttgagctaataccgtttttttcttttttttgagatggggtcttgctctgttgcccargctggagtgcagtggcacaattttggcatactgcaacctctacttcctgggctcaagcaatcctcccacctgttttttgtagagactgggtttctgccat

SEQ ID NO: 9254 - DNA, 201 bp, Homo sapiens
agtcaatctgtatcctaagcattttaataaaaagttaaaacaaatacgctatttccttttttttttttcattggtttgttctgagctctgagtttgaacartgccgtttatttggggaggcaaccaaaagttccctgcatagaggaagagacatttagggtgcgtgtgagatacttgaattttgccaccaggagggggaaa

SEQ ID NO: 9255 - DNA, 201 bp, Homo sapiens
tgctaacaggcctttcttggttttgcctcctttaggggaatgtgaccctgaaggagctgaatgctcgccccatggaagtgttcatgtgcagtgtgctcaaraggcaaggttacggcgagggtttccgctggctctcccagtatattgactgatgtttggacggtgaaaataaaagagttttacttctctggactgatccta

SEQ ID NO: 9256 - DNA, 201 bp, Homo sapiens
aatccagtttctcggagatttgtgttggggctttggcagcaaaaaaaaatcctaggagtaatcttgagagttccatgccccctagtggattgctatagggkttacttttaaattttcaaaacactgaattggccaaggatttccttggtccatattatcccaagggtcagaggctgaaggtcgcctagacctgggcagatg

SEQ ID NO: 9257 - DNA, 201 bp, Homo sapiens; identical to SEQ ID NO: 1181

SEQ ID NO: 9258 - DNA, 201 bp, Homo sapiens
ccttttcttttaaaggcttaaacaggcttaggattagttttactgtgagtattttgtaagctcactagaggcaggagtgtgttctttttaacgttttaaaygggattcattcatcaggtatttgaggaagaaggaaatggtagaaaaggcagatttactcttctaagagtttatgattatctttcaaatttgattctgaga

SEQ ID NO: 9259 - DNA, 201 bp, Homo sapiens; identical to SEQ ID NO: 2861

SEQ ID NO: 9260 - DNA, 201 bp, Homo sapiens
ccagttaacatttggcaaaaagacctagttgcaggaggaaaatgttttaaatctaagacattgcttttcaatgtcctgaggaaactcagctcaaacttaartaaattaactgttgtttctatcatacagtgattatatggccaagtttgctcaggatactcctcatttatgcctgttgtcccagcataattaatagtattc

SEQ ID NO: 9261 - DNA, 201 bp, Homo sapiens
ctaggttcaagcgtttctcctgcctcagccttctgcatagctgggattacaagcaagcgctgccgcgcccagctgttcattttattcttcatctggcattmtttgaatgtaaggggatttttttgtgggtaatgcttttactggttactgttcatgaaaattttgaatgcagttggtcatatctagtataaagccctgtgt

SEQ ID NO: 9262 - DNA, 201 bp, Homo sapiens
agtggtgctggccagtagaattttgggtgacttttgttttttagagttgtttacaggatagattaatatgtttttcattcaaatcaatgtgcttttcattsttattttctatttagtgcatctaagtggcattctgattcacattattgataagactgatttcctagagttgttcttcactggatgacagcagtcgtatgt

SEQ ID NO: 9263 - DNA, 201 bp, Homo sapiens; identical to SEQ ID NO: 1172

SEQ ID NO: 9264 - DNA, 201 bp, Homo sapiens
tggcaacttgaacctgtcttgaatttatttctaagtatgtttctcacatctatagctccagcctcatgtagaattgcctgccacgcagtctttaccttgctttttttttttttttttaaacagaatcttcctctgtggcccaggctggagtccaatggtgcaatcacggctcactgtaacctccagacttctgggctcaag

SEQ ID NO: 9265 - DNA, 201 bp, Homo sapiens
gtcctgtaaagggacacctctcctatacctacttctaagaagtggaaaatagcttggaagaaaagaaacctttggcttttagaatagtttaagaacatttsacccttgtattccttttctttgttgggagtggggcgttgcctgggctggtctcaaaaatcctgggctcagattatcctcctgccctcagcctcctgagta

SEQ ID NO: 9266 - DNA, 201 bp, Homo sapiens
tgaacttgtcttaatgttaatattcagttcccattcattgtgacacttatccactatattgtgttcttacttggctttgttaacataaatgtggctgggcrtggtggctcatgcctgtaattccagcattttgggatgctgaggttggcagattacttgaggggcaggagtttgagaccagcctggccaacatggtaaaac

SEQ ID NO: 9267 - DNA, 201 bp, Homo sapiens
tttttttttttttttgagatggagtcctgctctgtcacccaggctgaagtgcagtggagcgatctccgctcactgcaacctctgccttctaggttcaagcrtttctcctgcctcagccttctgcatagctgggattacaagcaagcgctgccgcgcccagctgttcattttattcttcatctggcattctttgaatgtaag

SEQ ID NO: 9268 - DNA, 201 bp, Homo sapiens; identical to SEQ ID NO: 1176

SEQ ID NO: 9269 - DNA, 201 bp, Homo sapiens; identical to SEQ ID NO: 1177

SEQ ID NO: 9270 - DNA, 201 bp, Homo sapiens
agagtgcatatatgtcctacttcaggaaaagtaaaacagtcatttacgaaagaaagtcaatctgtatcctaagcattttaataaaaagttaaaacaaataygctatttccttttttttttttcattggtttgttctgagctctgagtttgaacaatgccgtttatttggggaggcaaccaaaagttccctgcatagaggaa

SEQ ID NO: 9271 - DNA, 201 bp, Homo sapiens; identical to SEQ ID NO: 1179

SEQ ID NO: 9272 - DNA, 201 bp, Homo sapiens; identical to SEQ ID NO: 1180

SEQ ID NO: 9273 - DNA, 201 bp, Homo sapiens
ctttcggcgccttctgccccgacatctttctcaacacgctgagctgcggggtgctcagcaacgtggccggcccactgctgcttaccgacgcacgctgcctkcccggcaccgagggcggcggcgtgttcaccgcgcggcccgcgggggcgctggtggcgctggtggtggcgccgctctgttggaaggccggcgaatgggtgg

SEQ ID NO: 9274 - DNA, 201 bp, Homo sapiens
cgcaatcttggcttactgcaacctccacctcctgggttcgagggattcttctgcttcagcctcccgagtagctgggactacaggcacgtgccaccacgccyggctagttttttgtatttttagtagcgacggagtttcaccatgttagtcaggttggtcttgatctcctgacctcatgatccacccgccttggcctcccaa

SEQ ID NO: 9275 - DNA, 201 bp, Homo sapiens
aaggaagagaacttcggaagatcatcctctgtgtagttggtgggttaaagaagttttagtttttttttttttccccagcaattttgtggtttgggtttgamttttatgtactgttaacaggaagagcttaggctttggtgttagagatgagggtttaagccctggcactattactttttcaactgagccgtcttaaaggac

SEQ ID NO: 9276 - DNA, 201 bp, Homo sapiens
acaggtagtaagcattaataatgtctttcatctttgagtggatctacaatggcttcagcagtgtgctccagttcctaggtaaagccatttccttgaaatayaggtttcaaagtttgtgcctttccctcagtaatttaactacaaataggctttggtctgtagagagcaaatgtgttaacaatttttttctcttttaggact

SEQ ID NO: 9277 - DNA, 201 bp, Homo sapiens
gagaaatccatagagtctaatcttactgaaacccgaccaagatttgtccattttatagaccattaggttattcattttcacaatgtatattttttactcaygcaactacaaactttgttttttagcacgtcgcgtttggaaaaattatctcccagcaattaatgggattgtctttctggtggactgtgcagatcattctcg

SEQ ID NO: 9278 - DNA, 201 bp, Homo sapiens
acgcgcccggaagtcccggggaggggtgtgacgtacatccggcgagtagctggcggtcccgggtgctgctggttagtgtgctctgagggagggtccgagcyagccgctgttttgccggaggagcccctcaggccgtgagtctgagggtcgcgtcggggaggggagttggggctcgaggggctgggacggaaggcggggagg

SEQ ID NO: 9279 - DNA, 201 bp, Homo sapiens
tttttacttaatgtcatgggtgttatgtaatgtcaaggtgaatctttaatcactcaggtataaagttgatcagattttcactttacattaatgccttaaargattagtggaagtcagaattttcattatctggtgggcttttgtagattcctcacttaattcttttttttctttttttcttttttttcaatctttaggctt

SEQ ID NO: 9280 - DNA, 201 bp, Homo sapiens
tcatttcttcagtgccacctgttatgagtgtttatttctgcatgcttttgttaatgagaatgtccttatttttaaacagtcccagacctcttttctgcatyagagggcatgctggttccataagtcccagtggcttttttcttggtttgctgccataactttacagataaatattgggtgttcaaagcaaatgctcttcag

SEQ ID NO: 9281 - DNA, 201 bp, Homo sapiens
gagcctcacagccctcggtgaggcgggtgggagccctttatgattatccttgttttgtagactcggagactgaggctggccaaggctccgcagttagcgaktgtgagcgctcgaacctggtctacaggcccctagtccagggcttacccccaagtcagcgcttggttgtcttccgatggcccgggtcgaaccctgtatttt

SEQ ID NO: 9282 - DNA, 201 bp, Homo sapiens
ggtcctgtaaagggacacctctcctatacctacttctaagaagtggaaaatagcttggaagaaaagaaacctttggcttttagaatagtttaagaacattwcacccttgtattccttttctttgttgggagtggggcgttgcctgggctggtctcaaaaatcctgggctcagattatcctcctgccctcagcctcctgagt

SEQ ID NO: 9283 - DNA, 201 bp, Homo sapiens
ctctggctgatacttctgtctctttgagaagcactagttcttctggttagtccttaaatgttggtgttctccagagtactttctcctaggctggtcccatstactcccttcatttggcacctacatgtcagtgactctcaaatgcatttctctcctctagacctctcctgagctctaatctcatacctaatcctgcctact

SEQ ID NO: 9284 - DNA, 201 bp, Homo sapiens
gtggagctgcagcggggtaatcctgagccgtagcccgggcctggtgctttgccacgggggcatcttcgtccccttcctgcgagctggcagcgaagtcctgrccgcggccggcgccgtcttcctgcctggcgacagttgcagggacgacctgcgcctgcacgtgcagtgggccccaacggccgcgggtcccgggggcggcgc

SEQ ID NO: 9285 - DNA, 201 bp, Homo sapiens
cagtggagcgatctccgctcactgcaacctctgccttctaggttcaagcgtttctcctgcctcagccttctgcatagctgggattacaagcaagcgctgcygcgcccagctgttcattttattcttcatctggcattctttgaatgtaaggggatttttttgtgggtaatgcttttactggttactgttcatgaaaatttt

SEQ ID NO: 9286 - DNA, 201 bp, Homo sapiens
gctgtttctcggagaagctcccgagtgtccggcctagaggccatgagaaggcagtgggggtctgccatgagggcggccgagcaggcgggctgcatggtgarcgcctcccgggccggacagcccgaggcgggcccgtggagctgcagcggggtaatcctgagccgtagcccgggcctggtgctttgccacgggggcatcttc

SEQ ID NO: 9287 - DNA, 201 bp, Homo sapiens
ggggcagagaggcgtaacgctgtgagggggcggggcccattacgcgcccggaagtcccggggaggggtgtgacgtacatccggcgagtagctggcggtccmgggtgctgctggttagtgtgctctgagggagggtccgagccagccgctgttttgccggaggagcccctcaggccgtgagtctgagggtcgcgtcggggag

SEQ ID NO: 9288 - DNA, 201 bp, Homo sapiens
caatttactcttttttttttttttttgagatggagtcctgctctgtcacccaggctgaagtgcagtggagcgatctccgctcactgcaacctctgccttcyaggttcaagcgtttctcctgcctcagccttctgcatagctgggattacaagcaagcgctgccgcgcccagctgttcattttattcttcatctggcattct

SEQ ID NO: 9289 - DNA, 201 bp, Homo sapiens
aattggaaccagtcctcttaaaccctgctgctgctcaagtaagtttatgtaaactcaagtaagtttttgtaattttctaaattgttggtgtcatttcaacrgtattcatagcatcttcaccaggactagattccatctcaaaaaaaccactttttttgcttatccataagaagcatctctttatccattagtttgatcatg

SEQ ID NO: 9290 - DNA, 201 bp, Homo sapiens
agattctcttcttatcccttaatggttctctaaaatagtgatgtcatttctttttataaattgagacccgtgtctgcaaaaatgattaaatattgagatarcattggtaaatggagcagggcaagtggtgctggccagtagaattttgggtgacttttgttttttagagttgtttacaggatagattaatatgtttttcat

SEQ ID NO: 9291 - DNA, 201 bp, Homo sapiens
ccttgcattcttgtttctggcaacttgaacctgtcttgaatttatttctaagtatgtttctcacatctatagctccagcctcatgtagaattgcctgccaygcagtctttaccttgctttttttttttttttttaaacagaatcttcctctgtggcccaggctggagtccaatggtgcaatcacggctcactgtaacctcc

SEQ ID NO: 9292 - DNA, 201 bp, Homo sapiens
aaatagcttggaagaaaagaaacctttggcttttagaatagtttaagaacatttcacccttgtattccttttctttgttgggagtggggcgttgcctgggmtggtctcaaaaatcctgggctcagattatcctcctgccctcagcctcctgagtagctggaactacaggcgggtaccaccacactcaacttcttgtatctt

SEQ ID NO: 9293 - DNA, 201 bp, Homo sapiens
gcagtgacacaatcatagctcacggcagcctcaaattcctgggctcaagcaatcctcttgcctcagcctcccaagtagctggaactacaagcacgtgccaycatgcctgactaattttaattttttttttttttttttgtagagatgcaggtctctctatgttacccaggctggtcttgaactcctgaggtcagggaggaa

SEQ ID NO: 9294 - DNA, 201 bp, Homo sapiens
acttttcctttgcatttacaatttgggtaactgttgagtgcaagaggcctagcttctggcttatctcaggttttgatgtgtcttcgtcactaagcttaatsatttctaacttttgctttcaagggagagacctgttactttcacttggagaatagggaggcttggggtgggggcaggactgtggaggaagtcaagtttgct

SEQ ID NO: 9295 - DNA, 201 bp, Homo sapiens
gcatcagagggcatgctggttccataagtcccagtggcttttttcttggtttgctgccataactttacagataaatattgggtgttcaaagcaaatgctcytcagagagagaaaggctgggaatagaactgtgctgcttattctatcctgaaaacacgaagcctggggaagtcatctatatggccttgaccacatttctgt

SEQ ID NO: 9296 - DNA, 201 bp, Homo sapiens
actccccactaaccacccacccccactggccttgcagctctgaggagggtctgatccttagaatgaagccccagaggcctgggatatttcagagttcaggrcaagtgttccatgtcacagagctttgctctccccagcgcccacctaaggcctgtctatggaggcatgcaggctgggagccctgggccgccccacgagaag

SEQ ID NO: 9297 - DNA, 201 bp, Homo sapiens
ccatggctggaattgatgcaacagtgaagtctaagggagcaagggccttggaaaggcatagggaaactgaggcccaggctgggaccagactcctccttccrtgctctttccacaacactcatgcctaagtacacatagccatagcagtggctgcttgctgaatagtccttgggagctgcatagggagtgtacctacatgat

SEQ ID NO: 9298 - DNA, 201 bp, Homo sapiens
ctgggggtgccacatgcatcatcccaaaggccccttcccctctcccttcctgggagtttctgtttggaggttgggccacttggcaagtcaggagcaggagmaaggtcttctcttccatgtcacagcatcccgcggccaccacccagatggatctgcccagggtacctggagtgcctcaggccccaaaaaggtggagagaca

SEQ ID NO: 9299 - DNA, 201 bp, Homo sapiens
gcctgtccagagcagggtggattgggactgtccatctactggtcactgttgttacaagggacccttggccgcctaaccagcctcctctgcatcactgaccygtgctccgttcttccagaggtgtgtgtcctgccttctggcctcctgtgattctccacgccccctccctccaccttgcccggccaggtccaaggactccag

SEQ ID NO: 9300 - DNA, 201 bp, Homo sapiens
aggctgggaagccgacagtcaaggggcccatatctggtgaggaccttcttgtgtcatcccatggtggacagtggaagggcaggagagggcgagagaacacragcaagagaaggctgggcttgctgttataacaaacccactgtcgcaatcacacacccactcccacaataactaacccacttccatgataactaacccact

SEQ ID NO: 9301 - DNA, 201 bp, Homo sapiens
aaggtaagatggagggggaggacccaagtggggcaggactttggacaaatcagtggcctactggacctcagacccaagagggtctctcccttccaacctasgtggctgtgcctgtagtgaggcaggccaggttctcactggccccccgagggcctgataagtgggagccaaattactgggatccacctaggcagagttctt

SEQ ID NO: 9302 - DNA, 201 bp, Homo sapiens
ggatgttggcccaggagtcacagcttctgccatcacaccatgcacgtggccaagaccttttgtaaggctcagagcacccacttccccagcccaagtaaggyggctgagagcccccaggggaacttctgagtcccttctggggagacaagagggggcagagatagaggaggtgaattgaggcctgtgggctttgctggactg

SEQ ID NO: 9303 - DNA, 201 bp, Homo sapiens
cctcactgtggccagctgccatgcccacagcaccatgggcagaaggagacagagggctcctccactggcaggcaggaccaagggcaaaaccgaggctttgytgggcaaggccggctttctagggaggggttccaattaggaggtgggtgaatgaggatctggaccaaaccacactgtcaatttagcatgatgctgctgacc

SEQ ID NO: 9304 - DNA, 201 bp, Homo sapiens
tgcggggcctgcagggtcactgcctggaggactccagagaggccaactggcacctctccaggctggaccacattcaagtgacaggtcaagcccagcggccrccaagtcacccatgttcaagccctggctaagactccactctttcccagcccaatttatacaacaaagccccaggacagaataactcagtgggtacctgga

SEQ ID NO: 9305 - DNA, 201 bp, Homo sapiens
tgaacctgtggctgtttggctccaaagcctatgctcttgtccaggattctgggcagttccccattccttctaagtaaaaggaagaacagtgaaactacgasactgtgtgcatgtgtctagttgaagttcctcctaagatgggcagtgtctggatggagttcgtgatcagtcctcactgggggactctgggagccaacttca

SEQ ID NO: 9306 - DNA, 201 bp, Homo sapiens
gacctaaggatcccatttgatcctctgggtcagataaagacagcaaaaagctgagacaggaaacgagggctattgttcccattctatggctgagagactgrggcttagggagaactgtgcctcgccacacagggagggtgacagaggcaggcccaggctgaagattcaggccatctggccaggctgggagcaggcctttgg

SEQ ID NO: 9307 - DNA, 201 bp, Homo sapiens
ttttccttcttatgacaaaagcaccataaattaattgtgaaaagaatggaacatagacaaagaaacataatgtttgtgcgcatctctgatagttttgctgraatagagtcccagaggtggaatcactgggcaaggatgtccccaacaattagcaccctgtgtgtacggccacattctagatggcctgtttgcatgtctggg

SEQ ID NO: 9308 - DNA, 201 bp, Homo sapiens
acaggattctgaggaggttccgggacccaagcagctgaatcagatttgatgtggttgaaaaggaggctgcactggtccctttttaaggcctgaggcttagygaagcctttcttggttcagaagaaacactgacacctgagacttatcaacaaccaacatgcagccgggtgggggacctgcagtcagggcagctgccacagt

SEQ ID NO: 9309 - DNA, 201 bp, Homo sapiens
gcaggagatgctgcctctctctgtctcagcctcctgaagtccaccttaaaaggcttataagggttaaacatggtaatacctgtgaagcattaagactggcrcctggttggctgggcgcggtggctcgtgcctgtaatcccagcactttgggaggccaaggcaggcagatcacgaggtcaggagttcgagaccagcctggcc

SEQ ID NO: 9310 - DNA, 201 bp, Homo sapiens
ttccagacattgttgtgagaattctatgcaaattatctcatgcattccccacaccagccatctcactatcccccgctttacaaaggaagaactcaagaggrgtgcaggattccatccaggccactgcatgttactgcctcccttttcaagagcaagaggtggtgaagccagaactttctgtgctaccctgacctggtttcc

SEQ ID NO: 9311 - DNA, 201 bp, Homo sapiens
ctccttccctcccactcctcatgtgcacgctaatctctcttctctcttcctctgctccggtccctcttggttgccctgccctcctggtgacttttggcatmgatctgaatacctgtgatctttggcctttgccctctggccctccaactcatctttctcctcagctgctgcctctcctcaattcagtgcgactggctccac

SEQ ID NO: 9312 - DNA, 201 bp, Homo sapiens
tggccactcatgcacacgcttgcccctgctccccagcacctgtgtctcccatggccctgtcctcgaggtcagggtctccctccccgattgagaccccacaygtgtgctcaagtccacgtggagactgcttcccaccatagctcctctcttcgttcatttcaatcctttggacttggttccctgacacaaatgttcatggga

SEQ ID NO: 9313 - DNA, 201 bp, Homo sapiens
gagtctcgtgtgatttaagcgctttcaaaaacaagcagctgatgacagtatatgccatctttgttttcacatgggctctgatagcctcctaaagccacggkttgctcagcttcaatgggtagagggactggaagctgcaacaatttccagaaatgaaaatcacattagataatatgactgcaagttgccttccgcaaaaac

SEQ ID NO: 9314 - DNA, 201 bp, Homo sapiens
ggggtgagatcaggaggcagtgaggagagtggagggtacggaggtcaaatagctggtctgaagagcctggccactcatgcacacgcttgcccctgctcccyagcacctgtgtctcccatggccctgtcctcgaggtcagggtctccctccccgattgagaccccacacgtgtgctcaagtccacgtggagactgcttccca

SEQ ID NO: 9315 - DNA, 201 bp, Homo sapiens
tcttaacactcatcccaggagtctcgtgtgatttaagcgctttcaaaaacaagcagctgatgacagtatatgccatctttgttttcacatgggctctgatrgcctcctaaagccacggtttgctcagcttcaatgggtagagggactggaagctgcaacaatttccagaaatgaaaatcacattagataatatgactgcaa

SEQ ID NO: 9316 - DNA, 201 bp, Homo sapiens
gctacatttgtagcagctgtagttgggttggaagtgattctggattttgcaggaaatccattgtccaaggaactctccagggacagtcagtaggagaacgmggggcaactgcaagtgcctcgaaggtagaccgcagcacgcactgcctggtcacctctccctgtctgccaggctgcctgtctcagagagaccagtggaaga

SEQ ID NO: 9317 - DNA, 201 bp, Homo sapiens
ccatccctagaatgggtgattctgggtggggtgggggtgagatcaggaggcagtgaggagagtggagggtacggaggtcaaatagctggtctgaagagccyggccactcatgcacacgcttgcccctgctccccagcacctgtgtctcccatggccctgtcctcgaggtcagggtctccctccccgattgagaccccacac

SEQ ID NO: 9318 - DNA, 201 bp, Homo sapiens
aatacattatattgcttttaagcctctctgaatgtctgaaatatttcaagataaaacatatttaaatcataaagttaatgaacggatgttgttgaattagrggatgttgaaggaatccttcatgtctgcctctaaacctaattggcggtctttaccagcaaggatgtatcattgcttgctgcctaaatcccgtgtgtgtgc

SEQ ID NO: 9319 - DNA, 201 bp, Homo sapiens
cctcgctgatataaaaaggtgaatgactgaaaaatcatttggcagtatctggtaaagtaaagaatcgtgtccaataaagcagctcccttcctaggcacttytgagagaaatgctcgtctgtgcgtaaaagaagaagagatgctcactgcaacactactgtagtaagaaaaaaggaaaagaaaagaaaagcctaaatatttg

SEQ ID NO: 9320 - DNA, 201 bp, Homo sapiens
ctgctttacatgcaaataattgatgggctacttcggggtcattcttgctgtttcttaaagcagatcccctggggccagcctactaagagatcctactgttygattgctgttctcgtcaatattcagactcccccttgttctgctgcagccagagtggtgtgctttcccctgcgatgttagcctcagtcctccccaccccca

SEQ ID NO: 9321 - DNA, 201 bp, Homo sapiens
aaaaccctgctttacatgcaaataattgatgggctacttcggggtcattcttgctgtttcttaaagcagatcccctggggccagcctactaagagatcctmctgttcgattgctgttctcgtcaatattcagactcccccttgttctgctgcagccagagtggtgtgctttcccctgcgatgttagcctcagtcctcccca

SEQ ID NO: 9322 - DNA, 201 bp, Homo sapiens
tagggagaatatttaaactaaaggtatactgtttcaggtagctccaaaaccctgctttacatgcaaataattgatgggctacttcggggtcattcttgctrtttcttaaagcagatcccctggggccagcctactaagagatcctactgttcgattgctgttctcgtcaatattcagactcccccttgttctgctgcagcc

SEQ ID NO: 9323 - DNA, 201 bp, Homo sapiens
ggcctgtcctctaaaccatggcaatgtgctgtctatcccaggcccaaggagggggtcagcactttcccttccccaagccccagtgtgctttagggagggasaagaaaggagaagggaagttgtattccagtccttcagacctcacagtatggcactactctccagagagctgccacagcaaaggaaaaacctaataaagtt

SEQ ID NO: 9324 - DNA, 201 bp, Homo sapiens
ctgggaggctgggagctggggaggaatgtggcaggagggggaaggacttggaagagtgcttctcttctccctgcctgctgggagtctgtgtggaacccackggtcctgggcagtgaggagaagaccatgaagcagctcagagggtcaggggaggaggaaacaccatggggagaagaaagggcttgaccttggtcctctgcg

SEQ ID NO: 9325 - DNA, 201 bp, Homo sapiens
cccctgcccagcttgcaaatgctagctttgtaagggacaccagaagaacagaaggcactgtccctgcccaggggtccatcaggagcccagtccaaggcagraaacaattagcagagagctgagaaaagcatgtcattgtgcacatgagcatgaggtgcaggaagatgcaactggtttataggatcctgtgtttggggttaa

SEQ ID NO: 9326 - DNA, 201 bp, Homo sapiens
cttccgatagatgagtgggatctcctccctcgtgcccttttggttggctgccacaagcccatcctaagcctgtggcagacttcaactcactccctgttgarccagcgcacccaccctgatggcagggtgcccatcctacccagctgacgtgttccctgagcacaggccactggacacttatattcgtggcttcagggagga

SEQ ID NO: 9327 - DNA, 201 bp, Homo sapiens
tagtgaggaagcaaatagctctggctgtcatcctaactcgtcaaccttgtcagggtagggactacagtagatcaggtgcagtcagtcctggccagccagarcacaggcttcatgtggccaggtctttcagttagtttttcaagagaaattacaaatgcagatttgcacatgaaaccacccacttcaaaatattggcaacaa

SEQ ID NO: 9328 - DNA, 201 bp, Homo sapiens
gatgggccccccacatgagcttccttgcttcaccccagagatctgacccacttggagggacacctttctgacaccacaggctctcagtctatgaagtttgytaatgtccaccaccacccccagcagctggactgggcctggtatcctcttaaaagccagccagacccgcaaggcaggcttctccatcagttccttgagatc

SEQ ID NO: 9329 - DNA, 201 bp, Homo sapiens
ctgccccccacattcctatcccatgtcctcactcagatcactccagccacacttcaccccttcctgttcctcagatgctccatgaacaatcctgtctctgrgccttcgcctctgctgttccctctgactggaacacacttcctccagacatcaaaggattcattttcttacttcctccaaataccgcatgactcattttct

SEQ ID NO: 9330 - DNA, 201 bp, Homo sapiens
cttgaccttatgtgttaattttaagagcctaatttcagaaataattgcttctctctggtgtgccccacatacatggtggatgctcattgttcctcaaggcrttgtgcctcagtggggttagcagacgcagagtcacccgagaaatgcccatgcagtcccctcctgtccagcaggctggacaaaccacctgattctccgcac

SEQ ID NO: 9331 - DNA, 201 bp, Homo sapiens
gccctgaaaggcccttgcacccacactgaggatcccatggcccctgacacatcacagtgaggcaggacctgtcatgtcattacttgaaaggaaggataatktattatggcacgtttggtgtgtcagatcttaattcctatcatccatcttccaaaataaactctgccatatagagctttcacctgtgggaaatgtgctgct

SEQ ID NO: 9332 - DNA, 201 bp, Homo sapiens
cagttcaaagctgatggcttaaatctgtactatttcactcaaaaggtcacccagccctgtccagcctgctctgcttagctcagctcaccctgagccctgcrtgggttccaggattttaagggctcatctgagaggcagggcaacagcgtgattaagggcctggtactggttcagagcaagcgaagtgtcctctgaattgac

SEQ ID NO: 9333 - DNA, 201 bp, Homo sapiens
tgagaacactattgtgaactgtgcatgtgagggatctacgttgcacactccttatgggccaaggcggaacagttttatcctgaacccatccctcccacccygaaaaattgtcttctaggaaaccagtccctggtgccaaaaaggttagggactgctgccctagaatcagcctgcccctcaccagcttgggatgcaaggcag

SEQ ID NO: 9334 - DNA, 201 bp, Homo sapiens
gtcagagccagcaaagtgcaacgggcaaggctcatccctgattgatttccacctcgcccacacaagggctgacttgatagagaacttttccaccttccctrggcccactgtccctatctgtgtgtggcagcccagcccctctgacccgtgctggaggcctggccaggaaactgttcagcctgagaacagtgcctgcccttg

SEQ ID NO: 9335 - DNA, 201 bp, Homo sapiens
atagacaggtactcagcgcagggcttggacatctgggctttcatctcaaccctgccagtgcttccctggagaaccttgggtactgtacagctttgtcatgygtgtaaggaaatcggaggctccccgttctccaggctgtgtgctggtgtggaaagaggatggactttgcagtctcatagacccaggcaagaatcccagctc

SEQ ID NO: 9336 - DNA, 201 bp, Homo sapiens
tgagatgtcagaacttggcttcatcctttccttttccctttgccccttctcgtgccacatgcttaacgccctttctattcaaaagacagtggtttcagccrggtgctgtggctcacacttgtaatcccagcactctgggagatcaaggctggtagatcgctggagttcaggagttcaagaccagcctaggcaacacggcga

SEQ ID NO: 9337 - DNA, 201 bp, Homo sapiens
ggaggggagaggaatggacctcgctgggcaaaactggcaaacccttctcctgggcagtgaatgatgctagtggccaaggtggactcggcccattgctgggsctggggctgcggctttcccagtgccttgacagaaagggaccagagctatggagaccacccagactttttgtctgcagagagctctgacatccgcctggcc

SEQ ID NO: 9338 - DNA, 201 bp, Homo sapiens
cgatttccgggtccacctttcccacctgccttctctcccaaactccagagctgcccatgcctaccctgctgggctccacaaactcgccatcttcccacaaygtgctcttgccgctgttatgtcctaggggtggcatcttggctgcccaaggcagggcctggctcccacaaccaccccaaatccatccagtgcccagttcct

SEQ ID NO: 9339 - DNA, 201 bp, Homo sapiens
gggtgcagacagggggtggtgataatcactggccacagaatttgagccgggcacggagggaagtgacacatggtagtgatggacagtaaaaagttggtagracccgcaggttgaaggccctgtgggattcgagggtccctggggccggggtgttaggtccttgggaaatggagatctgtgggcagagtgttgaagcctagg

SEQ ID NO: 9340 - DNA, 201 bp, Homo sapiens
gggagctccgtagctggggtggccctagagtcagtccaatttgaggcagaggggccaggtctgcattcctcctgtctatcagtaattgaatatgggttgcmtttgggggagagtgtgaccctgatcaaggctgcttccttgagctgagagcagctcccagaaagaggctcagccatcagcagccaacactcccaacagcta

SEQ ID NO: 9341 - DNA, 201 bp, Homo sapiens
caggggacttgctggcgacaggaggggttggccctcgtggaagcacagatggggagcttaggaggagagaagggtgctggcaggcgcagatgcagatggayggcacgtgtagtggtggctgcctctggaagccctcttctgcttgcttttcttctcaaggtcatcagttgacaatgaagttgggggagggggcgttggtgg

SEQ ID NO: 9342 - DNA, 201 bp, Homo sapiens
tgttctactcaggccctcaacagatcagataatgcccaccccctatggtgaggacactgttctttcctgagtctactaattccagtgctaatcgacatacytagaaagaatgttttcccagctatctgggcatccttagcccaggcaagttaacagataaaattaaccctcacagctcccactcccgactcaacacccagg

SEQ ID NO: 9343 - DNA, 201 bp, Homo sapiens
tgaggtagagaaagcccagcatgtatgagagcttcagaggcctgtgtgattaccctggctgccgtgttgagaaaggtctgcaggggcacgggcagaagtcrggcattcgttagaaggttatcacagtaattaggccaggtggtagtcatggaggtggtgagaaggggtcagatctcggatgcgtctggcaggtaaagaaca

SEQ ID NO: 9344 - DNA, 201 bp, Homo sapiens
gcctggttattagtcatggttctccagagaaacagaagcaataggctgtatatagatgcacagaaagcgagttatcaaaagagattggctcatgtgattayggagatgagaagtcccttaatctgccatctgcaagaaagaggcccaggaaagccagtggtgtagctccacttaaacctgaaggcctgagagccaggagag

SEQ ID NO: 9345 - DNA, 201 bp, Homo sapiens
gcctccatcccctccaatcaaggctcccgatttccgggtccacctttcccacctgccttctctcccaaactccagagctgcccatgcctaccctgctgggytccacaaactcgccatcttcccacaatgtgctcttgccgctgttatgtcctaggggtggcatcttggctgcccaaggcagggcctggctcccacaaccac

SEQ ID NO: 9346 - DNA, 201 bp, Homo sapiens
gctggtaagaggttagcatgatgccagaccaaaatgggttattaatattaggttgatgcaaaagtaattgcgggttttgccattccttttaatggcaaaamccacaattacttttgtaccaacataataaatgtgactttaaaatcaaaaagctcatcattcagagatacaggcctggttgtcaaagcaagacctatgaag

SEQ ID NO: 9347 - DNA, 201 bp, Homo sapiens
aacttccctaagggactgacattgacaccacccccttttacagatgagaagactgatgtcactgtacctccctcccactatctgtgattcattcctttggwtgttaaggaatctcctgggagaggaagtggttgaaacttccaagctaaaatgttaaggaaccccaggcagactccttcatccctaaaaataacaacaatt

SEQ ID NO: 9348 - DNA, 201 bp, Homo sapiens
aggtgcttggcgctggtaagaggttagcatgatgccagaccaaaatgggttattaatattaggttgatgcaaaagtaattgcgggttttgccattcctttkaatggcaaaaaccacaattacttttgtaccaacataataaatgtgactttaaaatcaaaaagctcatcattcagagatacaggcctggttgtcaaagcaa

SEQ ID NO: 9349 - DNA, 201 bp, Homo sapiens
gaaatgtcctgtagttatagggtgcatacaggggccaatgctatgcgtgtcaccactatatctctttcaatcctcacaacttccctaagggactgacattsacaccacccccttttacagatgagaagactgatgtcactgtacctccctcccactatctgtgattcattcctttggatgttaaggaatctcctgggagag

SEQ ID NO: 9350 - DNA, 201 bp, Homo sapiens
cttgtcactctctccaggctcatggctcacctgcccttgcttctggagtccagctacatggtggcacgctgtcaaggctaggagcacagactctggaaccmgattgctgggttcaagaccagctctgccagttactggctatgtgaccttgggcaagttattcaagctctctgtgccttaggttatacctctgtaaaataa

SEQ ID NO: 9351 - DNA, 201 bp, Homo sapiens
ttaaactcttcagtaactccctattgctctcaggctagagaccgcattgctaaatgcgacccatatggccttcaggtgcagcccttgtcactctctccagsctcatggctcacctgcccttgcttctggagtccagctacatggtggcacgctgtcaaggctaggagcacagactctggaaccagattgctgggttcaaga

SEQ ID NO: 9352 - DNA, 201 bp, Homo sapiens
tgtcctctcctctccatccctgcctgccctccccagcctgagctgcccccctaactcttctgctctcacccatgctgttctgactctcttatccacacagyagccagaggggaccttttaaaaaactaagtgtaatcacgccgtctcccaattaaactcttcagtaactccctattgctctcaggctagagaccgcattgc

SEQ ID NO: 9353 - DNA, 201 bp, Homo sapiens
aaggtgcttggcgctggtaagaggttagcatgatgccagaccaaaatgggttattaatattaggttgatgcaaaagtaattgcgggttttgccattccttktaatggcaaaaaccacaattacttttgtaccaacataataaatgtgactttaaaatcaaaaagctcatcattcagagatacaggcctggttgtcaaagca

SEQ ID NO: 9354 - DNA, 201 bp, Homo sapiens
taaggtgcttggcgctggtaagaggttagcatgatgccagaccaaaatgggttattaatattaggttgatgcaaaagtaattgcgggttttgccattcctwttaatggcaaaaaccacaattacttttgtaccaacataataaatgtgactttaaaatcaaaaagctcatcattcagagatacaggcctggttgtcaaagc

SEQ ID NO: 9355 - DNA, 201 bp, Homo sapiens
ggctgctcaaagcgttggcctactcctacttccctgatctgccctgtggaaggctaggcccttccaatgctatgaaaaatgctggatgttctatttatgaracactgtgctaaggcactgcaagagatgggtgaaaggtatacccacccttaaagatgtgatgtgggatttgtcacaggtttaggggccttagttggaatc

SEQ ID NO: 9356 - DNA, 201 bp, Homo sapiens
ggaaatgatatgtgtaaggtgcttggcgctggtaagaggttagcatgatgccagaccaaaatgggttattaatattaggttgatgcaaaagtaattgcggkttttgccattccttttaatggcaaaaaccacaattacttttgtaccaacataataaatgtgactttaaaatcaaaaagctcatcattcagagatacaggc

SEQ ID NO: 9357 - DNA, 201 bp, Homo sapiens
ccttggcaggctggctcctcagcctcgtggagaccctggggagcctcctggagctagaatgaggaccaagtatgggcagaggctccctcagtgcctgcctkcctctttaaaccccaactggggaggaaatgcctgccacagaaagatgcccagcaggcggtgggggtataagtggatgccagcttcccatgtagttatgtg

SEQ ID NO: 9358 - DNA, 201 bp, Homo sapiens
cagctaaggacctctcttccaagcacgtcccaggcgaagtggtagcagtttattcccgcctgcccagtccctctctaggcatggacagtctaggcctccaygctgatcctcttactgcaaaagaagctgaagggaacacttcactccaaggctcaaggggttacagctctccccaaatttccccaataggtttggagttca

SEQ ID NO: 9359 - DNA, 201 bp, Homo sapiens
acacctggcctacttcatttatttatgtgacctgcctggctccttgtaggcattggagtttgtgacacctaatctccctcaactcttcttagagtagtgaytaaagaattaaggactgtgcccatcataaatcttacaacctaacaaaagacaaggtagaaaaacatggacatggaacatggaactgagatccacacatag

SEQ ID NO: 9360 - DNA, 201 bp, Homo sapiens
gagccctctgcctgtcctcccctccccctcccacccaccttagccaaattctcaggttcctggggggtggggaggaggtgggtattgactccaaatcctaytggggagaatatcctaatttaaagcatctctttttccctttttaattttatttttctttttctgtcttcaaccttaacacatgaatgatcttaaagtttt

SEQ ID NO: 9361 - DNA, 201 bp, Homo sapiens
agatgacccctggacccctgagatccttgaggtcctgggccccttgccaatctgcctcccatgcacaccatcagttctggggcccggttccttgactcctygcggcagtagcagggccttgggttagctagaaggaaggacttcgtcatacgaatgctgcaaagctcacataggggtatgtgcctcctgtccctgactttt

SEQ ID NO: 9362 - DNA, 201 bp, Homo sapiens
gactggtactccagtaatagatcatccaatctccttgaaagagccaagtttcacctctcacaggcatagagtcaaggtgtgggctctgagccaggcttccygggttcaaattctgcctctgtctttccaggctgtgtgctgtcttgcaggttacttggcccctctctgtcttagtttcctcgctcatgtaatgggttgcag

SEQ ID NO: 9363 - DNA, 201 bp, Homo sapiens
ggccagtttcccgactcaggagacctgagttgtgctctgtcatctgtatccttgggaaagccactcactgttgcagagtctccgtctcctcatctctaaamtggcgataataatgttttccctggatacctcactggattgttgggaaagagatgaagacatggtttagagctgcctctttggaaagtgtacagaagccct

SEQ ID NO: 9364 - DNA, 201 bp, Homo sapiens
taagcaaaaaaaaaaatcctaaggaggaaataaaacaaagtggtgtgctgggggaggaagaattttggaggaaggggtgcaggaggtgaggaaggcctaayagcaagccaggtaggtagctgggaagagaacacccaggcagagagcccagtaagtgtgaaggccctgaggtagagaaagcccagcatgtatgagagcttc

SEQ ID NO: 9365 - DNA, 201 bp, Homo sapiens
gctatacaggcctagacaggatctggtaggagcctgggctttagagacagagcctaaggccgagagaaggcaaggggttcttctagggtcacccagccaakgctggaaacacctagactaacaaagtggcaggattatctgctggctgagttctgggatccaactgtgttacaatgggcaagtgacttgacatctctgagc

SEQ ID NO: 9366 - DNA, 201 bp, Homo sapiens
tctggagcggttgtagtaagctcctgcggagggatggagtaggaggtacggctggaaagaaaagttgggggttggggaggcagaccgtggagggagttggwcaccaccctgaaagccagcttctatttggtgggtagcaggaaaccacggaaggtttctcagagggatgtgatgtatccagctgtgtatagctcagtgtag

SEQ ID NO: 9367 - DNA, 201 bp, Homo sapiens
aataactggaagttacagtaactagattgagcacccccacctctccactcctcacctcagcccaggccaggaatcagcagccagacttctggactgcctaygtgctctttagggctccaggatgaacatgaactacatcaacaagcagcctgggtccacctgcgggtagagggctgctccaggccctgtgttcagtgccgt

SEQ ID NO: 9368 - DNA, 201 bp, Homo sapiens
ccctgcctccctcctgggattggaggcagatcggagacttcactaaaaggtgccatcaccaaaggccatgcacaagaccagatgagtgctcagggagggcycttagggatctggggcaggcaatctttgcagcaggcaggactgggccacttcctgaagaatgggagaaggacactggggagggcaagcctggtgaggcac

SEQ ID NO: 9369 - DNA, 201 bp, Homo sapiens
gccacttcctgaagaatgggagaaggacactggggagggcaagcctggtgaggcacacggcctgtgcaatggcctgggggtgggactcccatgccaatggrgaaagcaggtgagggggcagagactgcgtgtatgaggcagaagggagagggagctgcagggagggccggccaaggggacccaggaggacaggaggcctga

SEQ ID NO: 9370 - DNA, 201 bp, Homo sapiens
accttctcagcctctgcagacctgtcctctcctctccatccctgcctgccctccccagcctgagctgcccccctaactcttctgctctcacccatgctgtyctgactctcttatccacacagcagccagaggggaccttttaaaaaactaagtgtaatcacgccgtctcccaattaaactcttcagtaactccctattgct

SEQ ID NO: 9371 - DNA, 201 bp, Homo sapiens
aatgacctccagccacacccaccccagctctcctgcccacaccttctcagcctctgcagacctgtcctctcctctccatccctgcctgccctccccagccygagctgcccccctaactcttctgctctcacccatgctgttctgactctcttatccacacagcagccagaggggaccttttaaaaaactaagtgtaatcac

SEQ ID NO: 9372 - DNA, 201 bp, Homo sapiens
gtaggacatctctggctcttaatgtcatcagaggcccagccaatctctacacccaccaacccacaactccagcatgtcttgaaagcacctcaaactctacrtgtctaaactgagcaggaaatccacccctcaccagcatcccttcatatgtgagcacaatgacctccagccacacccaccccagctctcctgcccacacct

SEQ ID NO: 9373 - DNA, 201 bp, Homo sapiens
atagacatcacagctccaaccacagaggatttttttctgtttcccaccccagggcctttgcacttgctgtgctggtgtgcagtgaccatcccttggactcyctcgtgccgcctcttcattatctaggtttcgactccaacaccacctcctcagaaaggccttcctcagtcatccaagctaaagcattttcccaaattccag

SEQ ID NO: 9374 - DNA, 201 bp, Homo sapiens
atagctggtgttgagcaggtgttgaaagtgggcatgagggagacacagctccagtgtgccaagatacaatcttctttaccccctcataccgcactgagccrtgcttccaagcgcctgccttctgctgaagaatgagaaaaataattctgaggaactcagccacttcctgctcaacccttagcctttcaggttctcatcagc

SEQ ID NO: 9375 - DNA, 201 bp, Homo sapiens
cagagcgcccagactgggatcctggctcctcagttcactaactgtgggcctcaggcacacaactctgtgctttggagtcctgtctgtagaagagaggcaakgcaaattcatacctcccagcaacacagttagaattaaatgagcaaactctatgggaaagtgtggagtgggatgccgggtgcactaagcaatgcgtaactg

SEQ ID NO: 9376 - DNA, 201 bp, Homo sapiens
gtttaggggccttagttggaatcccagctctctgtctagctctccagcacagcaaaagccacctaccctctctgaattttcacttgctcatctcttacatstaaataaggatcttacagggttattatgaaagttcttggtcaaccatggagatacaaatggagaatatttggcggacctcgtggcacaatggtagtgcgt

SEQ ID NO: 9377 - DNA, 201 bp, Homo sapiens
tcctctcccctgcaagtctttttccatcttacctttctttcaaagcccttctcatctttcaagcccaattcaatagaccacctcctccttgaagcctcccygatctatcaggcagaattccctgccctttcctctgcttctctgggtaggacctacatcattttgccacctcccttaactccccacctgacccaaagaagg

SEQ ID NO: 9378 - DNA, 201 bp, Homo sapiens
ggcagcaatggttctaaccctgccaggacccagacccagggggtcaagccctgctcagctggactctgacacctgaccccctctgtggtgctctgaagcgyccttgctcttcctctgcctgtgctcagtgtcacttcctctgagatgtctccgttgaatctcccagacacagctgggggccctttttctcagttcctagag

SEQ ID NO: 9379 - DNA, 201 bp, Homo sapiens
agcaaggatgtatcattgcttgctgcctaaatcccgtgtgtgtgcaccctcagccacctgtgggctggcagcaatggttctaaccctgccaggacccagayccagggggtcaagccctgctcagctggactctgacacctgaccccctctgtggtgctctgaagcgtccttgctcttcctctgcctgtgctcagtgtcact

SEQ ID NO: 9380 - DNA, 201 bp, Homo sapiens
ttgaattagaggatgttgaaggaatccttcatgtctgcctctaaacctaattggcggtctttaccagcaaggatgtatcattgcttgctgcctaaatcccrtgtgtgtgcaccctcagccacctgtgggctggcagcaatggttctaaccctgccaggacccagacccagggggtcaagccctgctcagctggactctgac

SEQ ID NO: 9381 - DNA, 201 bp, Homo sapiens
ccccattccttttggcagccatcctccattttcgcccgccctccgacccccagccccaggcaagcgttaatctactctccatctttatggatttagcatartgttttcaaggtttatccatgttgtagcatgtatcagtacttcattcctttttattgccaaataatacattatattgcttttaagcctctctgaatgtct

SEQ ID NO: 9382 - DNA, 201 bp, Homo sapiens
ggtcaggtaactggcgtgggtgaggccaaaatgaccacagctgctgggagaccaggtgctgcgcggctgctaaaatgctccaccatctgcccctggaagarccttttctctcaaggccctctggctctgcgtttcagaaattcctggggaattctccaaagttcatttcttccccatttcctcccaaaagcacttccagat

SEQ ID NO: 9383 - DNA, 201 bp, Homo sapiens
tggggtggagggtcaggtaactggcgtgggtgaggccaaaatgaccacagctgctgggagaccaggtgctgcgcggctgctaaaatgctccaccatctgcscctggaagagccttttctctcaaggccctctggctctgcgtttcagaaattcctggggaattctccaaagttcatttcttccccatttcctcccaaaagc

SEQ ID NO: 9384 - DNA, 201 bp, Homo sapiens
tggctgttgcagccccatttcaggcaactggcctgctccacaaggaaggttgaccatcaccttggagagggccctgggtttaaggagcacccccacccccmacagccatagctctctatgcccctcatggggtggagggtcaggtaactggcgtgggtgaggccaaaatgaccacagctgctgggagaccaggtgctgcgc

SEQ ID NO: 9385 - DNA, 201 bp, Homo sapiens
tagcattaaccatttgctttagatggtgtaggtgcttgagagcagcatgtagtatgagtctcttacacagcaagagtagcttttgtgggtttccagccagrgagagccttcccacctacaaaccacactgggcagcttccttgccatctccgcctggatcctcaaacggcacacaatgaaagccagcaccttccccccacc

SEQ ID NO: 9386 - DNA, 201 bp, Homo sapiens
cacccctccatgtcagctacatcatccctgcagctccttccatcctctcctccccacttggcctcggccatgagttctgctgtttgatgagtatgttaacrtaatgcctggtgtatgctcgatgtacaatccaggcaaaaccacccactgggacaagtaatttgtcctaaaatgagaagtgcaaacagaccaagatgtata

SEQ ID NO: 9387 - DNA, 201 bp, Homo sapiens
ccattgtgcaagagagaccagaactggatgtgaaatctcctgatgtgtgaacaaccaatatttattgagcacctactatgtgccaagccctgttttaggcrcagtgaatagaacagaacagaaaaaagtatccaggtccttgtcgaacttacattccagtgctacaaagagacaataagtaagaaaaataagcaaaaaaaa

SEQ ID NO: 9388 - DNA, 201 bp, Homo sapiens
tttaaagtaagatttaagaaaaatagatatccaggggtgattaagtaccttactaattgttaattattccctgtccctgcttcacggagtcctgctttacytccgggcctgaggaaagcagcctcctaactcacctggcatcctggggccggggacttatgtggggcttgtcttcagctctgggctccatgcccagtagaa

SEQ ID NO: 9389 - DNA, 201 bp, Homo sapiens
catggggctgccaggctgccacccatgagactgtgtgtttctttatttcttcctggcccacagttacacatgcacgccttcaccatgccctcctggactartgacagagctgcttgagacaggattcattgagagacagggacaaaaatgatgtttcacttgattgtgctattgtaagttaaaacactccatattataacg

SEQ ID NO: 9390 - DNA, 201 bp, Homo sapiens
aaccacccaatcactctagaaagtttcttcatgcaccttgggagacactcccagccccaggccaccactgctctgcgtcacttctgtcactgtagattagrtgtgtcttttgtctcttctagagcttcatgtaaatggaattaaacagtatctgtgcctggatgcttctgctcagcagaatgtgtttgagatgcacccttg

SEQ ID NO: 9391 - DNA, 201 bp, Homo sapiens
taggtgggatcttgttctcttttctctatctctgtctctctcccattgtctggctttctctctctctctctctgtctctctctctctctctctctctctcwcacacacacacacacacacacacacacacacacacgtacgtgcctcaagagggcctcttacggccccagccactgtttctcagttatctggagcagctgc

SEQ ID NO: 9392 - DNA, 201 bp, Homo sapiens
agggtcgcttgagcctgggaggttgtggctgcagggaaccaagatcacacgactgccctccagtcttttgagaccctgtctcaaaaaaaaaaaagtggttyctgtcatttctgcttgtcaccagactctggttagaggttctacatcctcagttatgaaaattctttcacttgcagttgtactgagacctgccaaggatgc

SEQ ID NO: 9393 - DNA, 201 bp, Homo sapiens
gaggttgtgtgtttctcccgctttaccctgctgcctgtgtgcaggggtggggtaggaggagacgttggatctagccaggctcgtggcttagtgaacagggygggtgtcaaggcagtggagggtgcagacagggggtggtgataatcactggccacagaatttgagccgggcacggagggaagtgacacatggtagtgatgg

SEQ ID NO: 9394 - DNA, 201 bp, Homo sapiens
aggggaccttttaaaaaactaagtgtaatcacgccgtctcccaattaaactcttcagtaactccctattgctctcaggctagagaccgcattgctaaatgygacccatatggccttcaggtgcagcccttgtcactctctccaggctcatggctcacctgcccttgcttctggagtccagctacatggtggcacgctgtca

SEQ ID NO: 9395 - DNA, 201 bp, Homo sapiens
gagcaggtgttgaaagtgggcatgagggagacacagctccagtgtgccaagatacaatcttctttaccccctcataccgcactgagccatgcttccaagcrcctgccttctgctgaagaatgagaaaaataattctgaggaactcagccacttcctgctcaacccttagcctttcaggttctcatcagctgtcgagacacc

SEQ ID NO: 9396 - DNA, 201 bp, Homo sapiens
tctcctgtccctctgcctgctcaaactgtctcaccagagccatctccacgagggctccaggccccaggcatatacccttacccattgctagctaggctggsgaacggcttccctggaaacacaggactgcatcgggaaggagaggaggctggaggaactttaaggttttgttgggaggagaaagggagaatggacgcagag

SEQ ID NO: 9397 - DNA, 201 bp, Homo sapiens
cagagtgtcaagaagcccctggagccagaccaagtgccccgccaggctgccaggtgtgaagtccacttccatggagtttacaggaaggtggccactcaggwtgctgtcaggtggctccaggggtggcagtggcatagctagtagtatggagtcctctggggacctcctggggccagggcatgaactaagctggaggggatc

SEQ ID NO: 9398 - DNA, 201 bp, Homo sapiens
cactgcagcatagaatataaaaaacacagaaacttcgtgatctagtaaccaactcaaagataaatcacgttatatgatctttaaacgcagccatgttaaakatgtcgtttccaaggctgccctgatgcaggaatgtgtctgccttgtcatggtaagtgaaggaagcagtggaccatattccgtgcacaccgatttctgctc

SEQ ID NO: 9399 - DNA, 201 bp, Homo sapiens
tcatgtgtgtaaggaaatcggaggctccccgttctccaggctgtgtgctggtgtggaaagaggatggactttgcagtctcatagacccaggcaagaatccyagctccaccgtttacttgtgatttgaccttgggcaatccgtgtaacctatggagcctgggtgtttacacctgtaagttagaactcagataggctgagtta

SEQ ID NO: 9400 - DNA, 201 bp, Homo sapiens
gggcctcaatcttcagcctacatggtatggtgtgtgagatgtcagaacttggcttcatcctttccttttccctttgccccttctcgtgccacatgcttaasgccctttctattcaaaagacagtggtttcagccgggtgctgtggctcacacttgtaatcccagcactctgggagatcaaggctggtagatcgctggagtt

SEQ ID NO: 9401 - DNA, 201 bp, Homo sapiens
ttattctcttttccgtttttatgctgggaataacaacagcatatttgcataatgattccgtgagggtgggctaactacagctaaatccagcttgcagcccrtttttgtaaatatatattttttatgggagcacagccacactgatttgtttccaaactatggctgctttggcctgcgatggaagagtggagtaggtgtggc

SEQ ID NO: 9402 - DNA, 201 bp, Homo sapiens
gcagctgccacagtgatttcaacacctgctcctctgccatggacaccctgagccctaaagtggcttctcagagggtgtggcaggatagggcccaggctccrgagtgacactgctagatgccatctgcctacaggttttccagccaaaagatggtgcaagcaggtcttgctgaaagcttacatttctcattcccaggttgtg

SEQ ID NO: 9403 - DNA, 201 bp, Homo sapiens
gtggctgctctgcacatggccccctgtggcagcgtgacttgtgtgagtctgtttgactccccacccaacaagcatgtgtgtgcgtgtgtgtggcggtaggrgggtggtgtctggcagcctagccgtggccaaaacagtgggacttttctattagtcactgtatcagatgatggtgtttcacatccaaacctcgatgatggg

SEQ ID NO: 9404 - DNA, 201 bp, Homo sapiens
gccccgggtcacacagctagaatgtgacagagatggagaggtgccccagtgtgtctgactccaaggctggggctcctagctaccatgctattctgtcctcrtattggaactagactgtcagctccacattggcatgaggctaaactgcctaggagaaagacacatgaccccttccatggaccaggcattgttttaagtact

SEQ ID NO: 9405 - DNA, 201 bp, Homo sapiens
  misc_feature (1)...(201): n = A,T,C or G, or insertion/deletion polymorphism (see Tables 1-2)
agattcagctggaatatgcagggctttatggaccacgttaaggctttcatctttatcctaagagcagtggggagccaccaaaaagtattgagcaggaccangacctaaccagactggtattatgaaagctcagactagctgatatggtttcactgtgtccccactcaaatctcatcttgaattgtagctcccataattccc

SEQ ID NO: 9406 - DNA, 201 bp, Homo sapiens
gactgtgtattgcgaattagcagcttgaggaccaaatgtagctctttcacaggttttgtttggcctgcagagtggtttttaagtgttcttaaattagtagyagcatttagaaatgagaagattttgcagaaaatatctgattctcagcttttcttgaatagtttcaagatctgccaatagtaggtctgcaacctcaactgg

SEQ ID NO: 9407 - DNA, 201 bp, Homo sapiens
ccgacatgctcactccttccctccaagctgcagctccatatttaccctactgaatacaatcttttcaactgctagatatgaaagttatcccagagagcatytgaactgaaccccatttttcagatggggaagttgagcccagagtcacatggcgaggcccaggactagaacctcagcctcctggccctgtatacaatgttc

SEQ ID NO: 9408 - DNA, 201 bp, Homo sapiens
atggctcagtacgtggcccttgactgcctgtctggctgagactcagcagggtggggtgactgggctggtgtggacccaggaagtcctctgacgagccttgyagccccacggaacccctggttgggatggtgggctgggggcaagtacaagggtggcgccaagagtggcctgcaggtcacttgtcccattttgggagacccc

SEQ ID NO: 9409 - DNA, 201 bp, Homo sapiens
ccacagtccaggaaggggaaacacacgggtaactcagtggctgctgcagagacccagggctccggtggggctaggcggtgcccagtgtgggctacagtccyagggccgcatcctccaggattccagccctgggaggccggccccaagcaaggcggggccaaggcagggacacaggtctagaaccacactgttggtggcttg

SEQ ID NO: 9410 - DNA, 201 bp, Homo sapiens
ctgccttaaaggatttttgagaccgtaaagtacatatgccaggtgaatgcaaactggagagggtggtgccccagactgtcaattatagcagcaatggggargcagatgggattgagctttgctcctgagctgatttactgtctgcagtggttttgctctggagagcctgggctctgttttgggaaatccaggaggtgactt

SEQ ID NO: 9411 - DNA, 201 bp, Homo sapiens
ctccggtggggctaggcggtgcccagtgtgggctacagtcccagggccgcatcctccaggattccagccctgggaggccggccccaagcaaggcggggccraggcagggacacaggtctagaaccacactgttggtggcttgtgcagctggcatttggccctgagacatcagatctgggactcagaagggaccccagagct

SEQ ID NO: 9412 - DNA, 201 bp, Homo sapiens
gcaagcacaaagtgaccctagagaagggttaactagcaatgttggcatagcgacaagagatatccttgcttttgtcatggagaagggaagtgttggctgamgtgtttgagtaggacttaaaagttcctaaaatcatgttggcccgtcatacctcacctgccttaaaggatttttgagaccgtaaagtacatatgccaggtg

SEQ ID NO: 9413 - DNA, 201 bp, Homo sapiens
catggaggggtctccatgccagggctccggctccagggtgcccagggcccaagagctttgacagcctgaatgtcctcttcattttcctataggcttagaasctggatgtgagtccttctcaacaaagaacttactttccctcggggtgttcgggaatctggacaatgaggccccatcagcatcccatgggggaccttacca

SEQ ID NO: 9414 - DNA, 201 bp, Homo sapiens
gttccccttccacttcaccagcttaggagcaagaggggctggatggaggaggcagagcctgtggcctgtctgcctggctgaggggggccctctggagtcaratgtcctgagttcccctccccacctcagcagcttcacagtgcatttccttgctcactaaatcctgaaatactgggatgatggggccccctttgaaacttg

SEQ ID NO: 9415 - DNA, 201 bp, Homo sapiens
tttaaggtgtcaggctcagagaatggaattgccatgcacaaaatcacagcatcattcatgtatcattcaacacatattactgagcactcactccatgccaygcctttgctaggtgctggtaacccgagggtgagcaagacatgacttacggttcagtcagggaggcagcctccaccaattgccccagcaaatataaaattg

SEQ ID NO: 9416 - DNA, 201 bp, Homo sapiens
gttgctcaagtggtcagaagattcagcctccacgtggaggccatcggcccacatgatagctggtgtgatgatgttaaactcttccccctcaacccacggcytaggagcgagaagaggaggaggagttaaagggtgagagtgcagaatctgggtttcagatcctggcaaccatgggttcaaatcctgcctttgtcacttgtc

SEQ ID NO: 9417 - DNA, 201 bp, Homo sapiens
ttcagatcctggcaaccatgggttcaaatcctgcctttgtcacttgtcagctgtggcctcttgggcaaatttttcaacctctagggtcttttttcatctamactgcggtgtccattatgactgccactaaccacacatgactgtatatttaaattaattcaaattaaataaaatttaaaatgcaattcatcagtttcccca

SEQ ID NO: 9418 - DNA, 201 bp, Homo sapiens
cctcagccctgcatcatcacagccttgtgcttcttctaatctcatcacatcccctttgtcctgaatcttgatcataaaccactggatcataaatcactgtrgtcagtgaacctgcttctagtctccgtcctaaatatttatttatgttgcactctgcacctccaggaaaataggcatagattgctctgcatcccacaaaga

SEQ ID NO: 9419 - DNA, 201 bp, Homo sapiens
cagatcctggcaaccatgggttcaaatcctgcctttgtcacttgtcagctgtggcctcttgggcaaatttttcaacctctagggtcttttttcatctacaytgcggtgtccattatgactgccactaaccacacatgactgtatatttaaattaattcaaattaaataaaatttaaaatgcaattcatcagtttccccagc

SEQ ID NO: 9420 - DNA, 201 bp, Homo sapiens
tcctggcaaccatgggttcaaatcctgcctttgtcacttgtcagctgtggcctcttgggcaaatttttcaacctctagggtcttttttcatctacactgcrgtgtccattatgactgccactaaccacacatgactgtatatttaaattaattcaaattaaataaaatttaaaatgcaattcatcagtttccccagccata

SEQ ID NO: 9421 - DNA, 201 bp, Homo sapiens
atatttcaagtgttcctgtggctagtggctactgtattggacagcacacgcacagaacatttccattattgcaaaatgttttctatccaacagctttgatstataaaatgaggataatgagaaggcttgttctatggatcgtggtgaggattaaatgagataatgtatataaagcaagctggtatagcacccaacatatat

SEQ ID NO: 9422 - DNA, 201 bp, Homo sapiens
agaaagggctcgctctcctccggatggggtgatccggctttcccgggaaccagcctttgtttctggaagcccatggagcagatacgagtccgggttcactkacccaggcacgcactactggtcttgccggagggccagcccacactcaccctcacagatgcctctgtgtgcagtgctgggtcctgtgtgttcactagcacc

SEQ ID NO: 9423 - DNA, 201 bp, Homo sapiens
agaaaaagatacaagaaattatgctgtgtgaccctgaaaggtggtcgtagagccccttgaagggcagtagggactttttaggaggagcataggcaacaaarggagagtgcagagcaagcaggcgggtagcatgcttcctgtccctgctggtcctgccaaaccctgcgcttgcagactgcacagccacctttctcaaccagg

SEQ ID NO: 9424 - DNA, 201 bp, Homo sapiens
cctctccacagcagtcactgggctcaacctcagccttagtcactatcacctcttcctcccagggagggattttctggtctacaaacccctccccgctcctyttccctcccatgttaaacagcaccatactggggacaccaaggagcccaggcattgcctggtttcctggaaatagctgactggtagggcagccccagggtc

SEQ ID NO: 9425 - DNA, 201 bp, Homo sapiens
ccttcctccctttctgtttccctcactctttgtcagccttcctgccaccttccttcttttaatgcattttttatggagtatctaaaatgtgctgggcactkcttcaggtgctagggatacagacgggagcaagagagagactgttcttgccatctgtagctcacagtctagtagggagacatccttttaaatgatcactca

SEQ ID NO: 9426 - DNA, 201 bp, Homo sapiens
actaacttgcctgaagtcacacagctgaatgtccaaaacaagatcgaaacacagttctcaaattccttccctccctttttttattaaggttttattacctycctccctttctgtttccctcactctttgtcagccttcctgccaccttccttcttttaatgcattttttatggagtatctaaaatgtgctgggcactgctt

SEQ ID NO: 9427 - DNA, 201 bp, Homo sapiens
cctatagccaggctcttctcagctgcccctgccaggctggcacctgctggagcagttctccagggtggccaaggaggagattgcagggccagagcagagasagcggtcacagggcaagcgtactggtgctagtggtgcacccatgactgctgctgtcagctcattcccacgccctgccaggctccagggaatccggagaac

SEQ ID NO: 9428 - DNA, 201 bp, Homo sapiens
tcctgctgtgtccacgaccagaggtgctacagcccaataaaaaggtgctagagttaggcagttgtgcacctggatttatttatcaatacgaaggtgttgawcatctgctgtgggccaggcgctgttatcatatgctgtgggcaggtgccgtggtaggtttgtgatatgtcacaaagtcaaacaagacatagtctttatcgt

SEQ ID NO: 9429 - DNA, 201 bp, Homo sapiens
tcagcctccccgagttgacccctcagagcctctggcctctggagccatatttattatctattgctgcataactaatcactgcaaacgtagcggcctaagamaatacacacttattggcacatagtttctgtgggtcaggaattcaggcacatcctagttgggtcctctgcccatggtctcatgaggctgcaattaatgtct

SEQ ID NO: 9430 - DNA, 201 bp, Homo sapiens
ttgggcaaatttttcaacctctagggtcttttttcatctacactgcggtgtccattatgactgccactaaccacacatgactgtatatttaaattaattcraattaaataaaatttaaaatgcaattcatcagtttccccagccatatttcaagtgttcctgtggctagtggctactgtattggacagcacacgcacagaa

SEQ ID NO: 9431 - DNA, 201 bp, Homo sapiens
gtggctagtggctactgtattggacagcacacgcacagaacatttccattattgcaaaatgttttctatccaacagctttgatctataaaatgaggataaygagaaggcttgttctatggatcgtggtgaggattaaatgagataatgtatataaagcaagctggtatagcacccaacatatattaggtgctcagctaatg

SEQ ID NO: 9432 - DNA, 201 bp, Homo sapiens
ggctttgcactttgcatgatgtgagctgctgcctgggctagaaacctggggccagggcttaggggtggaggattcactcagcttcccctcaagtcactcastttatgaaggccagtttcccgactcaggagacctgagttgtgctctgtcatctgtatccttgggaaagccactcactgttgcagagtctccgtctcctca

SEQ ID NO: 9433 - DNA, 201 bp, Homo sapiens
ggggttgaggcaattatgagcctctgagcccaggtaactaataataaccatggcatatattcaacagatgaccttgggccttgtgctttaaatacaatatmacttacattctgatcaagcaccctatgatgtaaggctatggctatccacatttcaaaaatgaagaaactgaggctcagagatgttcagggtttgcctgag

SEQ ID NO: 9434 - DNA, 201 bp, Homo sapiens
tggtgaggattaaatgagataatgtatataaagcaagctggtatagcacccaacatatattaggtgctcagctaatgtttgccatgacggtgatggtggtsatggggttggtgaagtccatttgcttctgtgtacattttcagtgtcctgctgtgtccacgaccagaggtgctacagcccaataaaaaggtgctagagtta

SEQ ID NO: 9435 - DNA, 201 bp, Homo sapiens
ctttcctgccttcccgagatgggtgggggttggcccagcctcacaggcacagccaagcactgcaaagtgggtcccacagggacaacaggaatggctgtccrtgctggtcactccccagctgtgtaaaccacatgccctggatcctcacatcaatatgcagggaggagaaatgggcaggggcttctccatctgaagcatgag

SEQ ID NO: 9436 - DNA, 201 bp, Homo sapiens
tggtccgcagtcaccaaccggctcagcagcccctctgctctgtctctggggagagtggtggtatgatgcccacacaatggcacgtttttatttttatttatttttaagaacaagagaggatattgtttccttctttttcacatctcctttttatcttagccctggcctcaattctgtgggactccctgaccctcctagcat

SEQ ID NO: 9437 - DNA, 201 bp, Homo sapiens
ggtccgcagtcaccaaccggctcagcagcccctctgctctgtctctggggagagtggtggtatgatgcccacacaatggcacgtttttatttttatttatttttaagaacaagagaggatattgtttccttctttttcacatctcctttttatcttagccctggcctcaattctgtgggactccctgaccctcctagcatg

SEQ ID NO: 9438 - DNA, 201 bp, Homo sapiens
gtccgcagtcaccaaccggctcagcagcccctctgctctgtctctggggagagtggtggtatgatgcccacacaatggcacgtttttatttttatttatttttaagaacaagagaggatattgtttccttctttttcacatctcctttttatcttagccctggcctcaattctgtgggactccctgaccctcctagcatgt

SEQ ID NO: 9439 - DNA, 201 bp, Homo sapiens
tccgcagtcaccaaccggctcagcagcccctctgctctgtctctggggagagtggtggtatgatgcccacacaatggcacgtttttatttttatttatttttaagaacaagagaggatattgtttccttctttttcacatctcctttttatcttagccctggcctcaattctgtgggactccctgaccctcctagcatgtg

SEQ ID NO: 9440 - DNA, 201 bp, Homo sapiens
ccgcagtcaccaaccggctcagcagcccctctgctctgtctctggggagagtggtggtatgatgcccacacaatggcacgtttttatttttatttatttttaagaacaagagaggatattgtttccttctttttcacatctcctttttatcttagccctggcctcaattctgtgggactccctgaccctcctagcatgtgg

SEQ ID NO: 9441 - DNA, 201 bp, Homo sapiens
agtgaggctgaggaactgaactgaattttttattttatttccattttattgtggttttttgttttgtttgttttgttttgtttttttgagatggagtctcrctctgttgtccaggctggagtgcagcagtgcgatctcagctcacggcaacctccacctccctgattcaagtgattctcctgtctcagcctcccaagtagg

SEQ ID NO: 9442 - DNA, 201 bp, Homo sapiens
cagactttttgtctgcagagagctctgacatccgcctggcctccccagcaaagcccttgcctggggctgtccagctggggcgggggagcggggggaggtayggggagggggctctgtgcagcccagcagtggggagatatcttcctagcgatcagcatctgataacacagcctggtctccccagggtgcccctgccccctc

SEQ ID NO: 9443 - DNA, 201 bp, Homo sapiens
tgtctgcagagagctctgacatccgcctggcctccccagcaaagcccttgcctggggctgtccagctggggcgggggagcggggggaggtatggggagggrgctctgtgcagcccagcagtggggagatatcttcctagcgatcagcatctgataacacagcctggtctccccagggtgcccctgccccctctaaaaagca

SEQ ID NO: 9444 - DNA, 201 bp, Homo sapiens
gcccaggtcaagaggggccttagagaaagttagatctaaataagagtaatggggagccattgaagggttttcaggaaggcagttatgcccctagagtgagkgcttacggctggcaaagcagtaaggccaaaaacagaaggctgctgcaggccagaggggacaatgaatgggggtaaaagtagggtcagagaggggtgactg

SEQ ID NO: 9445 - DNA, 201 bp, Homo sapiens
aattctccaaaatggaggtgcagaaggtccctgtcctcatggggcacacacaggcatctggtgagtttggaggccaagaccaggattctagctgggctttrccagtcttgtggccttaggcaagccatgctacacccctgcacttcaggttcatcttccattaaatctaggccctgcctccctcctgggattggaggcaga

SEQ ID NO: 9446 - DNA, 201 bp, Homo sapiens
ttccgtttttatgctgggaataacaacagcatatttgcataatgattccgtgagggtgggctaactacagctaaatccagcttgcagcccgtttttgtaartatatattttttatgggagcacagccacactgatttgtttccaaactatggctgctttggcctgcgatggaagagtggagtaggtgtggcagagatcatg

SEQ ID NO: 9447 - DNA, 201 bp, Homo sapiens
ggtatttggagaatgcgatggtcttggaagcctccaggggagaggtgacccattcattcattcattcgttcgttcgttcgttcaacaaatacttgtgaagygcttgccatgtgcagtggcaccgagctctagtgatatgaggaccaacctgacagaggtcttgacctcttcctgcttccagtgtaatgagagaaatcaaca

SEQ ID NO: 9448 - DNA, 201 bp, Homo sapiens
ctgcatctcagtccctcactcagaaaatggggctgctgactcctactccagcctttcagggctgttttgtggctcaaatgggaaaaggtaaaacaaagccmtgagaaggaagaaggactgaatgtcagccacagagtgcccccagacaggagcttgcttcggagtagagaccaacgtggggccagcctcaccccaggacca

SEQ ID NO: 9449 - DNA, 201 bp, Homo sapiens
gctgttttgtggctcaaatgggaaaaggtaaaacaaagccctgagaaggaagaaggactgaatgtcagccacagagtgcccccagacaggagcttgcttckgagtagagaccaacgtggggccagcctcaccccaggaccagcgggacacccacctctaagctggacggaaggcagagtcagggggtctgtacctggtggg

SEQ ID NO: 9450 - DNA, 201 bp, Homo sapiens
tgagctagaaaagaagccctcaaggtcagggacagcgggtgacctttacagccttctgcacagcagccatgcatagctggtgttgagcaggtgttgaaagygggcatgagggagacacagctccagtgtgccaagatacaatcttctttaccccctcataccgcactgagccatgcttccaagcgcctgccttctgctgaa

SEQ ID NO: 9451 - DNA, 201 bp, Homo sapiens
aaatgtaaaatccaaagtgttgccactcttctcagttcagatgcatccagttcctggactcctcggcctcccgagaaccccacatccctggcacgtacackggaggccatacagctcactgtgcagcccgggcctcaatcttcagcctacatggtatggtgtgtgagatgtcagaacttggcttcatcctttccttttccc

SEQ ID NO: 9452 - DNA, 201 bp, Homo sapiens
tcgggaggctgaggtggtagggtcgcttgagcctgggaggttgtggctgcagggaaccaagatcacacgactgccctccagtcttttgagaccctgtctcaaaaaaaaaaaagtggtttctgtcatttctgcttgtcaccagactctggttagaggttctacatcctcagttatgaaaattctttcacttgcagttgtact

SEQ ID NO: 9453 - DNA, 201 bp, Homo sapiens
ctatgcagccgagagtgctaacaacaggccgggctgccctcagagctccagtctgtgtcactggggacatctcagagctctagcctgtgtcactgggggcmtcaccagagcctgccacagtgggagccagggccccgtcaggcctggcaggcgcaaggcatctgccctccatgtggctgaagcatcccaaaattgccacag

SEQ ID NO: 9454 - DNA, 201 bp, Homo sapiens
gcttataagggttaaacatggtaatacctgtgaagcattaagactggcgcctggttggctgggcgcggtggctcgtgcctgtaatcccagcactttgggargccaaggcaggcagatcacgaggtcaggagttcgagaccagcctggccatatggtgaaaccctgtctctactaaaaatacaaaaaatagccaggcgtggt

SEQ ID NO: 9455 - DNA, 201 bp, Homo sapiens
aaggaatcagcacaagactgagagggcacagccagggtggtggaagggaaatggggagagtgcgtgtcctgggagccaagggcaggaagtgccccgaggargaaggggggtgagcaaaggctgcagcctggctaagaggaagcatgaggactgcccaccagatttggcaacccggaggtcactggcaacctgcaggacagt

SEQ ID NO: 9456 - DNA, 201 bp, Homo sapiens
gggaggccaaggcaggcagatcacgaggtcaggagttcgagaccagcctggccatatggtgaaaccctgtctctactaaaaatacaaaaaatagccaggcrtggtggcgcatgcctgtagtcccagctactcaagaggctgaggtagaagaattgcttgaacccgggaggcagaggttgcagtgagccgagatcgtgccac

SEQ ID NO: 9457 - DNA, 201 bp, Homo sapiens
taatgggatgtagcccctcccactgtgttaagtgcagcctgccctcagcaatgtgtgcgccatggcccctgccctcagaaggggcagaatcaaatccagamccctgtgataggagaggcttcatgagcggagcagctgggccttgcaggggacacctggctttccatcacggcatgctttcccaccactgtgttacagaag

SEQ ID NO: 9458 - DNA, 201 bp, Homo sapiens
caaggcaggcagatcacgaggtcaggagttcgagaccagcctggccatatggtgaaaccctgtctctactaaaaatacaaaaaatagccaggcgtggtggygcatgcctgtagtcccagctactcaagaggctgaggtagaagaattgcttgaacccgggaggcagaggttgcagtgagccgagatcgtgccactgcactc

SEQ ID NO: 9459 - DNA, 201 bp, Homo sapiens
agaggaaatgatatgtgtaaggtgcttggcgctggtaagaggttagcatgatgccagaccaaaatgggttattaatattaggttgatgcaaaagtaattgygggttttgccattccttttaatggcaaaaaccacaattacttttgtaccaacataataaatgtgactttaaaatcaaaaagctcatcattcagagataca

SEQ ID NO: 9460 - DNA, 201 bp, Homo sapiens; identical to SEQ ID NO: 1220

SEQ ID NO: 9461 - DNA, 201 bp, Homo sapiens
gtgtaaggtgcttggcgctggtaagaggttagcatgatgccagaccaaaatgggttattaatattaggttgatgcaaaagtaattgcgggttttgccattmcttttaatggcaaaaaccacaattacttttgtaccaacataataaatgtgactttaaaatcaaaaagctcatcattcagagatacaggcctggttgtcaa

SEQ ID NO: 9462 - DNA, 201 bp, Homo sapiens
tgtaaggtgcttggcgctggtaagaggttagcatgatgccagaccaaaatgggttattaatattaggttgatgcaaaagtaattgcgggttttgccattcmttttaatggcaaaaaccacaattacttttgtaccaacataataaatgtgactttaaaatcaaaaagctcatcattcagagatacaggcctggttgtcaaa

SEQ ID NO: 9463 - DNA, 201 bp, Homo sapiens
gtaaggtgcttggcgctggtaagaggttagcatgatgccagaccaaaatgggttattaatattaggttgatgcaaaagtaattgcgggttttgccattccwtttaatggcaaaaaccacaattacttttgtaccaacataataaatgtgactttaaaatcaaaaagctcatcattcagagatacaggcctggttgtcaaag

SEQ ID NO: 9464 - DNA, 201 bp, Homo sapiens
gtggcatagctagtagtatggagtcctctggggacctcctggggccagggcatgaactaagctggaggggatcttactggctcctgtcccttccttgctcrtacattccagtctctctgccaaccttaacagctgaatggggatgggatagagagctgcaatcaatgctagtccccatgcctggtatgagatgtgtctggg

SEQ ID NO: 9465 - DNA, 201 bp, Homo sapiens
tctgcggagtctgcagcagagaacagggagtacttggtgtgttgctcttgccaaagaattaaggaagtggagtgctttgcccattggcactgactccatcyaaataagtccctcagggagttgggatggtttcaggactcccaataaagcctggaggaggcagcttgccccaaccttccacgacagctattcctgaaacct

SEQ ID NO: 9466 - DNA, 201 bp, Homo sapiens
ggtaagaggttagcatgatgccagaccaaaatgggttattaatattaggttgatgcaaaagtaattgcgggttttgccattccttttaatggcaaaaaccrcaattacttttgtaccaacataataaatgtgactttaaaatcaaaaagctcatcattcagagatacaggcctggttgtcaaagcaagacctatgaagcct

SEQ ID NO: 9467 - DNA, 201 bp, Homo sapiens
gcagatggacggcacgtgtagtggtggctgcctctggaagccctcttctgcttgcttttcttctcaaggtcatcagttgacaatgaagttgggggaggggrcgttggtggtttggggagaggaagtgtgaaaactcccaggacagtgcaatggtgaagggttgagggaaccacagaatgattgctgggcttccgtttgaga

SEQ ID NO: 9468 - DNA, 201 bp, Homo sapiens
gggtgcaggaggtgaggaaggcctaacagcaagccaggtaggtagctgggaagagaacacccaggcagagagcccagtaagtgtgaaggccctgaggtagrgaaagcccagcatgtatgagagcttcagaggcctgtgtgattaccctggctgccgtgttgagaaaggtctgcaggggcacgggcagaagtcgggcattcg

SEQ ID NO: 9469 - DNA, 201 bp, Homo sapiens
aggcaggaggaggaggaaatgggaagctggccagggcaggaatcacctcctcagccctgttatctctgcttcctgcaaaagaagaatgctggtggccagasagaggggctctgagatgcctgtctgatgccgtctgggtgtatcctgggggctggctctgtcctccaacaggaagacccagatttctgcgggcacaaggtc

SEQ ID NO: 9470 - DNA, 201 bp, Homo sapiens
ctggtggccagagagaggggctctgagatgcctgtctgatgccgtctgggtgtatcctgggggctggctctgtcctccaacaggaagacccagatttctgygggcacaaggtcggccagtgcctgaagaacataactgtgcaggatggattaaagctgcagcaggaaccatttaggtggaagtaaattttcagctaccact

SEQ ID NO: 9471 - DNA, 201 bp, Homo sapiens
catgaaatccaaggaggggaaacatcagatgaccgaggggaatgtgggcagactttgtttctttcttacaacatccacctttaaaaagcatttagggggcrattgacagagcaggggctgctgcacatagtttccagtccctggccattccacacccatccctaacccaagcattttatggccaggactgcaaagagcatt

SEQ ID NO: 9472 - DNA, 201 bp, Homo sapiens
ggcctcctgtgattctccacgccccctccctccaccttgcccggccaggtccaaggactccaggcttgtctagcttggcaaagctttgttcttggtgttcrgctggacctgcaaacctcctagacaccagcatcacaacacagtcctggggcaattcccccgatccccaccccaacctcagagtgtcctggccagctgggg

SEQ ID NO: 9473 - DNA, 201 bp, Homo sapiens
caggtccaaggactccaggcttgtctagcttggcaaagctttgttcttggtgttcagctggacctgcaaacctcctagacaccagcatcacaacacagtcytggggcaattcccccgatccccaccccaacctcagagtgtcctggccagctggggccatggcttctggggaggatttcctgacttaggtgggatcttgtt

SEQ ID NO: 9474 - DNA, 201 bp, Homo sapiens
ggctatggaatagagcccccctgggaagtcagaaatccagaagccatcctggaacatcagccctggggggttcttgagagatttctgagagcaacacttcttttttttttttgagattgagtctcgctctgtcacccaggctggagcgcagtggcgagatctcggctcactgcaacctccgtctcctgggttcaagcaatt

SEQ ID NO: 9475 - DNA, 201 bp, Homo sapiens
ccactaggaagcatagcagcaaatctagggttcagccagtggcaaaggcttttgtatgagccttgatcccagatcctatttgatcactctgcctttgctgktcttctaccttactgtatactgtctgtctgtctgtttgtatcagctgcctgaatgctcccttttagagccagagaggggtaaaagatctgaagtaactaa

SEQ ID NO: 9476 - DNA, 201 bp, Homo sapiens
gaagtcagaaatccagaagccatcctggaacatcagccctggggggttcttgagagatttctgagagcaacacttcttttttttttttgagattgagtctygctctgtcacccaggctggagcgcagtggcgagatctcggctcactgcaacctccgtctcctgggttcaagcaattctcctacctcagcctcccaagtag

SEQ ID NO: 9477 - DNA, 201 bp, Homo sapiens
cgaggcacagagaggccaagtcacatgccccgggtcacacagctagaatgtgacagagatggagaggtgccccagtgtgtctgactccaaggctggggctsctagctaccatgctattctgtcctcatattggaactagactgtcagctccacattggcatgaggctaaactgcctaggagaaagacacatgaccccttcc

SEQ ID NO: 9478 - DNA, 201 bp, Homo sapiens
ctgtgtgcagtgctgggtcctgtgtgttcactagcaccctccaccccgtggctgggagcttgagaaaaccagcgaggctcccctcacatgtgcttccttarggaccaaaacaggggtgtgggtgatgaagccagcaagatatcgaggctgtgggaggaagggcttgttattttcccagagccctgaaccacggggctttaa

SEQ ID NO: 9479 - DNA, 201 bp, Homo sapiens
gggcccaagaaaactcaggaaagtttctatcaccaagggcagaacacgaacatcttgaggctaaaggagctgcatggttgctaccaacaaaggagaccgayggtgtgcagttgattcccatgtttttactgcacttcacccccaaattcccagcaaggtctaaggcttcgccaggaacccttgtcttcttgccaaaggcat

SEQ ID NO: 9480 - DNA, 201 bp, Homo sapiens
acttttcattctctgcctgccctgccctccatatccccctgccaccatccacacaccaatgggaatgccgctctggcccacagaggctcctctccctcccrgcatccatgtgacgtgtgtcataccgcaccgtggcaggctggggaaggggcacagggtcaccctgaaactgtggaatgcacctcctccccctgcaatccc

SEQ ID NO: 9481 - DNA, 201 bp, Homo sapiens
tgcctgagtccattgtaggacggcctcagagtataatcatgcttaggagatgctacgtattctctctccagtgattacaaacctcagcgagaggtggggtrggggtggtgtgagtctgggggccatggagcccacctgcaagcgtctccctccacccacgctcctttgaggggcctagctcccatgtttccatgactgtgc

SEQ ID NO: 9482 - DNA, 201 bp, Homo sapiens
agctgcttcctcgctttctctcctttgacctcccgctgtgtagcctcctgggaaatggccccattactggcatccaggtggccggggctctctgtctgggmccagctggccagttatcctgcctcagggcccctgagtgccatagtggaattatcctggcaccccacaagttacggcccatgcagggtgctggggccccat

SEQ ID NO: 9483 - DNA, 201 bp, Homo sapiens
acttattggcacatagtttctgtgggtcaggaattcaggcacatcctagttgggtcctctgcccatggtctcatgaggctgcaattaatgtctcagccaastgtattctcatctggagctagggatccccttccaagctactggtattggcagaatccagttccttgctggaacagaactcagctcctagaggccacctac

SEQ ID NO: 9484 - DNA, 201 bp, Homo sapiens
gtggagctctgtgtgccactgctgtccaagaaggcagcagctgtgacctggaaaggccacacttgggctccccatccccagctgggcgcattcgcagcccragcagctcctggttcttaacactcatcccaggagtctcgtgtgatttaagcgctttcaaaaacaagcagctgatgacagtatatgccatctttgttttca

SEQ ID NO: 9485 - DNA, 201 bp, Homo sapiens
gtttccctccctagagtataaacttcatgggagcagcctcagtctgctttgcataacaaggttcccaacattaacccctagaacattgtagatagtcaatrcccatttgtgaaaggcaggaaaggaggaaagaggtccccaacattcaccccaggacttctttgtggtggggggcccctgccttatcctgcaccaggccta

SEQ ID NO: 9486 - DNA, 201 bp, Homo sapiens
atcagggacctcggcatctgagcccctccccaatcctcccacctcactccctgcccttgctttccttttacactccacacacctgtgtttttctcagaagrtctgcccctctgtctcccactcatgaggtcctctcccctgcaagtctttttccatcttacctttctttcaaagcccttctcatctttcaagcccaattca

SEQ ID NO: 9487 - DNA, 201 bp, Homo sapiens
gcatagatttgggattccagctgaggggcagaccaagtttatttagaagagggtagaaaatcaggggccttctagagatctgttggctttccaaggggttrggttggggtggcaggtctcggggcctggaagacaccaagaaatccaggtggcccctcctccattccagcctgtggcttccccagggagggagaggagagg

SEQ ID NO: 9488 - DNA, 201 bp, Homo sapiens
tgcttctggagtccagctacatggtggcacgctgtcaaggctaggagcacagactctggaaccagattgctgggttcaagaccagctctgccagttactgsctatgtgaccttgggcaagttattcaagctctctgtgccttaggttatacctctgtaaaataagggtaatgataataagagtacttttatgagggttgtt

SEQ ID NO: 9489 - DNA, 201 bp, Homo sapiens
gggtggggtgggggcagggctctctgcccctcagcccaacataaggaaagggaagagcacagtgacagaaggctgcagaatacccctggccacagggtgcrgtgaagcctgacctcatgacagtggcactctggggaacatgtcaagcgtggggtgggggcatagatttgggattccagctgaggggcagaccaagtttat

SEQ ID NO: 9490 - DNA, 201 bp, Homo sapiens
ctgcggctggacctggcaggccctgagaatgagagagagagagagagagagagagagagagacagagagtctgtgtggcccagtgcctggagctccctgtrcagtgaaacccagacccccttacccgggtcccaagcagtgctcaaggggctgaggggcagtgatgaagctcacggtgagatgtcaacaaaagtctccgtg

SEQ ID NO: 9491 - DNA, 201 bp, Homo sapiens
ctcaggaagctggaaggcaggcctgaggtctgggttcctgggccagggaaccactgtgagcctggtacgtgagaggctgggatgggtttaaggctacggcsgtgctgggcccgggctgaggaaggcaggccagcagcagcacagtcagagccacagcctgtcagcggcatgtgctccagggatgcaggggccctgctgttc

SEQ ID NO: 9492 - DNA, 201 bp, Homo sapiens
gggtggggatttcaggctgagatggttcctctgcccacccccgcctgctccttccttttccttgctccaccccaagacacagaacccaaaagactgctgtygtcctgttaggaatcttcaaacttgtgtcccagcagcagggtcgatcttgggacaggggagagcaagatacgcacagcttcctccagtaggagccccagt

SEQ ID NO: 9493 - DNA, 201 bp, Homo sapiens
caaggacgatcacacaaagtgagagggatgggagcaaagatgaactggaggcctagggattggctctgtctcctccttgctcaatctcatgtgtctcttgttttttttttttcagggtcaaccaggaactagaggtttccctggatttccggtaagtggagaaggctgaagttagctgtgtcccaggtggtctgtaggcct

SEQ ID NO: 9494 - DNA, 201 bp, Homo sapiens
gggatgtatctttctctgaaggaatatagggaaatatttgccagcagctgccaggccttgctgaatatgatccttgctgaaatagtagctaacacttactrtgtgttagacactgttatgtttttatggaggcagtgtaacatagtgattatgagcatgggctctggggccagaccaactgcaatcaaatcctggcactgc

SEQ ID NO: 9495 - DNA, 201 bp, Homo sapiens
ggactgactgcagcaattcaaggataaaatctctccttggcctctttaaaaacagaggaaacccttctccaagcagggtggggatttcaggctgagatggktcctctgcccacccccgcctgctccttccttttccttgctccaccccaagacacagaacccaaaagactgctgttgtcctgttaggaatcttcaaacttg

SEQ ID NO: 9496 - DNA, 201 bp, Homo sapiens
gcctcccagttggtagaaaggggtcaattatggttattttcaaacttcagttttaattgacagaaccaggaaagcccccgaggtgccgcataatagattcrgttgacaccgctccaggggacatccttttcttggagtgaggggtcctcctggaggctggtccgggtgacatcctttccaggggtcctcctggagcctggc

SEQ ID NO: 9497 - DNA, 201 bp, Homo sapiens
ccagatgctgtcccctccactggcgtcccactggggcactggcactcaccctcattgtttaacctgtgtcctcacctctcaaaagggagtcacctctgccycacccccccacttcacattattcccaagaacctgaaataaggtgttgaagtgttgggaggacacagttgtataatagtgtagttggggggtggacaagat

SEQ ID NO: 9498 - DNA, 201 bp, Homo sapiens
ctcactctgtcacccaggctggagtgcagtggcacaatctcagctcactgcaacctctgcctcctgggttcaagcgattctcctgcctcagcctcccgagyagctaggattacaggctagtgccaccacaccaggctaatttttgtatttttagtagagatggggttttgccatgttggccaggctggtctcgaactcctg

SEQ ID NO: 9499 - DNA, 201 bp, Homo sapiens
tctggttcagtgggcttcactgcagcctgggaggcaggaggtggaatgtgctagtgtctcccagaggcttgatgcatgtgaggtagggggtcccatggagsagaaaactccctgacctctaggtagagcccctccatagctggcccatgagatgctggtggttggaggaatggatgaaagatgccatctgttcttcatcac

SEQ ID NO: 9500 - DNA, 201 bp, Homo sapiens
ggcttcagggccttaggacaggcaagaggccccccaccttggctctgagtaggttgcaggtcaactatcagctggccccacctggtaccagcacatctggyaggtggcagcagtggaggcagctgcaaatggaaactgccctcactttccttttgctgcttgaaaagtgcaatggtaagatttgggttccccaaagcagat

SEQ ID NO: 9501 - DNA, 201 bp, Homo sapiens
ccacttctcccttccagtgatgctcttgggagtttcccagtttggaggtggccctgttggcaagcggggagcaggaacaaggctctggcacatcacagcawgctgcggccacctcccagatggacccacccttggggatctgcagtgcttcaggccccaaagagactggtggctcaaagggacctgcttatggctctagcc

SEQ ID NO: 9502 - DNA, 201 bp, Homo sapiens
acctggtccttttcctactgtcaacagcaggccaaggatgttttaaggcaggggtctcgctatccagcctgtgtgttaagaagcttaactggacacttgcrtggaagacccatcacggaggaagagggtggaagtcctctagccttggtaaggagaaggatggacgaggacctcctgtaagatggcaggaaagggagagtg

SEQ ID NO: 9503 - DNA, 201 bp, Homo sapiens
cccctctctcgtgagcccacatcagtgggatagatcccctgtctgcctcatcaaatccagcaggccacagagcatctgattcctgtttggcttggcatggstacccgagctgttagttgcccaccgctgtccagcatcattaccttgccctgctcttcatctgtctgtctcctgccccagatgctgtcccctccactggcg

SEQ ID NO: 9504 - DNA, 201 bp, Homo sapiens
agctagggactatggagctggacagtagagagaaagaacttgtacatcctcgcagaaagttctattggccagcgctgtgctacgagcagcttccgggcctscaaagcaacttgaggggaccatcctgggcctttccctgtgtaggtgtgttctcccaggtctgagcaaaggtctgagcaaagggcagaggagagcaatggg

SEQ ID NO: 9505 - DNA, 201 bp, Homo sapiens; identical to SEQ ID NO: 1223

SEQ ID NO: 9506 - DNA, 201 bp, Homo sapiens
ctcccagagttcctaccaacaatgagttttcattgattcacactggccttggcatttgccattgttagagcagtctgacatcataggactgtgcccttgcrtgtgatcgccccattcaaccatggctccccagagcacagggctgcccaggcagacagaggccatctgcttgctaactaatccagaagacccgccttggtc

SEQ ID NO: 9507 - DNA, 201 bp, Homo sapiens
ctatagctgcatgtgacctttaaccaatggtaaaatagccggatttgtttccacctccttctgaggttctgacctgtagtagagaaaagaaatagacaagygtgggtgggccacatcctgatcagctgccaaaatgcgtgtggcccttgttacccctgtcctgcccacttggtggaccattgcaggaagtctgagccctct

SEQ ID NO: 9508 - DNA, 201 bp, Homo sapiens
ctaacccactctcatgataactaacccacccccacaataactaacccactctcacaataactaaaccactcccatgataactaacccactcctgcaatcayaaacccacacccatgataactaacccactcccacaataactaacccactcttacaataactaattcactcccacaataactaacccgtgataactatccc

SEQ ID NO: 9509 - DNA, 201 bp, Homo sapiens
gtgagcagccggcactccatagggccacagcagagactgtttcttcgtggcacggaaggacatctctgcttgctggtcccacgggctaggacagcccctaytgacgttgcactatagctgcatgtgacctttaaccaatggtaaaatagccggatttgtttccacctccttctgaggttctgacctgtagtagagaaaaga

SEQ ID NO: 9510 - DNA, 201 bp, Homo sapiens
ggccaaacgagccctcggtgtgaatccggagaaagagagggaagtgcagcgccagctccactccacacccccttcctgcctataaataaccccaagtgtcmcttcaaagaggacggggagcgcggcagaggggctcccgggccggcgggctggggccgccggacctgctcaccacgccccccaccctgggcgagtttgcat

SEQ ID NO: 9511 - DNA, 201 bp, Homo sapiens
actaccaccaagtttaacttctaaggtagaggatgggaggagagatcatgaagttctctgactactgaaatttcaattcacctaatattttttcatggctrtgagccacagaacacacttagggatggcacaaactcacaatcaaacaccacttctgtgacgtcccaatcccagaaattgctatcaacgacatggttctgg

SEQ ID NO: 9512 - DNA, 201 bp, Homo sapiens
agttagccaggcatggtggcgggtgcctataatcccagctactcagtaggctgaggaacgagaatcacttgaacccgggaggcggaggttgcagtgagtcragactgcaccactgcactccagcctgggtgacagagtgagactctgtcttaataataataatgtgaaatagctattggaaataaaaccttcccagaaaca

SEQ ID NO: 9513 - DNA, 201 bp, Homo sapiens
gctcgctggcactcagcctgctcgcccactttcggacggccgagctgcaggcccgggtgctgcgcctggaagcggagcgcggggagcagcaaatggagacrgctattttgggacgagtcaatcaactgctggacgaggtctgtgctctttgttgctggcttttatccctccccgcggcgccccctcgcgcagcctccagac

SEQ ID NO: 9514 - DNA, 201 bp, Homo sapiens
cagggattcggaggacctggtgggcaagagcatgacccagcgactcccgcctcgggcaagcgcccccggcttccagcgctgggagcgccctgggcacgccrggcaggtggaggaaggctgggcgcgcggaggctcgcggaggcgggcaagctccactcctccctttcgggacccggccagggtggtgtgacagccgccccg

SEQ ID NO: 9515 - DNA, 201 bp, Homo sapiens
tgccacctttttttttttttggcctattctcattcattcattcagaaaatgtttactgagagcctgctgcgggtcaggcattgtgggagacacttttgccytcctaaacttacatacagggaagtagtgcacaaagaagaaaatgggcagtgaccatgtcgtgtgcaaaaaaaaaaaaaaaaaaaagctacaatagtgaaa

SEQ ID NO: 9516 - DNA, 201 bp, Homo sapiens
ctgcgggtcaggcattgtgggagacacttttgccttcctaaacttacatacagggaagtagtgcacaaagaagaaaatgggcagtgaccatgtcgtgtgcaaaaaaaaaaaaaaaaaaaagctacaatagtgaaaaaagagaggggcctggggaatgcattacatgcaacattgtctgatggtggtggcagtcatggcagg

SEQ ID NO: 9517 - DNA, 201 bp, Homo sapiens
tcgccaagaagtgaagccagcaagcccagagccctggggaaagcgccttgccttggaggaggaaagaggtggagaagctgcccctggacagagggtcgccrgccgaatccttccagggggtacctggtttgaggggatgatcaaagtgtattgtgacctcaggagtgcaaggatgggcctctgtcctctccaagggctaga

SEQ ID NO: 9518 - DNA, 201 bp, Homo sapiens
ggtggggttggtggttgcggggttgggaggagtgagcggtcctccttctcatcacaccatggggaggctgtccactgccccccgccccctgctgccccctygctgcagaatgtcttcagacctttttttttctctctctgccagggggcgcccggaattgccgtggctgggatgaaggtcagtggactgttgtaaccaaca

SEQ ID NO: 9519 - DNA, 201 bp, Homo sapiens
ctgaggacaggggcccacacagctgccaccagggcagggtcctcagagctcaacatgaaccggacagccatcccagcctccagacaagacattctcaccgwcatccttgcaggctgacaggccccgagtctggtcctctcctcatgctttctcatttcttcctccagggagaacggggcatgccagggatgccaggcaagc

SEQ ID NO: 9520 - DNA, 201 bp, Homo sapiens
cctaattcaccccccgatccagccagttccgcaggcctgtgagtggggcgagaaggccccggccagagactgaggccagggctgtgggtctgcggtgggcyggtggggtgggtgttggctgaacaaccctctctcgtctgcccctgtgtgtgcatccgcatccatctctgtggcatgaagaccctcccgctgcatgtggag

SEQ ID NO: 9521 - DNA, 201 bp, Homo sapiens
gccctcattctgccacaccgtccctctgccccacacacttgaccgcctgtccagggatcagagctaactcaacagaaaaggcaggcccaccccctctctcrtgagcccacatcagtgggatagatcccctgtctgcctcatcaaatccagcaggccacagagcatctgattcctgtttggcttggcatgggtacccgagct

SEQ ID NO: 9522 - DNA, 201 bp, Homo sapiens
acactgcagctagggactatggagctggacagtagagagaaagaacttgtacatcctcgcagaaagttctattggccagcgctgtgctacgagcagcttcygggcctgcaaagcaacttgaggggaccatcctgggcctttccctgtgtaggtgtgttctcccaggtctgagcaaaggtctgagcaaagggcagaggagag

SEQ ID NO: 9523 - DNA, 201 bp, Homo sapiens
actgctgctgtcagctcattcccacgccctgccaggctccagggaatccggagaactccatcgggccgtccatggttccctgggcctggggtggaggtgcrgcatctctgggctcaggcagaatgagcccagactggctgggtggtgaagaaggtgtcagggcagtgagagctcctccaggtatctcgggggtcctggctg

SEQ ID NO: 9524 - DNA, 201 bp, Homo sapiens
gcagctgctagtgaggcccagcgaggggcagtgagcaaatgaccttgccttagggactgggtgaaggagtgcacaagccagaaggtgcagatggagcacargggacagggaggagcacggggggcagggaggagcacagggggcagggaggagcatgaaggacagagggtggaacttctgggctgcgaacagtgcacctgg

SEQ ID NO: 9525 - DNA, 201 bp, Homo sapiens
tgtgctgagtggcttacccgtgagcagccggcactccatagggccacagcagagactgtttcttcgtggcacggaaggacatctctgcttgctggtcccaygggctaggacagcccctattgacgttgcactatagctgcatgtgacctttaaccaatggtaaaatagccggatttgtttccacctccttctgaggttctg

SEQ ID NO: 9526 - DNA, 201 bp, Homo sapiens
tctgacaggcagagcagagggagcagttccccctttctcccaacctcaatgcaggccagcccctgatttctaggaacacaccacctactctgcactcaggrcaagggtgaggtccttgacattaatggggaggccacccattgggttctctcttgcgctgtgcacctggcatccaacattctattattctcaaccccattt

SEQ ID NO: 9527 - DNA, 201 bp, Homo sapiens
tttccctgcctcagcctcctgagtagttggaactacaggcatgcgccaccacgcccggctaattttttgtattttagtagagacagggtttcaccatattrgccaggctggtttcaaactcctgacctcaagtgatcctcctgcctcggctcccaaagtgctggaattacagacatgagccaccgcacctggcccagagat

SEQ ID NO: 9528 - DNA, 201 bp, Homo sapiens
gctttgagaggagatccagcgagggggaggcagaggggtggccatctgggtgtccttgacctctgcttatggggcctaaggcaggttctgacaggcagagmagagggagcagttccccctttctcccaacctcaatgcaggccagcccctgatttctaggaacacaccacctactctgcactcaggacaagggtgaggtcc

SEQ ID NO: 9529 - DNA, 201 bp, Homo sapiens
ctgtcgccaggctggagtgcaatggcgcgatctcagctcattgcaaactccgcctcccgggttcaagtgatttccctgcctcagcctcctgagtagttggractacaggcatgcgccaccacgcccggctaattttttgtattttagtagagacagggtttcaccatattggccaggctggtttcaaactcctgacctcaa

SEQ ID NO: 9530 - DNA, 201 bp, Homo sapiens
aaacctctgaagacagtcttggccctgggggcaggaggtcgggcaggaaggctctagaattggccctggtgtgagcccagtgggcaagggaaggggagatgggggggggcagggagaggggcccaccctgcaagccccaggaggagccaggcagacccaggctgggctgtctctgcctgccccagacaagcaccaaagagc

SEQ ID NO: 9531 - DNA, 201 bp, Homo sapiens
tgggagaacaccctgcagctcagcctgtgcctgagctttgagaggagatccagcgagggggaggcagaggggtggccatctgggtgtccttgacctctgcytatggggcctaaggcaggttctgacaggcagagcagagggagcagttccccctttctcccaacctcaatgcaggccagcccctgatttctaggaacacac

SEQ ID NO: 9532 - DNA, 201 bp, Homo sapiens
tgctctgtcgccaggctggagtgcaatggcgcgatctcagctcattgcaaactccgcctcccgggttcaagtgatttccctgcctcagcctcctgagtagytggaactacaggcatgcgccaccacgcccggctaattttttgtattttagtagagacagggtttcaccatattggccaggctggtttcaaactcctgacc

SEQ ID NO: 9533 - DNA, 201 bp, Homo sapiens
aacctctgaagacagtcttggccctgggggcaggaggtcgggcaggaaggctctagaattggccctggtgtgagcccagtgggcaagggaaggggagatgggggggggcagggagaggggcccaccctgcaagccccaggaggagccaggcagacccaggctgggctgtctctgcctgccccagacaagcaccaaagagcc

SEQ ID NO: 9534 - DNA, 201 bp, Homo sapiens
gatgggagcaaagatgaactggaggcctagggattggctctgtctcctccttgctcaatctcatgtgtctcttgttttttttttttcagggtcaaccaggmactagaggtttccctggatttccggtaagtggagaaggctgaagttagctgtgtcccaggtggtctgtaggcctgattgggttaaacttcatctgaggtc

SEQ ID NO: 9535 - DNA, 201 bp, Homo sapiens
acattatagcaactggcatcttcaaggacaaggccagcagtagggtctctctagtgtctagtgctagcaagacagagctgtgtgcacgtgtgtttgtgtgytcatgtaacatatttgtaacataatcttaatatatgttatatgtcaccatctgtatgacatgtatgttataatctgcaacataatcatagaagtgaggtc

SEQ ID NO: 9536 - DNA, 201 bp, Homo sapiens
caacccactaaccacagtgagtgtcccccaaggacgatcacacaaagtgagagggatgggagcaaagatgaactggaggcctagggattggctctgtctcytccttgctcaatctcatgtgtctcttgttttttttttttcagggtcaaccaggaactagaggtttccctggatttccggtaagtggagaaggctgaagtt

SEQ ID NO: 9537 - DNA, 201 bp, Homo sapiens
ctgatcctctggactgctccagtcttcccaaaccacatctctcagcaaccttcacagagcacctcccatgcttccatcctggtgctagagtctggagataygaaaataaacagaacttgccgggcacggtggctcacgcctgtaatcctagcaatttgggaggctgaggcaggcggatcacctgaggtcgggagtttgaga

SEQ ID NO: 9538 - DNA, 201 bp, Homo sapiens
ttctgatatccaagccatccttagataagtggccatgagcaatgactgtgtaaataaaaaagggcttagaggatcgccgtccaggagttccatgtgctgcrggctgagtctccgctggccccactgtcccatgcgtttgtttacaagccatgcatccacagcggtgaggagctctccaggagccacttcccagaagtagac

SEQ ID NO: 9539 - DNA, 201 bp, Homo sapiens; identical to SEQ ID NO: 1224

SEQ ID NO: 9540 - DNA, 201 bp, Homo sapiens
tgcgggtcaggcattgtgggagacacttttgccttcctaaacttacatacagggaagtagtgcacaaagaagaaaatgggcagtgaccatgtcgtgtgcaaaaaaaaaaaaaaaaaaaagctacaatagtgaaaaaagagaggggcctggggaatgcattacatgcaacattgtctgatggtggtggcagtcatggcaggc

SEQ ID NO: 9541 - DNA, 201 bp, Homo sapiens
ccttgggaactcccctctgcctagagcattcctggcccccacaagcgcatcctcagaactgacccctcacctgcggtagtgacctcgggaaaacccagccrcaggccaggacctgggctggagaggtgagaaaaccagaactgtgtttttttgttttttgttttttgttttgagacggagtctcactctgtcgccaggctg

SEQ ID NO: 9542 - DNA, 201 bp, Homo sapiens
atggtgaaaccccatctctactaaaaatacaaaattagccaggagtggtggcaggtgcctataatcccagctattcgggaggctgaggcaggagaatcacktgaacccaggaggcagaggttacagtgagccaggattgtgccactgcactccagcctgggcaacagagtgagactctgcctcaaaaaaaaaaaaaaaaaa

SEQ ID NO: 9543 - DNA, 201 bp, Homo sapiens
gaaaacacacattttgaaggtcaggttctgatatccaagccatccttagataagtggccatgagcaatgactgtgtaaataaaaaagggcttagaggatcrccgtccaggagttccatgtgctgcgggctgagtctccgctggccccactgtcccatgcgtttgtttacaagccatgcatccacagcggtgaggagctctc

SEQ ID NO: 9544 - DNA, 201 bp, Homo sapiens
gcgggtcaggcattgtgggagacacttttgccttcctaaacttacatacagggaagtagtgcacaaagaagaaaatgggcagtgaccatgtcgtgtgcaaaaaaaaaaaaaaaaaaaagctacaatagtgaaaaaagagaggggcctggggaatgcattacatgcaacattgtctgatggtggtggcagtcatggcaggct

SEQ ID NO: 9545 - DNA, 201 bp, Homo sapiens
cattagaaacactctaaattttatcaagaaggaaaggattaaataacttatagtaataatactaatagtaataatagtcaccacgtctgagcacttccctygtgccaagcaccgcactaagccctgggtatgtaacaactcattttcactccacccagtgaatagcacagcaccgttaccaggaagctggtggcgaacata

SEQ ID NO: 9546 - DNA, 201 bp, Homo sapiens
ttaattctagcccaggactttgcacataatacgcagctctcacaaattagctgttgatgtaaggtccccctgttagaggctggggaaggtttattagtcarctctcctcgcagcgtccccggccctggacccagcaataggctcagcatttgctcagggggtgtttctcagcaaccagcagaggatgagatgattgacttc

SEQ ID NO: 9547 - DNA, 201 bp, Homo sapiens
ttttcactccacccagtgaatagcacagcaccgttaccaggaagctggtggcgaacatataaaaaatggaaacatcagtttcacagtaagtgaaaaagagwtgaaaacgaaattttatacatatatgaaatcataagcatatacatatatgtatatacaattctacacatattatatgtaaatatcaaaagtatatacata

SEQ ID NO: 9548 - DNA, 201 bp, Homo sapiens
tacctgctgcagatgtctgtgggtagggcctggctgtaagtgtctaacgagctcctcgggtgatcgtgttctgcggctggacctggcaggccctgagaatragagagagagagagagagagagagagagagacagagagtctgtgtggcccagtgcctggagctccctgtgcagtgaaacccagacccccttacccgggtc

SEQ ID NO: 9549 - DNA, 201 bp, Homo sapiens
aaaagactggctcagactattccctaggaagccccaagcatgacccccacttagcatttctttctacctctcatgggcagggaccccaaaccatactctgyacccaaaacccttgttcttctgtgatccatttgtggactaggcagttgtgttaactagagatgcagttctaatgcaccttgctttattccaaatgcaggg

SEQ ID NO: 9550 - DNA, 201 bp, Homo sapiens
gctgtaagtgtctaacgagctcctcgggtgatcgtgttctgcggctggacctggcaggccctgagaatgagagagagagagagagagagagagagagagasagagagtctgtgtggcccagtgcctggagctccctgtgcagtgaaacccagacccccttacccgggtcccaagcagtgctcaaggggctgaggggcagtg

SEQ ID NO: 9551 - DNA, 201 bp, Homo sapiens
cttagggcaagaacagctgtaggggttgtttctcacattggtgtcgacacagaggatgtatcagagagaaagcaataaagcactggccacctgacacacgygggaatccccaagccccaacacacattcagggacaccgcactggcatggggaggcccacctccctccctcctctcaggcccactgtgtctctcccattca

SEQ ID NO: 9552 - DNA, 201 bp, Homo sapiens
aagcttcccatctgtcaccccacaaagggacaggttagattcttagccaatggttaaaatccttttcccatcaaacctgccctggccccttcactcatgcygagtagaggtgggagagagacagcaacatagggtgggacccctccctgggtcaagcttggggggactctgcactgggctctcccggcctcccctgaacca

SEQ ID NO: 9553 - DNA, 201 bp, Homo sapiens
gtgtctaacgagctcctcgggtgatcgtgttctgcggctggacctggcaggccctgagaatgagagagagagagagagagagagagagagagacagagagwctgtgtggcccagtgcctggagctccctgtgcagtgaaacccagacccccttacccgggtcccaagcagtgctcaaggggctgaggggcagtgatgaagc

SEQ ID NO: 9554 - DNA, 201 bp, Homo sapiens
acatagggtgggacccctccctgggtcaagcttggggggactctgcactgggctctcccggcctcccctgaaccatttcaaatggatgagggggctggggkctgttgatgtgacaatggccctttcctcatgccctggtattcaagagacttcggggcagtttgttctcccgactaggctgtgagcctcagggctctggag

SEQ ID NO: 9555 - DNA, 201 bp, Homo sapiens
caaaagtctccgtgtgcactgggaggtttgaagaagggcaagcagcaggctttttgctgttgttttccaaaaacaaaatcaactgaggtttgccctccagraagcctcagaagtccttctcccacctctttgggttgggttctgcccctcccagaaacagtctattgagccctcagtcagagggaaatcagcaggcttctc

SEQ ID NO: 9556 - DNA, 201 bp, Homo sapiens
aaggagctgcatggttgctaccaacaaaggagaccgacggtgtgcagttgattcccatgtttttactgcacttcacccccaaattcccagcaaggtctaasgcttcgccaggaacccttgtcttcttgccaaaggcatgtcagggccatcctgcaatactcatgaggttgcctgtcccttcatgcccctcaccccacccca

SEQ ID NO: 9557 - DNA, 201 bp, Homo sapiens
agcagccttggtcctcaagcttacacacctcagtgacggggagctcactaccttatattgctgactgttccctggtaggacatctctggctcttaatgtcrtcagaggcccagccaatctctacacccaccaacccacaactccagcatgtcttgaaagcacctcaaactctacgtgtctaaactgagcaggaaatccacc

SEQ ID NO: 9558 - DNA, 201 bp, Homo sapiens
tagttctgccagcagctgccttggcctctctgttcctcaccatacattacttttcattctctgcctgccctgccctccatatccccctgccaccatccacrcaccaatgggaatgccgctctggcccacagaggctcctctccctcccggcatccatgtgacgtgtgtcataccgcaccgtggcaggctggggaaggggca

SEQ ID NO: 9559 - DNA, 201 bp, Homo sapiens
ttccattattaagcatttaatgtgcacaaagaactcacaacatttttttttcagacagggtcttgctttgttgcccaggctgaagtgtagtggtgcaatcwtggttgactgctgcctcaaactcttgtccttggctcaagtgatctttctgcctcaaactcctgagtagctaggactacagggacatgccaccacacccga

SEQ ID NO: 9560 - DNA, 201 bp, Homo sapiens
gtcaaaagataaagggtggcatgaatctggcaatataatcattcaggaaaattggatgttactgtggagctgcctgcaaaccagccagctgaaaaggtctrtgtgcatgcagtgaggctgcttctgctctctgagatgcccaactttgggggggtggggggtgcacgcatgtttgtgtgtgtgtgtgtgtgcgtgtgtttg

SEQ ID NO: 9561 - DNA, 201 bp, Homo sapiens
acacggtctccagaacccaggtcttgtggctgatctttgcacactgataccatgttcatgcacagaaagtgccagaatgcctatgctcctatctggcaacrgtgaattccatctcttcaactcaagatctatttactgagcactcccattttcctaagtgctcttcactggcagctggtcaaaagcaactcagtttgtccc

SEQ ID NO: 9562 - DNA, 201 bp, Homo sapiens
aaccttacaggtatgcttctccatgtcccatcaaaggatggtctcagagcctctttcctgttcatggaaggaaagtccttgtcatggtgggcaaaggcccrgagccccagaccaggagctttctaagggacacacacgccagtggaaagaatatcctgaccttgtcactaagggtgcttccctttcccctaagtagctctg

SEQ ID NO: 9563 - DNA, 201 bp, Homo sapiens
gaaagagtcggcagggctctgaaaggactgcgccttctcagacccttgctgtccctttggtttctgccatcttcaccaggacacacttaccaaatgcccayggcacccacagccacataacagggggtggcaccgaccacagccttcagcatttgggcccagcagggagaatttaactacatctgaccaagagatggcctt

SEQ ID NO: 9564 - DNA, 201 bp, Homo sapiens
gatggagttcacactgtaaacccttacatgcagagagcatgccctggcttccaggagttattatggctttgctccttcgccacagtccctccctctccatycttccccacctagcaaacctgtctcaggtgcgggcagggctcggggatgatctgtggttgcaatcagagaaaccaagactttcctctcaatggcttctcc

SEQ ID NO: 9565 - DNA, 201 bp, Homo sapiens
gtccttcttcctgatctcaccttactgtcatagacttggcatttttctggagaagtaaagatgttgaacataaagatagggcagtgccacgatggtagagygaccccatgctgtcccagaggagcaacaatggacaggtgaccctacctgtgcctctggacaagtagggtcagaaatggggtgcagataaatgggcaggga

SEQ ID NO: 9566 - DNA, 201 bp, Homo sapiens
gaaaacaggcatcatttactattgactagaaagcacctggcccttctgcttatgactaacaactgaaggatcagaggaaaattccctcctgtccacctccrgtccctcccgtgagcgccctctgaggtcaaccttcccagggtattgagctcactcgccctcaagtctcgagtccctgctcggacaccatcacgagagctc

SEQ ID NO: 9567 - DNA, 201 bp, Homo sapiens
gtgagcagctcagaaggacccagcagtggctgcctgtggatgaaaggatgtgtgtgttcatcagagacagaagctgcaatgggcaccaccctctgtagagkaggcagccctgagctcctccatcttcactgtccagtcagaatctcctctagcacaatctgcatctgctctcaagggaaacagagaccagcagtccccatc

SEQ ID NO: 9568 - DNA, 201 bp, Homo sapiens
tatatgtatatacaattctacacatattatatgtaaatatcaaaagtatatacatatattcaagcacatctgatacatcaagaaaatgtttaaattttctytttaaagaaaattttaaaaattctttttattctttttattatttttaaaattaccacccaggtaaaattgacttcttctggaatgtgtccagttctgtga

SEQ ID NO: 9569 - DNA, 201 bp, Homo sapiens
ggctgtcgagtgaggagcgccaggcactcagaacatgcttggcacccgagaagcagacaggcgccttagctatgcctcagtggcggttagcacaggcctgstggcaagtgctaagcacatcaccggtggccatggcccttaaaggggcaggtgctgcctggctgaagataactggtaccatgtgttgttggacctcgacat

SEQ ID NO: 9570 - DNA, 201 bp, Homo sapiens
cttccctcgtgccaagcaccgcactaagccctgggtatgtaacaactcattttcactccacccagtgaatagcacagcaccgttaccaggaagctggtggmgaacatataaaaaatggaaacatcagtttcacagtaagtgaaaaagagttgaaaacgaaattttatacatatatgaaatcataagcatatacatatatgt

SEQ ID NO: 9571 - DNA, 201 bp, Homo sapiens
taaagggacctcgcggtaaaccaggagacatgggccctcctggtccccaaggccccccaggaaaggatggacctccaggagtgaagggagaaaacgggcasccagggagcccaggagagaagggggaaaaaggggagacaggacaagcaggctcaccggtgagtggcagggctggctgcccttccgtgcatacaccactcc

SEQ ID NO: 9572 - DNA, 201 bp, Homo sapiens
tgttgcttggtttactttagcagcactgagaaatgaagggggtctgtttcttagctcagaaggaaagcatgaattactctacatcatctggggcaatacaytcattcattccgcccatatccacctgccatgggctgggctctgtgtgggcctaggagggcctggcagggcagagtggacaccagtaaagggtacagaatg

SEQ ID NO: 9573 - DNA, 201 bp, Homo sapiens
ccaatacagctgtgctctctggtgacaatacaaatgctggattctatttacagctgcgtgaaggaaatagcagtactgaggaggatgtttttaatgtttcycttttttcccaacttttagctaattaaatcctgaaaaactagtagcaacctaccacgtatccccctttcctggaaatcagtttcattatctgcacttgga

SEQ ID NO: 9574 - DNA, 201 bp, Homo sapiens
gcacaggtccccagctgctgagcttggctttcgaagtccaggcgagagccatccctagaatgggtgattctgggtggggtgggggtgagatcaggaggcartgaggagagtggagggtacggaggtcaaatagctggtctgaagagcctggccactcatgcacacgcttgcccctgctccccagcacctgtgtctcccatg

SEQ ID NO: 9575 - DNA, 201 bp, Homo sapiens
ccacttggagggacacctttctgacaccacaggctctcagtctatgaagtttgctaatgtccaccaccacccccagcagctggactgggcctggtatcctmttaaaagccagccagacccgcaaggcaggcttctccatcagttccttgagatcaaagcccagtgtggccagcagcccctgtgctgcccccatgccccagt

SEQ ID NO: 9576 - DNA, 201 bp, Homo sapiens
tagtgggaagtggagggggccatttgagtcacccctgaccccagtggccttccccagggcacaggtccccagctgctgagcttggctttcgaagtccaggygagagccatccctagaatgggtgattctgggtggggtgggggtgagatcaggaggcagtgaggagagtggagggtacggaggtcaaatagctggtctgaa

SEQ ID NO: 9577 - DNA, 201 bp, Homo sapiens
cctgtccagagcagggtggattgggactgtccatctactggtcactgttgttacaagggacccttggccgcctaaccagcctcctctgcatcactgacccrtgctccgttcttccagaggtgtgtgtcctgccttctggcctcctgtgattctccacgccccctccctccaccttgcccggccaggtccaaggactccagg

SEQ ID NO: 9578 - DNA, 201 bp, Homo sapiens
taaaatcaaaaagctcatcattcagagatacaggcctggttgtcaaagcaagacctatgaagcctgcagcccctcccaggcctctgaggggtggcattcgrcatgagtctgacctgagctgtgacccttccccagcccctcttctctgctcctccggcagtcgccgggcagggcactggccagcagagccatgatgtgacg

SEQ ID NO: 9579 - DNA, 201 bp, Homo sapiens
agaggatatgagggcccaagaaaactcaggaaagtttctatcaccaagggcagaacacgaacatcttgaggctaaaggagctgcatggttgctaccaacaraggagaccgacggtgtgcagttgattcccatgtttttactgcacttcacccccaaattcccagcaaggtctaaggcttcgccaggaacccttgtcttctt

SEQ ID NO: 9580 - DNA, 201 bp, Homo sapiens
gacctttgcccttggcccagcctcgccttccccactgggtctctagatttctagattccccatagggtatgccagcaaggagaggatatgagggcccaagmaaactcaggaaagtttctatcaccaagggcagaacacgaacatcttgaggctaaaggagctgcatggttgctaccaacaaaggagaccgacggtgtgcag

SEQ ID NO: 9581 - DNA, 201 bp, Homo sapiens
ccggaaccccatgtcctgtgttctcactgacacctcttctcctttccctcctgctgcttccccctactacctgcccttcccaacccattctgaatgctccstccttgcccctgtgccctctgtgttgactctgctgatcccctcgtggccctccacgtcccctggcatccctctcctgtcccatggggccggcctcctgct

SEQ ID NO: 9582 - DNA, 201 bp, Homo sapiens
aaggagagaaaggcttccagggagaaaaaggagaccgtggtcccctgggactacccgtaagtaccttggacccagcaagactggtgggtttgatgggccasgggtgtgggctgggactgggggacagccagcggaaagctaaggttctagagtctgagcatccagagttccatgtggtttgtctttcccacctgggcaaga

SEQ ID NO: 9583 - DNA, 201 bp, Homo sapiens
caactgctaggagaagcctgctggctagagtgagaggaacaggagcaatctgactagtctagcctgaaaacacacattttgaaggtcaggttctgatatcyaagccatccttagataagtggccatgagcaatgactgtgtaaataaaaaagggcttagaggatcgccgtccaggagttccatgtgctgcgggctgagtct

SEQ ID NO: 9584 - DNA, 201 bp, Homo sapiens
ctgaatcttgatcataaaccactggatcataaatcactgtggtcagtgaacctgcttctagtctccgtcctaaatatttatttatgttgcactctgcaccwccaggaaaataggcatagattgctctgcatcccacaaagattaggggatgctcagagattgcccaactgctaggagaagcctgctggctagagtgagagg

SEQ ID NO: 9585 - DNA, 201 bp, Homo sapiens
gtgcttcttctaatctcatcacatcccctttgtcctgaatcttgatcataaaccactggatcataaatcactgtggtcagtgaacctgcttctagtctccrtcctaaatatttatttatgttgcactctgcacctccaggaaaataggcatagattgctctgcatcccacaaagattaggggatgctcagagattgcccaa

SEQ ID NO: 9586 - DNA, 201 bp, Homo sapiens
gaatagatggaaagatgtggcaggaaaggaaactaatatggttgatggggatgggattgagggatggccttgaacatggtagaaaggagcctttgctggtwcttgagagggagagtgacaagactcacgtttcttagctctccatcacccctgaccacctggccatccctcctcagccctgcatcatcacagccttgtgct

SEQ ID NO: 9587 - DNA, 201 bp, Homo sapiens
tccttgagaggagaaaagccaggggcccttccgatagatgagtgggatctcctccctcgtgcccttttggttggctgccacaagcccatcctaagcctgtrgcagacttcaactcactccctgttgaaccagcgcacccaccctgatggcagggtgcccatcctacccagctgacgtgttccctgagcacaggccactgga

SEQ ID NO: 9588 - DNA, 201 bp, Homo sapiens
atccttgagaggagaaaagccaggggcccttccgatagatgagtgggatctcctccctcgtgcccttttggttggctgccacaagcccatcctaagcctgyggcagacttcaactcactccctgttgaaccagcgcacccaccctgatggcagggtgcccatcctacccagctgacgtgttccctgagcacaggccactgg

SEQ ID NO: 9589 - DNA, 201 bp, Homo sapiens
tgaaccatttcaaatggatgagggggctgggggctgttgatgtgacaatggccctttcctcatgccctggtattcaagagacttcggggcagtttgttctyccgactaggctgtgagcctcagggctctggaggtagcatctcaggcatctgagcaaatctctgtaaggttcccattctcctgccatgcagttgggcacct

SEQ ID NO: 9590 - DNA, 201 bp, Homo sapiens
ttctccttgttttattcttagcatcacttatccttgagaggagaaaagccaggggcccttccgatagatgagtgggatctcctccctcgtgcccttttggwtggctgccacaagcccatcctaagcctgtggcagacttcaactcactccctgttgaaccagcgcacccaccctgatggcagggtgcccatcctacccagc

SEQ ID NO: 9591 - DNA, 201 bp, Homo sapiens
gccaaggcctgacctgtgggtttgtccccaggccacctagtccttttctctgtggggctctcaaagctcccacaggatacaggggctactaactgaggcgrgagtaggctaagaattcagggattcttggtatcctcagcctgccaccctgacccctccttcctctacaaatgccaccccagcctccaggaccccagaatg

SEQ ID NO: 9592 - DNA, 201 bp, Homo sapiens
cctgctaccagggcaggctctgtaattaacaaactgtgtgattatccctaccacgtaaacattgtccctagcgggatggaagatgtttcttggaatcctcycctcctgaccttttcttcaggcctcttggtgtgcagagtagtttacagaaagtttacactgggaggcttcagagatgacattgtgtggtttccgggtttt

SEQ ID NO: 9593 - DNA, 201 bp, Homo sapiens
actgggggacagccagcggaaagctaaggttctagagtctgagcatccagagttccatgtggtttgtctttcccacctgggcaagaccacaggctctgatkctcttcctcctctgggcccaggccccaccttggtgctggggaaaggcaatgctgaagaagacaggctcccccaccccaaggggcactgagctgggagggc

SEQ ID NO: 9594 - DNA, 201 bp, Homo sapiens
gcgtgagttcacacctcagatccactacatcctggctgtgtgaccctcagcaaatcactctacttgctctgaatccttgtgaagctttctgaccttccctccccacccccaaaccagaggcgataccacccttatgacacctcccatattactttcttcacctctcttgtggcccacactgagtggcaaaatttcacagta

SEQ ID NO: 9595 - DNA, 201 bp, Homo sapiens
gacaaagcatgagtgaacattttataattctgaaactggggaaggcccttttaaacatgacacaaaacccaaaagccataggagaagattaagtttgtctrtagaaatataaaacacaccagaaacaaaataaatgccaaatgccaaattagaaagaataatcatgacaaatatgactatcaaagagttatttttcttgac

SEQ ID NO: 9596 - DNA, 201 bp, Homo sapiens
gcatcccaccaccctccctggagcccgggctccatgccccctaaccctccactgaggttggcattcttccaagagctggaagggatgttagcgatccatcycatcatttcactgatggtcccagagaagaaagtgggtcactggaggtcacatacaaagttggtggccaagccagaggctgatctgaggccatggccttgc

SEQ ID NO: 9597 - DNA, 201 bp, Homo sapiens
actgggctgctcccctgccagaacttacagtgtcccacttgcacacaactcatgctattctggtatctttgttctcagtttctacctagtgaactcttcayccctccatgtcagctacatcatccctgcagctccttccatcctctcctccccacttggcctcggccatgagttctgctgtttgatgagtatgttaacata

SEQ ID NO: 9598 - DNA, 201 bp, Homo sapiens
tcacaataggaagagaaagctcaattgttcaagaaatgacgctgggacaaccaataagccagttagtaaaaggtaaaatgaaagacagttgtttggttttyttattattaaagccaatttattcattatattggaataaattccaacgagcgaaatacttagatataaaacctgaaactgtaaaatacaaggacaaagcat

SEQ ID NO: 9599 - DNA, 201 bp, Homo sapiens
gggatgttagcgatccatcccatcatttcactgatggtcccagagaagaaagtgggtcactggaggtcacatacaaagttggtggccaagccagaggctgmtctgaggccatggccttgcaaagcgactccttccagccactcaggcttcctctgtcctgggctcaaggccagttcccaccccaggtagccataaagagca

SEQ ID NO: 9600 - DNA, 201 bp, Homo sapiens
ttacaatataagtcatttatctaaagttaaaaacataaagacaacacaatacaatcttcaacaactatatgcatagatagtaaacacgtaaagaaatgatggaaatggtaaacatcaaattcagcagggaggagggactgggtagagactggggtgcttagggaggttcagctacatgggtagctattaggctgggtggtg

SEQ ID NO: 9601 - DNA, 201 bp, Homo sapiens
agccagaggctgatctgaggccatggccttgcaaagcgactccttccagccactcaggcttcctctgtcctgggctcaaggccagttcccaccccaggtarccataaagagcagagaaacaatggaaagcccagttacccccgcttggcagagcttgaaggcctggttaatacaatcacagcaaccaaacagcaaatgcag

SEQ ID NO: 9602 - DNA, 201 bp, Homo sapiens
tacaatataagtcatttatctaaagttaaaaacataaagacaacacaatacaatcttcaacaactatatgcatagatagtaaacacgtaaagaaatgatggaaatggtaaacatcaaattcagcagggaggagggactgggtagagactggggtgcttagggaggttcagctacatgggtagctattaggctgggtggtgg

SEQ ID NO: 9603 - DNA, 201 bp, Homo sapiens
acaatataagtcatttatctaaagttaaaaacataaagacaacacaatacaatcttcaacaactatatgcatagatagtaaacacgtaaagaaatgatggaaatggtaaacatcaaattcagcagggaggagggactgggtagagactggggtgcttagggaggttcagctacatgggtagctattaggctgggtggtggg

SEQ ID NO: 9604 - DNA, 201 bp, Homo sapiens
tccaggtttcacctggatgttttattctatgtagtagcagcctgcttctccaggcatatcctggagtgttcccccatttgccctgcagaagcaattctcartgctggctgcacactggaatcccctgagagcttttcaaactcaccatcaccccgggcttcactcttggagattttgaattgcatcgggctgggatggggt

SEQ ID NO: 9605 - DNA, 201 bp, Homo sapiens
caatataagtcatttatctaaagttaaaaacataaagacaacacaatacaatcttcaacaactatatgcatagatagtaaacacgtaaagaaatgatggaaatggtaaacatcaaattcagcagggaggagggactgggtagagactggggtgcttagggaggttcagctacatgggtagctattaggctgggtggtgggt

SEQ ID NO: 9606 - DNA, 201 bp, Homo sapiens
gctggctgttctgggtccacccatgtgcagctaggtgcagccagtgtgggctgatagagagcaggccacagttgccctcccggccctcccggtccaggccstgggttgagatctcatttgccttccagggctccaagggagaaccagggaaaggagagatggtggattacaatggaaacatcaatgaggctctccaggtga

SEQ ID NO: 9607 - DNA, 201 bp, Homo sapiens
ctgacttgtcacattggaatcattagaaaagggtccctgggttttcctgggtgggtttcagaggcagcttcataacccagggttggaacaggagtgccacyccacccccgacccaccaaccttgtatttcactggacaagagcaagtaagggtgctgatagcaggttggtctcagtagcttcccacctgctgcccatttgc

SEQ ID NO: 9608 - DNA, 201 bp, Homo sapiens
atataagtcatttatctaaagttaaaaacataaagacaacacaatacaatcttcaacaactatatgcatagatagtaaacacgtaaagaaatgatggaaatggtaaacatcaaattcagcagggaggagggactgggtagagactggggtgcttagggaggttcagctacatgggtagctattaggctgggtggtgggtac

SEQ ID NO: 9609 - DNA, 201 bp, Homo sapiens
caactgacttaggggactggggaaaaggtgtgagagagacaaaggggagtccctaacaatgaacacagaacagaaagaacgccaccgagtctgaagtgggrggcagcccagagggactcagagggacaggagtgtgggtgggtgttccctggatgtttcctgaaggggtggaacctgcacttctatggactaagagctaag

SEQ ID NO: 9610 - DNA, 201 bp, Homo sapiens
aggcacacttgggtcctctcttcctccattctttctgattccagaaaacaggcatcatttactattgactagaaagcacctggcccttctgcttatgactracaactgaaggatcagaggaaaattccctcctgtccacctccggtccctcccgtgagcgccctctgaggtcaaccttcccagggtattgagctcactcgc

SEQ ID NO: 9611 - DNA, 201 bp, Homo sapiens
tataagtcatttatctaaagttaaaaacataaagacaacacaatacaatcttcaacaactatatgcatagatagtaaacacgtaaagaaatgatggaaatggtaaacatcaaattcagcagggaggagggactgggtagagactggggtgcttagggaggttcagctacatgggtagctattaggctgggtggtgggtacg

SEQ ID NO: 9612 - DNA, 201 bp, Homo sapiens
gaaggaaaggaggtggcagctgagctgttttcgttcttgtaagagaaggctggattcaggcctttctctgagtctccaggctccctgggagcatgtctgcrgagtctgcagcagagaacagggagtacttggtgtgttgctcttgccaaagaattaaggaagtggagtgctttgcccattggcactgactccatccaaata

SEQ ID NO: 9613 - DNA, 201 bp, Homo sapiens
ccacggatttgccttcttcgtttcatggccacctctgtgggccagtagttcaagctgtctgaatcctcacttgatcaggatgcaggacaccagagttagcrtctcctcagggccactgatgctcaaaactgggcagaacaaggccagatgaggggcttctaatgcacagcctcccaacactcaccagccatccagctgaaa

SEQ ID NO: 9614 - DNA, 201 bp, Homo sapiens
ggctacatttgtagcagctgtagttgggttggaagtgattctggattttgcaggaaatccattgtccaaggaactctccagggacagtcagtaggagaacrcggggcaactgcaagtgcctcgaaggtagaccgcagcacgcactgcctggtcacctctccctgtctgccaggctgcctgtctcagagagaccagtggaag

SEQ ID NO: 9615 - DNA, 201 bp, Homo sapiens
gggacccttatcttgccactaactctccactgcctccaagtccaccaaaggtcagagggctggcactgggaactatgaccagcagcaggcagcctgccacsaaggacttgaggtcattccttgggaggctataaatgcctatcccactgccccagcctcactgggacagcagatatcttgacccccagtgatcaccatgat

SEQ ID NO: 9616 - DNA, 201 bp, Homo sapiens
tgcatgaggacattttaaaacaatgaaacaacataataaagaatagagacctgaacaactgtgttttttccacacacacccccacaccccacaccccactstgggaaatgaggaatgatctggagcggttgtagtaagctcctgcggagggatggagtaggaggtacggctggaaagaaaagttgggggttggggaggcag

SEQ ID NO: 9617 - DNA, 201 bp, Homo sapiens
tccccattttgcagagaaggacactaaagctcagaggtggacttgcccaagctcgactgctagaagatgtcttttctacctctatagtgccagcaccaacrtagagcagtgccagatatatcgagcaatggctcagtacgtggcccttgactgcctgtctggctgagactcagcagggtggggtgactgggctggtgtgga

SEQ ID NO: 9618 - DNA, 201 bp, Homo sapiens
aactaacccacttccatgataactaacccactcccacaataactaacccacttccatgataactaacccactcccacaataactaacccactctcatgatractaacccacccccacaataactaacccactctcacaataactaaaccactcccatgataactaacccactcctgcaatcacaaacccacacccatgata

SEQ ID NO: 9619 - DNA, 201 bp, Homo sapiens
tccccatgtgtgtgattcatactgggtttctccccagccaccctccacactcctcctccatcccccccaggctccacttcccacttcttcattctgtaaaygccaagggtcaccccgcctaggctagtactctgggggctcccagtcatgccaccctcttgcatgcaaagtttactgggatgtttcctggcttcctgctgc

SEQ ID NO: 9620 - DNA, 201 bp, Homo sapiens
gacatcacagctccaaccacagaggatttttttctgtttcccaccccagggcctttgcacttgctgtgctggtgtgcagtgaccatcccttggactccctygtgccgcctcttcattatctaggtttcgactccaacaccacctcctcagaaaggccttcctcagtcatccaagctaaagcattttcccaaattccagccc

SEQ ID NO: 9621 - DNA, 201 bp, Homo sapiens
ggcagtgggtcccctacaaaaagcagaaatgccttggcagggccattggatgtgggtgaaccatgcaaggggctattcatccccatcacactcaccacctkttgcactctggctctgaaacacaacctgggccatgttccctgccttccagggaggagaccgccaatggcctgcctgccccgttcccagccccagcagaga

SEQ ID NO: 9622 - DNA, 201 bp, Homo sapiens
ctctcagctccttgccccttttggccacagctctgatgacaatggctgccccacattgatgtgtggtttgtaggctcttctgtttccctccctagagtatmaacttcatgggagcagcctcagtctgctttgcataacaaggttcccaacattaacccctagaacattgtagatagtcaatacccatttgtgaaaggcagg

SEQ ID NO: 9623 - DNA, 201 bp, Homo sapiens
ctgcagtcagggcagctgccacagtgatttcaacacctgctcctctgccatggacaccctgagccctaaagtggcttctcagagggtgtggcaggataggrcccaggctccagagtgacactgctagatgccatctgcctacaggttttccagccaaaagatggtgcaagcaggtcttgctgaaagcttacatttctcatt

SEQ ID NO: 9624 - DNA, 201 bp, Homo sapiens
ggggttttgccacgttggccaggctggtctagaacttctgacctcaggtgatccacccgcctcagcctcccaaagcgctgggattacaggtgtgagccacygctcctggcctatttcaattttagtttaatggccacaggtggctgacagctgctgtaatagacatcacagctccaaccacagaggatttttttctgtttc

SEQ ID NO: 9625 - DNA, 201 bp, Homo sapiens
gccctttttgctgggggcttacttggaaagaatagggagagtctgcagttccaactttgggtcctggcgccaccctgaattcccatgtgactttgatcagrgaattcaacttcttggagcctcagttttctcttctgtaacataggacttgtgacgttatgaagattctagaatttcacagccagaaaggagctcgggagt

SEQ ID NO: 9626 - DNA, 201 bp, Homo sapiens
ggcttcctggcctcctggggcagaaggtaggtgttgctctgaatggagggttcaagtccttcgtcacccacatcccatacctggccctgcacatccacacrggccccagcattggacgtgtctgtctcccagactgcaggaaaggcagctggaacacagccagattctgtttgtcgagggagaggtgccataggcaggccc

SEQ ID NO: 9627 - DNA, 201 bp, Homo sapiens
aaaaaaaaaaaaaagagacatcaggagaggacctggagccacacgttaaactgcctggcatggggtgacactcgagaaagagggtttcttaccccatggcrcatgtctaatgcaggggccttccagcggcctcctgcgtctggaggaagccacctactgagaggtctctgccagcctgctcagggtactgcttttcttagt

SEQ ID NO: 9628 - DNA, 201 bp, Homo sapiens
cattccaggagagctgagtccacactctcagaatagccattctcctgggccccaacagcgacctcccagccttaggtgtatcagctgttcttttttgagcmctcactgggttccagacattgttgtgagaattctatgcaaattatctcatgcattccccacaccagccatctcactatcccccgctttacaaaggaagaa

SEQ ID NO: 9629 - DNA, 201 bp, Homo sapiens
ctgagagtgttcagaatccccagggccccgctggctgttctgggtccacccatgtgcagctaggtgcagccagtgtgggctgatagagagcaggccacagktgccctcccggccctcccggtccaggccgtgggttgagatctcatttgccttccagggctccaagggagaaccagggaaaggagagatggtggattacaa

SEQ ID NO: 9630 - DNA, 201 bp, Homo sapiens
agcgagactccgtctcaaaaaaaaaaaaaaaaaaagagacatcaggagaggacctggagccacacgttaaactgcctggcatggggtgacactcgagaaasagggtttcttaccccatggcacatgtctaatgcaggggccttccagcggcctcctgcgtctggaggaagccacctactgagaggtctctgccagcctgct

SEQ ID NO: 9631 - DNA, 201 bp, Homo sapiens
tgagatctaaatgtccacatttgtaaaatgaatttgtgcattaactcattaaatcactgagtttggaactctaggtaagtttagactgtgcgacacagtaygatacagagcaaaaggcagattctggactccacaagatctgggttcaaatcccagctctggcatcaagaagcttcaggaagttgggttctttcaaagcct

SEQ ID NO: 9632 - DNA, 201 bp, Homo sapiens
ccctttcctgcttcctccaggaggggcctgggggctgtcatagaggcccagctgcctagcctggtgcaggggatggggagcgggggtggggggcgcttccrcagcagtgccccctgatcacttcccactgccctatcatggaggcccatggtccgcagtcaccaaccggctcagcagcccctctgctctgtctctggggag

SEQ ID NO: 9633 - DNA, 201 bp, Homo sapiens
atgaaaaagaaaccaaaacacacatcctgaaatatcattcaaaagcccaagagtgagtggaccgtggggctgccacagccgaccacccgccctggcctggkgtccttcgcaggcagagccaatttcggatccacgggtcatggtcttgttgatgcttccgtgtgaagggtcctaggagtaacactcaaaaagactgtggat

SEQ ID NO: 9634 - DNA, 201 bp, Homo sapiens
tgggggctggctctgtcctccaacaggaagacccagatttctgcgggcacaaggtcggccagtgcctgaagaacataactgtgcaggatggattaaagctrcagcaggaaccatttaggtggaagtaaattttcagctaccactgccccacccatcatgcccctggcagacattgctaatcaattaggaggctttttaaca

SEQ ID NO: 9635 - DNA, 201 bp, Homo sapiens
aaaagaagaatgctggtggccagagagaggggctctgagatgcctgtctgatgccgtctgggtgtatcctgggggctggctctgtcctccaacaggaagayccagatttctgcgggcacaaggtcggccagtgcctgaagaacataactgtgcaggatggattaaagctgcagcaggaaccatttaggtggaagtaaattt

SEQ ID NO: 9636 - DNA, 201 bp, Homo sapiens
gtctctctagcctgatctctgaccagtcttccgctgtcctgcttttctttcagtaaaactgggctgctcccctgccagaacttacagtgtcccacttgcayacaactcatgctattctggtatctttgttctcagtttctacctagtgaactcttcacccctccatgtcagctacatcatccctgcagctccttccatcct

SEQ ID NO: 9637 - DNA, 201 bp, Homo sapiens
ggcttgtgcactagcgccatgaccagcactgcaaagaggacggatgaaagcggagaagtcgccttcagccagcctaatgggagaagccacagctgccttcygggtcagtgtgctggtgaggggtgcatgaagtgcccaggagccaaaggagctggggctctgggaaaacttcaccaaggagaggccttggaggttgttcaa

SEQ ID NO: 9638 - DNA, 201 bp, Homo sapiens
ggatgggctgggtcctgctgggtcccctgccctgcctctctctgactgacctgaggcttctcatgccttggtacagtaacctcctcaacagcaaacccaayctattataaataatagcagttactgccactgtgtcccacttgagcacctactatgtgccaggcacaggactgagcactttatgtgcattggtaaccttcc

SEQ ID NO: 9639 - DNA, 201 bp, Homo sapiens
gaggaggaaacaccatggggagaagaaagggcttgaccttggtcctctgcggggaagggacagcagcaagggctgatttggccaggcatagaggaagagtrggcaggggctcctggaagggatacccctgcatgttgagaatttctaaaaaggcagtttggcccaaagcatacatcagagccagtgggcaatgcctgaaga

SEQ ID NO: 9640 - DNA, 201 bp, Homo sapiens
gactccatgacatagggactgtgatcacctccattttacagatgaggaaactgaggcacagagaggctgagtgacttgcccagagccatagggctggcacrtggctacactggtagctgatcattcagccagaccatctggctccagtctgcttctggttcctgctgcagtcatagacgggccaggcctgatgtcactgtc

SEQ ID NO: 9641 - DNA, 201 bp, Homo sapiens
atgaagcagctcagagggtcaggggaggaggaaacaccatggggagaagaaagggcttgaccttggtcctctgcggggaagggacagcagcaagggctgakttggccaggcatagaggaagagtaggcaggggctcctggaagggatacccctgcatgttgagaatttctaaaaaggcagtttggcccaaagcatacatca

SEQ ID NO: 9642 - DNA, 201 bp, Homo sapiens
tctgcacttttcctgacccgccgtgctcagtgaggggtgggagcagagggctagcctctgggagactgagacccacagcagagggagaggggccagagaaygaatggctaacttacatccaagggagggggcctgcagtgagatgaacagccaagcgaggggttgtggcgagtgcagggagctgaaaggtagagccagttt

SEQ ID NO: 9643 - DNA, 201 bp, Homo sapiens
atgtctcatgtttatacggtgtgtgattttggtgcaaaagtaatttcagtttttgccattgaaagtaatggcaaagagatgtaggggacagatataggggmgggatcaaagcagcagctgaaagattggggctgtggatggggtcctttaggactgaaatgctgggatgaggatgggaagagactcttaaaggggatgtac

SEQ ID NO: 9644 - DNA, 201 bp, Homo sapiens
ccttatcaaatgccatgtcctagtgttgggggcacatttgtggccaggcagagacttgcctttctcccttccctgccttattggggaaagcacatcagttrtctgatggccttcaagtccatcatcagagtgggtggttctcaagaggtttcaatattgtgcctcagaaagtcaggctcaggtagtcctgggaggctggga

SEQ ID NO: 9645 - DNA, 201 bp, Homo sapiens
gtgatccggctttcccgggaaccagcctttgtttctggaagcccatggagcagatacgagtccgggttcactgacccaggcacgcactactggtcttgccrgagggccagcccacactcaccctcacagatgcctctgtgtgcagtgctgggtcctgtgtgttcactagcaccctccaccccgtggctgggagcttgagaa

SEQ ID NO: 9646 - DNA, 201 bp, Homo sapiens
ccctggggagcctcctggagctagaatgaggaccaagtatgggcagaggctccctcagtgcctgccttcctctttaaaccccaactggggaggaaatgccwgccacagaaagatgcccagcaggcggtgggggtataagtggatgccagcttcccatgtagttatgtgagctgtcacggggtgacctggcataccatgaca

SEQ ID NO: 9647 - DNA, 201 bp, Homo sapiens
ggggcctgggcagagagaccgttcgcatcagggctcatgggacagcccatgtttccaaggatcatgtctgttgcccttataactcttgggcaatgacaacygatttttgctcagcgtatagaatgctggtcaagggcaggatatttgaagccacagaggatgtaggtttgaattccatctccaacatggaccagtcttatg

SEQ ID NO: 9648 - DNA, 201 bp, Homo sapiens
ctggccccctgccagctccttccctttggttcctctctttcccgctcctcttctccatacctccctgcccctcgctccctctcccccttcctctctccccrcaggggtcccccggagacgctgggctgtccatcattggtccccgcggcccccctgtaagttgtttttgctcttcctcggggtgttggggggatgggtgag

SEQ ID NO: 9649 - DNA, 201 bp, Homo sapiens
ggggccagcctcaccccaggaccagcgggacacccacctctaagctggacggaaggcagagtcagggggtctgtacctggtgggcagcgtgggggctgcastctcactctggggttcccggcctcagtctgcaggaagcagtagacgcagtgaccagcagatgagccctgctccagggaaaagctgccacagcccccagcc

SEQ ID NO: 9650 - DNA, 201 bp, Homo sapiens
gaggctctcagccctcccccccatgaaagccgcagcagagggtgctggctgggcctgctgccctcactgcctctcacggccccgtttcctaacagcttccrtaacatcgggcagcagtcttgggattcctgggcggcggtcccagctttcccagctgaggaggtcttccctgccttgccctgccctgacagcatgaggcct

SEQ ID NO: 9651 - DNA, 201 bp, Homo sapiens
gtggggaaggaaggcctaaagaagagttgcaggagacaaggtatcacatttaagtaatggcagagagttttggtccgctactggcctctgccagctcagcrtgtggcctcctcgatacccacggtggcaggtggcactagcagggtgctcactgggctctctggctggccctcctctggcctcagaagccgagggacccaa

SEQ ID NO: 9652 - DNA, 201 bp, Homo sapiens
gccaaccaggcgagaaggtgagtccacactttccccttctgccctgcacccagcctcctcctccaggtggactcttgatgggaggctctcagccctccccmccatgaaagccgcagcagagggtgctggctgggcctgctgccctcactgcctctcacggccccgtttcctaacagcttccgtaacatcgggcagcagtct

SEQ ID NO: 9653 - DNA, 201 bp, Homo sapiens
ttggcctgcctgccccgcatccatcagtccacccaccattcatttgttcatagagtattttatgggcctgatactctttgaaccaggttgtggtgaagtcrgataagatgatgggcatgactgttttgaaagttatgaagtgctatgcagcgtcaaagggaccatcagccccccaaggggaggcaccttgcttgctgtgtt

SEQ ID NO: 9654 - DNA, 201 bp, Homo sapiens
atcatttactattgactagaaagcacctggcccttctgcttatgactaacaactgaaggatcagaggaaaattccctcctgtccacctccggtccctcccstgagcgccctctgaggtcaaccttcccagggtattgagctcactcgccctcaagtctcgagtccctgctcggacaccatcacgagagctctgtgcaccca

SEQ ID NO: 9655 - DNA, 201 bp, Homo sapiens
cccagaggcctgggatatttcagagttcagggcaagtgttccatgtcacagagctttgctctccccagcgcccacctaaggcctgtctatggaggcatgcrggctgggagccctgggccgccccacgagaagctctcccaccacttcccagagcagagcacagtggaattgctgcccggccctgtctgttttcttccgttc

SEQ ID NO: 9656 - DNA, 201 bp, Homo sapiens
tagccacacctcactcaggccgtcacttttcatttgaaagacaggagtgacaatatctgtggttgccttccatctgctcacagattggcctgcctgccccrcatccatcagtccacccaccattcatttgttcatagagtattttatgggcctgatactctttgaaccaggttgtggtgaagtcagataagatgatgggca

SEQ ID NO: 9657 - DNA, 201 bp, Homo sapiens
aagcacctggcccttctgcttatgactaacaactgaaggatcagaggaaaattccctcctgtccacctccggtccctcccgtgagcgccctctgaggtcarccttcccagggtattgagctcactcgccctcaagtctcgagtccctgctcggacaccatcacgagagctctgtgcacccagccccttccagccagggagg

SEQ ID NO: 9658 - DNA, 201 bp, Homo sapiens
gcaaataaactaagatgagaaccaaatgtctacacggatgctaccaaaatctctctgttcatttgactggtgaaattctgcccgctgttggatttgctttrtaaccacagctgcaagtaattctggctaaatcccttgcctttgaatccttttcctttgaagatacagagcaatcgatgtgtggaagtgaggaaaccacta

SEQ ID NO: 9659 - DNA, 201 bp, Homo sapiens
ttactcagacttcacaagaactgcatgaggtagacatggtttccacccctactcttccgatgagaaaaccaaggctcagaagctaactgtccttcccaagktcgcacagtcaggaagtggctgagcagaaatctgaactcagacagcccaactccaaacctgcgctcttgatcctgacaatattactactccccactaacc

SEQ ID NO: 9660 - DNA, 201 bp, Homo sapiens
ggctcacaggtcttcccaggtggccgggggcacttgcaaccggcaccaagagaagcccagagcttttagaggtaggagggtcaagatagacctctgtgagrgccccatcctactgaatgcctattctgtgccctcataaataggagatgacatggcttgcccaagatgacagacttcttcagagccccccacctccctgca

SEQ ID NO: 9661 - DNA, 201 bp, Homo sapiens
acctccaagtcctcacgaggaggctgagagttaaaacattcctgtttcttgcaggaaagtgaagatagagaaggggagatgagaacgtttgatggagaggstgtttcccagaaatgggaaggccagcctcagcccctgagtgtctacaaagggctataaaggcagtagtctaaggcagtgatggccatgccccaccctcac

SEQ ID NO: 9662 - DNA, 201 bp, Homo sapiens
agagctttcacctgtgggaaatgtgctgcttttccctgtctcattctgaggaagccacaagagccctcaactgcccccaccctgccttggggcctcctgcrcacacctcacccccaggggcaggatgctgcagcctcctgcacacacctcacccccagggccaggatgccaggacagctctgagtccctgcctgacttgag

SEQ ID NO: 9663 - DNA, 201 bp, Homo sapiens
caagagaagcccagagcttttagaggtaggagggtcaagatagacctctgtgagagccccatcctactgaatgcctattctgtgccctcataaataggagrtgacatggcttgcccaagatgacagacttcttcagagccccccacctccctgcactgatggagttcacactgtaaacccttacatgcagagagcatgccc

SEQ ID NO: 9664 - DNA, 201 bp, Homo sapiens
caggaacaaactgagcctcgacattgggaggactgccactccgccccccaaagctggcagctcacccttagattcacagctgctcctgcaaccacccctcrgtggagccagggttcccaggggccttctctgtagacagagatgcactaagagatggtgaagacagggcttggtcccaggtggcacctccaagtcctcacg

SEQ ID NO: 9665 - DNA, 201 bp, Homo sapiens
ttggagtcaaaaaaaaaaaaaaaaaagcaccaggtattagaagaaaagaaatcatctctcctcagttctgccccttgaaaggtctcagaaaacaggtcatygagctggctgcaagcatggtctgctccaggggactcacatccacacccctgagtggggcagctccattctggccactttgggcaggtggtggtggtggcg

SEQ ID NO: 9666 - DNA, 201 bp, Homo sapiens
aagggaaaatgtggggaaaaaaaataagccttccctgccaatattaacatttattgagcacttcctacgcgtcaggctcagcaccaaatgcttgctacgcwttcatgcatggaaacctggcacggtcaaggaggcagacacacgtggtacagacggggaaaccgacactcggcaaggctaaggagcttctccaatacccag

SEQ ID NO: 9667 - DNA, 201 bp, Homo sapiens
ccgtggcgctgtgcccaaccactggcccgagctgactccttattgtttttgagacagagtctcgctctgtcacccaggctggagtgcagtggcgcaatctyggctcactgcaacctccacctccgggtttcaagcgattctcctgcctcagcctcccgagtagctgggattacaggcacccaccaccatgccggactaaat

SEQ ID NO: 9668 - DNA, 201 bp, Homo sapiens
catttggggatgatttgtgccatgatgttcttgttggcagacaaaacttcaggccgatgggaatatacctaatatgtgcatacatatttaaacgcatgtcrttttctaagtaaggatttgcatttttagaaaattcatttagaataatgcactggcagttgcagaccacctctgaaatagagaaatttgagtaatttccga

SEQ ID NO: 9669 - DNA, 201 bp, Homo sapiens
gaagatgttggaggaggccagagcaagccctgatgctccatgtctaagccgtgagctccaatggctccagcgcccccagccccgggctagcagagctcatracacgcctccctgccaggccggtgtcggtgcagacattgaggcaccctaattcaccccccgatccagccagttccgcaggcctgtgagtggggcgagaag

SEQ ID NO: 9670 - DNA, 201 bp, Homo sapiens
caggtgtcaccaacgcgaagtgacccatggaagtagccagtcaggatgggggccgggaggaagtggagcccttcagaaagccagctgggggcaggggcacmgaggcaggagcaagggaaggcaaggccctaagctgtggagctggtggcttcccaaacctgctgcagaaacagttcctaacccccacactgtctgcatctc

SEQ ID NO: 9671 - DNA, 201 bp, Homo sapiens
ctccaatggctccagcgcccccagccccgggctagcagagctcatgacacgcctccctgccaggccggtgtcggtgcagacattgaggcaccctaattcaccccccgatccagccagttccgcaggcctgtgagtggggcgagaaggccccggccagagactgaggccagggctgtgggtctgcggtgggccggtggggtg

SEQ ID NO: 9672 - DNA, 201 bp, Homo sapiens
cctaacccaaggaggcttggataggagcagatcacaaagaacaaagccatctggcctctgctcttcagagatcacagcttgattccaggctggctggcccrtggctgcccctgtgctcctcacctttctcatgctgcaccaggtaccccgcccagcacagggacgctagcagtggcagggctctgagctgctttctacaag

SEQ ID NO: 9673 - DNA, 201 bp, Homo sapiens
aattggagttccaggcccagcgggaccaaagggcgagagggtgagtgtcactgagccaggggcctgggcggccaggagggagaggcatgcctgggacccarcaccaggggtctcagccctcatgccttccttcttccatctcttctcctggtcatcctcacagcagcctgggacagggggtgctggttgtgtagctatgag

SEQ ID NO: 9674 - DNA, 201 bp, Homo sapiens
ggagggagagattagtttgggaagtagcacggattgctcatccgatccgtgccgccgcagggagtgtgtcaagttacagaggcgccggaatcggcccctgmgctcctcgccagccgccacgacccacctctgcccatggggccctccatgtgcgccccttcgcccggggactgaaactgactggcccgggagacacgaggc

SEQ ID NO: 9675 - DNA, 201 bp, Homo sapiens
ggcctttgccctctggccctccaactcatctttctcctcagctgctgcctctcctcaattcagtgcgactggctccacccccggtcataaaaaggcggacrttccaggtagacacctcccgtttgtccagaccatgtgtggtttcccaaggggcccggcaagcctgctggggctgcagacaaagccagaacctctctctaa

SEQ ID NO: 9676 - DNA, 201 bp, Homo sapiens
tccagcctaggagacagagcaagaccttatctctataaaaaaaaaaatgaaaaagaaaaagaaagaaagaaagaaaaagaaaaagaaaaaagaggaaaagaaaaaaaaaggaattggagaacttcctccactttggcttctggccaccttgtgtccatctcaggttcagtttggcaaggccctgggcgccattgtcactgg

SEQ ID NO: 9677 - DNA, 201 bp, Homo sapiens
aaagccacggtttgctcagcttcaatgggtagagggactggaagctgcaacaatttccagaaatgaaaatcacattagataatatgactgcaagttgcctyccgcaaaaacgtggttgagctttctggagatatctttgcccagcctctatcttccaggccccgcagccccagggtgagccctcagcagcacttaacatgt

SEQ ID NO: 9678 - DNA, 201 bp, Homo sapiens
agcatgcttggaacacaggcaggaaactgcccttcttgccccctggcccacctccttcctcttcccagcttgtctaggtccctagaatgggggttgtctgrccagatggagtctccagtcatttgctcaagacctctgagtcacggaggtgaagaagccactgggaccagctgagactgaggggctctgggggaggggtca

SEQ ID NO: 9679 - DNA, 201 bp, Homo sapiens
ctctcccctcacggtccctgtcgccctgtctctgccacctccatcccctcccaaactaggagtgcctaagcagcatgccagcagctctgcgctccagccarataattgccctgaaggtttgtaggttctggaaggtctccgggcccctctccactgagaggcttcctgaacatacagcccaacattgcacatccccaggcc

SEQ ID NO: 9680 - DNA, 201 bp, Homo sapiens
tcctgcaaagggctggaccctgacccgaaggcataagagacccttctgagacctagcatgcttggaacacaggcaggaaactgcccttcttgccccctggsccacctccttcctcttcccagcttgtctaggtccctagaatgggggttgtctggccagatggagtctccagtcatttgctcaagacctctgagtcacgga

SEQ ID NO: 9681 - DNA, 201 bp, Homo sapiens
acggggttattatgttacccgaaagaaagacaacatcccccagcacaaaagacaacacaactgcagacgctttggtagtgtgtctcccgttcttagtaagygcttggggtggggtgggggcagggctctctgcccctcagcccaacataaggaaagggaagagcacagtgacagaaggctgcagaatacccctggccacag

SEQ ID NO: 9682 - DNA, 201 bp, Homo sapiens
cttaatgacctgccttcctgccccccacattcctatcccatgtcctcactcagatcactccagccacacttcaccccttcctgttcctcagatgctccatraacaatcctgtctctgggccttcgcctctgctgttccctctgactggaacacacttcctccagacatcaaaggattcattttcttacttcctccaaatac

SEQ ID NO: 9683 - DNA, 201 bp, Homo sapiens
tcagatgatggtgtttcacatccaaacctcgatgatgggagataatcggggactgactgcagcaattcaaggataaaatctctccttggcctctttaaaarcagaggaaacccttctccaagcagggtggggatttcaggctgagatggttcctctgcccacccccgcctgctccttccttttccttgctccaccccaaga

SEQ ID NO: 9684 - DNA, 201 bp, Homo sapiens
ccctaaaatttagcagggcactttgatccatccctggggcacagcgcccagctcagcctcatctccctggggtctccagttactaacagatcatgggggarcaggagcacccactgccctctgcactcagcagtcagagaggggagcttgggatggtggtgcgtctggtgggaacagctgatgtgtctctccagccatgtg

SEQ ID NO: 9685 - DNA, 201 bp, Homo sapiens
gagtgcgtgtcctgggagccaagggcaggaagtgccccgaggaggaaggggggtgagcaaaggctgcagcctggctaagaggaagcatgaggactgcccamcagatttggcaacccggaggtcactggcaacctgcaggacagttcttaggggacagtaggggaagagccaggtaggagtggtccaggagagacgtaggag

SEQ ID NO: 9686 - DNA, 201 bp, Homo sapiens
ggtttcctctccatcacagctgcctccgctgcaaatgcatttccccccgcccctaccccattcccaggcatgctgtgcacatgcatggagtagtggagacygaggcaggaagaaactgccatgccacattgttatagaggcataaagggcttggggtgctcatcccttcagcctgagcttctttccctctctggcagcctt

SEQ ID NO: 9687 - DNA, 201 bp, Homo sapiens
acagcgagggcggctgtgcccctgggtggggaggccaccgcatgtgatgtggtcagcccagccaggcctcgggtgccgatgttgatgttaaggaaagtggyctggctaaatatacctaaattacagtcccttgggagggttctgagggacctgccctctagccacgaaactacagcagctgcaaggcggccctgctgttta

SEQ ID NO: 9688 - DNA, 201 bp, Homo sapiens
ccctattccttttttctccccctcggaacacttgaatttgtcattcttggctgttgccagtaatgagatagggctgctgctgcggccgtgggagggaggtkgggagtggacaccagaaagagaaaggaacagagagaggcatggaggagggtggggccggagcccgagagggggctttgagaaagaggctgtgggtggcag

SEQ ID NO: 9689 - DNA, 201 bp, Homo sapiens
ttgttgggaggagaaagggagaatggacgcagaggaggtaaccaagaaagtctgctacttaggcacaccctcctgcgtccacagagaggagtaaccccggstgctgggcatctgagcctcccccgtcccaccagccctcaggcacttgccaaacaatgcaaggagcaaggaagtgaagggggcacctccagattgaaagca

SEQ ID NO: 9690 - DNA, 201 bp, Homo sapiens
gccacagagtgcccccagacaggagcttgcttcggagtagagaccaacgtggggccagcctcaccccaggaccagcgggacacccacctctaagctggacrgaaggcagagtcagggggtctgtacctggtgggcagcgtgggggctgcagtctcactctggggttcccggcctcagtctgcaggaagcagtagacgcagt

SEQ ID NO: 9691 - DNA, 201 bp, Homo sapiens
accaaataaaatacactgaaaggcctatttggccctggggctaccagcttcctatggctgcatgagcatcacagtgtgggtttgaatcccagctctgtacyttacttcagccttgaccttggccaggtgcagtctcctctctgtgcttcaagtcccttacctgtgacatgaacatggtaatagctaacattcattgagaac

SEQ ID NO: 9692 - DNA, 201 bp, Homo sapiens
gtggcccacactgagtggcaaaatttcacagtagtgaggaagcaaatagctctggctgtcatcctaactcgtcaaccttgtcagggtagggactacagtasatcaggtgcagtcagtcctggccagccagaacacaggcttcatgtggccaggtctttcagttagtttttcaagagaaattacaaatgcagatttgcacat

SEQ ID NO: 9693 - DNA, 201 bp, Homo sapiens
acctcacagtatggcactactctccagagagctgccacagcaaaggaaaaacctaataaagttgcatgaacaaagccctttgccagtcacctgctgggaayggcaggaacaaactgagcctcgacattgggaggactgccactccgccccccaaagctggcagctcacccttagattcacagctgctcctgcaaccacccc

SEQ ID NO: 9694 - DNA, 201 bp, Homo sapiens; identical to SEQ ID NO: 1222

SEQ ID NO: 9695 - DNA, 201 bp, Homo sapiens
tccatcattctctgtccccttgctttactttatttttctcccagcatttatcactgcctgttacacattttttgtttttctattgatttttttcttccacragaagttatgcccctctaggggtgtgccccatgaggatggagcaggggcaccacccactcatgccacaaattctgtctccagcccaaccctgtgatggca

SEQ ID NO: 9696 - DNA, 201 bp, Homo sapiens
cgaggaaagtgattcacccatctgtcacatgggagctgccagtcaccctgctctgtgccttgaagttgtgtttgataaagatgaggcacatcctggccatrgctggaattgatgcaacagtgaagtctaagggagcaagggccttggaaaggcatagggaaactgaggcccaggctgggaccagactcctccttccgtgct

SEQ ID NO: 9697 - DNA, 201 bp, Homo sapiens
agcactgctctccagctctggcagagacagaccgaggaaagtgattcacccatctgtcacatgggagctgccagtcaccctgctctgtgccttgaagttgygtttgataaagatgaggcacatcctggccatggctggaattgatgcaacagtgaagtctaagggagcaagggccttggaaaggcatagggaaactgaggc

SEQ ID NO: 9698 - DNA, 201 bp, Homo sapiens
ttccccctgaagggacgtgccaggctcaaggtcacagctgcaggtctcacctggcttctccctctgggctgtgtctatgccacagcttggacccaccccaygtattgcagaggcccaggttgagctaggacgttttaagagccctgaggctgagacacagggagggagtgttccctaaacccaagaccaggctggagccac

SEQ ID NO: 9699 - DNA, 201 bp, Homo sapiens
ccttccaggctcctagcaaactctaggccccaccccaggttttatgatgtctgcatgcatatgatggcaaaaaaatattttctaccaaaagggggaggaamaaaacttaataagcagatttccagagtgagatgtaacccctggctacaaaacaaagcatttcccttggagcatctgcaactcgtgattcggctgaatcca

SEQ ID NO: 9700 - DNA, 201 bp, Homo sapiens
ttatgctgcaggatgatcaaaaggcctctagcagatgggatcaagtccctgccctgtgccaggcattgtgatcagagtgctggcacaggggccggagcttygtctgctgtggtcattccagtgggcacctcctcttccttcaactcctagttctcagggtcaaaaggcagggctgcaggtcagaccctcctcactcaccct

SEQ ID NO: 9701 - DNA, 201 bp, Homo sapiens
gagtcacccgagaaatgcccatgcagtcccctcctgtccagcaggctggacaaaccacctgattctccgcaccctattgctttccacccttccaggctccyagcaaactctaggccccaccccaggttttatgatgtctgcatgcatatgatggcaaaaaaatattttctaccaaaagggggaggaaaaaaacttaataag

SEQ ID NO: 9702 - DNA, 201 bp, Homo sapiens
ccagcagcagttatgctgcaggatgatcaaaaggcctctagcagatgggatcaagtccctgccctgtgccaggcattgtgatcagagtgctggcacagggkccggagcttcgtctgctgtggtcattccagtgggcacctcctcttccttcaactcctagttctcagggtcaaaaggcagggctgcaggtcagaccctcct

SEQ ID NO: 9703 - DNA, 201 bp, Homo sapiens
ggttagcagacgcagagtcacccgagaaatgcccatgcagtcccctcctgtccagcaggctggacaaaccacctgattctccgcaccctattgctttccayccttccaggctcctagcaaactctaggccccaccccaggttttatgatgtctgcatgcatatgatggcaaaaaaatattttctaccaaaagggggaggaa

SEQ ID NO: 9704 - DNA, 201 bp, Homo sapiens
gtccccaaagaagctattggagtcaaaaaaaaaaaaaaaaaagcaccaggtattagaagaaaagaaatcatctctcctcagttctgccccttgaaaggtcycagaaaacaggtcattgagctggctgcaagcatggtctgctccaggggactcacatccacacccctgagtggggcagctccattctggccactttgggca

SEQ ID NO: 9705 - DNA, 201 bp, Homo sapiens
cccagcagcagttatgctgcaggatgatcaaaaggcctctagcagatgggatcaagtccctgccctgtgccaggcattgtgatcagagtgctggcacaggkgccggagcttcgtctgctgtggtcattccagtgggcacctcctcttccttcaactcctagttctcagggtcaaaaggcagggctgcaggtcagaccctcc

SEQ ID NO: 9706 - DNA, 201 bp, Homo sapiens
cacaggtttctttgctgcagaccttctcagaacctttaatttgctaaatgtgcattgaggagctctcaaaaggaaatatcttatgtggcattttcaaaacrtttttgaccagaacacccttttttaaagaggaaaagcttaagggacaagtattctggaaatgctggtcaatgatcactgcccatcctacccctcactgcc

SEQ ID NO: 9707 - DNA, 201 bp, Homo sapiens
gaaaaaagaggaaaagaaaaaaaaaggaattggagaacttcctccactttggcttctggccaccttgtgtccatctcaggttcagtttggcaaggccctgrgcgccattgtcactggacatgcctaaactttgtaatgatttagggaaactgcatggaacagagggccaggtggtgtttagataattcctcgaggacagca

SEQ ID NO: 9708 - DNA, 201 bp, Homo sapiens
ttgtgcctcagtggggttagcagacgcagagtcacccgagaaatgcccatgcagtcccctcctgtccagcaggctggacaaaccacctgattctccgcacyctattgctttccacccttccaggctcctagcaaactctaggccccaccccaggttttatgatgtctgcatgcatatgatggcaaaaaaatattttctacc

SEQ ID NO: 9709 - DNA, 201 bp, Homo sapiens
ggttttcctgaaaccccacatggctggggcccacgtaggctgggcctctgcctccttggccctttcccatcctcactcccaccccagccttgcctgcctcytcaagtctgggtcattctcctttgagcattcgtccaggcatttccctctgcccacacgctccttcctcctgcccaccaccccctcccttcaggcgcttcg

SEQ ID NO: 9710 - DNA, 201 bp, Homo sapiens
caaggccctgggcgccattgtcactggacatgcctaaactttgtaatgatttagggaaactgcatggaacagagggccaggtggtgtttagataattcctsgaggacagcaggaagtcaggaggccagagccataggccaggctcccacggtcgctgtcgatggacgttggccatgtcacaggacttgcagttcctggcct

SEQ ID NO: 9711 - DNA, 201 bp, Homo sapiens
agaaatgaaaaagaaaccaaaacacacatcctgaaatatcattcaaaagcccaagagtgagtggaccgtggggctgccacagccgaccacccgccctggcmtggggtccttcgcaggcagagccaatttcggatccacgggtcatggtcttgttgatgcttccgtgtgaagggtcctaggagtaacactcaaaaagactgt

SEQ ID NO: 9712 - DNA, 201 bp, Homo sapiens
ttttatagcacctgtatagctcttccccttctatggcacagcattagctcacaaagaggattttcctgtttctgaaatccctgtaggggacaggtatgggkagtggcagcctggctgagcttggaagagccaaattcccttgcataagacaaaggtgcctgtaaaagacagatgagagggttgagtctagagaagggggct

SEQ ID NO: 9713 - DNA, 201 bp, Homo sapiens
gggaggctgtccactgccccccgccccctgctgccccctcgctgcagaatgtcttcagacctttttttttctctctctgccagggggcgcccggaattgcsgtggctgggatgaaggtcagtggactgttgtaaccaacacatcagggacagggtgggagagaagagagcgggcagagctggaaatcttagactcagtggg

SEQ ID NO: 9714 - DNA, 201 bp, Homo sapiens
ttcctcgaggacagcaggaagtcaggaggccagagccataggccaggctcccacggtcgctgtcgatggacgttggccatgtcacaggacttgcagttccyggcctgtcctgctggaatgggcatgtccgagggtgagggtggagggtgtcagctgagtggaggcaggggagctgtgtctttctatatcagctcttcccag

SEQ ID NO: 9715 - DNA, 201 bp, Homo sapiens
ggccggaatcgggtatggagagcaccctggcctgaggctggcaccagtctgccctgtctccctgtaccaaaggccacatccatgagattccagacccttaygttcctccctcttacctaatgactccccttttagacatggattatactgtaacctttggactaatccaacagcttctaaaattcatgcctagcagtggct

SEQ ID NO: 9716 - DNA, 201 bp, Homo sapiens
ccatctagtgccccacagtccccactgtgcctcccaggagaggccaggagccatgcaggtggttgggaagcccagggagccccgcagactgagctacacaragccccttcctcagggtccattctcgtggcgtcagctcagcgcccccacctcccaggtggggttggtggttgcggggttgggaggagtgagcggtcctcc

SEQ ID NO: 9717 - DNA, 201 bp, Homo sapiens
gccaggctcccacggtcgctgtcgatggacgttggccatgtcacaggacttgcagttcctggcctgtcctgctggaatgggcatgtccgagggtgagggtrgagggtgtcagctgagtggaggcaggggagctgtgtctttctatatcagctcttcccagccagcccctgggttctacacactcagggctcggaggtccct

SEQ ID NO: 9718 - DNA, 201 bp, Homo sapiens
gactatccccctgcataccagctgacattcaaaccactgttcctcctatgcctgctgataagagagcggactcaaaaactttgttttctctcaattaccaygtcccaattctagagaggctgtgccaagtaaccatggggactctgggacaaaaaagatagccatctcttattgaaaccgtaagaagagccaggtactgca

SEQ ID NO: 9719 - DNA, 201 bp, Homo sapiens
ctctggggacactctggagtcccagctctttgggcctccttctgcctgccctggttctcccagctgcagcattgtggtctctcatcagtgccccctgatgygggcggcctcctcctgggcatccctgggtcataaaaagccatctcaggtaccactagctccactgcagtcctaagacccaagtggagagtaggggccccc

SEQ ID NO: 9720 - DNA, 201 bp, Homo sapiens
tcacctgcggtagtgacctcgggaaaacccagccacaggccaggacctgggctggagaggtgagaaaaccagaactgtgtttttttgttttttgttttttkttttgagacggagtctcactctgtcgccaggctggagtgcagtggcatgatctcggctcactgcaacctcagcctcccaggttcaagcgattctcctgcc

SEQ ID NO: 9721 - DNA, 201 bp, Homo sapiens
gggaccagagggaaggtgtgcagtaggtaagcagccaatgggtggctcctgcccctggtcccgtcccacagcccaagttccaggtacagctcaaccacagrgtggtaggtagatcttgggccagtcacttctcttgctgaacttgcattccactaggtaagcctctctgtctgggggcctttcctgctctgtgacctgtaa

SEQ ID NO: 9722 - DNA, 201 bp, Homo sapiens
agaacccaggtcttgtggctgatctttgcacactgataccatgttcatgcacagaaagtgccagaatgcctatgctcctatctggcaacagtgaattccatctcttcaactcaagatctatttactgagcactcccattttcctaagtgctcttcactggcagctggtcaaaagcaactcagtttgtcccgcatcttctat

SEQ ID NO: 9723 - DNA, 201 bp, Homo sapiens
agcctgtgtgttaagaagcttaactggacacttgcatggaagacccatcacggaggaagagggtggaagtcctctagccttggtaaggagaaggatggacsaggacctcctgtaagatggcaggaaagggagagtgtggacagctgagaaggaagccagagaacaccagatcccctctgcctttaagcctatgggaactgc

SEQ ID NO: 9724 - DNA, 201 bp, Homo sapiens
actttcctcagtgtggcatcaaaggatttaggcctctaaaatctttgatcattccacctcttcattggcatactaacttcctttcaaatgtctttctgacrtgttctagttttctttattatattcaattagtattttctaaacctccttcttcagactttttcagttggctggagacactgagccgtttgaaggctgcaa

SEQ ID NO: 9725 - DNA, 201 bp, Homo sapiens
attgggaactaaagattctaggccttctgtagaatttagagacttggcccaaagaggataaaagtgaagccatctcaggcagacataaatttgtgtgtgcmgattacaaacgctaagtggtccctgtcgcattgaggatgcagcgctgagttataggggatagcaaaaagcttcatagaagagataaaagggccccactcc

SEQ ID NO: 9726 - DNA, 201 bp, Homo sapiens
acactgagccgtttgaaggctgcaaaatcggtccttcaagggacggtgaccatgttgctctagaggtggaggcaggacaagtacccttgtcacagacagagggagggtgggggctggcggctctgatgctgcagcaactgaggttattgagtcatccacggaggccccaggaatcagtgggaaagtatttctattcccctt

SEQ ID NO: 9727 - DNA, 201 bp, Homo sapiens
tccccggaaccccatgtcctgtgttctcactgacacctcttctcctttccctcctgctgcttccccctactacctgcccttcccaacccattctgaatgcyccctccttgcccctgtgccctctgtgttgactctgctgatcccctcgtggccctccacgtcccctggcatccctctcctgtcccatggggccggcctcct

SEQ ID NO: 9728 - DNA, 201 bp, Homo sapiens
gccagctgaaaaggtctgtgtgcatgcagtgaggctgcttctgctctctgagatgcccaactttgggggggtggggggtgcacgcatgtttgtgtgtgtgtgtgtgtgcgtgtgtttgtgtgtgcgtgtgtgtgtgtgtgtgcatgtgtttgtgtgtgcgtgtgtgtgtacgtctcacttcctaagtccgtcttgtctcct

SEQ ID NO: 9729 - DNA, 201 bp, Homo sapiens
gctattttgtgtagctggaactgcccagggggacccccgaggctatggaatagagcccccctgggaagtcagaaatccagaagccatcctggaacatcagycctggggggttcttgagagatttctgagagcaacacttcttttttttttttgagattgagtctcgctctgtcacccaggctggagcgcagtggcgagatc

SEQ ID NO: 9730 - DNA, 201 bp, Homo sapiens
tctcacttcctaagtccgtcttgtctcctcacttcttcctcctccactatctcttttggcctcttcctttactgcttctccccccagatatgttcattccrttataatagtcccacgtccttcatcctttcccctccccctcaccagctgtcagtttatctcctccaaagtccactgttagacatttacttatgtttttaa

SEQ ID NO: 9731 - DNA, 201 bp, Homo sapiens
gaggggaaacatcagatgaccgaggggaatgtgggcagactttgtttctttcttacaacatccacctttaaaaagcatttagggggcaattgacagagcargggctgctgcacatagtttccagtccctggccattccacacccatccctaacccaagcattttatggccaggactgcaaagagcattagttttaaaaaag

SEQ ID NO: 9732 - DNA, 201 bp, Homo sapiens
gataagagagcggactcaaaaactttgttttctctcaattaccacgtcccaattctagagaggctgtgccaagtaaccatggggactctgggacaaaaaakatagccatctcttattgaaaccgtaagaagagccaggtactgcatttatcatgtttcacacattcagcttgttcaatacctcagtgaaatgggtatgatt

SEQ ID NO: 9733 - DNA, 201 bp, Homo sapiens
tggctcatgttccgcagaagcgcctttccttccctatctttctgggactgcttttctaaaccttccctcccgctccccacccctattccttttttctcccyctcggaacacttgaatttgtcattcttggctgttgccagtaatgagatagggctgctgctgcggccgtgggagggaggtggggagtggacaccagaaaga

SEQ ID NO: 9734 - DNA, 201 bp, Homo sapiens
ccgaatgaggtcttgggtggaggtggaacaggccaaactgtagaagaatgggatcccaagagttggcaaaccacaggtcggtgaggcctgggccacgggtragggcgtgcgtcctagggactgaggcacgggaggagccccgaggcaggtctggtgccattagtccagcatggggtttctcatccttagcacgattcacac

SEQ ID NO: 9735 - DNA, 201 bp, Homo sapiens
aaattgtcttctaggaaaccagtccctggtgccaaaaaggttagggactgctgccctagaatcagcctgcccctcaccagcttgggatgcaaggcaggagrtgctgcctctctctgtctcagcctcctgaagtccaccttaaaaggcttataagggttaaacatggtaatacctgtgaagcattaagactggcgcctggtt

SEQ ID NO: 9736 - DNA, 201 bp, Homo sapiens
cccatttatttatttctgtttgttgtctatcacctgcggctagagataataataataataagccaatacttgtatggtgcttattatgtgtcaggtactgrtttatcatttcacatatgttatctcatctaattccttcaactctcctgtgagaaaagtgctgctttgtccccattttgcagagaaggacactaaagctca

SEQ ID NO: 9737 - DNA, 201 bp, Homo sapiens
atacctgctgcagatgtctgtgggtagggcctggctgtaagtgtctaacgagctcctcgggtgatcgtgttctgcggctggacctggcaggccctgagaawgagagagagagagagagagagagagagagagacagagagtctgtgtggcccagtgcctggagctccctgtgcagtgaaacccagacccccttacccgggt

SEQ ID NO: 9738 - DNA, 201 bp, Homo sapiens
ccagcctgggcaacagagtgagactctgcctcaaaaaaaaaaaaaaaaaaaaaaaaaaaaaaaacagaaccatccctccacagctcacaataccccataakgggcactagcatgggagcaactcagggaatcgggcaagcatcccaaaagactttctatttgggcagagtcttgacggctttgtaggagtttgccacaaag

SEQ ID NO: 9739 - DNA, 201 bp, Homo sapiens
atcctatttgatcactctgcctttgctgttcttctaccttactgtatactgtctgtctgtctgtttgtatcagctgcctgaatgctcccttttagagccasagaggggtaaaagatctgaagtaactaaacattttaaagttactctcccctccttctcactgatccagatgtcctcaaaggcttgcccttgtacgggtga

SEQ ID NO: 9740 - DNA, 201 bp, Homo sapiens
agctactggtattggcagaatccagttccttgctggaacagaactcagctcctagaggccacctacagttcctgccacctgcgcccctgccctccccaccycccgcagagtagacagttcacattatagcaactggcatcttcaaggacaaggccagcagtagggtctctctagtgtctagtgctagcaagacagagctgt

SEQ ID NO: 9741 - DNA, 201 bp, Homo sapiens
ttattatggcacgtttggtgtgtcagatcttaattcctatcatccatcttccaaaataaactctgccatatagagctttcacctgtgggaaatgtgctgcwtttccctgtctcattctgaggaagccacaagagccctcaactgcccccaccctgccttggggcctcctgcgcacacctcacccccaggggcaggatgctg

SEQ ID NO: 9742 - DNA, 201 bp, Homo sapiens
gctccaacttcctgttgctcttcctaggttgtgccagacatttagctcagagaaggaaaatagacatagcatgtgttgttggctttccttatcccaaacgrtagcagatactactcatcgctcaatacactctttcccattcagcctaggtaggcctcggaatccttctcgacacagtcctccagtggcacggagaacagc

SEQ ID NO: 9743 - DNA, 201 bp, Homo sapiens
atccacacccctgagtggggcagctccattctggccactttgggcaggtggtggtggtggcggcggcaatggttatgtaagagagagcggtgtcagccggktagactgggagacagcacataaattataggcatcatgccgcactccttcctggccttgctaggaagcccagggtggggcagggagtggagccacttccag

SEQ ID NO: 9744 - DNA, 201 bp, Homo sapiens
agacattattaatcaattgctgcacactttcccatggagcttacatgcagcctcagaatccttttcaacagtgttcaggaagctgctacttactagtgacrgttggtgttcaagacgaaaagctatttcataactctagattttgtttttttaataacaggtgcttactataaaggcagggagaattactagagctctgcc

SEQ ID NO: 9745 - DNA, 201 bp, Homo sapiens
ttctgggtgacattcctctgccactcagcctaatggctcccagatgctccccctgctctgtgctccctcccgcttgttctgggccctgcatgcaaggcccrggcctggggcttgctcacccaggctctacacctcttgactttttctgttgcttttaatctaaaacactgtgttcctccttaacgtgatggcttgacagag

SEQ ID NO: 9746 - DNA, 201 bp, Homo sapiens
ctgagcatggaatagatggaaagatgtggcaggaaaggaaactaatatggttgatggggatgggattgagggatggccttgaacatggtagaaaggagccyttgctggttcttgagagggagagtgacaagactcacgtttcttagctctccatcacccctgaccacctggccatccctcctcagccctgcatcatcacag

SEQ ID NO: 9747 - DNA, 201 bp, Homo sapiens
gcgcaaggcatctgccctccatgtggctgaagcatcccaaaattgccacaggctgaattttgtcaccagcctgcttctcatgcagaggacatctcccccarccaggaggcacagatttcccagctaagctggcccctctggcaggctgcgctcaggggatattttcagattctgggtgacattcctctgccactcagccta

SEQ ID NO: 9748 - DNA, 201 bp, Homo sapiens
aaagtggtgtcccagtttccacttggtccgtgacaacattcttccccagatctctgaaaaagccttggttagccctggatttgatcctggttggagacatkcatcctgctaccagggcaggctctgtaattaacaaactgtgtgattatccctaccacgtaaacattgtccctagcgggatggaagatgtttcttggaatc

SEQ ID NO: 9749 - DNA, 201 bp, Homo sapiens
tgggcatcctgcgctgagcggcccccacactctgacccctgcacccctatgatgggccacagacctaaggacccccaccaagcaaagaggggctctgctcygctttcagcctgcaaaggctgtttggtggaagcagacggaacatcagtccatctgatacttgggttggccaagagaaataagtaccttggcataacagac

SEQ ID NO: 9750 - DNA, 201 bp, Homo sapiens
tgacacctatgcagccgagagtgctaacaacaggccgggctgccctcagagctccagtctgtgtcactggggacatctcagagctctagcctgtgtcactrggggcctcaccagagcctgccacagtgggagccagggccccgtcaggcctggcaggcgcaaggcatctgccctccatgtggctgaagcatcccaaaattg

SEQ ID NO: 9751 - DNA, 201 bp, Homo sapiens
gcagcagccacagccttgtgccttcccggtcccacttgtgtcaaagctatacaggcctagacaggatctggtaggagcctgggctttagagacagagcctraggccgagagaaggcaaggggttcttctagggtcacccagccaatgctggaaacacctagactaacaaagtggcaggattatctgctggctgagttctgg

SEQ ID NO: 9752 - DNA, 201 bp, Homo sapiens
cactgccagcccagctcctcgaaatggaggtgggaagaagagggcagaggcattgagggaaagcaagagaaaagacagagaaagtagaagagagggatgaygggggcctctgaatagtcaaggactcccaagctgacctcccacctgcacccacaccagaggactgtgggggcctctgtactgagtcaaactggtctggtc

SEQ ID NO: 9753 - DNA, 201 bp, Homo sapiens; identical to SEQ ID NO: 1227

SEQ ID NO: 9754 - DNA, 201 bp, Homo sapiens
ccctcctctggcctcagaagccgagggacccaagtaacactcacccaggtccccaagccagggaagagaggctgacagatgttaagcatatgggaaacgarggaccgcatttgctggagagtgaatgggctggggtgggagtcacagttccaggatgctgccctgggagacaaggagaccgtgaaaagattcagctggacc

SEQ ID NO: 9755 - DNA, 201 bp, Homo sapiens
aaaatcagggatgggacaggccttcaaggtcattcaaagcaaacgcctctctacccacttgtgctcccctagagccttctcagccacaatgactacaatcyatcccttcctgcattggttcttggcactgaggttaaaaagccagccttgcagaggggtggctggatgttggcccaggagtcacagcttctgccatcacac

SEQ ID NO: 9756 - DNA, 201 bp, Homo sapiens
tcttttgtgtcactgtctgggggtgggaggcagggagaacgcaggcaacgttactactctaatagcctcaaaggacaccggatttggggcaattgcacagrttcttagaacacaactccccatagtgtccgttacctgttgtgaaagtctggaacacgccaaccctctgttacccccggggtatcctggactgggatcccc

SEQ ID NO: 9757 - DNA, 201 bp, Homo sapiens
tagaatgcactgtacctctttagaggtggggaaggaaggcctaaagaagagttgcaggagacaaggtatcacatttaagtaatggcagagagttttggtcygctactggcctctgccagctcagcatgtggcctcctcgatacccacggtggcaggtggcactagcagggtgctcactgggctctctggctggccctcctc

SEQ ID NO: 9758 - DNA, 201 bp, Homo sapiens
cctatgatgagatggctagagggctggggaagggcacagggacagaagcccacccacccagccatctcagccttcattctgtggctgtgctggcccttccycttgccccttctcaatgcttcagccaaagggcatgaggattctgatctgccagccagagcaagggcccgtgtggtggacacacttctgtagaatgataac

SEQ ID NO: 9759 - DNA, 201 bp, Homo sapiens
agccagctgagcacaaggggccatccgtgagctctggacacacacatacatatgtgcacatggacacacatgcataataaaggcacacacatgtgttcacrtgcccaagcacatacccacacacactcaaacgtgggcacacacacacatatacacaagcacatacctgtatactcatacatacatatacacacatgtgca

SEQ ID NO: 9760 - DNA, 201 bp, Homo sapiens
gcctggatgttaagcctcatggtttgcatgaaggaccatggctgaaacacacattcccctctttcaggctgtgggtttcagaccagaggaggaaatgagarcttcaggctagagctgtttgcaactgcagctacccctcctggaggccagtggggctccccagaaacaggaatgccctggggaggagagtggatgggccct

SEQ ID NO: 9761 - DNA, 201 bp, Homo sapiens
tggtccaggattaggttttcggatcctaaagggtttgtccttcttgcttaaatctccaaagacattaccagacccttcctcgtccctttctttcatgatcrgatggcttcttactgaagagtctgggagagacggaaaggtcaagaatgtagttaaggaggaggcagggagacagctaaggacctctcttccaagcacgtc

SEQ ID NO: 9762 - DNA, 201 bp, Homo sapiens
tcatcgctcaatacactctttcccattcagcctaggtaggcctcggaatccttctcgacacagtcctccagtggcacggagaacagcaacccaggctgccrctcccgtccattagagtcagtgcacaagaggaaatccatttgccattcatggttcaacccaaccacattgtacaacggtctctccatgtgaccacacatg

SEQ ID NO: 9763 - DNA, 201 bp, Homo sapiens
caggtgtctgcattctgctgcaaactggaagagtgattcatccagaaggggcatggggtctgctgtcctgagtacggagaatcctctgcttggggttaggrtgtcctgacgctagagggcctggtcccaggacagtggcaatcctagactcagattgtaggaagaaacatgtaacccaggctacattgaatttgcagagaa

SEQ ID NO: 9764 - DNA, 201 bp, Homo sapiens
tttaggaggagcataggcaacaaaaggagagtgcagagcaagcaggcgggtagcatgcttcctgtccctgctggtcctgccaaaccctgcgcttgcagackgcacagccacctttctcaaccaggacttccaccatccacgcaccaatgggaatgccgctctggcccgcaggggctcccttgagcactggccaggtcttcc

SEQ ID NO: 9765 - DNA, 201 bp, Homo sapiens
ggcttgctgttataacaaacccactgtcgcaatcacacacccactcccacaataactaacccacttccatgataactaacccactcccacaataactaacmcacttccatgataactaacccactcccacaataactaacccactctcatgataactaacccacccccacaataactaacccactctcacaataactaaac

SEQ ID NO: 9766 - DNA, 201 bp, Homo sapiens
aaatgtccacatttgtaaaatgaatttgtgcattaactcattaaatcactgagtttggaactctaggtaagtttagactgtgcgacacagtacgatacagrgcaaaaggcagattctggactccacaagatctgggttcaaatcccagctctggcatcaagaagcttcaggaagttgggttctttcaaagcctcggccctg

SEQ ID NO: 9767 - DNA, 201 bp, Homo sapiens
acgtatccccctttcctggaaatcagtttcattatctgcacttggaaaaccagggaatttcaagtctgggttttgtacaggtgcctaccggtgacaggctyttggtaaatatttgtagttaaaatgactaccaccaagtttaacttctaaggtagaggatgggaggagagatcatgaagttctctgactactgaaatttca

SEQ ID NO: 9768 - DNA, 201 bp, Homo sapiens
ggtgttttttctcatctgcagaagtcaaaatgtccccagccactttccaggcctccccacccggtgtggcctgcccaggtgattccagcttccttgaaccmagcaccttatgggatggggctgaaagtgggccccacggccagctcccgagtaaggtcagaggtcaggagagtaggacgagttggtcatcctgggctcctc

SEQ ID NO: 9769 - DNA, 201 bp, Homo sapiens
taggggactggggaaaaggtgtgagagagacaaaggggagtccctaacaatgaacacagaacagaaagaacgccaccgagtctgaagtgggaggcagcccrgagggactcagagggacaggagtgtgggtgggtgttccctggatgtttcctgaaggggtggaacctgcacttctatggactaagagctaagatgagcctc

SEQ ID NO: 9770 - DNA, 201 bp, Homo sapiens
ccacatcctaaatttgttagcaccagctaatcgtcttaaccttcctccctccagtgctcccaataggcgcctccttaaacacacagggtgcttttttgatyctcagaggggagcaccgggagggaccaaatccccacaggggcagaggaagtttccctggaggtccctcctctgccgtggctgctggtgagccggggtgtg

SEQ ID NO: 9771 - DNA, 201 bp, Homo sapiens
tgcagataaatgggcagggacacatgcccttggggagagttagacccagaggacttggaagggaaaggaaccccagatgaaaagagaagagagctcctgtytggctcagccagaaggtatcatcctagcaaagctgctggagtgaaaatgaggcaagaagtcccaggcagggaccagagggaaggtgtgcagtaggtaagc

SEQ ID NO: 9772 - DNA, 201 bp, Homo sapiens
ctctctgggaggccatgcatgtctctcttaaccaagagaggaacctagaagaagagcagcccagccctcggtaacaaggggctgggggtggtcccaagacrgggtcctggatgaagaagggtctggtggcactggaggggctgggggagagtgtcctggttcctaatcaacaggaagggcctctgcctccaggatcacttt

SEQ ID NO: 9773 - DNA, 201 bp, Homo sapiens; identical to SEQ ID NO: 1225

SEQ ID NO: 9774 - DNA, 201 bp, Homo sapiens
ggcaagtgacttgacatctctgagctgcagctttcttacctctaagatagggatcatgacaacctctacctccatgctgtcctgagatgaaggagatgtaygtaaagcacgtggtacagtacctggcatggggaggagtttaatcagtggtattgagctgctggtactcagctctcctgaaccgcaggccaggactctctt

SEQ ID NO: 9775 - DNA, 201 bp, Homo sapiens
atcctggtcttgtcacccagtgaacacaggaggccagggccctgtgggttggtcacccctggacattccacccacagtgccttgggcagggcaaggtctgmgcctgctccaaggcatccaggcagccccctcctcaaggggccacaggagacagcagcagccacagccttgtgccttcccggtcccacttgtgtcaaagct

SEQ ID NO: 9776 - DNA, 201 bp, Homo sapiens
aatgtctccagtaggcaaggtgtgtggctgacaagagctggagatgggcaaacctggggcacacagagctacatccttggcaggctggctcctcagcctcrtggagaccctggggagcctcctggagctagaatgaggaccaagtatgggcagaggctccctcagtgcctgccttcctctttaaaccccaactggggagga

SEQ ID NO: 9777 - DNA, 201 bp, Homo sapiens
cagccggcactccatagggccacagcagagactgtttcttcgtggcacggaaggacatctctgcttgctggtcccacgggctaggacagcccctattgacsttgcactatagctgcatgtgacctttaaccaatggtaaaatagccggatttgtttccacctccttctgaggttctgacctgtagtagagaaaagaaatag

SEQ ID NO: 9778 - DNA, 201 bp, Homo sapiens
cagagacccagggctccggtggggctaggcggtgcccagtgtgggctacagtcccagggccgcatcctccaggattccagccctgggaggccggccccaakcaaggcggggccaaggcagggacacaggtctagaaccacactgttggtggcttgtgcagctggcatttggccctgagacatcagatctgggactcagaag

SEQ ID NO: 9779 - DNA, 201 bp, Homo sapiens
atgcgcagtctgcaatagggtttggggtcctgtgagaatctattgccaccgctgacctcctgctgtgaggcctggttcttaacaggtcacagtccagtccrgatctatggcccagtgcttggggacccccgctctaagagaagacacagagaagcagaggaagcaggtgaggggagtaacgagagggaggttgcagaggta

SEQ ID NO: 9780 - DNA, 201 bp, Homo sapiens
caggatgaacatgaactacatcaacaagcagcctgggtccacctgcgggtagagggctgctccaggccctgtgttcagtgccgtgggatgcaaggtgatcmggcaaagttccttggttcagggctgggcaagtgctaaacagaagcataggcatctagtttgggaaatgcaagaaaaggagtgactactcctgaagggagg

SEQ ID NO: 9781 - DNA, 201 bp, Homo sapiens
aaaggaagaacagtgaaactacgacactgtgtgcatgtgtctagttgaagttcctcctaagatgggcagtgtctggatggagttcgtgatcagtcctcacygggggactctgggagccaacttcaggcaagagacgagcatggtctgaacttagcccaggaatgaggccacatggtcctcaaaggaacttggaagggctca

SEQ ID NO: 9782 - DNA, 201 bp, Homo sapiens
cggaatgcagccccactcacagccatgcctggccccgccactcgcctctctcagttgagggaccctagcaccacccagttactccccaactgcaggccagygagctaagtgcagcccaggggtgccagcaatcatttccactcatgtcacgggaccaggcatcccccgaagctaccctggacatgtgaatggcatgagcgt

SEQ ID NO: 9783 - DNA, 201 bp, Homo sapiens
atcgcctgaggtcaggagttcaagaccagcctggccaacacggtgaaaccctgtctctactaaaaatacaaaaattagctaggtgaggtggtgggcgcctrtactcccagctactcatgaggctgaggcaggagaattggttgaacctaagaggcagaggttgcggtgagccgagatcgcaccaccgcacttcagcctggg

SEQ ID NO: 9784 - DNA, 201 bp, Homo sapiens
ccattttatgaggctaacattaccttgataccatagttggatgaggactgtatgagaaaataaaattataggccaatatctctgatgaacatagatgcaamaatcctcagcataatattaatactagcaaaagatggtccaatatatgcaaatcaataaatatgatacaccacattagcaggaggaaagataaaaataata

SEQ ID NO: 9785 - DNA, 201 bp, Homo sapiens
ggtggatcgcctgaggtcaggagttcaagaccagcctggccaacacggtgaaaccctgtctctactaaaaatacaaaaattagctaggtgaggtggtgggygcctgtactcccagctactcatgaggctgaggcaggagaattggttgaacctaagaggcagaggttgcggtgagccgagatcgcaccaccgcacttcagc

SEQ ID NO: 9786 - DNA, 201 bp, Homo sapiens
atgaagaaaattataactaggttcttttttagagacccactgcagaaaaataataattcaaaacaaaagtcacagctggaatccaataataattgtgttayagttttcctttgaaatagaatttctctctctctaatctctccttttttactaaaaagaaatgatagtatggccaatttatgtgcaaaataagtttcagga

SEQ ID NO: 9787 - DNA, 201 bp, Homo sapiens
aggcccggtgggatatcaaattagggagattcataggctcttaaatcatctgtagttttcaaaacaccgcaacttcagttttctcagacgaagtgaaacartggggaaataaataacattaatcatttgacaaaagagaatttatatgtcagaatggaagaggaacttattccatgagagagctaactaaaaacatcatga

SEQ ID NO: 9788 - DNA, 201 bp, Homo sapiens
tagagggagggtgcttgtatagttttagcagcaggggattggcaaggagaaacagatcaggcccggtgggatatcaaattagggagattcataggctcttraatcatctgtagttttcaaaacaccgcaacttcagttttctcagacgaagtgaaacaatggggaaataaataacattaatcatttgacaaaagagaattt

SEQ ID NO: 9789 - DNA, 201 bp, Homo sapiens
attttttagaataaccatttaaaaatttccaccttcctggaatgagtcctttgactctcccttttgcttttccccatgctcttcttaattactttaatgtwttattagcatctgtaagacccatgaggggaagctgaaacagccaatttgctacggcttctcgtgttgttctggacaacagtaggagtagcattacatagg

SEQ ID NO: 9790 - DNA, 201 bp, Homo sapiens
aatgaataaggcatcctattcgatagtacaacagggtgagtatagtcaatagaaacttaattgtacatttaaaaataacttaaaaagtatcagtagattgtttgtaacacaaaagataaatgcttgagaggatggacacttcattgtccatgatgtgattattatacattgcatgtctgtattagaatatcctatgtacct

SEQ ID NO: 9791 - DNA, 201 bp, Homo sapiens
ggctaaagaaagagaaaggagaacagctctctctcttgcgaaagagaggggcacctgaatgggacttctggcccactgtggagtgtaccggattttatagwcaggcttgaggaggctatgactgatttacatagggcccatagattggttggaccaggtgcgatgtttacatagctggtgaggaagctggtcgtcccaccc

SEQ ID NO: 9792 - DNA, 201 bp, Homo sapiens
tcagtggccacactttcattttgtcccatgttgttgctgaggtggtatggctatctgcttcaggtccgtcctgtcccttggtggggcccttgtggccaagrgacatagagccaaaaaacttaacagccaatttaagtgttctaggccagatggcatagagggcaggcactcatcaatgtttaaaaccttttatgcaataaa

SEQ ID NO: 9793 - DNA, 201 bp, Homo sapiens
gatcagacaacttacagaatgggagaaaatttttgcaatctacccatctgacaagggtctaatatccagaatctacaaggaacttaaacaaatttacaagaaaaaaacaagcaaccccatcaaaaaatgggcaaaggatatgaacagatacttctcaaaagaagacattatgtggccaacaaacataggaagaaaagctgc

SEQ ID NO: 9794 - DNA, 201 bp, Homo sapiens
ttatttctcatttttcccccttttggctaagattggccagaggcagcatcagtggccacactttcattttgtcccatgttgttgctgaggtggtatggctrtctgcttcaggtccgtcctgtcccttggtggggcccttgtggccaagagacatagagccaaaaaacttaacagccaatttaagtgttctaggccagatgg

SEQ ID NO: 9795 - DNA, 201 bp, Homo sapiens
ataaatttttccatatgcattgatatgattacctcaagcctttttacttcatgccattgatttgcttttcaggtgtgtctgtttcttttctttcctttcctttttttttttttttttttttttttgagacagagccttgctttgtcgcccaggctggagtgcagtggcacgatctctgctcactgcaacctccgcctcctg

SEQ ID NO: 9796 - DNA, 201 bp, Homo sapiens
agcaaagctttttctcgtgctctgaagggtcttgagaggggagtgggatgccttctgtgaggatttttatcgcagtgaagctcaagtggtacccaactgcrttgtaattaacatgattattggcatgtttttgactctcattttctacaaggctgcagtgggcccacccatgggctggcccataactgtatgttatgtgga

SEQ ID NO: 9797 - DNA, 201 bp, Homo sapiens
aaataccaaactacttggactttatattccatctccccaccttctcaaggtctttgttcctttattgtttcttcatggatggtcttttttgttgttattgktttgttgtttttttggggggagtgaggtggagggggacagaatctcactctgttacccaggctggagtgcagtggtgccatctctgctcactgcaccctc

SEQ ID NO: 9798 - DNA, 201 bp, Homo sapiens
cactttgggaggctgaggctggaggattgctggagccctggagttcaagaccagcctgggcaacacagggagactcccatctctacggaaaaaaaaaaaaraaaagaaaagaaacaaaaaagccaggcatggtggcaaatgcctgtgttctcaattacttgggaagctgaggtgggaggatcactttggcccaggaggttg

SEQ ID NO: 9799 - DNA, 201 bp, Homo sapiens
gtgaattctgcttaaaaattattttagaagatcagcatatcatttctttagagaaaatgaagaattgataaaattggaagacacagactgattttcttccragaacactgagaactaaaaatgagaaaaaaggaaaatatattatttctgaaaagcatgttttctgcaattccgttgtagaatatgacagatgatattaaa

SEQ ID NO: 9800 - DNA, 201 bp, Homo sapiens
atggaacttagtgtaataaaacaaataacggtttatgctgcaagtactgtatttataaccattttttaaaatttcacagttgataaatgatacataaatartaccttgtgctaatttgtctcctaagacagccagtgtttctcctcttctgggctacattgaggtttggctgagatcaccttgtgattcctatacatgagc

SEQ ID NO: 9801 - DNA, 201 bp, Homo sapiens
tggcttgcctccctgtgcttctgtcttctctaggattttgttccctgaagtcctggttgtctcaacaactgcttgatgctttcgggcatcatagcgtgcaygcgtgtgtgagtgtgtgtgtatttgtgctttatccagcttttaaagtggctttcagcagaagcattggtctgaagtatcaaacaaccccatcatggctag

SEQ ID NO: 9802 - DNA, 201 bp, Homo sapiens
cttttaaaatttgatttacttatggatttgctttgaattgccataaattgcaggagggcctgcacaaggagggtgctgttgagaccagaaaagaggccacmggtatctgtgtgggtgctacaatctccagaccatcacaattggttagcaggtgggtagcaaggaaagggagactttggagatagtgctgtggtctggagg

SEQ ID NO: 9803 - DNA, 201 bp, Homo sapiens
catttcacttggaataaaattcactctttagcacatgtaggaggtccttggtttgtccctgcctcactcctcaacatcttgaactgcattctgtcttgttygccacattccagtcacattgacctttctcagtttctctattgtaccagattctttcctgcatcgggtttactccatgaaaactcaccaactaatatattt

SEQ ID NO: 9804 - DNA, 201 bp, Homo sapiens
gatgccagatgggcctgggcgtcacatcagtatatttgaaaatatcctccagatgatcccaatgtgcagccagagtgagaacccctgagccagactgatcyttttttttttttttttttttttttttttttttttttagacggagtctcattctgttgcccaggctggagtgcagtggcacaatctcggctcactgcaagc

SEQ ID NO: 9805 - DNA, 201 bp, Homo sapiens
aagtgctgggattacaggcataagccactgcgcccggccagactgatctttaaaacataaaaatgtgattatatccatggttcccaaactcatctgcataycagagtcacctaggaatcccctcaaaattccaaagcactggccataccaagactaattaattcataatatctggaagtgggactcatgcatccatatttt

SEQ ID NO: 9806 - DNA, 201 bp, Homo sapiens
ttagctgggggccatacaaaaacagactgggaccagatttggtcttactggagcttgccagcttctgctccagatttgatttggtcccatttaattctttccctcctttccttctttccccctttcttttcttccacctttccttctttccccctttcttttctcccacctttccttcctttcttcctacctaccaccaac

SEQ ID NO: 9807 - DNA, 201 bp, Homo sapiens
tagctgggggccatacaaaaacagactgggaccagatttggtcttactggagcttgccagcttctgctccagatttgatttggtcccatttaattctttccctcctttccttctttccccctttcttttcttccacctttccttctttccccctttcttttctcccacctttccttcctttcttcctacctaccaccaact

SEQ ID NO: 9808 - DNA, 201 bp, Homo sapiens
gccacacatcccagaaagaaagccatgggtgtcagccatgaaggcaatatccaagtagaggagcataggaactggcagtagcaatcccattgttgggtgcyaagggctatgcatgattcatctcatttaatccccatgaccactctgtgggcacactcacacccccacccctactcctgggtgatgaggacagggaggctg

SEQ ID NO: 9809 - DNA, 201 bp, Homo sapiens
gctgggggccatacaaaaacagactgggaccagatttggtcttactggagcttgccagcttctgctccagatttgatttggtcccatttaattctttccctcctttccttctttccccctttcttttcttccacctttccttctttccccctttcttttctcccacctttccttcctttcttcctacctaccaccaactaa

SEQ ID NO: 9810 - DNA, 201 bp, Homo sapiens
actaaataaacacatttttgatgaaggccacacatcccagaaagaaagccatgggtgtcagccatgaaggcaatatccaagtagaggagcataggaactgrcagtagcaatcccattgttgggtgccaagggctatgcatgattcatctcatttaatccccatgaccactctgtgggcacactcacacccccacccctact

SEQ ID NO: 9811 - DNA, 201 bp, Homo sapiens
tatatgccttcttcaaccgggacctgaggaccacctatcgcagcctgctccagtgccagtaccggaatatcaaccggaagctctcagctgcaggcatgcaygaagccctgaagcttgctgagaggccagagagacctgagtttgtgctgtaaggtcatttatcactattttccttttatcccccaaacccttttatgcagc

SEQ ID NO: 9812 - DNA, 201 bp, Homo sapiens
atctcagggtccttttttttttttcactaaataaacacatttttgatgaaggccacacatcccagaaagaaagccatgggtgtcagccatgaaggcaatayccaagtagaggagcataggaactggcagtagcaatcccattgttgggtgccaagggctatgcatgattcatctcatttaatccccatgaccactctgtgg

SEQ ID NO: 9813 - DNA, 201 bp, Homo sapiens
ctactaattgagcttcttttctgggccacaaaggtgatagccctttattagcaactccttagcataataaaattgccttttcttattatgtgagttatacrggatttatctttttgcttttttaatatttattgactacctaatctatgttggttagtcttccttatcataagcaaggcaaataacacctttgctctctag

SEQ ID NO: 9814 - DNA, 201 bp, Homo sapiens
tcattaacccttttatatatgccttcttcaaccgggacctgaggaccacctatcgcagcctgctccagtgccagtaccggaatatcaaccggaagctctcrgctgcaggcatgcatgaagccctgaagcttgctgagaggccagagagacctgagtttgtgctgtaaggtcatttatcactattttccttttatcccccaa

SEQ ID NO: 9815 - DNA, 201 bp, Homo sapiens
ccttagcataataaaattgccttttcttattatgtgagttatacaggatttatctttttgcttttttaatatttattgactacctaatctatgttggttastcttccttatcataagcaaggcaaataacacctttgctctctaggatcttatattctagtaagaataaacaggtagataagaaacagataagttaaaaca

SEQ ID NO: 9816 - DNA, 201 bp, Homo sapiens
gtcattatgcaatgataaagaggtcaattaatcaggaagatacaacaatttaaatatttatgcatttaacattggaacacctaagtatataaagcaaatastaatagaatagaagggagaaataaacagcaatacaataatagtaggggacttaaatatcctactctcaacaatgaataaatcatccaagcataatatcaa

SEQ ID NO: 9817 - DNA, 201 bp, Homo sapiens
caatgtacatggattaaattctccacacacaaaagacatagaatggctgaatggataaaaaataagagccaataacatgctgcctacaagagactcacttkagctttaaggagacacatgggctgaaagtgggatggaaaatgggatggaaaaagatatttcatgcaagtagtaccaaaagagagtagcagtggatccact

SEQ ID NO: 9818 - DNA, 201 bp, Homo sapiens
tttgtggagaatgaaatggaggagggtgagaatgaaaacttggagaccaatgggaaggcttctacgttagtcaaggcaagaggtaatcgtagcttggactkggttggagtagtggagacagagacaactggagaaattccggatctgtcttggaggtgtatcggcaggccttgctgatggactggatgtaggcgctgaggg

SEQ ID NO: 9819 - DNA, 201 bp, Homo sapiens
cacacccttagtaattgcaggattttttttggaacgtagtgctgtgggctgtagtaatcaaagtgttcttggctagtgggaggaatcatcagtactgtgctgtttcagtggtaccttctgtaactgaacacgagccttggccaacaacattcttccttttcttcaaaggccaactgaaggactgacagccactaagtttta

SEQ ID NO: 9820 - DNA, 201 bp, Homo sapiens
tctcttgccttctgtgcacccacaggcttaataccacatggaagccttggtggcttctggcttgcaccctctggaacagtggcctgaactgtaccttggcmtcttttagatgtggctccatggctggagcagagtagctaggacaccaggtgacatgtctcgaggctgcacagagcagcaggttcctggtcctggcccatg

SEQ ID NO: 9821 - DNA, 201 bp, Homo sapiens
ttaaataaacttttagtcttactctaagacttgctttggtatcttcttctcctttatacccctcagacaaattctttcttctgaggaggcaagaactgagrttgctttaggcccatatggatctgctgctggtaacagaatgacaccaaagacagcaaaaaaaaaaaaaaaaaaaaaaaggccacaaatggggtacaactc

SEQ ID NO: 9822 - DNA, 201 bp, Homo sapiens
agagttcaaaatacatgtctctgccacttctttaattagattgtcaattagatatttaggcctttctgagtgatcaaacacttttgatgtttctagctgcytctgatgtttatgggacaggtacagtttttgctacggttttctgcatgtttcattcattcatttattcatccaaccaatatttatttaatgcttatgtca

SEQ ID NO: 9823 - DNA, 201 bp, Homo sapiens
attgtgagtcaggtgtggagtggtgaggggtgtgtgagtgaatgtggggtctggccactgcacagtcagacatgctggctgctgccatggggcaggcagcyccaggtgctggcatgggcgtcagctctctgggaggctgtggctggaccaggcacactgcaagcagcttccctggctggcattggggaatgtggtggcacc

SEQ ID NO: 9824 - DNA, 201 bp, Homo sapiens
agagagtagcagtggatccacttatatcaaacaaaatagactttatgccaaaacaatcacaagagacaaagaaggtcattatgcaatgataaagaggtcarttaatcaggaagatacaacaatttaaatatttatgcatttaacattggaacacctaagtatataaagcaaatactaatagaatagaagggagaaataaac

SEQ ID NO: 9825 - DNA, 201 bp, Homo sapiens
gtcttgaactcctgaccttgtgatccacccaccttggcctcccaaagtgctgggattacaggcgtgacccactgtgcccagcggtttgtcttattatttastgatgtatccccagtgtgtctggcacatagtaggccctcctctttagtaaatatgttgaatgaataaggcacggttagaggatggctttgtgaatctacc

SEQ ID NO: 9826 - DNA, 201 bp, Homo sapiens
gaagtgtgtccaacttcccatttcaccatggctgtgaactcagcttttcaggtttctctggggtttccttggccaagaggaggtgtgttcagtctgttggrtgtttagaattgtttttatttctcatttttcccccttttggctaagattggccagaggcagcatcagtggccacactttcattttgtcccatgttgttgc

SEQ ID NO: 9827 - DNA, 201 bp, Homo sapiens
tttgttgtgtccctgtgaagataagctagtagtcttttgaaaggactagtttctttttagctcttagggaggaaagcctgatggctcccctgaaggtgggrgtatcaggaagtgtgtccaacttcccatttcaccatggctgtgaactcagcttttcaggtttctctggggtttccttggccaagaggaggtgtgttcagt

SEQ ID NO: 9828 - DNA, 201 bp, Homo sapiens
aggcacccgccaccacacctggctaattttttgtatttttagtagagatggggtttcaccatgttagccaggatggtctcgatctcctgagctcgtgatcygcccgcctcagcctcccaaagtgctgggattaccccagtattttaaacttatgacaacttaacactgattgcataaacaagcaataagtaataaaaactc

SEQ ID NO: 9829 - DNA, 201 bp, Homo sapiens
gggggccatacaaaaacagactgggaccagatttggtcttactggagcttgccagcttctgctccagatttgatttggtcccatttaattctttccctcctttccttctttccccctttcttttcttccacctttccttctttccccctttcttttctcccacctttccttcctttcttcctacctaccaccaactaacca

SEQ ID NO: 9830 - DNA, 201 bp, Homo sapiens
ggggccatacaaaaacagactgggaccagatttggtcttactggagcttgccagcttctgctccagatttgatttggtcccatttaattctttccctcctttccttctttccccctttcttttcttccacctttccttctttccccctttcttttctcccacctttccttcctttcttcctacctaccaccaactaaccag

SEQ ID NO: 9831 - DNA, 201 bp, Homo sapiens
ggccatacaaaaacagactgggaccagatttggtcttactggagcttgccagcttctgctccagatttgatttggtcccatttaattctttccctcctttccttctttccccctttcttttcttccacctttccttctttccccctttcttttctcccacctttccttcctttcttcctacctaccaccaactaaccagtc

SEQ ID NO: 9832 - DNA, 201 bp, Homo sapiens
ccatacaaaaacagactgggaccagatttggtcttactggagcttgccagcttctgctccagatttgatttggtcccatttaattctttccctcctttccttctttccccctttcttttcttccacctttccttctttccccctttcttttctcccacctttccttcctttcttcctacctaccaccaactaaccagtcat

SEQ ID NO: 9833 - DNA, 201 bp, Homo sapiens
caggccttgctgatggactggatgtaggcgctgagggagacaggcatgaaggatgactcttgtgcttttggctcaagcaattcagtagatggtgatactgyttaccaagacatgatggtagtagaattggtggtaaaaatcaagagttctattttgattgataaattttatatcaatagacatttgaatatgagtctagaa

SEQ ID NO: 9834 - DNA, 201 bp, Homo sapiens
catacaaaaacagactgggaccagatttggtcttactggagcttgccagcttctgctccagatttgatttggtcccatttaattctttccctcctttccttctttccccctttcttttcttccacctttccttctttccccctttcttttctcccacctttccttcctttcttcctacctaccaccaactaaccagtcatg

SEQ ID NO: 9835 - DNA, 201 bp, Homo sapiens
ttgaaaacactgctgtttgtggtttgctggtacttaaaatgttctgctgtatgtattttttgcttgaccagggtttataattactaaataaaggaaataakagaaaagggaatattttcaagaagaaaaacacattgtagctccatttagctaacaatttaggttatttttctttaaattgattctaccattttatatatc

SEQ ID NO: 9836 - DNA, 201 bp, Homo sapiens
aaaaacagactgggaccagatttggtcttactggagcttgccagcttctgctccagatttgatttggtcccatttaattctttccctcctttccttctttccccctttcttttcttccacctttccttctttccccctttcttttctcccacctttccttcctttcttcctacctaccaccaactaaccagtcatgtacca

SEQ ID NO: 9837 - DNA, 201 bp, Homo sapiens
aaaacagactgggaccagatttggtcttactggagcttgccagcttctgctccagatttgatttggtcccatttaattctttccctcctttccttctttccccctttcttttcttccacctttccttctttccccctttcttttctcccacctttccttcctttcttcctacctaccaccaactaaccagtcatgtaccat

SEQ ID NO: 9838 - DNA, 201 bp, Homo sapiens
aaacagactgggaccagatttggtcttactggagcttgccagcttctgctccagatttgatttggtcccatttaattctttccctcctttccttctttccccctttcttttcttccacctttccttctttccccctttcttttctcccacctttccttcctttcttcctacctaccaccaactaaccagtcatgtaccata

SEQ ID NO: 9839 - DNA, 201 bp, Homo sapiens
cagactgggaccagatttggtcttactggagcttgccagcttctgctccagatttgatttggtcccatttaattctttccctcctttccttctttccccctttcttttcttccacctttccttctttccccctttcttttctcccacctttccttcctttcttcctacctaccaccaactaaccagtcatgtaccatactg

SEQ ID NO: 9840 - DNA, 201 bp, Homo sapiens
ctgggaccagatttggtcttactggagcttgccagcttctgctccagatttgatttggtcccatttaattctttccctcctttccttctttccccctttcttttcttccacctttccttctttccccctttcttttctcccacctttccttcctttcttcctacctaccaccaactaaccagtcatgtaccatactgcctc

SEQ ID NO: 9841 - DNA, 201 bp, Homo sapiens
catgcaggtgagcaggtgcaggagctggggggagtgcctttaggcgctggcaggaatgaacccgtaccagcccatggcacattctagcagttgcccacaayctctggaaccccagagggcatgtgttacaaacaatgctcttttggtatttgctgtccaaagatggctaagtgttaactagctcagtggggagacatatac

SEQ ID NO: 9842 - DNA, 201 bp, Homo sapiens
tgtctgtgccttaaaattattatttttatcagttcatcttttagtctttccactcaagaggtgagtagttaacataccacaattacagtgttattatattytgtgtttttctgtttacttattattatcagtgagttttataccttcagatgatttcttattgctcatttacttcctttactttcagactgaaaaaattcc

SEQ ID NO: 9843 - DNA, 201 bp, Homo sapiens
agccactctagtgagtgtgtagaatttctgttgtcatttaaatttgtatttttcttcttattaatggtgttatcttagccaattgtgtaatttctttgatragatatccatacacagtttacctccactttttaattggattgtttgtggctctattattgaattgtagcagttctttatatattctggatacaacctctt

SEQ ID NO: 9844 - DNA, 201 bp, Homo sapiens
agcaaacaaacaaaaaacacctcaaaaatgaagcggatttgtgggaaaggagaaaaaggccccagaatgagtggcattagaaaatattagaaaattgtacmtgtcaatgaacacttgcggagcctcagaagcatctccatggatcaggggtttaccttgttttggaagatctttgttgagtcttttgcaccatttaagagc

SEQ ID NO: 9845 - DNA, 201 bp, Homo sapiens
aagaggaagagatgaaggggtgtgtgggatttgggggtggtggataaggaagtggcattgttacatcttgctacagattttgatctctcatactgaccctrtgtgctttcacttcccatcagctgtcacaggacacagcaattaaggacccaactccttgtttccctgaattgtgcaataacctcattgttcacaactgct

SEQ ID NO: 9846 - DNA, 201 bp, Homo sapiens
accagatttggtcttactggagcttgccagcttctgctccagatttgatttggtcccatttaattctttccctcctttccttctttccccctttcttttcttccacctttccttctttccccctttcttttctcccacctttccttcctttcttcctacctaccaccaactaaccagtcatgtaccatactgcctctcctc

SEQ ID NO: 9847 - DNA, 201 bp, Homo sapiens
ccagatttggtcttactggagcttgccagcttctgctccagatttgatttggtcccatttaattctttccctcctttccttctttccccctttcttttcttccacctttccttctttccccctttcttttctcccacctttccttcctttcttcctacctaccaccaactaaccagtcatgtaccatactgcctctcctcc

SEQ ID NO: 9848 - DNA, 201 bp, Homo sapiens
gatttggtcttactggagcttgccagcttctgctccagatttgatttggtcccatttaattctttccctcctttccttctttccccctttcttttcttccacctttccttctttccccctttcttttctcccacctttccttcctttcttcctacctaccaccaactaaccagtcatgtaccatactgcctctcctccccg

SEQ ID NO: 9849 - DNA, 201 bp, Homo sapiens
ttggtcttactggagcttgccagcttctgctccagatttgatttggtcccatttaattctttccctcctttccttctttccccctttcttttcttccacctttccttctttccccctttcttttctcccacctttccttcctttcttcctacctaccaccaactaaccagtcatgtaccatactgcctctcctccccgtat

SEQ ID NO: 9850 - DNA, 201 bp, Homo sapiens
tgaaggagttgaaagaacaagacaaactccatgcctgtgtcacacaggattcccttctcttggttgcggtggctgctgtaagtgttgggtgttgaggacamttgcattgcatactgcagctaagttttctgcatgtttggggtaggagaatgaagcagcctatctgatcacttggctttactcctttccagtgtcattcca

SEQ ID NO: 9851 - DNA, 201 bp, Homo sapiens
tggtcttactggagcttgccagcttctgctccagatttgatttggtcccatttaattctttccctcctttccttctttccccctttcttttcttccacctttccttctttccccctttcttttctcccacctttccttcctttcttcctacctaccaccaactaaccagtcatgtaccatactgcctctcctccccgtatt

SEQ ID NO: 9852 - DNA, 201 bp, Homo sapiens
gaattcactgactatcatgagaacagcaagggaggaagtctgcctccatgatccagttaccttccaccaggccttttctccaacactggggattataattygacctgagatttgggtgggaacacaaatccaatctataccttttaaactctagaagtttatttagttcatggttctggaggctgggaagttgaagaacat

SEQ ID NO: 9853 - DNA, 201 bp, Homo sapiens
gtcttactggagcttgccagcttctgctccagatttgatttggtcccatttaattctttccctcctttccttctttccccctttcttttcttccacctttccttctttccccctttcttttctcccacctttccttcctttcttcctacctaccaccaactaaccagtcatgtaccatactgcctctcctccccgtatttt

SEQ ID NO: 9854 - DNA, 201 bp, Homo sapiens
tcttactggagcttgccagcttctgctccagatttgatttggtcccatttaattctttccctcctttccttctttccccctttcttttcttccacctttccttctttccccctttcttttctcccacctttccttcctttcttcctacctaccaccaactaaccagtcatgtaccatactgcctctcctccccgtattttg

SEQ ID NO: 9855 - DNA, 201 bp, Homo sapiens
aaccaactatcaggcaaagccttcgtgaggcaatttggggttgtaacactacattacctacaaatcaatggatattttaggagaaattaaaaagggatgaygtactctgttcaaaaaaaaggtttgaaacccagcagattcctgtgggctttgcatccccagccctaggcatctctgtttaaagaggcagcttagtgataa

SEQ ID NO: 9856 - DNA, 201 bp, Homo sapiens
cagcttctgctccagatttgatttggtcccatttaattctttccctcctttccttctttccccctttcttttcttccacctttccttctttccccctttcttttctcccacctttccttcctttcttcctacctaccaccaactaaccagtcatgtaccatactgcctctcctccccgtattttggcaattctggtcttct

SEQ ID NO: 9857 - DNA, 201 bp, Homo sapiens
agcttctgctccagatttgatttggtcccatttaattctttccctcctttccttctttccccctttcttttcttccacctttccttctttccccctttcttttctcccacctttccttcctttcttcctacctaccaccaactaaccagtcatgtaccatactgcctctcctccccgtattttggcaattctggtcttctt

SEQ ID NO: 9858 - DNA, 201 bp, Homo sapiens
gcttctgctccagatttgatttggtcccatttaattctttccctcctttccttctttccccctttcttttcttccacctttccttctttccccctttcttttctcccacctttccttcctttcttcctacctaccaccaactaaccagtcatgtaccatactgcctctcctccccgtattttggcaattctggtcttcttt

SEQ ID NO: 9859 - DNA, 201 bp, Homo sapiens
tttcccaaagttactgcatcagtttacattcccaccagtaatgtgtgagaatcacaattgtttcatatcttcacagaacacttggcattatagtttttatmatcatcatcattaattttaaccactctgatggctgttagtgacatttcattgtgctaatctgcatttttgtcatgactcgtgatgttaaacaccttttga

SEQ ID NO: 9860 - DNA, 201 bp, Homo sapiens
gatttatcctatacaaggtttggaagaatgaatgtataatttagagaaacacttccctgaataccaatattactttatgtagtaattatgggattttaaakgccaatgagttctttttcttttgtataaacttatgaatgtattctaataaagtacttttgacaagctaatcaaataaaacaatgtaagatttaattatca

SEQ ID NO: 9861 - DNA, 201 bp, Homo sapiens
tttttcagtttatgtgtgtctttataggtgaagtatgttagtgtgtttttagtaggcaacagaacactgggtctgttttttaaaaatccattcagccactytgtcttttttgactaatttttggtttaatttttatttttagtagagacatggtctcactttgttgcccaggctggtctcaaattcctgtgctctagcaat

SEQ ID NO: 9862 - DNA, 201 bp, Homo sapiens
tacttttgacaagctaatcaaataaaacaatgtaagatttaattatcagctttctaaagattttatgaaccagattgtttctattgccagaatcatataawttaggaatctcagaatcctcttaaatcttttattttgttcttaaaatagtgttttttttacatgctcactacaaaaatatcaagcatagaaaatatagag

SEQ ID NO: 9863 - DNA, 201 bp, Homo sapiens
caaactgtcttccaaaattatttcagttgacattcccaatagcaacgtaatagaatgattgctttttcagttttctaatattggattttgtctttcttaamtatttgcaaatgataaaaatgtgtcattttaaaatgtgcatctctttattaatgaagttctgaatatttttaagtgcttattggtcattagtttctttct

SEQ ID NO: 9864 - DNA, 201 bp, Homo sapiens
aatataatgtgtcagcctaagtgtactagaatgaataaacataccatttaaatgagattatctaaaattctgaaatgttctttgtactctattaatctctmcggattaatctttgtgaattctgtattatttacttagccaggaaaaagatgggattgttatttaagtgggaaggcatagttctagtaaggaaagtgtgaa

SEQ ID NO: 9865 - DNA, 201 bp, Homo sapiens
atacaaccttttttgtcataatttttccaacataatacctgttacttcaaccacctaccctattgaaacaccccccttcccagtaagtaggtgtaaaatgrtctgacaatgccatctggtggcctcctggggaattgtgtaaagtaacctctacctgctggacttcactccttggtgaacctgaggcaccatcctgggctc

SEQ ID NO: 9866 - DNA, 201 bp, Homo sapiens
tcactgtcctatccccaacacctggaacagaacctgtccagtaaaatgagctccattaatacttattgaaggaaagaattctagagaagtaagaacatctrgctcattattttttactatatttcagtgttgtcttcctgtaagtgttatagtgatgctaattttcattgtgaaagtatgattttggacttttgtgggata

SEQ ID NO: 9867 - DNA, 201 bp, Homo sapiens
ctgccagttgtatttggccaacaggccatagtctgctgtatcttctttgcatttctctcagtttgaatttataattacagaatatctacttcattaaggaygattagcctaaaaatatccatcaactttaggaaatttctaatatggctgccatgcattgaggaagatacagaaaacagatgatatctttcatgtccttat

SEQ ID NO: 9868 - DNA, 201 bp, Homo sapiens
ccttcctcatagggttttttgatggttaagtttttaaaaatgtatatgctagagagctttttaaaaataagttgtaaagagattatagacagtccccaacytaggatggttccacttactatttttcaactttttagtggttcaaaagcaatatacatttagtacctcctcatcttatgatggggttctgtctgggtaaat

SEQ ID NO: 9869 - DNA, 201 bp, Homo sapiens
ttctttgttggttttctttctgggtgatctgtccaatgctgaaagtggggtgttgaggtctcctgctatcattgtattggggtttatctctctgtttagckctaacattttctttatatatctgggtactccggtgttgggtagatatgtatttacaattgttatatcctcttgcagaattgacccttttatcattataca

SEQ ID NO: 9870 - DNA, 201 bp, Homo sapiens
agtgtatccaataatcgagttcagatgctgctcaaggtaagtcagtggcttgaattcattcacgctgaggtgggatcagtaggtcggtcgggaaggatacstaatttgtgtcttatataatgttttagcgaatggggagggtttgggtgcatcatcacacctcagatagcatccaagttgttcttgccctttccttgtgta

SEQ ID NO: 9871 - DNA, 201 bp, Homo sapiens
tcgctgttttacagatgagaaagctgaggctccgagaggttgacaaatatgcctaaggttgcagaactaataagtgaccagtctgggacttgaagccatgrctctttttctgtttcatggtctgtgctcttagactgcttgcttctaagcaattgttggtgcctagatttgaggcttaaagctttgaccagtgtcagggac

SEQ ID NO: 9872 - DNA, 201 bp, Homo sapiens
tcttcagccacccctaacattgtagctattgcccaactcaccagccagtgcacacaccaatgtcaagacctttcatagtacaaagtaatatctggtacccygcaaaagctagagaccaggtaatgcaatataaaacagtgcagagttttagacctgagaggcatctgtctgcttacaactcttgggttttcataaggaaaa

SEQ ID NO: 9873 - DNA, 201 bp, Homo sapiens
aattgttacagtaggtaggtagtcagacatgaccagggcaggatagggctcctctccccaacaccaggaatgtcaggcaaccatcagatgatggtcaggcrgttgttaactctctctccaaaataataattggtcatagccagactcaggaaaaggcggtctcccgataaacagaaacacctgaaactggtgatcagcagc

SEQ ID NO: 9874 - DNA, 201 bp, Homo sapiens
aatggcaaatagtggagtttaagtgatatttgacctcctagggatattcaactagtaagggaaaaacacctcaagtgagatgtgtacaactccagtaaacrtactgtgcatacacccttcccaagcgctggcaggctactgcgcatgtgaataccctaccccaagggaaagatcaggggagaagggacacaagaccctcat

SEQ ID NO: 9875 - DNA, 201 bp, Homo sapiens
gcaacccgctggggtccctttccacagtttggaagcaatgtgttttgctttttgcaatagatcttgctactgcccactttttgggtccacactgcttttawgagctgtaacactcacagcgaagatttgcagcttcactcctgaagtcaccgagaccacgaacccaccgggaggaacaaacaactccagatgtgccggctt

SEQ ID NO: 9876 - DNA, 201 bp, Homo sapiens
gctgcctctcctcggggcagggcttgggacctgcatcccaccatgcctgggtctcccctacacccaccgtggcctcctgcactgcctgagcctctccgacragtgccaccccctgctccacggcgcctggtcccatccaccacccaagggctgaggagtgcacccgcatggcgtgggacttgcagacagctccacctgcag

SEQ ID NO: 9877 - DNA, 201 bp, Homo sapiens
gccttagctgcctctcctcggggcagggcttgggacctgcatcccaccatgcctgggtctcccctacacccaccgtggcctcctgcactgcctgagcctcyccgacgagtgccaccccctgctccacggcgcctggtcccatccaccacccaagggctgaggagtgcacccgcatggcgtgggacttgcagacagctccac

SEQ ID NO: 9878 - DNA, 201 bp, Homo sapiens
atgtcaagacaaggaataggaagagcttaatttgtcacgttgagtaccgctgtgtgtagaactgcaatttgcattttaatgtcctgcttattcctgaaaartggcattttacagatttcctgtattattcatgaattttaagctttgtagtttaaaaataaaaattcaggtaataaccaagaataagagaagttaaactct

SEQ ID NO: 9879 - DNA, 201 bp, Homo sapiens
gctctatttacttaaacaatttcccccctacttgttaggtacttttcttcagggagatgttattattatgtcttatctttgtgtgttctccttacctgtcrccttctaattgcttgaataaattttgaataaatttttccatatgcattgatatgattacctcaagcctttttacttcatgccattgatttgcttttcagg

SEQ ID NO: 9880 - DNA, 201 bp, Homo sapiens
ttctgctccagatttgatttggtcccatttaattctttccctcctttccttctttccccctttcttttcttccacctttccttctttccccctttcttttctcccacctttccttcctttcttcctacctaccaccaactaaccagtcatgtaccatactgcctctcctccccgtattttggcaattctggtcttctttca

SEQ ID NO: 9881 - DNA, 201 bp, Homo sapiens
gctccagatttgatttggtcccatttaattctttccctcctttccttctttccccctttcttttcttccacctttccttctttccccctttcttttctcccacctttccttcctttcttcctacctaccaccaactaaccagtcatgtaccatactgcctctcctccccgtattttggcaattctggtcttctttcagttc

SEQ ID NO: 9882 - DNA, 201 bp, Homo sapiens
gtgttcagttaatctttgtggattgactgtggaaggaagggagggagggaaggaagaaggaacaaaagaaaaaaaaaggagggaaggaagtaggaaggaakgaaaaaaaaggagggaaggagggaagaaagggaagaaaaaagggaatggtgcctctgattctcaaatccacacatgtggccttgacttcttattctgcag

SEQ ID NO: 9883 - DNA, 201 bp, Homo sapiens
cccaaaagtctgcctcttaatactatcacattgaggttcaagttccaatatatgaatttttgagggacatatacattcaaaccataacaggatcttttttsttgttgttgttgttgtttttgtttttgtttttctttgagacagagtcttgctctatgcccaggctgaagtgaagtggcatgatctcggctcactgcaacc

SEQ ID NO: 9884 - DNA, 201 bp, Homo sapiens
ctgattccatgatcatgaattttaactaccagactacaaagtggagcagcttccgttgttaatcccacatggaatcaaaagcaggcagtttgagtgtacamgggattttaactttgttttaggtcagattttgctctttaaagagaatttttaaggctagctataacgctattacggattcttttaaaaatttaacctttc

SEQ ID NO: 9885 - DNA, 201 bp, Homo sapiens
ttctagacacttgacacatggtatctcatagaatctttacaatatccttgtgagggtgtttttcgagtgtctgtcgttgagtgactctgctggtcaaagaygaacaagacatatatgaacacttttaatgccatgctataggtgaggaagctgaggaagctcacatacattgtatgtgactggaacagtgtctgaatccaa

SEQ ID NO: 9886 - DNA, 201 bp, Homo sapiens
ttgggttacgatgacaattaaggtattatggactatcagatctagtccttcacagatttaagatagaatctaagcagtgagctctaacagagaggccagakgtgtgtgtgtgtgtgtgtgtgtgtgtgtgtgtgtgagagagagagagagaaacagatggagagacagacagatggagagatggagaggagagaggaaaag

SEQ ID NO: 9887 - DNA, 201 bp, Homo sapiens
aaaagcaggcagtttgagtgtacaagggattttaactttgttttaggtcagattttgctctttaaagagaatttttaaggctagctataacgctattacgkattcttttaaaaatttaacctttccatcaattgcttagaataagagatctctaaaatcttttttatttccaatagtgtacttagttccagtagtgactca

SEQ ID NO: 9888 - DNA, 201 bp, Homo sapiens
gttgaatttggtttgcaagatttttttgaggatttttgcttcaatattcatcagggatattagcctgtactttttttttctttctttctttcttttttttwaattttcaaccccctgagacttctacatcctatctagttttcttattttttggatgcgttttcatctggtgttggcatcagggtaatactgtcctcataa

SEQ ID NO: 9889 - DNA, 201 bp, Homo sapiens
accagagtcactacaccccaagactagtcacacaaatcccttttttcccaataatcaaaactttgagacaaaacggtgatttttaaccatctgttcaatcrgattgcacaaggaggccaggaggctcactgataagaatttcttacctatttgctggcttgtaagtttcctgagttctcttcattctgacttccaaaagag

SEQ ID NO: 9890 - DNA, 201 bp, Homo sapiens
tcattcaggagtgtattatttaatttccgtgtgtttgtgtggtttccaagattttgcttgttattcatttcttgttttattccattgtggtcagagaagakacttattctttcagtttttttgaatgtgttaagacttgttttgtgtcctaatatatggtctatccttgagaatgatccatgtgctgagaagattgtgttc

SEQ ID NO: 9891 - DNA, 201 bp, Homo sapiens
ctttccccttgaccctctgaagttttgctgaaaaattaactcacaaaaggcagattaatgggagaaaaagtatacaatttatttaatcatgtttacatggkaaccttcagaatgaagactcttagctaatctttcctagatccaaattagggaaggtctggctgggccactttataatatgtcaaataaatatattttggg

SEQ ID NO: 9892 - DNA, 201 bp, Homo sapiens
atcagggaacctcaggagaagagagcagcttttgagcattggtgatgtgcacaatctgtcagagagaatctcttgccagcactgataggagaattgctgcrggtcaaaggggctgatctcttccctgagatcccgtcagagttaatgaaatgactgctaacatgagtgtgaggcataagtctcaaatcatggagctttatt

SEQ ID NO: 9893 - DNA, 201 bp, Homo sapiens
acaagcaataagtaataaaaactctacacttcaccttcatcctcttgcttttaaactttttgttgtttctatttatatcttatagtactgtctgtgccttaaaattattatttttatcagttcatcttttagtctttccactcaagaggtgagtagttaacataccacaattacagtgttattatattttgtgtttttctg

SEQ ID NO: 9894 - DNA, 201 bp, Homo sapiens
aaaggggaaagggtgggacagcagtgagacaaatgattacatacttgtgagagtttagttagtgcccagtaaatctacattttacgtaagataaggtgaaygtttgaagaaaaagagaatagagaaaacacgtctcaaggaggagtgaagaaagggttaatttcatctcggggggtgaaggaatgattaatctcatgttgt

SEQ ID NO: 9895 - DNA, 201 bp, Homo sapiens
acatccaggcatttccatacatcatctgagatctaggtggaggctcccaagcctcatctcttgccttctgtgcacccacaggcttaataccacatggaagycttggtggcttctggcttgcaccctctggaacagtggcctgaactgtaccttggcctcttttagatgtggctccatggctggagcagagtagctaggaca

SEQ ID NO: 9896 - DNA, 201 bp, Homo sapiens
actttctaagaaaacggccaaacttttgtaagtggttgtacattctcaaatcaatgtatgggaattccagttttgttttcacattcacaccacactttgtmatgttagatgttttcattatagccactctagtgagtgtgtagaatttctgttgtcatttaaatttgtatttttcttcttattaatggtgttatcttagcc

SEQ ID NO: 9897 - DNA, 201 bp, Homo sapiens
gtggtttttagggcccaaaccatgcttttctcatccaaacatgcaaagaaatgagtagccccctatagtaatgaccatttcctgtaaataactgtcttcarccacccctaacattgtagctattgcccaactcaccagccagtgcacacaccaatgtcaagacctttcatagtacaaagtaatatctggtaccctgcaaaa

SEQ ID NO: 9898 - DNA, 201 bp, Homo sapiens
tggtttttagggcccaaaccatgcttttctcatccaaacatgcaaagaaatgagtagccccctatagtaatgaccatttcctgtaaataactgtcttcagscacccctaacattgtagctattgcccaactcaccagccagtgcacacaccaatgtcaagacctttcatagtacaaagtaatatctggtaccctgcaaaag

SEQ ID NO: 9899 - DNA, 201 bp, Homo sapiens
cttttttttccctctatttcctttcccttttaatctctcattttgttataggatttttgggttgtcatttctctggctggaaacctctgtctggtggtgcstttgcctgagttttgcttggggctgctgttcttgttctgcccactcggcctggcaggctgcacttggcttgtgctaccagcctggatcccacaccttcaa

SEQ ID NO: 9900 - DNA, 201 bp, Homo sapiens; identical to SEQ ID NO: 1687

SEQ ID NO: 9901 - DNA, 201 bp, Homo sapiens
ttcttaccagacatggggaaaagctacctttcctgaaaggggaggagggcactgtcctttcagacaaagcttgtacaaattcctgaaccgcaaatttgctraagtgaccgtatatattatattcataatttaaatgattatttatggtcagatacatattgttaaacttgaaaatgttttattacattacatcaaataaag

SEQ ID NO: 9902 - DNA, 201 bp, Homo sapiens
ctgagatgtaaatgacatgaaggagccagctgtgtgaagatcaggaaaaagaactttctaggcaaaggcagcagctggcagaaaggccctgggccagtgtrattggaggagagagacaaaaggaaaacctggaaggagatgagattagagaagtgttgcaaattatattgggattcagaccaggtaaagagtttggacttt

SEQ ID NO: 9903 - DNA, 201 bp, Homo sapiens
gttatagcagctcttttagcctcgccatttggtgggtcctgagttattgttctgcaaacaggaagaatgaggtatgcggacaagtgaagggtgagcaagaygaagaggagctttactgagcaatagaacaaccagcagagacccacagggtgcagctcctttctaaggccagggtgtcccattgagtgttcagctcctagc

SEQ ID NO: 9904 - DNA, 201 bp, Homo sapiens
ttatgaaaagtgagtttgtgctgtagttatagtttcctatcttgttttttatttaggagaaaagagaatccttgtgcattgttgttggtttgtaaattgayacagttattatggaaaaaagtatgggggtttctcaaaaaattaaaaatagaactaccatatgatccagcaatcctactactggtatatacccaaaggaag

SEQ ID NO: 9905 - DNA, 201 bp, Homo sapiens
gtaagataaggtgaatgtttgaagaaaaagagaatagagaaaacacgtctcaaggaggagtgaagaaagggttaatttcatctcggggggtgaaggaatgwttaatctcatgttgtatttgttctgtacatgtgaagataaggtagtagtcttttgaaaggactagtttctatttagcccttggggaagaaagcctgatgg

SEQ ID NO: 9906 - DNA, 201 bp, Homo sapiens
cggctcactgcaacctctgtctcctgggttcaaatgattcttctgcctcagccttccaagtagctgcgattacagtcgtgcaccatcacgcctggctaatktttgtatttttagtagagatgagttttcaccatgatggccaggctggtcttgagctcctagcttcaagtgatcagccaactttggcctcccaaattgctg

SEQ ID NO: 9907 - DNA, 201 bp, Homo sapiens
taatttatgcagaaaagaggtttaattgactcacagttccaaaggctgtacaggaggcatggctggggaggcctcaggaaacttaaaatcatggcagaaagtaaagggaatcaagcatgtctttcccattgccagcaggagagagagagagagtgaagggggaggtgctatatactttcaaacaaccagatctcatgagaa

SEQ ID NO: 9908 - DNA, 201 bp, Homo sapiens
catgatctttgctcactgcaacctctgccacccgcgttcaagcgaccctgtggcctcagcctccccagtagctgggactacaggcgtgtgctaccatgctyggctaatttttatatttttggtagagatggggtttcaccatgttggccaggctggtcttgacctcctgacctcaggtgatcggcccgcctcggcctccca

SEQ ID NO: 9909 - DNA, 201 bp, Homo sapiens
ttttacaatagtgatgttatccccaggagcaatttggggagggtcagaatcttgtagcttccagctacatgactcctaaaccataatttctaatcttttgmctaatttgttagctctacaaaggcggtctagttctcgggcaagaaggcggtttgttttgggaaagggctgttattatctttgtttcaaagtataaactat

SEQ ID NO: 9910 - DNA, 201 bp, Homo sapiens
ggcgtgtgctaccatgcttggctaatttttatatttttggtagagatggggtttcaccatgttggccaggctggtcttgacctcctgacctcaggtgatcrgcccgcctcggcctcccaaagtgctggtattataggtttcatgcgcgtccgtgtgaagagaccaccaaacaggctttgtgtgagcaatacagcttttaat

SEQ ID NO: 9911 - DNA, 201 bp, Homo sapiens
gtcttgacctcctgacctcaggtgatcggcccgcctcggcctcccaaagtgctggtattataggtttcatgcgcgtccgtgtgaagagaccaccaaacagkctttgtgtgagcaatacagcttttaatcacctgggtgcaggcgggctaagtctgaaaagagagtcagcaaagggagataggggtggggccgttttataag

SEQ ID NO: 9912 - DNA, 201 bp, Homo sapiens
ctccagaaaaaagcaaagttaaccaggcagcacaaattaagtcatttggggtctcccttgtattaaaatttgataaagaactcaagtgtgggtaatacttyttattccagttttaaaaatgattaatatgtttagcaatgaaacttgaatcaaatgtttgctgaaccctggaaacacattttcattccacatgactaggat

SEQ ID NO: 9913 - DNA, 201 bp, Homo sapiens
ttaatcacctgggtgcaggcgggctaagtctgaaaagagagtcagcaaagggagataggggtggggccgttttataagatttgggtaggtaaaggaaaatkacagtcaaagggggtttgttctctggcgggcaggagtgggggttgcaaggtgctcagtgggggaggtttttgagccaggatgagccaggaaaaggaattt

SEQ ID NO: 9914 - DNA, 201 bp, Homo sapiens
gttttgtttatcattttcatagaactatgatgattcttaattgtctgttaaccttcagcagtacatttgctaacagcatttaaagaaacagatcatgtctyggcacttggatttataaagaacatttgattttcccagtgaacctttccaccttcttttcagttcaggcagatgcactgatgtgtgtgtggcatatccctc

SEQ ID NO: 9915 - DNA, 201 bp, Homo sapiens
gggggtttgttctctggcgggcaggagtgggggttgcaaggtgctcagtgggggaggtttttgagccaggatgagccaggaaaaggaatttcacaagacartgtcatcagttaaggcaggaacaggccattttcacttcttttgtggtggaatgtcatcagttaaggcggggcagggcatattcacttcttttgtgattct

SEQ ID NO: 9916 - DNA, 201 bp, Homo sapiens
agtccccatcatctctgttgaagaaggataagttggtgcacgatgacaatataacattatattgcatcatagtgttatggatcaagtgctaggggatcgcrataatgggagtaagtagctggggtggggtgcagataggaaggaccttacagtagaggtgacacttgagcaaggtcttaagggataaataggagtttgcta

SEQ ID NO: 9917 - DNA, 201 bp, Homo sapiens
ttttgtggtggaatgtcatcagttaaggcggggcagggcatattcacttcttttgtgattcttcagttacttcaggccatctgggcgaatatgtgcaagtsacaggggatgcgatggcttggcttgggctcagaggcctgacattcctgccttcttatattaataagaaaaataaaacaaaatagtgttgaagtgttgggg

SEQ ID NO: 9918 - DNA, 201 bp, Homo sapiens
attacctccttcatatggctggtgtgaggattacatgagttaaatatgtaaagcacttagcactatagctgacgtaaatccccacccacagctaccagcaygtaagtccagtgaaggtagtgagctttgtcttattattttttttatttttattttttttgagatggagtcttgctccataacccaggctggagtgcagtg

SEQ ID NO: 9919 - DNA, 201 bp, Homo sapiens
ggcttggcttgggctcagaggcctgacattcctgccttcttatattaataagaaaaataaaacaaaatagtgttgaagtgttggggtggcgaaaatttttkgggggtggtatggagagagagaatgggcgatgtttctcagggctgcttcgagcaggattggggtggcttgggaacctagagtgggagagattaagctgaa

SEQ ID NO: 9920 - DNA, 201 bp, Homo sapiens
atctatttaagcatttcatagcctattcttatgttggttcttagatattaggaacaaatacacgtggaagtgttagctcaggcaccacatctggcttcctygttagcttcaaattccccaaaatacatatgtgggaaaaaaaatcagtggcctgcatagagaaccatgaacacatacctagcagcaggggagaaccacagc

SEQ ID NO: 9921 - DNA, 201 bp, Homo sapiens
ccattctcctgcctcagcctcccaagtagctgagactacaggcgcccgccaccacgcccggctaattttttgtattttttagtagagacggggtttcaccrtgttggccaggacggtctcgatctcctgacctcgtgatccgcccacctcagcctcccaaagtgttgggattacaggcgtgagccaccgcgcccagcctac

SEQ ID NO: 9922 - DNA, 201 bp, Homo sapiens
ttttaggaaaagattacatatcaacatacataaataaattatgcatagagaatttctggaggaatacacttaacaatgattacttctaagagcagtattgkggatctagggtagaaatgggggagaggacttccacttttcaattcatactattttgcattatttgaaattttgctgtggtcatatattgttttctaatct

SEQ ID NO: 9923 - DNA, 201 bp, Homo sapiens
aagtagaaagctgctccccttttcatgtaatctgtgctgattcagacacatttggagtctggagttcaattctgtaaaaaattgatgccatcttctgtggraaattctgatggtatcatttgagctcctggatcaagatgggcctgaagataacctgagcttttttttttattcagtgagccattatgtttgccatcttgc

SEQ ID NO: 9924 - DNA, 201 bp, Homo sapiens
ttgcaaggttttgttctaaggaatgaggctgaactaaatccagtgtcagagaaaaagtgatctcagaaaccaagaggacaattagaagtgagttggccccrgaaatagaaaccaactatcaggcaaagccttcgtgaggcaatttggggttgtaacactacattacctacaaatcaatggatattttaggagaaattaaaa

SEQ ID NO: 9925 - DNA, 201 bp, Homo sapiens
cccaatgctctccctcaggccccccacaaaaggccccagcatgtgttgttctcctgcccgcacatgtccatttaatattgcctgaggggcgcatttacatyctttctgttttatagtactaggtaggggaaacctctcccagtcagatacaagatccatttttataaacatttaggtaaagaagacacaatcactttagaa

SEQ ID NO: 9926 - DNA, 201 bp, Homo sapiens
cattttattagggaaccctgggcacttcaatggggcactgctatccctgttagcatagggatagcttcacttaatgtcccttagcaaggcagtaaatgctyctcaagtggaaattctcttaaagtctcagtaatcatcattgggaagtgctcacagacttttgccaaaacctgcaataaatgctctacaaagggctatcaa

SEQ ID NO: 9927 - DNA, 201 bp, Homo sapiens
acttggatgttgtgatctaagtttttggtcactgccgccatgtctgcattaggcggcagccttatagaggtataagcctgcagactcatagaggtacaagsctgcagactcatagaggtactgccttggtggttgtggatgagatcctgaagaattctctggattgccaggcagagactgtcatattcttgccttactttc

SEQ ID NO: 9928 - DNA, 201 bp, Homo sapiens
tgaactctgcatgtagaattctcttatatctagtagttttaattatatttattaacaactattctaactaagtaaccctaatttacagtgaaaaacctggrattacctaatataacatgatctctagattttaaattactaaagaaattttacaactagttttacttatcaaagattcctaaagtctcatgagctaacagg

SEQ ID NO: 9929 - DNA, 201 bp, Homo sapiens
actacaggcgcccgccaccacgcccggctaattttttgtattttttagtagagacggggtttcaccgtgttggccaggacggtctcgatctcctgacctcktgatccgcccacctcagcctcccaaagtgttgggattacaggcgtgagccaccgcgcccagcctacctttaggaacttaatacagcacagctgcagctcc

SEQ ID NO: 9930 - DNA, 201 bp, Homo sapiens
ctcttgtgataacagtgttacattaatgagtgcagaacaatgttacgttaataaaggcagggccctcaatgacccaaacacctcccatttggccccacctsccaccatggttgcgttggggattaagattccaacatatgaacacatttaaaccacagcaacccccaaaagttcccagtgctcttttatagtctataccca

SEQ ID NO: 9931 - DNA, 201 bp, Homo sapiens
agatttctttctgcagaatctagtacagtgcttgacacataatagatgataaataaaagtaataactgctaaccattattgaacacccgctacatgctatscagcatgctacctgcaaaataggtgcttctagcatccccacttttcagaagaacaacttaaggctcaggaacaaaagtaactgacctatgttcacacagt

SEQ ID NO: 9932 - DNA, 201 bp, Homo sapiens
aggagggcagacaagggaaagatgggtggcaggggatccagttaagcagccagtgtataaagtaggaaagaacagataaagtcatgagcaaggaaacactgctatatttgcatgcatccatagggtcaaaaaacttgagaatcattttattgattattttagttaatgattcatagataattcagatagatcataaaatgg

SEQ ID NO: 9933 - DNA, 201 bp, Homo sapiens
ccagcaaagattatttatttacttcaagagttaagagtggcagtttggggatagcaccaggagatatcagctgtgatggcttggagaaacagtgtaaaccrgcagtgtaaacaagagcagggcatgtatgagtagctgagaatggtgaataggagtatgactagacagaagatagtagggatgacaagtttttttggggca

SEQ ID NO: 9934 - DNA, 201 bp, Homo sapiens
gtctgctgtatcttctttgcatttctctcagtttgaatttataattacagaatatctacttcattaaggatgattagcctaaaaatatccatcaactttargaaatttctaatatggctgccatgcattgaggaagatacagaaaacagatgatatctttcatgtccttatgcacataattttgttggatataccttacac

SEQ ID NO: 9935 - DNA, 201 bp, Homo sapiens
agtggcagtttggggatagcaccaggagatatcagctgtgatggcttggagaaacagtgtaaaccggcagtgtaaacaagagcagggcatgtatgagtagytgagaatggtgaataggagtatgactagacagaagatagtagggatgacaagtttttttggggcacagtctaagttggtctggtgtctggaatgagactg

SEQ ID NO: 9936 - DNA, 201 bp, Homo sapiens
taatatggctgccatgcattgaggaagatacagaaaacagatgatatctttcatgtccttatgcacataattttgttggatataccttacacaaacagacrtatgttgctatggcctgaatgtttgtgtctcctgcaaaattcatattttgaaaccaaattcccaatgcaatactatgaaaatgtggattctttaggaggt

SEQ ID NO: 9937 - DNA, 201 bp, Homo sapiens
tttaagaggtttagaaacctggccgtcaatacccacaacagttatggaggcaagggaaacaggcccttgaaaaggaggtaatgtggagtgggtagcctccrtattcattaagaaggggacggacttaccttccactgtgaaggttacccgaagctcggagtccgtgatggtctagggggcttccgaggtgatcaggcagtg

SEQ ID NO: 9938 - DNA, 201 bp, Homo sapiens
actactggcatctactgggtagaggccagggctgctcttaaggattttacagtatacaggccagcaaccccccgcccaccccccaacaaagaagtacctartccttaatgctaaatgtgggacactctgtagtagtaagccatcagtgaatctgcaagtaggatcagtgaatctgcaagtaggggaatggagtcatcaaaa

SEQ ID NO: 9939 - DNA, 201 bp, Homo sapiens
agaagatctgggaagcagtcagagagccttgggccagagttccaggggctctgggagtggctgccaggtgagttggacagtccgatttccagtggggtccygcacagatgggacgtgacttaggaggaatcctgggctgcaggcattccttggcctggtggccagatttctggcacttgtagcaagctcctgacagaggag

SEQ ID NO: 9940 - DNA, 201 bp, Homo sapiens
tggggtcctgcacagatgggacgtgacttaggaggaatcctgggctgcaggcattccttggcctggtggccagatttctggcacttgtagcaagctcctgrcagaggaggttctggaggaacgcctggccgctgcggttcaggcatttggaagttcttgtgtgctggagttgtggctggggtttgtctcacagtggaggca

SEQ ID NO: 9941 - DNA, 201 bp, Homo sapiens
catgtatcttgtgaaccagttccccaggagctggatccattgctaaactccactggtaacttttacctttaggaactttttttttatttttttattttttwaatttttttattttgttttttttgagatggagtctcgctctgtcgcccaggctggagtgcagaggcgtgatctcggctcactacaagctccgcctcccgg

SEQ ID NO: 9942 - DNA, 201 bp, Homo sapiens
tgtgaaccagttccccaggagctggatccattgctaaactccactggtaacttttacctttaggaactttttttttatttttttattttttaaattttttyattttgttttttttgagatggagtctcgctctgtcgcccaggctggagtgcagaggcgtgatctcggctcactacaagctccgcctcccgggttcacgcc

SEQ ID NO: 9943 - DNA, 201 bp, Homo sapiens
ggcatgcacagatcttaaatattcaatttgtatgttgacaaatatatatacctatgtgactaatgttctaatcaagatatagaatatcttgtcatccaagraagttcccttgtgctaatttaagaatgatcttttaaaaatagaaatcaaattaccagccagatgtggtgactcacaactgtaatcccagcactttgggag

SEQ ID NO: 9944 - DNA, 201 bp, Homo sapiens
tcagagaccccaggtcctgtgcctgggagggtgggagccccgccctctccatggagcctgcaggcagcccaggctatgcctccttgcagcctggggtgggkcctccaggtcctctctgggctcctctctgcctgcccctccgtgcccaactgtgctgctccagtgctggcaggtagctcggctcagccctgtcgcagtggc

SEQ ID NO: 9945 - DNA, 201 bp, Homo sapiens
cccaagacaggatccaaaaagagaaacagcataaagctcttttaaaaaaaaattgtaattatagcttagatatcagcttttaatgaagctgactgctaacsatagaagtctttaaaagaaaaaaattctttcagatctcttattacctgggataaacagctgatatttctggcctttgaactcctttaccaaacctgaagg

SEQ ID NO: 9946 - DNA, 201 bp, Homo sapiens
tgctggcaggtagctcggctcagccctgtcgcagtggcccccagggcagcaggctctcagagggtccctcttatccctggctccctccagctccatggagygcagcaccatcctgggcccagctctgcctccttcccgtgccctccctgcaggtgccctccccgcaggtgcggtatgctagaatggtcatgctgggccagg

SEQ ID NO: 9947 - DNA, 201 bp, Homo sapiens
gatctaatgcagacagataccgacacccagcaggctcaatgtatttctcaggagcattggctctcaccccaggcttttatgagaatcacctggggatctcttcattcattcattcattcattcattcattcattcattcattcatgcagagccggctgtgcgggaaacatgagttttattactcaaatcagtctcctggag

SEQ ID NO: 9948 - DNA, 201 bp, Homo sapiens
ttctaaaaattcttttgttcatttatcctcatggctattttaaagtgcatatttggttatagttgtaaagtctaaagcttattatttaaactttaaaccaraaaataattttgataagtatataaggatttgtattttactctattttagtggaaatatatgaacatttgtgataggcctcgatcagataagcaatttaat

SEQ ID NO: 9949 - DNA, 201 bp, Homo sapiens
atctaatgcagacagataccgacacccagcaggctcaatgtatttctcaggagcattggctctcaccccaggcttttatgagaatcacctggggatctcttcattcattcattcattcattcattcattcattcattcattcatgcagagccggctgtgcgggaaacatgagttttattactcaaatcagtctcctggagc

SEQ ID NO: 9950 - DNA, 201 bp, Homo sapiens
cacattaccgaggaagaagttggagttgttttattctttatgtttgatctttctcatctgaagtgtggatttcattttgtccttgattggtggacatgagrataagaatgatgtgaatatcatttgaattcatttatcccattgcttatttattactggataaatgaatgatggcaaagtcccacaatttaatacttgcag

SEQ ID NO: 9951 - DNA, 201 bp, Homo sapiens
catagcatgacccaggcttatcttgaagactgtattgccagcctgttggcatagtactttgtacttggtaggtgttcagttaatctttgtggattgactgyggaaggaagggagggagggaaggaagaaggaacaaaagaaaaaaaaaggagggaaggaagtaggaaggaaggaaaaaaaaggagggaaggagggaagaaa

SEQ ID NO: 9952 - DNA, 201 bp, Homo sapiens
aggtccttgattagatattactaggtcatgacacatttctagaatcccctgactatcttaaacagtcttttaacaccttgcactttttcttcctaattctyacctcaatttgtaattaatggtttgtaaaattaactgtaataaagtcatgatttatgggatcatctgtacactctgcatagcatgacccaggcttatctt

SEQ ID NO: 9953 - DNA, 201 bp, Homo sapiens
cagctttagagtacctgcagtggccccactcaactagagatcgcaacaggaagctctgtctgtctgtcaatgctaccagttggcctgtcaagaaccatagrctggactgagtagtgaagttctttccctgccaaagtgaacctataaaggtttgaagagatgactgtagagttttatgtgcagtggaagttaagttgttat

SEQ ID NO: 9954 - DNA, 201 bp, Homo sapiens
ttgacaaggacatacagtttgtatggatggaacttgtgttcaaagcttgttcaaatattgtgtatttatttatatctatgtgtgtaaatatatctaaggawaataataaaagtggagacatggaacattccagtcaaaggagcagcagatgccaggaacacagaggcagtgaatcagtgtttgaatgaactcacagagagg

SEQ ID NO: 9955 - DNA, 201 bp, Homo sapiens
ctgaatatctcttttaatctttacaacaaccccatgcggtacgttctattaccctccttttacaaataaggaaaggcttagataatttaatcaggttaccyagagtcagaacctggaatcaaaccagcatgggtctgctttcagagctggtgccttaactcttaagcttcacagagaagggaatgtaaaatatggtctatt

SEQ ID NO: 9956 - DNA, 201 bp, Homo sapiens
ctcccaacaaactaaagtccagagccagatgacttcactggggaatctacccaacatttaaggaagagttaatgtgaattattctcaaactcttccaaaargttgaacaggaaggaacacttccaaatccattttatgaggctaacattaccttgataccatagttggatgaggactgtatgagaaaataaaattataggc

SEQ ID NO: 9957 - DNA, 201 bp, Homo sapiens
ctttatttatttccctcctactcctcagctgggtatataaaacctgatgtttgctatattcttgaaattttctgttttcgcattctcttttgcagtaagcrtgccttttacctatccttgtaatttcttagtgtacctatagatagacaacagcaaagtgcccccaagttttttcaaaataggattatgtagtcataaaag

SEQ ID NO: 9958 - DNA, 201 bp, Homo sapiens
gccgcaaggttttgcagtagtttgttatacagaaaaagctaactgatgtagcaggcctttagtgatttcccccaccccccgaatttatgttcccatatttmtgtattcagattataacacaatgttcatctccatcatgttctttggatggttgttcatgagtctgcctccccagtagactttggatactccaagggtagg

SEQ ID NO: 9959 - DNA, 201 bp, Homo sapiens
gcctgaggtcaggagttcaagaccagcctggccaacacggtgaaaccctgtctctactaaaaatacaaaaattagctaggtgaggtggtgggcgcctgtamtcccagctactcatgaggctgaggcaggagaattggttgaacctaagaggcagaggttgcggtgagccgagatcgcaccaccgcacttcagcctgggcaa

SEQ ID NO: 9960 - DNA, 201 bp, Homo sapiens
cttggctgccagtcgccagtcaagtgaatgaatgaagttattatagattgtccagacatgagcagatctatcacctgaccacagacacagagaaaacccarctgagatgatctgaacctgcctggactggaacagcccagctgactcacagaagagcaagctgaataaaaggctgtggtttaagccgcaaggttttgcagt

SEQ ID NO: 9961 - DNA, 201 bp, Homo sapiens
ttggacaatgagagacccatggcctactcattctatttccttggctgccagtcgccagtcaagtgaatgaatgaagttattatagattgtccagacatgarcagatctatcacctgaccacagacacagagaaaacccaactgagatgatctgaacctgcctggactggaacagcccagctgactcacagaagagcaagct

SEQ ID NO: 9962 - DNA, 201 bp, Homo sapiens
ttttgtggagcatcgtaactgggccaaagcttgtttgcttgcctttttttttttttttttctgagacagggtctcactttgtcacccaggctggagtgcartggtgccatcttggcttactgctgcctccatctcccgggcttaagcgatcctcccacctcagccctccaagtacctgggactacaagcacgcaccaccac

SEQ ID NO: 9963 - DNA, 201 bp, Homo sapiens
gatgttctttctgactctccgttttcatcctaaaagcaataaataaatcaagtttacctttgggaaaaacctgtattggggcttgatgaggcttcagggartgccatcctgccctccaaagcaccctatgtgtttattgatgtcagcaatgggggccaaagtgtatccaataatcgagttcagatgctgctcaaggtaagt

SEQ ID NO: 9964 - DNA, 201 bp, Homo sapiens
tctaatgcagacagataccgacacccagcaggctcaatgtatttctcaggagcattggctctcaccccaggcttttatgagaatcacctggggatctcttcattcattcattcattcattcattcattcattcattcattcatgcagagccggctgtgcgggaaacatgagttttattactcaaatcagtctcctggagca

SEQ ID NO: 9965 - DNA, 201 bp, Homo sapiens
ctaatgcagacagataccgacacccagcaggctcaatgtatttctcaggagcattggctctcaccccaggcttttatgagaatcacctggggatctcttcattcattcattcattcattcattcattcattcattcattcatgcagagccggctgtgcgggaaacatgagttttattactcaaatcagtctcctggagcat

SEQ ID NO: 9966 - DNA, 201 bp, Homo sapiens
atacagccatcctattagttctgcccctctagagaaccctgactaatacagtgtcttagttgaggtacattgtacacttgtctgtaattccaaggtgatctttttttttttttttgagctttcttaaaaattgtttttttaaaaataatattaaatttattttcactatctatactaaatatatatatatataattagaaa

SEQ ID NO: 9967 - DNA, 201 bp, Homo sapiens
gtctgtaattccaaggtgatctttttttttttttttgagctttcttaaaaattgtttttttaaaaataatattaaatttattttcactatctatactaaawatatatatatataattagaaatattgatgtactactataagtaatttcccaatattaaactcttcttgcattcctggaattatcctcttctatggttatt

SEQ ID NO: 9968 - DNA, 201 bp, Homo sapiens
attctacagaattaattgctctcatttgccatgccataatgaattcttgccagtcctcagctaactaagaccttcaattaattagattttctttcctttgcctctctgtatgtggacagctattatggaataacaacactgagaccgtgtagcctttgtaatcagcaaagaaaattctattatagtctgtataccatactt

SEQ ID NO: 9969 - DNA, 201 bp, Homo sapiens
ctgggaagagtagtgggggttggagagcaggtgaggatgattaatgggtacaaaaaaaaagaatgaataaggcatcctattcgatagtacaacagggtgastatagtcaatagaaacttaattgtacatttaaaaataacttaaaaagtatcagtagattgtttgtaacacaaaagataaatgcttgagaggatggacact

SEQ ID NO: 9970 - DNA, 201 bp, Homo sapiens
aagaatgaataaggcatcctattcgatagtacaacagggtgagtatagtcaatagaaacttaattgtacatttaaaaataacttaaaaagtatcagtagattgtttgtaacacaaaagataaatgcttgagaggatggacacttcattgtccatgatgtgattattatacattgcatgtctgtattagaatatcctatgta

SEQ ID NO: 9971 - DNA, 201 bp, Homo sapiens
tttctccccattttcttgatcagcataaccagaacctcaggagttcatcaggcactcgaaaattttccctggggtaatgaagtgaatagatggaggaaaakctgtgaatacttttgcactggtaattttaatttactgctatcaattttaatccttttcacaagtattcacagattggtaatataaaaccaaatatgataa

SEQ ID NO: 9972 - DNA, 201 bp, Homo sapiens
agaatgaataaggcatcctattcgatagtacaacagggtgagtatagtcaatagaaacttaattgtacatttaaaaataacttaaaaagtatcagtagattgtttgtaacacaaaagataaatgcttgagaggatggacacttcattgtccatgatgtgattattatacattgcatgtctgtattagaatatcctatgtac

SEQ ID NO: 9973 - DNA, 201 bp, Homo sapiens
gaatgaataaggcatcctattcgatagtacaacagggtgagtatagtcaatagaaacttaattgtacatttaaaaataacttaaaaagtatcagtagattgtttgtaacacaaaagataaatgcttgagaggatggacacttcattgtccatgatgtgattattatacattgcatgtctgtattagaatatcctatgtacc

SEQ ID NO: 9974 - DNA, 201 bp, Homo sapiens
ataatgatcattttttgctaaccatttcaacactctaggattcccaaattatctcacgaatctgtgtgatcttaaagaaatgcttttgctgtaatgcaaarggaaagctaaaatgaattaaaagctggcctaaattaagacagctggggtgatcactgggtgtataataccagagtgtggtagaccttggttaagttttga

SEQ ID NO: 9975 - DNA, 201 bp, Homo sapiens
tgaggtgggaggatcactttggcccaggaggttgaggctgcagcgagccaagattacaccactgcactctagcctgggcaatagagtgaggcactgtcttaaaaaaaaaaaaaaaagaaaaaaaaaagaaatcaaattactttttatgcatagttttaaaacatgaaaaatagttttacatatcatttagggaagcttgta

SEQ ID NO: 9976 - DNA, 201 bp, Homo sapiens
attttcttgatcagcataaccagaacctcaggagttcatcaggcactcgaaaattttccctggggtaatgaagtgaatagatggaggaaaagctgtgaatrcttttgcactggtaattttaatttactgctatcaattttaatccttttcacaagtattcacagattggtaatataaaaccaaatatgataatgaaatata

SEQ ID NO: 9977 - DNA, 201 bp, Homo sapiens
ccttttcacaagtattcacagattggtaatataaaaccaaatatgataatgaaatataatcaaggattctttttttcttttaaaatttgatttacttatgsatttgctttgaattgccataaattgcaggagggcctgcacaaggagggtgctgttgagaccagaaaagaggccaccggtatctgtgtgggtgctacaatc

SEQ ID NO: 9978 - DNA, 201 bp, Homo sapiens
gctatgatcatgccactccaacctggttgacagagcaagactcgcctctaaaaaataaaagaaaaagagccacaggagcttttaggaaatgttcctgcccrtcttggcaggtgagaaccaagaattggtctaagaagtcttagtgactttcaaggaagcaattacaataggttcttgggatctgaaaaaggatctgatggt

SEQ ID NO: 9979 - DNA, 201 bp, Homo sapiens
tgccaggaccatttgttctgtgactttgaaggcttagccctgctttatgtgatttatgaggacactgccaatttcattcccaggatgttctgtcattaagrtcttcctgtaagggtggtcagtacaatgggattttacctgcatagctcattatatgaacatctccagcatggggatggtttagcttattgggttactttc

SEQ ID NO: 9980 - DNA, 201 bp, Homo sapiens
atcaactaattttagagtgagaacatgtggtgtttaactttctgtacctggcttatttcacttaatgtcttccagtttcattcatgtttctgtgaacaacrggctttccctctttttatggctgaatagtatttaattgtgtatatacaccacactttctgtctccattaaactgttgttggacacctaggttgattcaat

SEQ ID NO: 9981 - DNA, 201 bp, Homo sapiens
ggaaaacagtatggaggttccttaaaaaataaaaatacaactaactgccatatgatccagtgcttctacttctgggtatatgtccaaaggaaatgaagctagtatgttgaagagatatctgcactcccatgttaatagcccactatttactatagccaagctatggaagcaatctaagtgtctgtcaagggatgagtggat

SEQ ID NO: 9982 - DNA, 201 bp, Homo sapiens
ctacaccaaccaaacttcggttacggcatagcctatgtacatctttaaaagaaaaaccggaaatgttctggtttactgtagtgacgaatttaagaccaaarttaagagtattttaagccttagcatttccaccagcgggtcccttgccttggtttttggaaggaagggatttggtgctccctgacttgatcaagccttgct

SEQ ID NO: 9983 - DNA, 201 bp, Homo sapiens
agagttaatgtgaattattctcaaactcttccaaaaagttgaacaggaaggaacacttccaaatccattttatgaggctaacattaccttgataccatagytggatgaggactgtatgagaaaataaaattataggccaatatctctgatgaacatagatgcaacaatcctcagcataatattaatactagcaaaagatgg

SEQ ID NO: 9984 - DNA, 201 bp, Homo sapiens
atccccacctcaagtctcacagtctgtcaaggagcctccagattctttttatcctgtgcatgatgtggaaccattcaaatctctttttaaacaacaacaamaaaaaaaacatgatgtggtttttatattagacgtggacaagtgagccagttaatggcatgtcctggttgtctaaagctgagtgacaaactactccaaaac

SEQ ID NO: 9985 - DNA, 201 bp, Homo sapiens
gtaacttcttgatttctgacttaatttcattatttactccaaagtaattcaggagcaggttattcaatttccatgcaattgtatggttttgagtgaatttyttagtcttgagttctaatttgattgtgctgtggtccaagagactgtttgttactatttcagttcttttgcttttgctgaagagtgttttacttccgatta

SEQ ID NO: 9986 - DNA, 201 bp, Homo sapiens
gtgggtaacccaacctttctctctgactgcccttaacattttttccttcatttcaagtttggtgaatctgacaattatgtgtcttggagttgctcttctcraggagtatctttgtggcattctctgtatttcctgaatttgaatgttggcctgccttgctagattggggacgttctcctggataatatcctgcagagtgtt

SEQ ID NO: 9987 - DNA, 201 bp, Homo sapiens
ctttatattacagagagtagtttatatgttaaagacactctatgttaaaatattaaacagcattcttaggtacataatttataataatgaaaatttcaccttttttttttgagacagagtctctcgctctgtcgcccaggatggagtgcagtggcacgatcttggctcactgcaagttccacctcctgggttcacgccatt

SEQ ID NO: 9988 - DNA, 201 bp, Homo sapiens
gtttgaacttcctcctttagcttggagaagtttgatcgtctgaagccttcttctctcaactcatcaaagtctttctccgtccagctttgttccgttgctgrtgaggagctgtgttcctttggaggaggagaggcgccctgatttttagaattttcagtttttctgctctgttttttccccatctttgtggttttatctacc

SEQ ID NO: 9989 - DNA, 201 bp, Homo sapiens
ctgggtatcagcagcggaggctgcagaacagcgaatattggtgaacagcaaatgttgctgcctgatcgttcctctggaagttttgtctcagaggggtaccmggctgtgtgaggcgtcactctgcccctactgggggatgccttccagttaggctactcgggggtcagggacccacttgaggaggcagtctgtccattttca

SEQ ID NO: 9990 - DNA, 201 bp, Homo sapiens
gtatgtttctgtactttgttcattaacttcattattttatttcattaaaaaaaattttttttttaagatgaagttttgctcttgttgcccaggctggagtrcaatggcgtgatcttggctcactgcaacctccgcctcccaggttcaagcgattctcctgcctcagcctcccgagtagctgggattataggcatgcaccac

SEQ ID NO: 9991 - DNA, 201 bp, Homo sapiens
gttatttaccctctctgagcctcaggttcctcctctataaagtttggattttatttctaatgtgattttggctccaaaattattttttttctttatagttwtgtcatcctctttccagccttaaactggctgaaggcaattagtagtcttaaacttaagcaagtctcactcatttctgatagtacttccttaaacaaaaat

SEQ ID NO: 9992 - DNA, 201 bp, Homo sapiens
cctgtgggggactgcatggtctctgacttcctttcctgtgctttctctgttgctatctgcacctaagcatgatcctgcctccatgcctttgccttacattstgtattctctgcctggtacactcttcccccagttacctgcacagtttagtcccttacctcattcagatctgtgctaaatgtcacctaactaagtccttct

SEQ ID NO: 9993 - DNA, 201 bp, Homo sapiens
ttacattctgtattctctgcctggtacactcttcccccagttacctgcacagtttagtcccttacctcattcagatctgtgctaaatgtcacctaactaartccttctctcacctccctattttaaatagcactgccccagagtccctcttggttttatttttctttacagcactgatcactacatgaccttatttatttg

SEQ ID NO: 9994 - DNA, 201 bp, Homo sapiens
attacaggcatggtaaatatgagaagaggcaacagtagagaagaggcatcagcaaatttttggaagatgaaaagcaaatagacctgtggcaactgccttastataacagaggaagttgatacctaagtgcctttaactgaggttgagaggagatgctgggaagaaacagtcactgtatccctaagaattccagaaagtttc

SEQ ID NO: 9995 - DNA, 201 bp, Homo sapiens
atttggctacaagtagcacaaattagttctgtgtcagatattataagtatgtttctgtactttgttcattaacttcattattttatttcattaaaaaaaattttttttttaagatgaagttttgctcttgttgcccaggctggagtacaatggcgtgatcttggctcactgcaacctccgcctcccaggttcaagcgattc

SEQ ID NO: 9996 - DNA, 201 bp, Homo sapiens
caatttgtgtcatctctgatttttttaagcagtggtttgttgttctccttgtagagatctttcacctccctagttagctgtatttttagctattttattawttttatggcaattgtgcatgggagttcatttgtgatttggctcttggcctgacccttgttggtatataggaatttgattttaggctagtgatttttgcat

SEQ ID NO: 9997 - DNA, 201 bp, Homo sapiens
gctcaagaaatagaccaatttaatttgtttttccttccatgggaatcttttattcttctgctagagggagttggctttttttttttttttttttttttttycccacagaagccatgagtagtagcaggaggcaattataagttttggcaagtccaaaatatgcgcttttttcaagtggagcaagatcaaaagtataatatt

SEQ ID NO: 9998 - DNA, 201 bp, Homo sapiens
aaaagaactggtgaagtcttagcctctgctacctgtgaatatgaccttatttggaaaggtcatattctttgaaggtataatcagtttgggctcttaattcwgtaagactcatgtccttataagaagaggaaaaggccaggcatggtggctcatatctgtaatcccagcattttgggaggccaaggtgggtggattgcttga

SEQ ID NO: 9999 - DNA, 201 bp, Homo sapiens
tcctaatagagcagtcaagcagatagttaaaatgcattagtgaagaggtaaagatatcaaactgtagttaatagctttgggtgtcattagtatagaggtgrtagttgaggttccaggactggatgaatttgtcattattctgaattatagcagatttgcaagttaatgatacaatgaaggatatgttctattcacctattc

SEQ ID NO: 10000 - DNA, 201 bp, Homo sapiens
tacagttattttaaaatcaatttatgcttataagttcaggttcttattacagaaagtctttccttttctagtagaaatgagtgttctacttaaaatttcakacttcactggtaaaaaggattaaagaatcaatggttacggaaatattgtaaaggaaatggtgatctatgaatttataatcatgaagttctaattaacttc

SEQ ID NO: 10001 - DNA, 201 bp, Homo sapiens
acatggtcaagggtgattggaagttctcttcaattctctgttccccctaccattcatacatcattgattttaggcaaacatagatttagagttataatatycatggtcataaaataaatatatgtgggccttataggatatttatgttcaattgtaatattttctgtaatctctataggaagacctttatattacagagag

SEQ ID NO: 10002 - DNA, 201 bp, Homo sapiens
aatagcttctagaccagtgggactgtactggaatgtaaacatatgtttatttttaacataaattaaacataaagtgaaggaaagaatgcataatagaaaarcattggtcaatcttggacacacacctcaccctaccccagtaaaagaagtgtactgcattcaaagataggctcttcctattcaggtgaagaaatgtgtctt

SEQ ID NO: 10003 - DNA, 201 bp, Homo sapiens
cctggactccactgttattcttttaaaacatatttaaaatagtttcagacacaaaataggaacataccaagtcttttttatatattgtggtatatatacartaatatcctccaatgcatattttaaacacactagaagtagtgtgatttttcacatactgttctgtttagtctctgaaatgaaagatatgaagcataaaga

SEQ ID NO: 10004 - DNA, 201 bp, Homo sapiens
ctaagatgatagaatttaagtattaccaaccatttattgtttttgaacaaatatcataaatatacaagtacttaaggtacagaaaactcatgatgctttgrtattcaatatttgaaaatcttacactacatacacatgctactcaaagtgaaacctctgaattagctgcatccaccatcagcaacatcacctgggaactta

SEQ ID NO: 10005 - DNA, 201 bp, Homo sapiens
ttcatgactatgtaactgttgtgtacccaatactgatctgaatttatgattctgaatgaatagccattttaatgaaaaaaagatataaattgaactttacmataatgtattcttaataagaataaaaaacatgttttggaataaaaaaggccaaaatagaaattatatttatcatctcagtaggtgcaaatataatgtttt

SEQ ID NO: 10006 - DNA, 201 bp, Homo sapiens
agttgtctaattcattatactttcatctaactttggtccaaacatgcagttttagttatgactgctgtctttcagccaatcaaataagttcaaaagcttcrcgtcatctttgatctgttactcttttctttcaaccagtcactaagtcctgcaaaattcccccagtttagtgctgctcacccttatatctacattttttaa

SEQ ID NO: 10007 - DNA, 201 bp, Homo sapiens
cattttaatgaaaaaaagatataaattgaactttaccataatgtattcttaataagaataaaaaacatgttttggaataaaaaaggccaaaatagaaattrtatttatcatctcagtaggtgcaaatataatgttttaagatatactagaaatgatgtcattggtatactgatgttacatatttcaaacagtattttggca

SEQ ID NO: 10008 - DNA, 201 bp, Homo sapiens
tagaagatcacttgccttagagggttaataatattcttaaataattgaatataaatcatatgtatatatatgcatatatatatatgcatgcatatatatakgagagagagagagagagagagacgcagggtctctgtcactcagacaggagtgcagtggtgcagtcacggctcactgcagccttggcctcctggcctcaag

SEQ ID NO: 10009 - DNA, 201 bp, Homo sapiens
tgagaaaaagtgtgtaacctaaactacaaaaatattcatggttagaaatcatgatcagtatacaggtatgtttaagagtctagcacaagggttcaatatamgcattataaacaattagtctaactttgtaaaaaagacaaaagataattttcatttgggtactctgaagacttctggtgttttatatgtactgatttttac

SEQ ID NO: 10010 - DNA, 201 bp, Homo sapiens
tctaacagtcaggaccctcagctgcaggtctgttggagtttgctggaggtccacttcagaccctgtttgcctgggtatcagcagcggaggctgcagaacarcgaatattggtgaacagcaaatgttgctgcctgatcgttcctctggaagttttgtctcagaggggtacccggctgtgtgaggcgtcactctgcccctact

SEQ ID NO: 10011 - DNA, 201 bp, Homo sapiens
agccatcttaaggattttgcttttactctgagagaaatgaagatccgtttcaggcagggttttgagtagaagaattatatgatctgatttatgtttaaagraatcactcagactactatgtcgaaagcagacctgttagaaggccattgcagtaatccaggcaggagatggtaatggcttgcatcaaggtggtggtaaaaa

SEQ ID NO: 10012 - DNA, 201 bp, Homo sapiens
gggtcaacagaagtggttttagggggttctttttgagctggggaaatatgtttaaatgtcattaagaatcttcagtagatggcaaaagatgtaagtgaaargggacaattacttgatcagtgttcttaggtcatggtgacaggatctggcatatagggcagaggatggctttagataggtacatgaagttctggaaatagg

SEQ ID NO: 10013 - DNA, 201 bp, Homo sapiens
gaagcttaattaaataatgatattctacttgtagtaggtagttttaaggtctgtttctaattacacttagtttaacattaaatgagcgttcatatgatgcrttttaacctaacatcttctttcttcttagtctgtaagacttgtattgttcagcactttgaagatagcaatgattgcccaaggtgtggcaaccaagttcat

SEQ ID NO: 10014 - DNA, 201 bp, Homo sapiens
gagggcttgacaagttgctagaaggccttagcctagtgataggatgaatcactcctgtatttcatgactttctccagcaatgctcagaaaattggaagtaragatgctgtgagtatcactgaaactgccaactccatatgggcccttggttgagtaggaaggcaagtgacactagagtgtcgatgggctgggagaatagca

SEQ ID NO: 10015 - DNA, 201 bp, Homo sapiens
tgtgggagagtagggaatgcaatctcacagcctaagaggagacactggttttcagtgggagcattgacaaaaaaaattgtagcaacaggcaggcagacagygagtacatggtgcagatgctataggtaggtatggtggccggggcctgtggaagtttgtttttcattgctttgacatttttcattgagaagaaagtgtttg

SEQ ID NO: 10016 - DNA, 201 bp, Homo sapiens
ggctgggctcactcatgcaactgcagttagctgtgcattgggtaatctgctgtgctgatcttgggggatgggctgtctgtggactagtctaaaatggcctyagcagggcagcttggctctcttctacgtggtctctcatcctccagccttgttctcatggtagcaggattctgagagagagaaatagagacaaaagcattt

SEQ ID NO: 10017 - DNA, 201 bp, Homo sapiens
atcagtctactactggggaaggctgtaaataagtgtgttccatggacagaagagtatggtatagtagatgtgctaaaattgtgtatgtattttgtaacatrtataagattatacatctcagactatttacatgtcagatcttggtgtcttcattgttagtattttctttctcccccctttcgaaggttggacaatacatta

SEQ ID NO: 10018 - DNA, 201 bp, Homo sapiens
tttgattccataccctgaccactgtgagagagaggatgatagctctagtttcagtattgttccctcaggccttgtatgatgtgtatccaacatatagttaraactactcaacagatgaatgataaatatagctgcattatttataggctacaggtttgtaataggtgaaatacatttgtatataatataaagtatgccatt

SEQ ID NO: 10019 - DNA, 201 bp, Homo sapiens
tttgagggtttttaaaaagccagatcctaaaaggaacctcggttgccattcatgaatacagaatttttcccaatgtgatcactctcaaagattaacttgaytcattcccacctcacattagtaagactgaataaagttttctcatcatttaagactcacctcaaacggcatctactcagccaggccttcttgatcgccttc

SEQ ID NO: 10020 - DNA, 201 bp, Homo sapiens
atctcctaggtattcaatgtgaaaactctttgcaagtaaatagtgttatgcaaaggtaagttatcactattaccatatgggatgcaacacacactgtgatrtttaagagcttaatttttaaagtgttttgaataaaacaacaaagatgactattgaaatttggtgggggattggtttaggcccttgaagtaaattatgaca

SEQ ID NO: 10021 - DNA, 201 bp, Homo sapiens
gtatgatgtgtatccaacatatagttagaactactcaacagatgaatgataaatatagctgcattatttataggctacaggtttgtaataggtgaaatacrtttgtatataatataaagtatgccattgagatatctttaatggagttgtaacatgttatgtattaatagctatatacatgttaaaaagctaattcattat

SEQ ID NO: 10022 - DNA, 201 bp, Homo sapiens
gacagtttttggtattagtctctgaaaaaatgctttcaaaaattcacatcaacgctgggcgcagtggctcacgcctgtaattccagcactttgggaggccgaagtgggcagattacttgaggccaggagttggagaccagcctggctaacatggcgaaaccccgtctctactaaaaatacaaataattagccaggcatggt

SEQ ID NO: 10023 - DNA, 201 bp, Homo sapiens
tatttacttcatagatattaatttaattcttctagaatgcagactctatgatgaccaggccaggtctattttatttactattgtgttccaggcacattttyacaaacagcctgtttggaagttactaaaacacagaataagtggatatgaaatggtagagccattcctttccagacaaatgtttggttctcaagtcttgga

SEQ ID NO: 10024 - DNA, 201 bp, Homo sapiens
tgataaacatgagaacccagaaaatgcaaagaaggagagctccgaggataaaaatagttgtacataacaaaagttccccactgccaactcattattgccaygtcctgccctttttctctctcttcttcagatttcttcctcctttcactgcctcactgtcttttgtgaaaatgagtactttgggtattgttttgattctgt

SEQ ID NO: 10025 - DNA, 201 bp, Homo sapiens
gagtgcaatggtgcgatctcagctcaccgcaacctccacctcccaggttcaggtgattctcctgcctcagcctcctgagtagctgggattacaggcatgcrccaccacattaattttgtatttttagtagagacagggtttctccatgttggtcaggctggtctcaaactcccgacctcaggtgatctgcctgcctcggcc

SEQ ID NO: 10026 - DNA, 201 bp, Homo sapiens
acttactttaattgtcaaaaaaattactagtaaactcagtcgtctcccttgctttagttgaaaatgtaagcttctttcccacttgactgcaatagtaacaygtgtagggtctacaattttggttccctttagtattcctaaccattgtgttctcatttatattataaatcattactaagcactttgtcttccagatacaat

SEQ ID NO: 10027 - DNA, 201 bp, Homo sapiens
ctgtgagataggtacctttgttatcttccttgtacacagaaacacaaagtagtttgcctaatggcagtactgggattcagatctaggcagtctgcctcaasattatctggaacaactatgctatactaccttggtttttcatgtatatctgcattatagggagagtacattgatcacaaattctttaattattttttgtcc

SEQ ID NO: 10028 - DNA, 201 bp, Homo sapiens
gacccatgactgtcatacaccaaccaaataaatgactccacatctgtgtggaatagtatggtgtcatataagaagccaggaatggatgggtcatctctctsctttaaacacttcctcaatggcaaaaaggtgttggttacccttgaacataggttattgagtactcataacttttgtgtttgcccccaagttaaactaacc

SEQ ID NO: 10029 - DNA, 201 bp, Homo sapiens
ttaaggctcctaaaataaggagtaagacattctttttctatatatcgtagatctatgtaaataaagtgtgaagaaaatgtatcacacatacattggttaasaaaatggattcaaatattggttttaaccactaactagcttcataattttagacaacttgctcaaattctctactcatttttttatctataagaggccaaa

SEQ ID NO: 10030 - DNA, 201 bp, Homo sapiens
acgagatctggtggttttaaaaagaggagttcccttgcacaaactctctttttgcctgctgtcattcacgtaagatgtgacttgctcctccttgccttctrccttgattgtgaggcctccccagccatttggaactgtaagtccaataaacctctttcttttgtgaattgcacagtctcaggtatgtctttatcagcagcg

SEQ ID NO: 10031 - DNA, 201 bp, Homo sapiens
ttttattcactcctactattaaatagtctgggaaaactttacgaatgaccttgtcttgaagaataaggtagcattggtttggtcggagagtacagagagtrtttgagccaggatgtaaaacatgagggagaaaaatgaattggaaaagacaaggaattcttgggataattgaataagccagttggctagagaagggagaca

SEQ ID NO: 10032 - DNA, 201 bp, Homo sapiens
gtgacagccaagtcctaaggggaggtacacctgcgtgtttgaggggtggcgaggggtagttggaggggagagagcagggggatgagtaggagatagggtcrgaaaggccctccaccctggatggagggtggagaccatgaagggctttggcttttgttccaagtgagctagggagtcattgcagcattttgatcacagaag

SEQ ID NO: 10033 - DNA, 201 bp, Homo sapiens
caagggtgaggtatctggtgagggccttcttgccggtggagaccctctgcaaccttctgagctgggcatcacatggtgaggggctgagtgtgtcagctcargtctctcttcatgtaaagccactagtcctatcatggtccccccagtgacattactaatcttaattacctcccaaagccccacctctaaatgccatcaacg

SEQ ID NO: 10034 - DNA, 201 bp, Homo sapiens
cagttggatatgagtctggaggtgaggagaaaaaggtctcgaattcaaaagcatagagatggtttaaagccacagactgaatgagatcaccaagagcatawgtagagatagagaagagaagaggatcaaggtgggggtcaagagaacttgtattgtcctcatttttaaaaaagatagtattaaggatatgtttgtgtgcta

SEQ ID NO: 10035 - DNA, 201 bp, Homo sapiens
aaccctgcaaacccttgatttttgcccagggagatggatatctgacctgcagagctataagataatacatttgtgttgttttcagccactaagtttgtcayaatttgttatcacagcaatataaaatgaatacacagagtaagcagttggatatgagtctggaggtgaggagaaaaaggtctcgaattcaaaagcatagag

SEQ ID NO: 10036 - DNA, 201 bp, Homo sapiens
gtagagtatctttcccatggtggtcagaggctgaggtgactacgggagaatggccagagagatgcaaggttgctggatttgaagatggaggaagggggccmctggccaaggaatgtgggtggctgctagaaggtggaaatggcaaggaaacaaattctcccctataacctcaagaagggaacacaaccctgcaaacccttg

SEQ ID NO: 10037 - DNA, 201 bp, Homo sapiens
gccatggcctccatctgaaacacattccttctcttctttgcctggcaaaatcttcttttacaaccctgattgataattttctcctttttccagacatcctytcttgaccctcatgattcttggtcatctccctgtgttctgtccccatttttccatgccatgaaaggtgtctgttcatacctatctccactagacagtgca

SEQ ID NO: 10038 - DNA, 201 bp, Homo sapiens
tatcacctccttcaaaaaaaaaaaagtcaaatattaaaagaaaatttagggtggaattagacaggaaaagcccagtattgttatcctttctatccattgtstagactcctagaagatcacttgccttagagggttaataatattcttaaataattgaatataaatcatatgtatatatatgcatatatatatatgcatgca

SEQ ID NO: 10039 - DNA, 201 bp, Homo sapiens
aaggggcttttagcatagaaagacccttttcctaaaaaccttttaaagaggaattttttcagcctatcatttacttttatttaagtttaagaccactttgrtgagggatgtgcagctggtggtagtattcttctactagagagttgtgagatgagccatttgtcattgcattacttttgatcttacacattttttctactt

SEQ ID NO: 10040 - DNA, 201 bp, Homo sapiens
ttttctttgtctttcatgacattaatattttcaaaaagtgtaggccatttgttttgtaaaatggccctcaatgtggacttattttatgtttccaaatgatwatagtcaggatagacattttgggcagaaacattacataggtgataatgtatcctcctaagagcatcatctcagcaggtacataatgtcagattatcccat

SEQ ID NO: 10041 - DNA, 201 bp, Homo sapiens
atgaaatggtagagccattcctttccagacaaatgtttggttctcaagtcttggaagatgataaacatgagaacccagaaaatgcaaagaaggagagctcygaggataaaaatagttgtacataacaaaagttccccactgccaactcattattgccatgtcctgccctttttctctctcttcttcagatttcttcctcct

SEQ ID NO: 10042 - DNA, 201 bp, Homo sapiens
ttgcttaaagtttttctttaatcttaagatttttttcttagctggaagtaagtttaattcatctattgggacgtttggatttttattaagcttgatgtctyctctctttgtaaagatctgaataagttgtgcttcagactcatcttcatggtagaaactatgaaaaattgtacagcatatgtgttatactatatgaagaaa

SEQ ID NO: 10043 - DNA, 201 bp, Homo sapiens
accgtatttccaaggcaggggaataaactccatccttagtcaagggaggagtttcaaagtcatgctcaagagtctggatatagagagagctggggactggkaccatttttgttatcagtctactactggggaaggctgtaaataagtgtgttccatggacagaagagtatggtatagtagatgtgctaaaattgtgtatgt

SEQ ID NO: 10044 - DNA, 201 bp, Homo sapiens
ggctaaatacagctagtcctgaatctttcatttggatgtcccaatgagcctagaaatcttaagctatgttaataagtttccaattttttttttttttttttacaaaatatttccattgctgagttggttggaacattttaaagatactaagttcttcttcaaaaactgttaggaaattttttaaagttgatttttgttttg

SEQ ID NO: 10045 - DNA, 201 bp, Homo sapiens
tggctaaatacagctagtcctgaatctttcatttggatgtcccaatgagcctagaaatcttaagctatgttaataagtttccaattttttttttttttttttacaaaatatttccattgctgagttggttggaacattttaaagatactaagttcttcttcaaaaactgttaggaaattttttaaagttgatttttgtttt

SEQ ID NO: 10046 - DNA, 201 bp, Homo sapiens
attgtaatcatttttttggctaaatacagctagtcctgaatctttcatttggatgtcccaatgagcctagaaatcttaagctatgttaataagtttccaawtttttttttttttttttacaaaatatttccattgctgagttggttggaacattttaaagatactaagttcttcttcaaaaactgttaggaaattttttaa

SEQ ID NO: 10047 - DNA, 201 bp, Homo sapiens
tgttcttatagggtcacttgtaagttcagcctcccaatcttggttttcccataagatcataggattgtcaattatacatgattaaggtggatgagatctcycttttttaatctgtaaaatggagattatcattttattcgttcaacttaactgtgcaaggctgttagagcaggggaagtttgagaatagttttgatgctag

SEQ ID NO: 10048 - DNA, 201 bp, Homo sapiens
taccctccaccctccaaaaggacccagtgtgtgttgtttccctctgtgtgtccatatgttctcatcatttagctcccacttaaaagtgacaacatgtggcrtttggtattctgttcctgtgttagtttgctaaggataatggcctccagctccaaccatgtccccacaaaggacatgatcttgttctttcttatggctgca

SEQ ID NO: 10049 - DNA, 201 bp, Homo sapiens
ttagtaatttttaataataatttcagcaaaggggcaaacattactgagcagataaaaggcttttagtgtatatatatatatatatatatatatatatatawgtataaaatctacacaaagggatattaaaattataagaaactagtatcgctcccatttttttaaatatgagatttaatttaggatgtcctaaatatcatt

SEQ ID NO: 10050 - DNA, 201 bp, Homo sapiens
ggactacaggcacctgccaccacgccctgctaatcttttgtatttttagtagaaaaggagtttcaccgtgttagccaggatggtctcgatctcctgacctygtgaccacccgcctcggcctcccgaagtgctgggattataggcatgagccaccgcacccagctgaaaaattcaccttatttaatatttcagggagatgta

SEQ ID NO: 10051 - DNA, 201 bp, Homo sapiens
tctgggctggagaaaaacatttggtagtcttcaacatatagaaggtctttcaaactgtaagcaggatgagatcacttcagggagtgagtacagagaggcaygagtaaaggaccaaggattgagccctggagaactccagcattaagtgttcagagagaagaggaggagccagcacaggaaactgagaaggcacaaccagtg

SEQ ID NO: 10052 - DNA, 201 bp, Homo sapiens
agtagctgggactacaggcacctgccaccacgccctgctaatcttttgtatttttagtagaaaaggagtttcaccgtgttagccaggatggtctcgatctyctgaccttgtgaccacccgcctcggcctcccgaagtgctgggattataggcatgagccaccgcacccagctgaaaaattcaccttatttaatatttcagg

SEQ ID NO: 10053 - DNA, 201 bp, Homo sapiens
tacttttgcaccaacgtaatacatgaagcattattatttggaagttagattcatcctctacaactgatttcagcactcactctatctcaacatcttttggrggagcttttagaaaattcaaatgactctcctatctcaagattctgacttacttgactttgggtaagccctagggaattagtaatttttaaaagcttgcta

SEQ ID NO: 10054 - DNA, 201 bp, Homo sapiens
atatatgtgtatatatacacacatatatatgtaacaaattaaaatgtttaaaatgttaagttacaaagtttcttttgtacctttcaccagttccatcccckgcctccctagattcaactagggatgtactagtaactgtttcacttcaagccaatgccctgctccatatattgataggacttgcctctaacattctttcca

SEQ ID NO: 10055 - DNA, 201 bp, Homo sapiens
tcaagcctcagcaatggtgggcgcccatcccccagcctcactgctgccttgcagttcaatctcagactgctgtgctagcaatgagcgaggctccataggcrtaggaccctccaagccaggtgcgggatataatctcctggtgcgccatttgctaagaccgtcggaaaagcgcagtattagggtgggagtgacccaattttc

SEQ ID NO: 10056 - DNA, 201 bp, Homo sapiens
tatatatgtgtatatatacacacatatatatgtaacaaattaaaatgtttaaaatgttaagttacaaagtttcttttgtacctttcaccagttccatcccstgcctccctagattcaactagggatgtactagtaactgtttcacttcaagccaatgccctgctccatatattgataggacttgcctctaacattctttcc

SEQ ID NO: 10057 - DNA, 201 bp, Homo sapiens
gatgtatctgtttttatggttcttctgtcttttttgatgtagtatggtggttaagcctatagactctgaagcaaaataacctggatttgaatccaccaccrttgtgatctgattgttttaagctgattaatttttgtgaacctaatgatttcagtaaaacccaccattgtgaccttgagagagttaatttaattccctgtg

SEQ ID NO: 10058 - DNA, 201 bp, Homo sapiens
ttatcctttctatccattgtgtagactcctagaagatcacttgccttagagggttaataatattcttaaataattgaatataaatcatatgtatatatatrcatatatatatatgcatgcatatatatatgagagagagagagagagagagacgcagggtctctgtcactcagacaggagtgcagtggtgcagtcacggct

SEQ ID NO: 10059 - DNA, 201 bp, Homo sapiens
tttcttttttctgggtttctaaatgactggacacacacacacacacacacggcccagctaacatggagcaaattatcttccacccttccccaggtcagacstggcactctaaatccttcacagataatctgtgaataaaaacacacccatagacctagatattagtattttaagtgacaagggtatattccagcgttcatt

SEQ ID NO: 10060 - DNA, 201 bp, Homo sapiens
ttacctcttgggctaaatcagctgtaccctcaggttgccctcaagttatttgatctcacctggattttgccccaactctcacagctgtggtgtaccaggcrttcattcaccagtagcagtattgccaggttgcaactgggatcaccagcagttttcatagctcactagttgtctatggcgagaattcttaggtgattagca

SEQ ID NO: 10061 - DNA, 201 bp, Homo sapiens
tgaaaattattggattgtgggagaggggtgcagtaagagaaagacatggtcaagggtgattggaagttctcttcaattctctgttccccctaccattcatmcatcattgattttaggcaaacatagatttagagttataatattcatggtcataaaataaatatatgtgggccttataggatatttatgttcaattgtaat

SEQ ID NO: 10062 - DNA, 201 bp, Homo sapiens
tatcctttctatccattgtgtagactcctagaagatcacttgccttagagggttaataatattcttaaataattgaatataaatcatatgtatatatatgyatatatatatatgcatgcatatatatatgagagagagagagagagagagacgcagggtctctgtcactcagacaggagtgcagtggtgcagtcacggctc

SEQ ID NO: 10063 - DNA, 201 bp, Homo sapiens
gtgctttctctgttgctatctgcacctaagcatgatcctgcctccatgcctttgccttacattctgtattctctgcctggtacactcttcccccagttacytgcacagtttagtcccttacctcattcagatctgtgctaaatgtcacctaactaagtccttctctcacctccctattttaaatagcactgccccagagtc

SEQ ID NO: 10064 - DNA, 201 bp, Homo sapiens
cattttggtatttctttacttttaacattacctcttgggctaaatcagctgtaccctcaggttgccctcaagttatttgatctcacctggattttgccccractctcacagctgtggtgtaccaggcattcattcaccagtagcagtattgccaggttgcaactgggatcaccagcagttttcatagctcactagttgtct

SEQ ID NO: 10065 - DNA, 201 bp, Homo sapiens
ttaatattttcaaaaagtgtaggccatttgttttgtaaaatggccctcaatgtggacttattttatgtttccaaatgattatagtcaggatagacattttkggcagaaacattacataggtgataatgtatcctcctaagagcatcatctcagcaggtacataatgtcagattatcccattattagtgctgttagatgcaa

SEQ ID NO: 10066 - DNA, 201 bp, Homo sapiens
gaatataaatcatatgtatatatatgcatatatatatatgcatgcatatatatatgagagagagagagagagagagacgcagggtctctgtcactcagacrggagtgcagtggtgcagtcacggctcactgcagccttggcctcctggcctcaagtaatcctccacctcattttttaatttttttgtagagatgaggttct

SEQ ID NO: 10067 - DNA, 201 bp, Homo sapiens
cccgggagttgcaaagattggtggggcaagtgtggtttccttgggtcacacattcactccctgcttccctgggcaggggagattcccttgactccgtgtgrctccctggtgggccatcattttgccttgcttttctctgttctctgtgggtcaggttgtttccttgattagtcccaatgcaggtacctggatgtttcaatt

SEQ ID NO: 10068 - DNA, 201 bp, Homo sapiens
ggagtggtttcatgaagggttctcctgacccgggagttgcaaagattggtggggcaagtgtggtttccttgggtcacacattcactccctgcttccctggrcaggggagattcccttgactccgtgtggctccctggtgggccatcattttgccttgcttttctctgttctctgtgggtcaggttgtttccttgattagtc

SEQ ID NO: 10069 - DNA, 201 bp, Homo sapiens
cgaaggttggacaatacattagaggaaattatatttaagctggtccctggactacgagaacgtaagtggctctttaggttcttgcagacttttgtgttttrtgaaatcaacacttctattaaagatttcatgacttttacttttatactctttcttttaaattagaagaacttgagcgtgaatctgaattttggaagaaaa

SEQ ID NO: 10070 - DNA, 201 bp, Homo sapiens
tccgttatgaaatccttgtagtgtgttttttgtctctgtcaggttggttacagtactctctactggctgttttgtctgtcagctcctgcaatgttttagcrtgatttttagcttccttgcttgggttataatgtactcctttagctcagaaagtttggttttatccatattctgaattctacttctgtcatttcagccatg

SEQ ID NO: 10071 - DNA, 201 bp, Homo sapiens
tcaaacccctgggccagccagtcctcccacctcggcctcccaaagtgctgggattacaggtgtgagcccctgcacctggcctgctgtttctcattttaaaygtagtagtacactttgagtttaaacataattttcatgggttactttgattaaaaatagtaaaaaaaaaaaatgtaatgatgatgagtagtttggaaaatg

SEQ ID NO: 10072 - DNA, 201 bp, Homo sapiens
cctagtggccttggatttttcagtatctggaggtatcaccagtgaaggctacaaagcaacaaagatggcagtgtaccccttcctgtgggagtcccatcccrgggagttatggacctgttgccagcctgaatgcagcggtaggaggtagctggagaccccagttgtgaggtctcacccagtcaggaggaacaacacagggga

SEQ ID NO: 10073 - DNA, 201 bp, Homo sapiens
gatggataccatctttgctgcacagctgtgcagctgtgagcagcctagtcaggctctccagcactacattcctcacttgcccagggaggatagtaactgtycatactataatccatacagagtcctgaggccaagcctgatatttggttagtgctcattaaatattagctaagttgttacttaagtgttttcccacctgag

SEQ ID NO: 10074 - DNA, 201 bp, Homo sapiens
agaagatcacttgccttagagggttaataatattcttaaataattgaatataaatcatatgtatatatatgcatatatatatatgcatgcatatatatatragagagagagagagagagagacgcagggtctctgtcactcagacaggagtgcagtggtgcagtcacggctcactgcagccttggcctcctggcctcaagt

SEQ ID NO: 10075 - DNA, 201 bp, Homo sapiens
agcttagtttggctggatatgaaattctgggttgaaaattcttttctttaagaatgttgaatattggcccccactctcttctggcttgtagagtttctgcygagagatcagctgttagtctgatgggcttccctttgtgggtaacccaacctttctctctgactgcccttaacattttttccttcatttcaagtttggtga

SEQ ID NO: 10076 - DNA, 201 bp, Homo sapiens
tctgggttgaaaattcttttctttaagaatgttgaatattggcccccactctcttctggcttgtagagtttctgctgagagatcagctgttagtctgatgsgcttccctttgtgggtaacccaacctttctctctgactgcccttaacattttttccttcatttcaagtttggtgaatctgacaattatgtgtcttggagt

SEQ ID NO: 10077 - DNA, 201 bp, Homo sapiens; identical to SEQ ID NO: 1703

SEQ ID NO: 10078 - DNA, 201 bp, Homo sapiens
ctcagcaattagtaatttttaataataatttcagcaaaggggcaaacattactgagcagataaaaggcttttagtgtatatatatatatatatatatatayatatatatgtataaaatctacacaaagggatattaaaattataagaaactagtatcgctcccatttttttaaatatgagatttaatttaggatgtcctaa

SEQ ID NO: 10079 - DNA, 201 bp, Homo sapiens
atcacttgaacctgggaggcagaggttgcagtgagccgagatcgcgccactgcactctagcctaggcgacagagtgagaatccatctaaaaaaaaaaaaaattgcatcagaaaacctgaatttatgtctttttgctgccattcaccagaataggcaggtgactgggcctattgaaacctcttttttaccagcaaaagtgga

SEQ ID NO: 10080 - DNA, 201 bp, Homo sapiens
agtttttggtattagtctctgaaaaaatgctttcaaaaattcacatcaacgctgggcgcagtggctcacgcctgtaattccagcactttgggaggccgaagtgggcagattacttgaggccaggagttggagaccagcctggctaacatggcgaaaccccgtctctactaaaaatacaaataattagccaggcatggtgat

SEQ ID NO: 10081 - DNA, 201 bp, Homo sapiens
gagagtttggcatgaaatctttaagatatttttaaaatgtgctgtactgctagtatggacttcaaattataaactaagaattagaagtgagttttgtagtratgagaagttttttaagcatctatgggaaaccaaatcctcattttactttttccagtttcaccgagcttcaagcctggatttcctcaggttctaatttat

SEQ ID NO: 10082 - DNA, 201 bp, Homo sapiens
ggtctgtatacatagtcttaaccttagactaggacctttttaacatcattcttggaccaattgggttaaccactacagcagttgagcagttagagagtttrgcatgaaatctttaagatatttttaaaatgtgctgtactgctagtatggacttcaaattataaactaagaattagaagtgagttttgtagtgatgagaag

SEQ ID NO: 10083 - DNA, 201 bp, Homo sapiens
aataaagtgttgtactcggtagaagaaaatgctgtccttagggttctctgtgaaattgcaactcgtgtaggcctttgaaagaaagaaacgtgccaatatayggcacattatgtaatatatatacacatatacatacataagagaataattagttcattatacaaataaaacaagaagatgcatggaagcgaattacagcta

SEQ ID NO: 10084 - DNA, 201 bp, Homo sapiens
aaggcctgggcatgcatattttggaagagctccccaagtgatgctgatgtatactcctttggggtattactggcacatcttattcaattagcaattaactrtgtactatcttgtattactagtttgctgttgccctgtattgttatttaacttgaacagttaattaactatcatcgaacagacatttattgagtactttgt

SEQ ID NO: 10085 - DNA, 201 bp, Homo sapiens
gcaaaaccagacatagaacctgcccttctggactctctggtcaagtgaagaaagagtaatcaagttaagaaatgtaaaaaaaaaaaaaaaaaaaaaaaaaatgctgttaagtgcaatgaggaaggacagactatgatataatagcagatgtgtatcaggatactggagcagaatgatatgcagaagaaactcgtgttttgt

SEQ ID NO: 10086 - DNA, 201 bp, Homo sapiens
aattttttttttttttttttacaaaatatttccattgctgagttggttggaacattttaaagatactaagttcttcttcaaaaactgttaggaaatttttkaaagttgatttttgttttgattatcaatgtatgattgcttaactttaaaatcaactttgatttatagctaacttagttttgtttaaattatacagatgat

SEQ ID NO: 10087 - DNA, 201 bp, Homo sapiens
gtgtcaggcactgtgctggggcatgagataataaagaagggcacaagataataaagaagtctctgctcaagaagtataattctagtaggaaaactaattttaaaaatgccatattagtgataagtagtatgaaaaagaacaaagcacaattgtagataggagacatggaggtaatttatagtgggtcagcctctttgatat

SEQ ID NO: 10088 - DNA, 201 bp, Homo sapiens
caagaaatagaccaatttaatttgtttttccttccatgggaatcttttattcttctgctagagggagttggctttttttttttttttttttttttttccccacagaagccatgagtagtagcaggaggcaattataagttttggcaagtccaaaatatgcgcttttttcaagtggagcaagatcaaaagtataatattagt

SEQ ID NO: 10089 - DNA, 201 bp, Homo sapiens
tccacagtgtgttttgttttgcttctttgaacatttgttcattgtttttaatttttggattcatccagcaaaaactgtcaactctggatgatgagaagaargcacaaactctcgcatttctatctatatgctacaaattttatatatgtcctttggaagaaaattttctttgggtcatagtgaaatcccaatttaaatgta

SEQ ID NO: 10090 - DNA, 201 bp, Homo sapiens
tgtatgtattttgtaacatgtataagattatacatctcagactatttacatgtcagatcttggtgtcttcattgttagtattttctttctcccccctttcraaggttggacaatacattagaggaaattatatttaagctggtccctggactacgagaacgtaagtggctctttaggttcttgcagacttttgtgttttat

SEQ ID NO: 10091 - DNA, 201 bp, Homo sapiens
agcattcaagggatcatccctgcttccacaagcaaagttccagagtctgtgaattttatgacataataaacaagtagaaaatgtacttgtcacaggttggkttccctgggaagctgactcccaggtgtagttttgtatccaggatgtttattagggaatgccctttgaagggtgggaaggcagcaaggggggcagaaaagg

SEQ ID NO: 10092 - DNA, 201 bp, Homo sapiens
tgattgagttcattgaaatcctaggatgttagagtccaaagaggccataaaaatcctttatgcaaccctcttgtttgacagatagggaagtggagtaaatmaaggagaataaattttagtgtggtttccccagaaacagaccccaagacaagaatttgagagtaagtggtttagttgagaggttctcccaagaaatatcaa

SEQ ID NO: 10093 - DNA, 201 bp, Homo sapiens
cacattgcagccagaacataattggattttgttagccagaaataaggggaatttaggctccttcattagaagcctaaattgcctgtgacacatgtagcaaraaatttaccttctatgtactttttctcagtaagctattgggagatgtgctggagcataaaccaagaaagaataaatgactctagcatagcagagaggtga

SEQ ID NO: 10094 - DNA, 201 bp, Homo sapiens
ttcaggctatcctacccaaaggacagggaaattgggttacttgcccatcaactatccatcctccttgactgagggctgtttcctggagatgctaacttccytgcatttttgcctcactgtgggagagggcccagcctgctcccagagccagaataaaagccacaggtgttcaagaaggctgccttcagcatgtagagatga

SEQ ID NO: 10095 - DNA, 201 bp, Homo sapiens
cccaaaggacagggaaattgggttacttgcccatcaactatccatcctccttgactgagggctgtttcctggagatgctaacttccctgcatttttgcctyactgtgggagagggcccagcctgctcccagagccagaataaaagccacaggtgttcaagaaggctgccttcagcatgtagagatgagcgtggaggagata

SEQ ID NO: 10096 - DNA, 201 bp, Homo sapiens
ctcaagatgtttcattcattcaataaatattgattatctactaagtgccagacattggggaagtgaatccacatcagtgaacaaaacagacaaaaaatacrtgccctcacagagcttacattctaatgggtagagataaatatataacatttttacttttcaggcaatgagaaatactgtggagaaaagtaaacccagaga

SEQ ID NO: 10097 - DNA, 201 bp, Homo sapiens
taaaggccctgattagtggcagcaccatgggaatctccctggcctattcagtagcattgaatcaatcctgagtttaattagcagcaattgccaggatgacrttttggccttgtcataccacggggcagtacctcttaaggattggatgtagttttgtgcaatgaagagcccttcttcagatgggttatttctaccccatgg

SEQ ID NO: 10098 - DNA, 201 bp, Homo sapiens
ctttgggaggccgaggcaggtggatcacttgtggtcatttgttggtcaggagtttgagaccagcctggccaacatggcaaaaccctatctctgctaaaaayacaaaaagtagccaggcacggtggtggatgcttgtaatcccagctacttgggaggctgaggtgggagaattgcttgaacacgggaggctgaggtgggaga

SEQ ID NO: 10099 - DNA, 201 bp, Homo sapiens
ctctgacttcctttcctgtgctttctctgttgctatctgcacctaagcatgatcctgcctccatgcctttgccttacattctgtattctctgcctggtacrctcttcccccagttacctgcacagtttagtcccttacctcattcagatctgtgctaaatgtcacctaactaagtccttctctcacctccctattttaaat

SEQ ID NO: 10100 - DNA, 201 bp, Homo sapiens
tagctggctttcattactgtttttcacacattaactttggcctcaacttgacaactcaaataatatttataaatacagccacacttaaaatggtcccattrtgaaatacatatttaaatatctatacgatgtgttaaaaccaagaaaatatttgattcttctctgatatttaagaattgaaggtttgaggtagttacgtgt

SEQ ID NO: 10101 - DNA, 201 bp, Homo sapiens
ctttctcacaatatatagcaacagttatttacttgctgattttctaatgcacatcacacatagtcatattaaacacacacacacacacacacacacacacmcacccctcaagaaacattttctgagacgtgatttcctgatttcatcaaaaaagaaaagagcgggccaggcacagtgggaagtcaaggtgggtggatcact

SEQ ID NO: 10102 - DNA, 201 bp, Homo sapiens
aacagaagatgattgtcttttccaatgggacatgaaccttagctctagattctaagctctttaagggtaagggcaagcattgtgttttattaaattgtttmcctttagtcttctcagtgaatcctggttgaattgaattgaatggaatttttccgagagccagactgcatcttgaactgggctggggataaatggcattga

SEQ ID NO: 10103 - DNA, 201 bp, Homo sapiens
gagaccaagatagggaacttcacatacagtaccttttctcccaaggcggaagagggctgttcaatttctacactagagttcggggagttttagaaatgagycagttatcgaggatgagagcagttcctgataggctcaaccacaatgagatgtagctgttcagagaaagcattcttttatctataaactggaagataatcc

SEQ ID NO: 10104 - DNA, 201 bp, Homo sapiens
cagacccttctccattcccaggcatgtttggtggcagagtttaccttagttggggttaggctgttgtctggtactgtgagagagaaggaagaagaagataygatattaacaacaacaatacatatttatatttgaaaattaaatgcactaatacacctatagtgctattaaacaaatttatttgttcagcaaatgtttgtt

SEQ ID NO: 10105 - DNA, 201 bp, Homo sapiens
caccctttggcaagtaccccagcctggaacttcagccctggatgtacaacgaacagtacacatttgtcaggtatgtttgtcttctacatcccaggaggggrtaagattcgagcagaccaaagatgtttacgagggccaagggaatggacttcagaattacacggtggaatgaattttactgctgcggctcaggtccctgta

SEQ ID NO: 10106 - DNA, 201 bp, Homo sapiens
gctgttcaccgacaatgtgagtcatgcagagagaacactcctgctgggatgagcatctctgggagccagaggacagtgtttaattgtgatcttattccacytgtcagtggtattgacactgctgactgccttgtcctgtcttcagagtctgtcttccctgagaaggcaaagcacctttctttcttgctgtgccttacattt

SEQ ID NO: 10107 - DNA, 201 bp, Homo sapiens
gggctcagtgggtggattgacactgcagaaatggccagatctaaaggatcaacatttacgtagctgggaaatgtagctgggacttcagtttcactgccctrgtgatttttcctaccactaagcagctcagtccatacccctacgagacccacaagcttatgagatactgttcttccaggaaagcagtggggccagggccac

SEQ ID NO: 10108 - DNA, 201 bp, Homo sapiens
tgaatcatagaaccagaaggggttctcatctgaaatgcaaaggaaggaggagttggtttaattcaataagtttcagttgagtaaacatgatttagtgagayactgttcttgcttctgactcaccatttggaaaatctctctaaaataaaattggactctccatctcggacatcattttgggtgtaggttttgctttttttt

SEQ ID NO: 10109 - DNA, 201 bp, Homo sapiens
ttctgaggcagctgtgatttaagaaaatgctctagtctgtggcattccatattcaagtactttgagttgtatattaatttatttttgttaataagagtgasatgactcactaagtaatttagagatttaaacacttttttaaaaaacagtaacttcatatgcattggatctattcttctataaagtcttttcttggggggt

SEQ ID NO: 10110 - DNA, 201 bp, Homo sapiens
caatggaggagcactggatttggttcctaaaacaaaataaagtttgaaatcctgtctttcccatgttgaaaacaaagttggtacaaaaccctttagctttkgcaaacctcctttaagacccgatttaaatgcttccctcctcatgaagctcttctggatccactccttcccatcactaagttgaaagtaagatccccttct

SEQ ID NO: 10111 - DNA, 201 bp, Homo sapiens
catacatcagcctcttaaggagctggggccacaggcacgcaccactgctcctggctaaatttttacaattttttgtaaagacaaggtctcactatcttgcycagactggtcttgaactcctgggctcaagtgatcctcccacatcagcctcccaaagtgctgggattacaggcataagccactgtgcaggtcatcaaatgc

SEQ ID NO: 10112 - DNA, 201 bp, Homo sapiens
aattcttgtctataaagacccgtatgcttggttttcatgtgatgacagagaaaacaaaacactgcagatatccttcaggacctgacaggaagaaacatttyggattatctggtgaagacgtatgtgcagatcatagccaaaaggtgactttttactaaacttggcccctgccttattattactaattagaggaattaaaga

SEQ ID NO: 10113 - DNA, 201 bp, Homo sapiens
tgagaaactttccgtttctgttgagagtatcattctcttgagaaactttctcctaaatcagagaaagtatggaagcatggaaagtattcctgagtagaacytctacagatattacaatatttttcaaatacaaagtttccattgtcagcctgtttcccaagtgcttccacaaaccattaaataattccacaaaccattaaa

SEQ ID NO: 10114 - DNA, 201 bp, Homo sapiens
ccagggactttctgcttaggacccctctcatcacttctccaacgctggtatcatgaaccccattctacagatgatgtccactagattaagaatggcatgtraggccaagtttccacctgagagtcagttttattcagaagagacaggtctctgggatgtggggaatgggacggacagacttggcatgaagcattgtataaa

SEQ ID NO: 10115 - DNA, 201 bp, Homo sapiens
gaaataagatgccagatgtaagttgtcaacagttgcagccacatgacagacatagatatatgtgcacacactagtaaacctctttccttctcatccatggktgccacttttatctttttatttttatttttttttttgagatggagtctcgctctgacgcccaggctggagtgcagtggctcgatctcggctcactgcaac

SEQ ID NO: 10116 - DNA, 201 bp, Homo sapiens
ccacttttgttccatttttcccactttgttctttggcacacagaatgtttgatttgtgaaaatcttaataacagtagttttttctataaggaacactcagaatcttgataatattggaataatacagatccttttgtaggatcctctcagacctcatataatagagttcatgtagtcaatatttaaagaaaaacaccctta

SEQ ID NO: 10117 - DNA, 201 bp, Homo sapiens
cccacttttgttccatttttcccactttgttctttggcacacagaatgtttgatttgtgaaaatcttaataacagtagttttttctataaggaacactcagaatcttgataatattggaataatacagatccttttgtaggatcctctcagacctcatataatagagttcatgtagtcaatatttaaagaaaaacaccctt

SEQ ID NO: 10118 - DNA, 201 bp, Homo sapiens
gcacccctaccagcaatgtgggagaaaatagcaacatatttttgatgttggggtctagtgttacggtttcttctgctctttgggatgtatattccatggcwactgaatacccaagtcccaaacagttttcttagactcagaaggtcatccacttcagcttcttcatcaaaaagacatattttctggctgggcacggtggct

SEQ ID NO: 10119 - DNA, 201 bp, Homo sapiens
cccatatttcagaacttgatacatttttaggataaaccatgaatgacacccgtttcttctccctcaccctcccttccctcccattttttttttttttttttagaagctgaataatatcaatgatatcctgaagtccgtgttcttgatcttcccacatttttgcctgggacgagggctcatcgacatggtgaaaaaccaggc

SEQ ID NO: 10120 - DNA, 201 bp, Homo sapiens
attctcctgcctcagcctccctagtagctgggattacaggtgcatgccaccacacccggctaatttttgtatttttagcagagatggggtttcgtcatgtyggccaggctggtctccaactcctgacctcaggtgatccacccacctcggcctcccaaagtgctagaatcacaggtgtgagccgccgcacccggccgctta

SEQ ID NO: 10121 - DNA, 201 bp, Homo sapiens
ttttaaatttggtggaatatgtttttattagcttgtatctttaattcctaaattaagctgtgtgtgtgtgtgtgtgtgtgtgtgtgtgtgtgtgtgtgtgtgaagtttaaagccaggatgagctagtttaaagtatgcagcctttggagtcatacagatctgggtttgaatctggtctctaaactttatagatgtatgata

SEQ ID NO: 10122 - DNA, 201 bp, Homo sapiens
ttttaaatagttttctggagatcctccatttgggtattttttcctgctttcaggtttggagatggttatacaatagttgtacgaatagcagggtccaaccyggacctgaagcctgtccaggatttctttggacttgcatttcctggaagtgttctaaaagagaaacaccggaacatgctacaataccagcttccatcttca

SEQ ID NO: 10123 - DNA, 201 bp, Homo sapiens
tgcgatgaaacaattctgacattcatgttatgagcagttacctcataaatagattacatgtgagattgaacttgggcagactataatatagcattaatgaygaaacagacacagtcatcttcgggaagaagaatagaggcttatttgctgcctgtgaaattaaaattactctgactgggaatccatcgttcagtaagttta

SEQ ID NO: 10124 - DNA, 201 bp, Homo sapiens
tagtgaaaccctgtctctgctaaaaacatagaaaaattagccgggcatggtggcgtgcgcctgtaatcccagctactcgggaggctgaggtgagagaattrcttgaacccgggaggcggaggttgcagtgagcccagattgcaccactgcactccagcctgggcgacagagcaagactccatctcaaaaaaagctctcaga

SEQ ID NO: 10125 - DNA, 201 bp, Homo sapiens
ttgtttgttgcagatatatagaaggaagcggaagcctgctgttgacaggatttgcgtgggcattcctcctggtgaggtaaagacactttgtctatattgcrtttgtccctattagttcagactatctctacccaatcaagcaacgatgctcgttaagaggtaaaagtggattttaaaggcttctgtatttatgccaggatg

SEQ ID NO: 10126 - DNA, 201 bp, Homo sapiens
atgatgatgagatctttgctgtttataccaagccccttagactgtgtcactcttctgatccggttgtccttgtatggccatgctgtatattgtgaatgtccgttttcaaaagcaaagccaagaattaaccttgtgttcaggctgtggtctgaatggttatgggtccagagggagttgatctttagctcacacttctattac

SEQ ID NO: 10127 - DNA, 201 bp, Homo sapiens
ccccgtctctactaaaaatacaaaaattagctgggcgtggtggtgcaagcctgtaatcccagctactcaggaggcttaggcagaagaatcgcttgaacccrggaggcagagattgcagtgagccgagatggtgccactgcacagagcgagactccatctcaaaaaaacaaaacaaaacaaaacaaaaatcttgctttatag

SEQ ID NO: 10128 - DNA, 201 bp, Homo sapiens
ctccagagccaacctggcagcagcctgtgggggcatcatctacttcacgctgtacctgccctacgtcctgtgtgtggcatggcaggactacgtgggcttcmcactcaagatcttcgctgtgagtacctctggcctttcttcagtggctgtaggcatttgaccttcctttggagtccctgaataaaagcagcaagttgagaa

SEQ ID NO: 10129 - DNA, 201 bp, Homo sapiens
aaaacttcatttgaatttttaatacataagaaaacaataagaaatagttaaaaatatatatttatataatatatatgtgtgtgtgtgtgtgtgtgtgtatrtatatatatatattttatttatttatttttttttgagatggagtctcgctctgttgcccaggctggagtgcagtggctcaatcttggctcactgccacct

SEQ ID NO: 10130 - DNA, 201 bp, Homo sapiens
tattcattgtatttattttgagatagggtcttgctctgttgcacagggtggagtgcagctgcacagacaaggctcactgcaacctcagcctcctgcgctcrcgtgatcctcatacatcagcctcttaaggagctggggccacaggcacgcaccactgctcctggctaaatttttacaattttttgtaaagacaaggtctca

SEQ ID NO: 10131 - DNA, 201 bp, Homo sapiens
ggaaaacttcatttgaatttttaatacataagaaaacaataagaaatagttaaaaatatatatttatataatatatatgtgtgtgtgtgtgtgtgtgtgtrtatatatatatatattttatttatttatttttttttgagatggagtctcgctctgttgcccaggctggagtgcagtggctcaatcttggctcactgccac

SEQ ID NO: 10132 - DNA, 201 bp, Homo sapiens
gtagaatgatcttggctcactgcaacttccgcctctcaggttcaggtgattctcctgcctcaacctcctgagtagctgggattacaggtgcgtgccaccayacccggctagtttttgtgtttttagtagggacagggtttcaccatgttggccaggctggtctcaagctcctgacctcaagtgatctgccagcctcagcct

SEQ ID NO: 10133 - DNA, 201 bp, Homo sapiens
aaggagacaattagagatcaatctggaaaacttcatttgaatttttaatacataagaaaacaataagaaatagttaaaaatatatatttatataatatatrtgtgtgtgtgtgtgtgtgtgtgtatatatatatatatattttatttatttatttttttttgagatggagtctcgctctgttgcccaggctggagtgcagt

SEQ ID NO: 10134 - DNA, 201 bp, Homo sapiens
atagactcttctaattatgaagatatctagatgtctagaaaatatcaaaatgcatgtggtttttgcatttctaaaatacttttaaaaccaaatactttttyttttttttttttttctgagatggagtcttgctcttttgcctaggctggagcgcagtagaatgatcttggctcactgcaacttccgcctctcaggttcagg

SEQ ID NO: 10135 - DNA, 201 bp, Homo sapiens
aggtgctttaaggagacaattagagatcaatctggaaaacttcatttgaatttttaatacataagaaaacaataagaaatagttaaaaatatatatttatataatatatatgtgtgtgtgtgtgtgtgtgtgtatatatatatatatattttatttatttatttttttttgagatggagtctcgctctgttgcccaggctg

SEQ ID NO: 10136 - DNA, 201 bp, Homo sapiens
aacctccacctcctgggttcaagagattctcctgcctcagcctcctgagtagctgggactataggcgcacgccaccatgcctggctagtttttgcattttyagtagagacagagtttcaccatgttggccaggatggtctcgatttcctgacctcttgatccacccgcctcggcctcccaaagtgctgggattacaggcgt

SEQ ID NO: 10137 - DNA, 201 bp, Homo sapiens
cacatgcagtgtccctttccaaatcctcccatgccatttatgtccaatgctgttgacctattgggagttcacggtctcgatccctgagggacattttctttgttgtcttggcttctagaagagtatcttttacttgccccctcccaaacacacatttcatggtctcctaacaagctagaagaaagaggtaaagacaagcgt

SEQ ID NO: 10138 - DNA, 201 bp, Homo sapiens
tcacatgcagtgtccctttccaaatcctcccatgccatttatgtccaatgctgttgacctattgggagttcacggtctcgatccctgagggacattttctttgttgtcttggcttctagaagagtatcttttacttgccccctcccaaacacacatttcatggtctcctaacaagctagaagaaagaggtaaagacaagcg

SEQ ID NO: 10139 - DNA, 201 bp, Homo sapiens
atcacatgcagtgtccctttccaaatcctcccatgccatttatgtccaatgctgttgacctattgggagttcacggtctcgatccctgagggacattttctttgttgtcttggcttctagaagagtatcttttacttgccccctcccaaacacacatttcatggtctcctaacaagctagaagaaagaggtaaagacaagc

SEQ ID NO: 10140 - DNA, 201 bp, Homo sapiens
atgacaaagccaaggccacaaatagaactgaaaactcttgatgtcagagatgacctctcttgtcttccttgtgtccagtatggtgttttgcttgagtaatrttttctgaactaagcacaactgaggagcaggtgcctcatcccacaaattcctgacttggacacttccttccctcgtacagagcagggggatatcttggag

SEQ ID NO: 10141 - DNA, 201 bp, Homo sapiens
gcagtgtatgtggtttatagtcctgccttccacagttgcttgggagagctgtgagtcactgaggcttatgaatgtttacattttgtttgttgcagatatayagaaggaagcggaagcctgctgttgacaggatttgcgtgggcattcctcctggtgaggtaaagacactttgtctatattgcgtttgtccctattagttca

SEQ ID NO: 10142 - DNA, 201 bp, Homo sapiens
ctaccacgcccagctaattttgtatttttagtagagatgggttttatccatgttggtcaggctggtctcgagctccagacctcaggtgatctgcccgcctyggcctcccaaagtgctgggattataggcctgagccacagcgctcagccataactttaatttgaaaatgattgtctagcttgatagctctcaccactgagg

SEQ ID NO: 10143 - DNA, 201 bp, Homo sapiens
tgacttcaatagaggtttcagacaaaaagttgttttgtatatacttatcagtcatgaaaagataattacaactaaatggcctttttccttccctatttatytggagaaatttaattacataaaaaagtactcagaatatttgagtttcctgcatcaataagacatttataataatgaccttgtttacaaatgaatttgaaa

SEQ ID NO: 10144 - DNA, 201 bp, Homo sapiens
cgtagttacctccttagagtatgaaaaaataggcttagggcatccccaagtcccctctatgtctgagagctgaggctggctgtcaaagaggaactaaggaygccagggactttctgcttaggacccctctcatcacttctccaacgctggtatcatgaaccccattctacagatgatgtccactagattaagaatggcatg

SEQ ID NO: 10145 - DNA, 201 bp, Homo sapiens
tgtgtgttgaaaccagtggtacctaacacatttacatcccaaccttaaactcctatgcacttatttaccctttaatgagcctctttacttaagtacagtgkgaggaacagcggcatcaggatcacttgggaacttgttagaaattcagcaacttgggcccagctcagacctactgaatcagaatcaggagcaattctctgg

SEQ ID NO: 10146 - DNA, 201 bp, Homo sapiens
ggtcttgaactcctgacctcaggtgatccgcccaccttggcctcccaaagtgctgggattacaggcgcgagccactgtgcccagcccacttcatcttaccrtagttacctccttagagtatgaaaaaataggcttagggcatccccaagtcccctctatgtctgagagctgaggctggctgtcaaagaggaactaaggatg

SEQ ID NO: 10147 - DNA, 201 bp, Homo sapiens
tcgcatcccctgtgacttgcacatatacgcccagatggcctgaagtaactgaagaatcacaaaagaagtgaaaaggccctgcctcgccttaactgatgacrttccaccattgtgatttgttcctgccccaccttaactgagtgattaaccctgtgaatttccttctcctggctcagaagctcccccactgagcaccttgtg

SEQ ID NO: 10148 - DNA, 201 bp, Homo sapiens
ctgtaaggctaacagttgcaatatactagggtaatctgagtgagctggaattaaaaaaaaaaaggaatttcaccccaatcttatactgacttcaatagagstttcagacaaaaagttgttttgtatatacttatcagtcatgaaaagataattacaactaaatggcctttttccttccctatttatttggagaaatttaat

SEQ ID NO: 10149 - DNA, 201 bp, Homo sapiens
aggtgcccttgaggagctttgtagctggcagaggaggtgaaactgacaaatgtttggcagatggaggagagtaccagaggggtttgagatgagctaaattycaatctaaccgcaggtgtgaggaagaggcttggattgggaccatggagatgggggttctactcccagtcacgccagctgactttgcgagtgttctttgtc

SEQ ID NO: 10150 - DNA, 201 bp, Homo sapiens
ctcctaggcttagcattttctccccacactatgctgccatgttgcttattccaacattaggaagcataggtgccatccccagcttttgaggccaatatcaygatgaagcatttttaaaacatctcattaaattgctgatatagtggaaagaaccaaagctttgcagtcaaagctgtttgggttcaaatttaccacttgttt

SEQ ID NO: 10151 - DNA, 201 bp, Homo sapiens
atattatttacttgtcttcctgtacacccactgcctagtcctgatcctacttttgtttgcaaataggatggggcacaacgtacaaggaagggcctttgccrcccctgctaagggataacctgaaataccttcaccatcactgccctgtgctgcttttcacctatgccagtctgtctacagtgccagtgtctcctggcattg

SEQ ID NO: 10152 - DNA, 201 bp, Homo sapiens
ttccagtgagcctcctgcctcagcctcccaaatagctgagactacaggcatgtgccaccacgtccggctaatttttgtatttttagtagagacagggtttygccatgttgaccacactggtctcgaactcctggcctcaggtgattcgcccgcctcagcctcccaaagtgctgggattacaggcatgagccaccatgcccg

SEQ ID NO: 10153 - DNA, 201 bp, Homo sapiens
tagtgcaatctccgctcactacaatgtctgcctcccaggttccagtgagcctcctgcctcagcctcccaaatagctgagactacaggcatgtgccaccacrtccggctaatttttgtatttttagtagagacagggttttgccatgttgaccacactggtctcgaactcctggcctcaggtgattcgcccgcctcagcctc

SEQ ID NO: 10154 - DNA, 201 bp, Homo sapiens
ccccactttttccttttgctgcagccctgggagccacctggctctccaaaagcccctaatgggcccctgtatttctggaagctgtgggtgaagtgagttartggccccactcttagagatcaatactgggtatcttggtgtcaatctggattctttccttcaggcctggaggaatataataactgagacttgttttatttc

SEQ ID NO: 10155 - DNA, 201 bp, Homo sapiens
gtatacagatcttcctttgagaaaaactgattgtgttcagcctctcatgttacaaatggggaacctgaattctgaggtctctagtgagagaacagggactrgaatctgtggatcctatctgttttaataataattgtaaagtataatagataatattatattaataaaataaaagcaaacacttagaatgagcttccatgt

SEQ ID NO: 10156 - DNA, 201 bp, Homo sapiens
ctctatgttcaggtgctgaggagctggcaaaaggttttaagtcggggagaggcatgttcagatatttggtctagctgagtaactttgggtgctctgtgacraatggttgggagaccagtgaggtggcagttgcggtcatctaggagcaggatcagagtggcctattgactgggatgactgtgaagtgggatcctttccagc

SEQ ID NO: 10157 - DNA, 201 bp, Homo sapiens
tattaggaagtaaaagtaggtataaacttcttataggctgttattatacaactatatgacccatacatatttacaaattaagtgcagccaaaattgcaaartcaataccattcaaattaataccttaaatgtggtgaggcagctgttgttcaactgaaaccaaattataagttgcatggcagtaaatgctatcatgctgat

SEQ ID NO: 10158 - DNA, 201 bp, Homo sapiens
accagggaggaggctctccaagtggccaaggcataaagcaagaaatgaggcctggtgactgcttagtggcagagcagtgaaagagagggaggcatcaaagygagtctcgatttctagctgggtgggtggtagcgatgtccagtaggccagtggctactgaggtctgcagtggaggagggtggttgggctggagacagatga

SEQ ID NO: 10159 - DNA, 201 bp, Homo sapiens
gggctgagaactccacaaagtgccggaatacatttgcatgtaagacagaacgctgcctgggtcattgatgcctgttgagtggcagtcacagacactgcctrgggtttctgactcacgctgttgggactgttctatgcagggcaccctcttgtgtggcataggatttgtgcctcaccacacactgttgtagctttgctgtct

SEQ ID NO: 10160 - DNA, 201 bp, Homo sapiens
gctccctctttccccacatccattcaaatctgttccttctccaaaggatgtgtcaaggaggaaatggacctggctgggaaaccctcagaatactgggatgwtgctgagcttggctcatacctgtgctttgctttcaggccagtacggaattcccaggccctggtattttccttgcaccaagtcctactggtttggcgagga

SEQ ID NO: 10161 - DNA, 201 bp, Homo sapiens
attgcttcagtcagatgtttgcgaatagctgtgtgatctcaaaatgttttcctatgtgatctatagaaaatggaatgatagagtattaggctgtaagggcmtaagaaacaaaggaaaaagagaagtgaactgttagtttagttgtaaaacctaactttggtgaattgtaaaaatttgttataatacaatatgattcttgct

SEQ ID NO: 10162 - DNA, 201 bp, Homo sapiens
tctttgcaagagggacaagagtgtgggagatactgagttaatgcaacttgcaggttttaagtgtcctgtcattgtgccttgtgctttgatacattctgagkttcagtaaagagacctgatgcattggactgttgcaatggaacctgttttaagatcttcaaagctgtattgatatgaagttctccaaaagacttcaaggac

SEQ ID NO: 10163 - DNA, 201 bp, Homo sapiens
ctaaatacaagtcctgtgtttttatcacagggaggctgatcaatataatgaaattaaaagggggctggtccatattgttctgtgtttttgtttgtttgttttgtttgtttctttttttgtttttgtggcctccttcctctcaatttatgaagagaagcagtaagatgttcctctcgggtcctctgagggacctggggagct

SEQ ID NO: 10164 - DNA, 201 bp, Homo sapiens
actaaatacaagtcctgtgtttttatcacagggaggctgatcaatataatgaaattaaaagggggctggtccatattgttctgtgtttttgtttgtttgttttgtttgtttctttttttgtttttgtggcctccttcctctcaatttatgaagagaagcagtaagatgttcctctcgggtcctctgagggacctggggagc

SEQ ID NO: 10165 - DNA, 201 bp, Homo sapiens
ggagaaggtccttagaggacattattatgtcaaagaaaagagacttgtcaagaggtaagagccttggctacaaatgacctggtgttcctgctcattacttwtcaatctcattgaccttaacttttaaactataaaacagccaatatttattaggcactgatttcatgccagagacactctgggcatgaaagaaagtaatga

SEQ ID NO: 10166 - DNA, 201 bp, Homo sapiens
aactaaatacaagtcctgtgtttttatcacagggaggctgatcaatataatgaaattaaaagggggctggtccatattgttctgtgtttttgtttgtttgttttgtttgtttctttttttgtttttgtggcctccttcctctcaatttatgaagagaagcagtaagatgttcctctcgggtcctctgagggacctggggag

SEQ ID NO: 10167 - DNA, 201 bp, Homo sapiens
cacagagagtgatggagaaggtccttagaggacattattatgtcaaagaaaagagacttgtcaagaggtaagagccttggctacaaatgacctggtgttcstgctcattacttttcaatctcattgaccttaacttttaaactataaaacagccaatatttattaggcactgatttcatgccagagacactctgggcatga

SEQ ID NO: 10168 - DNA, 201 bp, Homo sapiens
aatcacatgcagtgtccctttccaaatcctcccatgccatttatgtccaatgctgttgacctattgggagttcacggtctcgatccctgagggacattttctttgttgtcttggcttctagaagagtatcttttacttgccccctcccaaacacacatttcatggtctcctaacaagctagaagaaagaggtaaagacaag

SEQ ID NO: 10169 - DNA, 201 bp, Homo sapiens
aaactaaatacaagtcctgtgtttttatcacagggaggctgatcaatataatgaaattaaaagggggctggtccatattgttctgtgtttttgtttgtttgttttgtttgtttctttttttgtttttgtggcctccttcctctcaatttatgaagagaagcagtaagatgttcctctcgggtcctctgagggacctgggga

SEQ ID NO: 10170 - DNA, 201 bp, Homo sapiens
tgaggagcagggcattggagtgcagtgggacaacctgtttgagagtcctgtggaggaagatggcttcaatctcaccacttcggtctccatgatgctgtttracaccttcctctatggggtgatgacctggtacattgaggctgtctttccaggtacactgctttgggcatctgtttggaaaatatgacttctagctgatgt

SEQ ID NO: 10171 - DNA, 201 bp, Homo sapiens
atataaatgatgtcacagtgtacaaggctgttgtgggatcaagcaatcaaatgagatcatgcttgtcttttccaaatggtgagggaatagatgcatgtttrtggttgttacggaatgatcctgtgctcctgaggcaacagaaaggccaggccatctctggtaatcctactcttgctgtcttccctttgcagagacacgccc

SEQ ID NO: 10172 - DNA, 201 bp, Homo sapiens
tggaaacataaagttttaaaagttttatgcttcactgtatatgcatttctgaaatgtttgtatataatgagtggttacaaatggaatcattttatatgttrcttggtagcccaccactcccctaaagggactctataggtaaatactacttctgcaccttatgattgatccattttgcaaattcaaatttctccaggtata

SEQ ID NO: 10173 - DNA, 201 bp, Homo sapiens
ggtagaattggctgctcatctcaaccccgctactgactatctctgtgatttacccttcctccagccttagccttgctacatataaaatcaagacaataatrtttcctatctcacagggttgtcctgaggattaaattaagtaattaatataaaatgtgccttgtacatattgggccctaaataaacagtagctactattta

SEQ ID NO: 10174 - DNA, 201 bp, Homo sapiens; identical to SEQ ID NO: 1763

SEQ ID NO: 10175 - DNA, 201 bp, Homo sapiens
ggtggctgggatacacagaatgtagtatcccttgttcacgagaagaccttcttgccctagcatggcaaacagtcctccaaggaggcacctgtgacacccarcggagtaggggggcggtgtgttcaggtgcaggtggaacaaggccagaagtgtgcatatgtgctgaccatgggagcttgtttgtcggtttcacagttgatg

SEQ ID NO: 10176 - DNA, 201 bp, Homo sapiens
ttgaacccaggaggcagaggttgcagtgagctaagatcgcatcattgcactcccgcctgggcaataagagtgaaactccatctcaaaaaaaaaaaaagatrcaaaaatagaaaaaggggcttggtaagggtagtagggttttgggcaatttttttttttttttttttttattgtatggttctaaaggaatggttgattacc

SEQ ID NO: 10177 - DNA, 201 bp, Homo sapiens
ggacagaattgctcccagtattgatcattgtgttctgagatgggggagcaaattgtgcaggaggccaggtcagtgccaaggtgggtgggaggaattggagsaggaagcttgcctaagtgtgcccagcaaagccacggtagaactttctactgtggctctatgctacttcttagcaaccttctccatgtgcttcctggagag

SEQ ID NO: 10178 - DNA, 201 bp, Homo sapiens
ttatattagtagggatgggtaagaggtgttttggtctggttggttggttagttgctatgactcagaattgctaagaaaacagaaaagtaagataagatcaytgttttaacctcttttcctccacaaaatcaataaataacatatccctaaattactcttagaatttctcttaaattgcagtgaaaaaccaaaatccttcat

SEQ ID NO: 10179 - DNA, 201 bp, Homo sapiens
agcacatctgtgcaggcctctgcctcggcccctctggatctgctgattgagcagcggattgatctgtccttctctttcgtgttgacccatgtgaggaaccractggcaagggaacaagaaatggaaataggcctcctttgcatcatgacctgtacatcctgcaattggaaaagattgtactttagttggtttaaccagcag

SEQ ID NO: 10180 - DNA, 201 bp, Homo sapiens
acctgaggggtagggaggtcctgcctacagtctccgtgcgctcagctgagctggtgtccctggcgcagagcgcggacgagttttgtttccttttctttttyttttttttctttcctttaagtctcggtctgtcgcccaggctggagtgcaatggaacgatctccgctcactgcaacctccgcctcccgggttcaagcgatt

SEQ ID NO: 10181 - DNA, 201 bp, Homo sapiens
ctccaattcggtagaaccagagcttcatcttctctgtcgaagctgtgacaggagttgcaaatgcctctcctttttgctgagtttgcagctgctgtttttcyggcagcacatctgtgcaggcctctgcctcggcccctctggatctgctgattgagcagcggattgatctgtccttctctttcgtgttgacccatgtgagga

SEQ ID NO: 10182 - DNA, 201 bp, Homo sapiens
ggtcggccagtacctacggagacaaatgccagcactgagtcttcactcggttcttaagaagctggtctgttctgacctgggaattggctatatgctccccsggactggagcggcacagtcccggactgtgaatccgggaactcgagttggaggtgtcccaaacggtccgtggtgctattgctcactagaggccttgggtct

SEQ ID NO: 10183 - DNA, 201 bp, Homo sapiens
ctcaccccacaggtcccagggcacctctctcgggcaagtcttggaaccctctgacactgatttgctctcttttctgagctgcttttagccacccatcctcrggacctgttttctctctgcctccacccctgcgggcagtcttaggtctcctgcccctcacgagcaccccagagaggccacgtgctcagtgatctcagtggg

SEQ ID NO: 10184 - DNA, 201 bp, Homo sapiens
gtggcccttcccctcccctctgtgctctatagctcagtcttcccaggcggtgtgaacacgcagtgacatttccaggaatacagggatttattaatgatttmttgtgaaatgtttggaaatacaaagtactctataaatatttcataatagcattggggctgagaactccacaaagtgccggaatacatttgcatgtaagac

SEQ ID NO: 10185 - DNA, 201 bp, Homo sapiens
tgtgggtggaagaaaagggaacctcttccaactgttttctttgcttcttccctctctttctctttttttttttttttggacagagtcttgctctgtcaccyaggctgaaatgcagtggcatgatcttggctcaccacagcctccgcctcctgggttcaagcaattctcctgtctcagcctccagagtagctgggattacag

SEQ ID NO: 10186 - DNA, 201 bp, Homo sapiens
gtgctagatgccccctctctggagaaaaaaaatccttgtggcctctgacccacctctggagagcctagttcccttctggaggcagaaggcaaagcttaggwcctagagagtgctggaccacgccactcacaggaaccagcaggctgtgaggttgaaagctaggcatatggagctttccaggctgggtgcagggcctcgtgg

SEQ ID NO: 10187 - DNA, 201 bp, Homo sapiens
atttggctagctggctttcattactgtttttcacacattaactttggcctcaacttgacaactcaaataatatttataaatacagccacacttaaaatggwcccattatgaaatacatatttaaatatctatacgatgtgttaaaaccaagaaaatatttgattcttctctgatatttaagaattgaaggtttgaggtagt

SEQ ID NO: 10188 - DNA, 201 bp, Homo sapiens
ctttgggggaggcctcagcttctctgtctataagattgcagcaggggtgtagtgggaatgagtcttcaacattccaagagattttatctactaatacgacmgtcaaatggagcatgactttgtggaagcctctcctcttccacccagaggggccaatttctctgtcccagtgagatgttgacacttgtatgatccctgctt

SEQ ID NO: 10189 - DNA, 201 bp, Homo sapiens
tataagattgcagcaggggtgtagtgggaatgagtcttcaacattccaagagattttatctactaatacgacagtcaaatggagcatgactttgtggaagyctctcctcttccacccagaggggccaatttctctgtcccagtgagatgttgacacttgtatgatccctgcttggagacttccctcttctggaacctgccc

SEQ ID NO: 10190 - DNA, 201 bp, Homo sapiens
agattctattacgtttttcaggatgtcccaggagtcacctgggaagctcagcagtcctttgtgactttcaagcatatggtagaagctgctgaacacagagmtccctctttggggataatttgcccaaatcatttaatcaggcttgagaaatgagttaccacaggtccaggagtgctgccacccttgaattctgacacccta

SEQ ID NO: 10191 - DNA, 201 bp, Homo sapiens
cactctctcagttcattgtcctaaagatgcttcatcagaaaggaataacttccaccccgttactctctgtccccttactctgctttatttttcttcgtcartcctaccaccaccacccactgtttgaacaacccactattatttgtctgtttcccatccctggtagaataggagccccatgaatgaaggaactttgcttct

SEQ ID NO: 10192 - DNA, 201 bp, Homo sapiens
ctgggatgactgtgaagtgggatcctttccagccagtaactggaaatgtgtatgagggcagaagtgagtgtactgcatttgaaacattgagaaatctagtrcatagtactgtctcttttatatcttttttttttttttttttgattttggtttgtttgttcactaacttggaaaactgatgtggaaatgtccctttggctt

SEQ ID NO: 10193 - DNA, 201 bp, Homo sapiens; identical to SEQ ID NO: 1724

SEQ ID NO: 10194 - DNA, 201 bp, Homo sapiens
tgtccctttggcttcagttacctgagcagaaggggccgggcattgccaaactctcctcttaggacagaattgctcccagtattgatcattgtgttctgagwtgggggagcaaattgtgcaggaggccaggtcagtgccaaggtgggtgggaggaattggaggaggaagcttgcctaagtgtgcccagcaaagccacggtag

SEQ ID NO: 10195 - DNA, 201 bp, Homo sapiens; identical to SEQ ID NO: 1729

SEQ ID NO: 10196 - DNA, 201 bp, Homo sapiens
acagtcctccaaggaggcacctgtgacacccaacggagtaggggggcggtgtgttcaggtgcaggtggaacaaggccagaagtgtgcatatgtgctgaccrtgggagcttgtttgtcggtttcacagttgatgccctgagcctgccatagcagacttgtttctccatgggatgctgttttctttccagagacacagcgcta

SEQ ID NO: 10197 - DNA, 201 bp, Homo sapiens
ttccgtttgtgttcttttatgcccttttgccagagtaggtggtgcaatttggctagctggctttcattactgtttttcacacattaactttggcctcaacytgacaactcaaataatatttataaatacagccacacttaaaatggtcccattatgaaatacatatttaaatatctatacgatgtgttaaaaccaagaaaa

SEQ ID NO: 10198 - DNA, 201 bp, Homo sapiens
aatctgatctttgggaatacagctacattttataggcttcttagataatgttactctaagtactttaaatatgtggggcttctctgggcttttttttttttgagacggagtttcactcttactgcccaggctggagagcaatggcgcgaccttggctcactgcaacctccgcctcccaggttcaagcgattctcctgcctc

SEQ ID NO: 10199 - DNA, 201 bp, Homo sapiens
taatgtttcagcactgtggatgcaaagtgagcaggataaacaggctcttctttcaaagcttgtggtccactggaccacgtatgaagtagaatagtttaggyccagaaaggcaattaagtaaaatatgaccaagaagaggctctctagtgggtttggtataaagaaaagataagaatgatttagaattggcctatcaatgag

SEQ ID NO: 10200 - DNA, 201 bp, Homo sapiens
ttacagacatgacccactgcacccggcctgttgtcagtattcttaaacatagacactaactgtaggctgacagcctagcagcaaggaccagttaaagaaaygagtagaactgaagtgtgcttgagtatctctggcagtcagcaaaaacttaatgggaatcatggtaggccaaatgttctgcagtatttcaaaagctgcatg

SEQ ID NO: 10201 - DNA, 201 bp, Homo sapiens
aaccttctctgcatccgtttataattggaaattgacctgcaccagggaaagagagtagcccaggtgtctggggcttgttcccattagatcttccccaaggrgtttttctccttggtggctggcctgtggggcccctctccaggaggcattggtgaagaaactaggggagctggttgccacagacagtgatgtactaatctt

SEQ ID NO: 10202 - DNA, 201 bp, Homo sapiens
gcaggcatttcttggggatggggaggactggcacagggctgctgtgatggggtatcttttcagggaggagccaaagcgctcattgtctgtgcttctcctcctttttctgcggtccctggctccccacctgactccaggtgaacaagaccttccaggaactggctgtgttccatgatctggaaggcatgtgggaggaactca

SEQ ID NO: 10203 - DNA, 201 bp, Homo sapiens
tcattcctcttcttgtgagcgctggcctgctagtggtcatcctgaaggtaaggcagcctcactcgctcttccctgccaggaaactccgaaatagctcaacrcgggctaagggaggagaagaagaaaaaaaatccaagcctctggtagagaaggggtcatacctgtcatttcctgcaatttcatccatttatagttggggaa

SEQ ID NO: 10204 - DNA, 201 bp, Homo sapiens
agcaggcatttcttggggatggggaggactggcacagggctgctgtgatggggtatcttttcagggaggagccaaagcgctcattgtctgtgcttctcctcctttttctgcggtccctggctccccacctgactccaggtgaacaagaccttccaggaactggctgtgttccatgatctggaaggcatgtgggaggaactc

SEQ ID NO: 10205 - DNA, 201 bp, Homo sapiens
cgatctcctgacctcgtgatccgcctgtctcggcctcccaaagtgctgggattacaggcgtgaaccactgcgccctgttgagaatttttttttttttttttgggagacggagtttcgctcttgttgcccgggctagagtgcagtgacacaatctcggctcactgcaacctctgcctcctgggttcaagcgattctcctgcc

SEQ ID NO: 10206 - DNA, 201 bp, Homo sapiens
ttgatggtgctttttttttttttttttgagacagagtctcgctctgtcgccatgctggagtgtagtggcacaatcttggctcactgcacctccgcctgccrggttcagcgattctcctgcctcagcctcccaagtagctgggactacaggtgcctgccaccatgcccagctaatttttgtatttttagtagagacggggtt

SEQ ID NO: 10207 - DNA, 201 bp, Homo sapiens
gctccgcctcccgggttcacgccattctcctgcctcagcctcctgagtagctggaactgcaggtgcccgccaccatgcccagctaatttttttttttttttgtattttgagtagagacggggtttcactgtgttagccaggatggtctcgatctcctgacctcgtgatccgcctgtctcggcctcccaaagtgctgggatt

SEQ ID NO: 10208 - DNA, 201 bp, Homo sapiens
ctttgtggttttgagttggggattggaggagggagggagggaaggaagctgtgttggttttcacacagggattgatggaatctggctcttatggacacagractgtgtggtccggatatggcatgtggcttatcatagagggcagatttgcagccaggtagaaatagtagctttggtttgtgctactgcccaggcatgagt

SEQ ID NO: 10209 - DNA, 201 bp, Homo sapiens
aggatgagagcagttcctgataggctcaaccacaatgagatgtagctgttcagagaaagcattcttttatctataaactggaagataatcccggtgaaacraagcccagccccaggggcttcactaactccaggctgtgcttctcaaactttagtgagcataggaatcacctgggcatcttgtgaagctgtagatttgaat

SEQ ID NO: 10210 - DNA, 201 bp, Homo sapiens
gagttggggattggaggagggagggagggaaggaagctgtgttggttttcacacagggattgatggaatctggctcttatggacacaggactgtgtggtcyggatatggcatgtggcttatcatagagggcagatttgcagccaggtagaaatagtagctttggtttgtgctactgcccaggcatgagttctgatccctag

SEQ ID NO: 10211 - DNA, 201 bp, Homo sapiens
agagacatgacgtgacttttcaaaggctgtaagctgacgagggacatagctagggttcagacttgagtttttctttttctttttctttttcttttttttttaagactgagtcttgcttttgtcgcccaggctggattgcagtggtgcttggctcactgcaacctctgcctcccgggttcaagcaattctcctgcctcagcc

SEQ ID NO: 10212 - DNA, 201 bp, Homo sapiens
aagggttttggggccacttgttagctcacatagtgagaaccagccctgcccattaggtaggggaagaagttagcagtccatgatagctgttgcctgcagcrtatggatgttcattgcacagttcctgtctcctgagatcctggagtgtatacgcttggcctcagagcccagcacagagcctggcccttgggacatgcttag

SEQ ID NO: 10213 - DNA, 201 bp, Homo sapiens
cagagacatgacgtgacttttcaaaggctgtaagctgacgagggacatagctagggttcagacttgagtttttctttttctttttctttttcttttttttttaagactgagtcttgcttttgtcgcccaggctggattgcagtggtgcttggctcactgcaacctctgcctcccgggttcaagcaattctcctgcctcagc

SEQ ID NO: 10214 - DNA, 201 bp, Homo sapiens
ggttttggggccacttgttagctcacatagtgagaaccagccctgcccattaggtaggggaagaagttagcagtccatgatagctgttgcctgcagcgtayggatgttcattgcacagttcctgtctcctgagatcctggagtgtatacgcttggcctcagagcccagcacagagcctggcccttgggacatgcttagtaa

SEQ ID NO: 10215 - DNA, 201 bp, Homo sapiens
tcagagacatgacgtgacttttcaaaggctgtaagctgacgagggacatagctagggttcagacttgagtttttctttttctttttctttttcttttttttttaagactgagtcttgcttttgtcgcccaggctggattgcagtggtgcttggctcactgcaacctctgcctcccgggttcaagcaattctcctgcctcag

SEQ ID NO: 10216 - DNA, 201 bp, Homo sapiens
ttggggccacttgttagctcacatagtgagaaccagccctgcccattaggtaggggaagaagttagcagtccatgatagctgttgcctgcagcgtatggaygttcattgcacagttcctgtctcctgagatcctggagtgtatacgcttggcctcagagcccagcacagagcctggcccttgggacatgcttagtaagtat

SEQ ID NO: 10217 - DNA, 201 bp, Homo sapiens
atgcctgggctctttctgatagttttccttttttaattgtcccctcctcattgttaccttggggatttcaagagattcatgtagcttctaaatcaacgaastgattcctggagagcagcttctgtatgagaaaaatctagctaattatttatttcagtgtctctggaatgcaagctctgtcctgagccacttagaaaacaa

SEQ ID NO: 10218 - DNA, 201 bp, Homo sapiens
ctcagagacatgacgtgacttttcaaaggctgtaagctgacgagggacatagctagggttcagacttgagtttttctttttctttttctttttcttttttttttaagactgagtcttgcttttgtcgcccaggctggattgcagtggtgcttggctcactgcaacctctgcctcccgggttcaagcaattctcctgcctca

SEQ ID NO: 10219 - DNA, 201 bp, Homo sapiens
gtttcccctcctgctttatctttcagttaatgaccagccacggcgtccctgctgtgagctctggccgctgccttccagggctcccgagccacacgctgggsgtgctggctgagggaacatggcttgttggcctcagctgaggttgctgctgtggaagaacctcactttcagaagaagacaaacagtaagcttgggtttttc

SEQ ID NO: 10220 - DNA, 201 bp, Homo sapiens
ttgttagctcacatagtgagaaccagccctgcccattaggtaggggaagaagttagcagtccatgatagctgttgcctgcagcgtatggatgttcattgcrcagttcctgtctcctgagatcctggagtgtatacgcttggcctcagagcccagcacagagcctggcccttgggacatgcttagtaagtatttactgaatg

SEQ ID NO: 10221 - DNA, 201 bp, Homo sapiens
actcagagacatgacgtgacttttcaaaggctgtaagctgacgagggacatagctagggttcagacttgagtttttctttttctttttctttttcttttttttttaagactgagtcttgcttttgtcgcccaggctggattgcagtggtgcttggctcactgcaacctctgcctcccgggttcaagcaattctcctgcctc

SEQ ID NO: 10222 - DNA, 201 bp, Homo sapiens
aatgagtgggaaatgtcttaaggcccattagtttgcaggtcttgaggaggctcccttgcactaggaagaatagaaagcatacataaagcctgtgtgctgcygccaggaagactagaaacgctatgttcagcctggagctgaatggtataccccagagcaaccctgttgaaaggcagtgcttgccttttcattctgtgtcct

SEQ ID NO: 10223 - DNA, 201 bp, Homo sapiens
ttcaaagggctataagggactttggagagaatttcattcagttttcctcaaactagaataatgcttgcactgtctgtaaaagaacaaaagtgtcaaagcayccttttgttcactaaatttccttttttattatagtgttacttaaatattaggaagtaaaagtaggtataaacttcttataggctgttattatacaactat

SEQ ID NO: 10224 - DNA, 201 bp, Homo sapiens
gctattatttaggagaatttaccttggttctgattaacttacccatacttgcaaatcatttgcagctttttagttaactttgtgagttctcttagatttaygaccatgccagaaacagaaaggatattttcatctcttcctttctgatgtttattcttcttgtttcctttttttatcccccattatattctcaagaatctc

SEQ ID NO: 10225 - DNA, 201 bp, Homo sapiens
tgcctaatcgcttttcagtggtgtcattattttgcctattctccatctgagaatattgaagtttctgactccttccttgcctttctccctgcctcccgtgkttatccccaggtcttggtgttccagtcctctatgtccgtccttactcttattcctttgctacagtgtgatccagggctcctgccccttcttatcctggta

SEQ ID NO: 10226 - DNA, 201 bp, Homo sapiens
gagggtttatgtttaggaaaagtgctaagcttagagaaggaggagaaatctgattttattaatgagtgtagccataatggcatatcctggcagaagtcaastttggtttctagagggaggctattatgaaaagaaatacctggaacattcccctgggtttggaaggtgagttctaggttcaatgatgggaagaattttaga

SEQ ID NO: 10227 - DNA, 201 bp, Homo sapiens
gatgggaagaattttagaggtccaagataaaagggcaaagattaaattttgtctctcatgagttctctggctcaggtggtgtgaactttgcagacagtctytttaattcactcatacatgctagtctcccagctcagcaagggctttgagagagcaggtgtctgtatgctctggtaagtgaaggcaaagtgcataaggagg

SEQ ID NO: 10228 - DNA, 201 bp, Homo sapiens
  misc_feature (1)...(201): n = A,T,C or G, or insertion/deletion polymorphism (see Tables 1-2)
gaggattcttcaaatgcacaggaccgtgatgtgagttaggacggagtaaggacgatgggatgtggctcaggacaatcctgaggaagctgcagctgcggcangcagggccacactgtcatgttcatggaccctagactggctttgtagcctccatgggccccttccatacacaaatattaaaaattatatttcatgactgca

SEQ ID NO: 10229 - DNA, 201 bp, Homo sapiens
cgattcggaaactgggcctcgtgaagtatggagaaaaatatgctggtaactatagtggaggcaacaaacgcaagctctctacagccatggctttgatcggygggcctcctgtggtgtttctggtgagtataactgtggatggaaaactgttgttctggcctgagtggaaaacatgactgttcaaaagtcctatatgtccag

SEQ ID NO: 10230 - DNA, 201 bp, Homo sapiens
aggcaattaacgtgggctaaattggacttttccaaagatgctgtctttgggaaacatcacacatgctttggatcagaaaacctaggcttctaatttgttgrtaaggcatgaactcaggagactgttttcagtcctagtgaatggtgataattgtaattataacagtagacaacatctcttttacacattttaaatcatgaa

SEQ ID NO: 10231 - DNA, 201 bp, Homo sapiens
gtgctttaaggagacaattagagatcaatctggaaaacttcatttgaatttttaatacataagaaaacaataagaaatagttaaaaatatatatttatatwatatatatgtgtgtgtgtgtgtgtgtgtgtatatatatatatatattttatttatttatttttttttgagatggagtctcgctctgttgcccaggctgga

SEQ ID NO: 10232 - DNA, 201 bp, Homo sapiens
tcctttctgatgtttattcttcttgtttcctttttttatcccccattatattctcaagaatctctcaatactaagaaatagcgacttcatttttcagcgcrgagtgcattattttggctaccatgattcagaagcctcttgcctaaggcccaattttattctgctagttttctctgttctttgtacatggcccttgcgctg

SEQ ID NO: 10233 - DNA, 201 bp, Homo sapiens
atgcatattgaataacatgatgataagtactagactctgtgctaagccttctatgtgaaatacatttaattctcataataactctagagcagtggttctcraccggggccggttatccccctaccccaccccaccctcacccttccaccagggacataacatctggagatatttttggttgtcacaatcctgggaatgtat

SEQ ID NO: 10234 - DNA, 201 bp, Homo sapiens
tccttggggcctccagctttctgcgggtgatgagccggtcaatgcccctcttcatgacgctggcctggatttactcagtggctgtgatcatcaagggcatygtgtatgagaaggaggcacggctgaaagagaccatgcggatcatgggcctggacaacagcatcctctggtttagctggttcattagtagcctcattcctc

SEQ ID NO: 10235 - DNA, 201 bp, Homo sapiens
agttctgttaaagcttagagagtggtgggagagactggagaagttgattaattagtaaatgaagttgtctgtggatttcccagatcccagtggcattggayatccatattatttttaaatttacagtgttctatcttatttcccactcagtgtcagctgctgctggaagtggcctggcctctatttatcttcctgatcctg

SEQ ID NO: 10236 - DNA, 201 bp, Homo sapiens
attggacttttccaaagatgctgtctttgggaaacatcacacatgctttggatcagaaaacctaggcttctaatttgttgataaggcatgaactcaggagrctgttttcagtcctagtgaatggtgataattgtaattataacagtagacaacatctcttttacacattttaaatcatgaaaatagaataaccttactgat

SEQ ID NO: 10237 - DNA, 201 bp, Homo sapiens
cagatgtctctgctatctccaacctcatcaggaagcatgtgtctgaagcccggctggtggaagacatagggcatgagctgacctatgtgctgccatatgargctgctaaggagggagcctttgtggaactctttcatgagattgatgaccggctctcagacctgggcatttctagttatggcatctcagagacgaccctgg

SEQ ID NO: 10238 - DNA, 201 bp, Homo sapiens
acacatgctttggatcagaaaacctaggcttctaatttgttgataaggcatgaactcaggagactgttttcagtcctagtgaatggtgataattgtaattrtaacagtagacaacatctcttttacacattttaaatcatgaaaatagaataaccttactgataattttagaaagtggtgattaaaagcacatttaagata

SEQ ID NO: 10239 - DNA, 201 bp, Homo sapiens
cataacaaccttgaatagaactcagatcatctgtcaatcatgtattttgataacagcctttacagtgagcatagaaaatacagtagtggctaacaacacargctccagatgtcaggttatctgggtatgaattctggtgtcagcattcactaagcatatgaccttggacaagtgatttaagtttcttttaaacagagaata

SEQ ID NO: 10240 - DNA, 201 bp, Homo sapiens
agatcatctgtcaatcatgtattttgataacagcctttacagtgagcatagaaaatacagtagtggctaacaacacaggctccagatgtcaggttatctgrgtatgaattctggtgtcagcattcactaagcatatgaccttggacaagtgatttaagtttcttttaaacagagaatagtaatacctacctcatattatta

SEQ ID NO: 10241 - DNA, 201 bp, Homo sapiens
agaaaccatactgggcagggccgacttcaccctaaaggctgcgtctcttcactctgcttttgtttgttccaaataaagtggcttcagaattgctaaccctrgcctctgtgaacttgtgaggtacaattttgtgtctgttatgttaacaaaaatacatacataccttcctggtgatggtataaattgctattctctattgga

SEQ ID NO: 10242 - DNA, 201 bp, Homo sapiens
accgaggttgtgatcttgggcagattgttgagttttaacctagattcctctgactccagatcataaattttcagaaaagttctgaaattcttgtatatacwgatggtaaatgagacttttccttacatctatgcacttctttgtttgtttgttttgagatggtcttgctctgttgcccagactggagtgcagtagtgcaat

SEQ ID NO: 10243 - DNA, 201 bp, Homo sapiens
ttgtcgggtattttgattaatagtttatgtggcttcattaattcagagttactctccaatatgtttatctgccctttcttgtctgataatggtgaaaactygtgtgatgcattgtatatttgatttaggggtgaactggatgtctttgttttcacttttagtgcaattacgttgtccctgccacactggtcattatcatct

SEQ ID NO: 10244 - DNA, 201 bp, Homo sapiens
ggttgtgatcttgggcagattgttgagttttaacctagattcctctgactccagatcataaattttcagaaaagttctgaaattcttgtatatactgatgrtaaatgagacttttccttacatctatgcacttctttgtttgtttgttttgagatggtcttgctctgttgcccagactggagtgcagtagtgcaatctccg

SEQ ID NO: 10245 - DNA, 201 bp, Homo sapiens
aacaggaagatagggagattaactgtgtaaatgttcaataggccagagtccctgcagagggtggccacagtgatcagatcttatcacatccttgctttggrtgttgcctctctggttggagtatggatagaaaagaaagaaagaccctatattgaaatgcaaagtgcagcaagtcctgactttggattaacttctcagccc

SEQ ID NO: 10246 - DNA, 201 bp, Homo sapiens
gtccaaaattcatttgggtcaatgttatgtcttagtgttatcttccatttccttctgagcttcaaagccaggctgactgtgcccttccacgccctggccaktgtgaccaggacatcctttccctctggggctgcactggctctttgggggaattgttaccattcagggtcttcaaccctcattctagggacttccagtaac

SEQ ID NO: 10247 - DNA, 201 bp, Homo sapiens
ccatagcaacagaagtctggctcatcaacaagtccatggagctgctggatgagaggaagttctgggctggtattgtgttcactggaattactccaggcagyattgagctgccccatcatgtcaagtacaagatccgaatggacattgacaatgtggagaggacaaataaaatcaaggatgggtaagtggaatcccatcaca

SEQ ID NO: 10248 - DNA, 201 bp, Homo sapiens
gctggttgtggcatgggttttgtgacacaaccatttgtctgtgtctctgatagcattgagaaaagtgaaagggcagttttgaaggtaaggaaaatagtgtyatttgcttggatccactggctcatgccactgtctgggttggttagaagcactggaaaagtcaaaccataactttgagaattaggtgatcagggaatcaga

SEQ ID NO: 10249 - DNA, 201 bp, Homo sapiens
agctggttgtggcatgggttttgtgacacaaccatttgtctgtgtctctgatagcattgagaaaagtgaaagggcagttttgaaggtaaggaaaatagtgktatttgcttggatccactggctcatgccactgtctgggttggttagaagcactggaaaagtcaaaccataactttgagaattaggtgatcagggaatcag

SEQ ID NO: 10250 - DNA, 201 bp, Homo sapiens
gtgagagcccaggagatgaggaacagccttccagatttttcttgggtagcgtgtgtaggaggccagtgtcaccagtagcatatgtggaacagaagtcttgrcccttgctatctctgcctagtcctaatggctggcttttcccaggaaggcttctgcttccatggactgttagattaaccctttatttaggtaaatgaggga

SEQ ID NO: 10251 - DNA, 201 bp, Homo sapiens
agtggacactgaataccagggatgaggagctgagggccaagccaggagggtgggatttgagcttagtacataagaagagtgagagcccaggagatgaggarcagccttccagatttttcttgggtagcgtgtgtaggaggccagtgtcaccagtagcatatgtggaacagaagtcttgacccttgctatctctgcctagtc

SEQ ID NO: 10252 - DNA, 201 bp, Homo sapiens
gggccatggtttttgatccctccattctgaccggatctctgcattgtgtctactaggggagaatcgctttgtgtcaccattatcttgggacttggtgggaygaaacctcttcgccatggccgtggaaggggtggtgttcttcctcattactgttctgatccagtacagattcttcatcaggcccaggtgagctttttctta

SEQ ID NO: 10253 - DNA, 201 bp, Homo sapiens
ctggggtatccagtagggcccagagctgacctgcctccctgtccccaggctgactgtcgaagaacacatctggttctatgcccgcttgaaagggctctctragaagcacgtgaaggcggagatggagcagatggccctggatgttggtttgccatcaagcaagctgaaaagcaaaacaagccagctgtcaggtgcggccca

SEQ ID NO: 10254 - DNA, 201 bp, Homo sapiens
agggtggccacagtgatcagatcttatcacatccttgctttgggtgttgcctctctggttggagtatggatagaaaagaaagaaagaccctatattgaaaygcaaagtgcagcaagtcctgactttggattaacttctcagcccatttgcatgaaaataaaaagatgaataaaacaaggttcccactttggagggaggtgg

SEQ ID NO: 10255 - DNA, 201 bp, Homo sapiens
agaaagaaagaccctatattgaaatgcaaagtgcagcaagtcctgactttggattaacttctcagcccatttgcatgaaaataaaaagatgaataaaacarggttcccactttggagggaggtggtagctgtgagatggaaggagtgttcctgctgggcaacagcagagtaagtgctggggtagattcactcccacagtgc

SEQ ID NO: 10256 - DNA, 201 bp, Homo sapiens
tcagcccatttgcatgaaaataaaaagatgaataaaacaaggttcccactttggagggaggtggtagctgtgagatggaaggagtgttcctgctgggcaayagcagagtaagtgctggggtagattcactcccacagtgcctggaaaatcctcataggctcatttgttgagtctttgtcctacaccaggcactctgcaaaa

SEQ ID NO: 10257 - DNA, 201 bp, Homo sapiens
tgaataaaacaaggttcccactttggagggaggtggtagctgtgagatggaaggagtgttcctgctgggcaacagcagagtaagtgctggggtagattcaytcccacagtgcctggaaaatcctcataggctcatttgttgagtctttgtcctacaccaggcactctgcaaaaacgctttgcctgcaaggtctcatgcgat

SEQ ID NO: 10258 - DNA, 201 bp, Homo sapiens
cccaagtcccctctatgtctgagagctgaggctggctgtcaaagaggaactaaggatgccagggactttctgcttaggacccctctcatcacttctccaaygctggtatcatgaaccccattctacagatgatgtccactagattaagaatggcatgtgaggccaagtttccacctgagagtcagttttattcagaagaga

SEQ ID NO: 10259 - DNA, 201 bp, Homo sapiens
  misc_feature (1)...(201): n = A,T,C or G, or insertion/deletion polymorphism (see Tables 1-2)
ctagagggtaggggctggcacaaagatgcatgctggaagggtccttgcccataagaagctgacagccaaggctaggggagttctgtcttctctgcatcagntcacctctctcacctctgtcactgccccatcagactacaatgtctgcaggtctttctcccctgagtgtgagctccctgagcaaagcaggatgctgcccct

SEQ ID NO: 10260 - DNA, 201 bp, Homo sapiens
aagctgggcgtgtccattcagaacctggtaaaagtctaccgagatgggatgaaggtggctgtcgatggcctggcactgaatttttatgagggccagatcayctccttcctgggccacaatggagcggggaagacgaccaccatgtaagaagagggtgtggttcccgcagaatcagccacaggagggttctgcagtagagtt

SEQ ID NO: 10261 - DNA, 201 bp, Homo sapiens
  misc_feature (1)...(201): n = A,T,C or G, or insertion/deletion polymorphism (see Tables 1-2)
atgctggaagggtccttgcccataagaagctgacagccaaggctaggggagttctgtcttctctgcatcaggtcacctctctcacctctgtcactgccccntcagactacaatgtctgcaggtctttctcccctgagtgtgagctccctgagcaaagcaggatgctgccccttccctttgtattcctggctcctggcttca

SEQ ID NO: 10262 - DNA, 201 bp, Homo sapiens
ccatgggagtgggttagggccagcctgtggaggacctgggagccaggctgagttctatgcacttggcagtcacttctgtaaagcagcagaggcagttggcmtagctaaagcctttcgccttttcttgcaccctttacagtgtggctcgcctgttctcagatgctcggaggcttcttttatacagccagaaagacaccagca

SEQ ID NO: 10263 - DNA, 201 bp, Homo sapiens
aagatagggaacttcacatacagtaccttttctcccaaggcggaagagggctgttcaatttctacactagagttcggggagttttagaaatgagtcagttrtcgaggatgagagcagttcctgataggctcaaccacaatgagatgtagctgttcagagaaagcattcttttatctataaactggaagataatcccggtga

SEQ ID NO: 10264 - DNA, 201 bp, Homo sapiens
cagaaccgtcagctacactgtgtcccatcctgctgtgttgtggttgtgccttgtggatgcgttggtttatgaccaggtattgattaaggtggctactaccrggtgctttctgcatatctcgggtttgtggagcactcaggttctgcttctgcccctctgctgttaccaagagacctctcttcaaaatggggctcttgagtt

SEQ ID NO: 10265 - DNA, 201 bp, Homo sapiens
tgttcaagatccccagcacagcctatgtggtgctcaccagcgtgaacctcttcattggcattaatggcagcgtggccacctttgtgctggagctgttcacygacaatgtgagtcatgcagagagaacactcctgctgggatgagcatctctgggagccagaggacagtgtttaattgtgatcttattccacttgtcagtgg

SEQ ID NO: 10266 - DNA, 201 bp, Homo sapiens
ttttaaagaatactttcattgcaaattggaaacttcgtttaaaaaatgctcatactaaaattggcatttctaacccataggcccacttgtagttatttacygaagcaaaaggacagctttgctttgtgtgggtctggtagggttcattagaaaggaatgggggcggtgggagggttggtgttctgttctctctgcagactg

SEQ ID NO: 10267 - DNA, 201 bp, Homo sapiens
ggcttacacctgttatcccagcattttgggatgccgaggcgggcaaagcacaaggtcaggagtttgagaccagcctggccaacatagtgaaaccctgtctytgctaaaaacatagaaaaattagccgggcatggtggcgtgcgcctgtaatcccagctactcgggaggctgaggtgagagaattgcttgaacccgggaggc

SEQ ID NO: 10268 - DNA, 201 bp, Homo sapiens
tggcagctctgcttcctgacctttcaccctcaggaagcgaggctgttcacacggcacacacatgccagacagggtcctctgaagccacggctgccagtgcrtgtgtcccagggaaagctttttcctttagttctcacacaacagagcttcttggaagccctccccggcaaaggtgctggtggctctgccttgctccgtccc

SEQ ID NO: 10269 - DNA, 201 bp, Homo sapiens
gatatggataagtgaaagttaagcacttctttctaaaaagagaatgcaattcattttcccctaatcatttcaattagtctgatgggcatttgaacttgttrtctttaaaaagtgaaatctttacctctgatctggtaagtatccaggcaatttcttgtgtgccacccaggaggtatctggggagtgggcattttctgactg

SEQ ID NO: 10270 - DNA, 201 bp, Homo sapiens
  misc_feature (1)...(201): n = A,T,C or G, or insertion/deletion polymorphism (see Tables 1-2)
tgaacagtcacaactgaggcaggtttctgttgtttacaggacagttctgcagatcgatttctcaacagcttgggaagatttatgacaggactggacaccanaaataatgtcaaggtaaaccgctgtctttgttctagtagctttttgatgaacaataatccttatgtttcctggagtactttcaactcatggtaaagttgg

SEQ ID NO: 10271 - DNA, 201 bp, Homo sapiens
gaacagaagatgattgtcttttccaatgggacatgaaccttagctctagattctaagctctttaagggtaagggcaagcattgtgttttattaaattgttwacctttagtcttctcagtgaatcctggttgaattgaattgaatggaatttttccgagagccagactgcatcttgaactgggctggggataaatggcattg

SEQ ID NO: 10272 - DNA, 201 bp, Homo sapiens
tgatctgcccacctcggcctcccaaagtgttgggattaaaggcatgagtcaccgtgcctggtcccatgttataattttaaagtaaggtatatttctctacrgggatctttgcaaccctaagtaactggcctaaaaagttagagaagctgacttgtgcagacatttgcagcctgttggtcttttttgtgctgtgaatcatag

SEQ ID NO: 10273 - DNA, 201 bp, Homo sapiens
acttgttgtctttaaaaagtgaaatctttacctctgatctggtaagtatccaggcaatttcttgtgtgccacccaggaggtatctggggagtgggcatttkctgactgaggcattggctgccatagcatcagagcagccttccaggcagtggcctggcaaggggacagaggctggtgggagcagctggctgagtgcagcca

SEQ ID NO: 10274 - DNA, 201 bp, Homo sapiens
gaggcagtacggtgtagtgtagtgattcagagaatttgctttgccaccagacataccaggtaaccttgactaagttacttaacctatctaaacctcagttycctcatctgtgaaatggagacagtaatcatagctatttccaaactgttgtgagaattcaatgagttaaaggtataaggtcctcaccacagcgcctgccca

SEQ ID NO: 10275 - DNA, 201 bp, Homo sapiens
caatgggcggaggtgtagttattgcagacatctgaaatatgtaatgtttcttccagattctggaaattctcttattctctgtggttggtggtggtggtggsatgtgtgtgtgtgtgtgtgtgtgtgtgtgtgtgtgtagggatcaggatgcgggaggagctgggttctgcttgtattggttctctgttttgcattgaatag

SEQ ID NO: 10276 - DNA, 201 bp, Homo sapiens
tgatctctgttcggctgagctacccaccctatgaacaacatgaatgtaagtaactgtggatgttgcctgagactcaccaatggcagggaaaatccaggcarttaacgtgggctaaattggacttttccaaagatgctgtctttgggaaacatcacacatgctttggatcagaaaacctaggcttctaatttgttgataagg

SEQ ID NO: 10277 - DNA, 201 bp, Homo sapiens
ctcccaaagtgctgggattataggcttgagccaccacgcctggccgatggtgctttttatcatttgaaggactcagttgtataacccactgaaaattagtmtgtaaggaagttcagggaatagtataagtcactccaggcttgaggcaaaatttacaaatgctgctgactttgtatgtaaggggaggcattttcttagaaa

SEQ ID NO: 10278 - DNA, 201 bp, Homo sapiens
ttctctcttttctctgtgctctcagagtccttagtccatgcctccagtacaacgtacatccacttacatggtaatttcctgtttacatacttttcctactyggagtggagtctgtttcttaataattttgcctctcccatgccctagcacagtgcatccagcgtatagccccttattcagttggtagatatttggccactg

SEQ ID NO: 10279 - DNA, 201 bp, Homo sapiens
cacatgtgattcttcacttgactggcttcatagaaccccaaagccaccccaccaccacataaattgtgtctctaggttctgtgttgctcacactcaaaatktctgggccttctcatttggtgcatgtgaatggtgcatatgagtgaagtctaggatggggccttagcattaaagccctggggtagtgtgactgagattgtt

SEQ ID NO: 10280 - DNA, 201 bp, Homo sapiens
agaatttaaaattagtttttattgttaatgagtgtattatgaatatttcccagtgggttacatttcctaagatgtggaattttacattgctacataaaatycccctatgtacatgtacctataatttatttaataaattccttataaatgttggacacattagtttccatttttcactatgtaaatatgtccctgtataca

SEQ ID NO: 10281 - DNA, 201 bp, Homo sapiens
gcttgctcctagtaccaagctcctgacgcatatagcagtggcagtaataaccagcccatagtaaggtttgtcacagggactggttgtaagaactgatttgrttggtatagctgtgagggcctggcacggtgtccacgtgtgcctcaatcctaattctgaaaaaggctgaccctgggggtgctaattagatacacagagagg

SEQ ID NO: 10282 - DNA, 201 bp, Homo sapiens
ggagtgcagtggcgcagtcttggctcactgcagcctctgcctcctgggttcaagcgattctcctgcctcagcctcctgagtagctgggactataggcatgstccaccatgcccaactaatttttgtatttttagtagagatgagatttcaccatgttggccaggatggtctcgatctcctaacctcgtgatctgcccgcct

SEQ ID NO: 10283 - DNA, 201 bp, Homo sapiens
ttattacaaatttctactctgtggaatttaatttttaaaatacctgcaatacatatatatgttgaatagatgaaaaattatgtagatgataatgaatgatrcggttctaaaaagacaggttaaaaagtaagttcacttttattttgagcttcagaatcattcagaagccagtcgccacaaacgcagaccaaggctcttggc

SEQ ID NO: 10284 - DNA, 201 bp, Homo sapiens
ggaattttacattgctacataaaatccccctatgtacatgtacctataatttatttaataaattccttataaatgttggacacattagtttccatttttcrctatgtaaatatgtccctgtatacatcttttattatttcctcaggaacaattcctacaaagtaaattgccctctctaaagagcatacaaattgactgagc

SEQ ID NO: 10285 - DNA, 201 bp, Homo sapiens
taacctcgtgatctgcccgcctaggccttccaaagtgctgggattacaggcatgagccaccatgcctggccttctttgagaagctggagacatgagttaaktggtgaagaagccaaatctgtatctaaaaaccctacagtagtgtgcagagctctgaggagagaaggtcccttagattttgagtgtattattatgtcagtg

SEQ ID NO: 10286 - DNA, 201 bp, Homo sapiens
tctaccactcactaagtagcccattctgggtgttgacagctctaattgttagaaaatattcaccaccctgttatgctttctagagaacaagtctaattctrttttccttgaaatagtcgaagacagctctcatgtttttctttccctgttttcccaaagtccatgattttttaggcaaaatggcctcctttcctcttatgg

SEQ ID NO: 10287 - DNA, 201 bp, Homo sapiens
acttggatgggggatcacctgggactacccaaggatgtgggctgtctgctagactatagccccttgagggcaaggtgggcgccttgctcatggttccatcmtaagccccagcacagtagtgggtgcatggtgagccattagtgaatctttgtggaatgaaggtgggagaaaataaaatacctgtacttcacagggtattgt

SEQ ID NO: 10288 - DNA, 201 bp, Homo sapiens
ggctggtggaagacatagggcatgagctgacctatgtgctgccatatgaagctgctaaggagggagcctttgtggaactctttcatgagattgatgaccgrctctcagacctgggcatttctagttatggcatctcagagacgaccctggaagaagtaagttaagtggctgactgtcggaatatatagcaaggccaaatgt

SEQ ID NO: 10289 - DNA, 201 bp, Homo sapiens; identical to SEQ ID NO: 1713

SEQ ID NO: 10290 - DNA, 201 bp, Homo sapiens; identical to SEQ ID NO: 1705

SEQ ID NO: 10291 - DNA, 201 bp, Homo sapiens
ttttaaaagttttatgcttcactgtatatgcatttctgaaatgtttgtatataatgagtggttacaaatggaatcattttatatgttacttggtagcccaycactcccctaaagggactctataggtaaatactacttctgcaccttatgattgatccattttgcaaattcaaatttctccaggtataatttacactagaa

SEQ ID NO: 10292 - DNA, 201 bp, Homo sapiens
tggcaatgccgaaaacacctaagataataggtgaccttcagtgttggcttcttgcagaatccagagagacagacttgctcagtgggatggatggcaaaggrtcctaccaggtgaaaggctggaaacttacacagcaacagtttgtggcccttttgtggaagagactgctaattgccagacggagtcggaaaggattttttg

SEQ ID NO: 10293 - DNA, 201 bp, Homo sapiens
ttgagaggagtcccagagaaagaagttggcaaggtactgtgggcacctgaaagccagcctgtctcctttggcatcctgacaatatataccttatggctttyccacacgcattgacttcaggctgtttttcctcatgaatgcagcagcacaaaatgctggttctttgtatctgctttcagggtggaaacctgtaacggtggt

SEQ ID NO: 10294 - DNA, 201 bp, Homo sapiens
atttgcaatatttttattacaaatttctactctgtggaatttaatttttaaaatacctgcaatacatatatatgttgaatagatgaaaaattatgtagatrataatgaatgatacggttctaaaaagacaggttaaaaagtaagttcacttttattttgagcttcagaatcattcagaagccagtcgccacaaacgcagac

SEQ ID NO: 10295 - DNA, 201 bp, Homo sapiens
attttcttccctcttccctttaatcaagaccgtatgtgccaaagtaaatggatgactgagcagttggtgatgtaggggtggggggcgatatagaaagtcartttttggccgggcgtggtggctcatgcctgtaatcccagcactttgggaggctgaggagcaggcagatcatgaggtcaggagatccagataatcctggcc

SEQ ID NO: 10296 - DNA, 201 bp, Homo sapiens
ctatctcattcctgtgtgtgtttagccaggcaactgttgatcatcaatattatgataacgtttctccactgtcccattgtgcccactttttttttttttttgagttacttactaaataaaaataaaacactatttctcaatagacttgaagcttcaagatttcctggtggacaatgaaaccttctctgggttcctgtatca

SEQ ID NO: 10297 - DNA, 201 bp, Homo sapiens
ttgtgacctgaactaggtagatggttgtgttaaaaatgcagtgggtatttcagtctgaagctcaggggcaatgatggaaaataagataaatgtgtgcaagytggctgggcgtggtggtgcacgcctataatcacagcactttgggaggccgagacgggtggatcacttgaggtcaggcgtttgcgaccagcctaacatggt

SEQ ID NO: 10298 - DNA, 201 bp, Homo sapiens
ggtgaaaccccgtctctactaaaaatacaaaaattagctgggcatggtggtgcgcacttgtagtcccagctacttgcgaggctgaggcaggagaattgctygaacccaggaggtggaggttacagtgagccaaggtctcgccactgcactccagcctggggacagagcaagaccccatttcaaggggggaaaaaaagtcta

SEQ ID NO: 10299 - DNA, 201 bp, Homo sapiens
atacacacatgaaggagccgaagttcagagaggccaagtaacttgcctaagaaagcacagctggcaaggggcagtaataggaccagaattccagtttctcrtgctctgttgttgttatatcctaaagagagcagctctgagtagccagaagcttccctaaagtcacaggacatggggcatgggctggctgggatgagaaag

SEQ ID NO: 10300 - DNA, 201 bp, Homo sapiens
ccagcctgggcgacagagccagactccatctaaataaataaatagataaataaataaaataaaataaaaacttgtagggaggtggcagtgtgctatggagrataggtgcaacctctgtgagaatgtagagaaaatagtataagtgagtggtgaggacccccaagagggggttttatagtaaaacaatggtcagaagtggca

SEQ ID NO: 10301 - DNA, 201 bp, Homo sapiens
agtgagccaaggtctcgccactgcactccagcctggggacagagcaagaccccatttcaaggggggaaaaaaagtctatttttaagttgttattgcttttytcaagtattcttccctccttcacacacagttttctagttaatccatttatgtaattctgtatgctcctacttgacctaatttcaacatctggaaaaatag

SEQ ID NO: 10302 - DNA, 201 bp, Homo sapiens; identical to SEQ ID NO: 1744

SEQ ID NO: 10303 - DNA, 201 bp, Homo sapiens
taatgtctcgttccacccctgattccagtgctgactgattctggagtggcagagagggttggaggctcaccgctctgctcacccgaccctctggccatctyctcttagaatgcaagggcagggattttgttacacagcgcctcttttgttataggctagctcctgccttcaaggagcactgagaaaaatattatccctttg

SEQ ID NO: 10304 - DNA, 201 bp, Homo sapiens
aatacaagtcctgtgtttttatcacagggaggctgatcaatataatgaaattaaaagggggctggtccatattgttctgtgtttttgtttgtttgttttgyttgtttctttttttgtttttgtggcctccttcctctcaatttatgaagagaagcagtaagatgttcctctcgggtcctctgagggacctggggagctcag

SEQ ID NO: 10305 - DNA, 201 bp, Homo sapiens
ggccctgcattcctcattgccgtgctggttggtcggggaggtgggctggactcgtagggatttgccccttggccttgtttctaacacttgccgtttcctgytgtccccctgccccctccactgcctgggtaaagattgtcttgccagctgtgtttgtctgcattgcccttgtgttcagcctgatcgtgccaccctttggca

SEQ ID NO: 10306 - DNA, 201 bp, Homo sapiens
gctttggaattaaaaaccctggccctcaaggaatttctattcttctgggagcaggatatttacatgggtgactgcagcttgatctgtgtggtactagtggraaacataggatgttgggcacaaaagagtcacaaaacgccgggcgcggtggctcatgcctctaatcctagcactttgggaggccaaggcgagtggatcacc

SEQ ID NO: 10307 - DNA, 201 bp, Homo sapiens
agaggaggcgcacagggaaacactcaccaatgggggttgcattgaactgaactcaaaatatgtgataaaactgattttcctgatgtgggcatcccgcagcyccctccctgcccatcctggagactgtggcaagtaggttttataatactacgttagagactgaatctttgtcctgaaaaatagtttgaaaggttcattttt

SEQ ID NO: 10308 - DNA, 201 bp, Homo sapiens
gggagcaggatatttacatgggtgactgcagcttgatctgtgtggtactagtggaaaacataggatgttgggcacaaaagagtcacaaaacgccgggcgcrgtggctcatgcctctaatcctagcactttgggaggccaaggcgagtggatcacctgaggtcaggagttcaagaccagcctggccaacatgatgaaacccc

SEQ ID NO: 10309 - DNA, 201 bp, Homo sapiens
caaaatttagccctcctttgaacaggaatttgactcagtgaaccttgtacacactcgcactgagtctgctgctgatgatactgtgcaccccactgtctggsttttaatgtcaggctgttcttttaggtatggcggcttttccctgggtgtcagtaatactcaagcacttcctccgagtcaagaagttaatgatgccatcaa

SEQ ID NO: 10310 - DNA, 201 bp, Homo sapiens
cagataaacctcatcttgggccagtgcttccatttactgtctccttttggcttgcttatccttccttctgccttcttgaattgatttgcctctttatctcycctttcagccttgaaagttcctcgaaggcagggactgtgtccccatcttttctataaatggcattgttgtacattggtaaagttgagtgaaaaaatcttt

SEQ ID NO: 10311 - DNA, 201 bp, Homo sapiens
ttcccccagctgggcagagtggaggcagaggaggagaggtgcagaggctggtggcgctgactcaaggtttgctgctgggctggggctgggtggctgcgggkgtgggagcagcttggtggcgggttggcctaatgcttgctggggtgcctggggctcggtttgggagctagcagggcagtgtcccagagagctgagatgatt

SEQ ID NO: 10312 - DNA, 201 bp, Homo sapiens
tcagccctaatcccatctcctagtgtttagtattcagctacccttcactgggcagtaattctgtgccaggcctgatctgggcattggtggtactaagaacrcatattccctatcctataggcatagtctggtagagacaacatgcaagtaaaacaatgttccttaaactgtggttccacacctccctcccccaacattaaa

SEQ ID NO: 10313 - DNA, 201 bp, Homo sapiens
attctggttttctactcaccagatagattctcttaaaaccagggaaagattcctggaggaaggatgtatctggaaagagatgttccttattataataaaaygaaattgtaatactcttggattttgtgcagcacgaattctttatagagagttggtcctcccagagaattaagaatactcagtttctggaccctgttccca

SEQ ID NO: 10314 - DNA, 201 bp, Homo sapiens
gtgtgtgtgtgtaacagcaccatcacactgtttgagttgaggagcacatgctgagtgtggctcaacatgttaccagaaagcaatattttcatgcctctccygatatggcgatgctcccctatctcattcctgtgtgtgtttagccaggcaactgttgatcatcaatattatgataacgtttctccactgtcccattgtgcc

SEQ ID NO: 10315 - DNA, 201 bp, Homo sapiens
aataaacatttatagcctcctgcctgcctgagaaaccagggtggacatggagagaaggcacttctgaaagttcaagcgcagtgcgctgtgtccttacactscactcctcagtgctttctgtgggttcatttctgtcttctctcctgtcacagtctgcatggaggaggaacccacccacttgaagctgggcgtgtccattca

SEQ ID NO: 10316 - DNA, 201 bp, Homo sapiens
tctctgagaagcacgtgaaggcggagatggagcagatggccctggatgttggtttgccatcaagcaagctgaaaagcaaaacaagccagctgtcaggtgcrgcccagagctaccttccctatccctctcccctcctcctccggctacacacatgcggaggaaaatcagcactgccccagggtcccaggctgggtgcggttg

SEQ ID NO: 10317 - DNA, 201 bp, Homo sapiens
tgctcatattatccccatgttgaaatagcaagatgggaagtgcaaagtggtgcttcggtactcttggagcagctttgactttggtgagaaacgccttttawaaacaatgtttcttcccatcttcccaccccatggggaggtgtggggttgggtgggtaggcaccaaagcaagatttagaagagttttctgtaggaatttat

SEQ ID NO: 10318 - DNA, 201 bp, Homo sapiens
tctcagctatctaactgtgtgtgtaatcaggccaggtcctccctgctgggcagaaaccatgggagttaagagattgccaacatttattagaggaagctgaygtgtaacttctctgaggcaaaatttagccctcctttgaacaggaatttgactcagtgaaccttgtacacactcgcactgagtctgctgctgatgatactg

SEQ ID NO: 10319 - DNA, 201 bp, Homo sapiens
gccccctctctggagaaaaaaaatccttgtggcctctgacccacctctggagagcctagttcccttctggaggcagaaggcaaagcttaggacctagagartgctggaccacgccactcacaggaaccagcaggctgtgaggttgaaagctaggcatatggagctttccaggctgggtgcagggcctcgtggcccttcccc

SEQ ID NO: 10320 - DNA, 201 bp, Homo sapiens
agcatctagagttaagggtaggtcaaccctgacttctgtacttctaaatttttgtcctcaggtcaatcctgaccgggttgttccccccgacctcgggcacygcctacatcctgggaaaagacattcgctctgagatgagcaccatccggcagaacctgggggtctgtccccagcataacgtgctgtttgacatgtgagtac

SEQ ID NO: 10321 - DNA, 201 bp, Homo sapiens
tcttaatcttttaacaggtatttgtgaactttgccaaggaccaaagtgatgatgaccacttaaaagacctctcattacacaaaaaccagacagtagtggamgttgcagttctcacatcttttctacaggatgagaaagtgaaagaaagctatgtatgaagaatcctgttcatacggggtggctgaaagtaaagaggaacta

SEQ ID NO: 10322 - DNA, 201 bp, Homo sapiens
ttgtatggttctaaaggaatggttgattacctgtggtttggttttaggtactgggaccctggtcctcgagctgacccctttgaggacatgcggtacgtctsggggggcttcgcctacttgcaggatgtggtggagcaggcaatcatcagggtgctgacgggcaccgagaagaaaactggtgtctatatgcaacagatgccc

SEQ ID NO: 10323 - DNA, 201 bp, Homo sapiens
ggtgtggacatctttgcaggggatattcagtctgctgtagctttcttgattggaaggaatagtttatcatatatttgaagtgttccctcagtgcctttggyttttgttgacccctctgcagctctctgctttttcttgcccatatttggaaagtgactctaaagcataataagcatcacctattagggtttttaatgtaca

SEQ ID NO: 10324 - DNA, 201 bp, Homo sapiens
atctctgaactaggtatgagacattcatcgaaaaaaatccatcaagtgtttattgtatgtctgctttataccagcactgttctaggcactgaagttcgacyaccaacaaggcagttgtgatgcacttggagctttcattctgatgggcattgagatccaggctgaaggctgagtctgggaatttgaggaattctttgtagg

SEQ ID NO: 10325 - DNA, 201 bp, Homo sapiens
ctaggtgacagggtgagactccgtctcaaaataaaaaaaaaaaaagaaaaggaaaggctgtgtgtgtgtgtatgtgtgtgtgtgtgtgtgtgtgtgtgtgtaacagcaccatcacactgtttgagttgaggagcacatgctgagtgtggctcaacatgttaccagaaagcaatattttcatgcctctcctgatatggcgat

SEQ ID NO: 10326 - DNA, 201 bp, Homo sapiens
gcatctaaaaaataggtaataaagataatttctttgggatagtgcctagtgagaaggcttgatatttattcttttgtgagtatataaatggtgcctctaamataaagggaaataaaactgagcaaaacagtatagtggaaagaatgagggctttgaagtccgaactgcattcaaattctgtctttaccatttactggttct

SEQ ID NO: 10327 - DNA, 201 bp, Homo sapiens
ttttttgagttacttactaaataaaaataaaacactatttctcaatagacttgaagcttcaagatttcctggtggacaatgaaaccttctctgggttcctrtatcacaacctctctctcccaaagtctactgtggacaagatgctgagggctgatgtcattctccacaaggtaagctgatgcctccagcttcctcagtagg

SEQ ID NO: 10328 - DNA, 201 bp, Homo sapiens; identical to SEQ ID NO: 1708
  misc_feature (1)...(201): n = A,T,C or G, or insertion/deletion polymorphism (see Tables 1-2)

SEQ ID NO: 10329 - DNA, 201 bp, Homo sapiens
caaactaaatacaagtcctgtgtttttatcacagggaggctgatcaatataatgaaattaaaagggggctggtccatattgttctgtgtttttgtttgttkgttttgtttgtttctttttttgtttttgtggcctccttcctctcaatttatgaagagaagcagtaagatgttcctctcgggtcctctgagggacctgggg

SEQ ID NO: 10330 - DNA, 201 bp, Homo sapiens
tgcattccagccagcgtgacagagtgagactctgtctcagaaaaagaaaaaaaagatagaagttttcttctgtagatcagtgttagaactcataccaagcraagtggtcctggtgagtatttcagtgaaaaactgcattcttgctcagatattgtcaagacttttcacccaaagattcttatttatgtctcagtccgtacc

SEQ ID NO: 10331 - DNA, 201 bp, Homo sapiens
gaagagccaccctggttccaaccagaagagaatatcagaaagtaagtgctgttgacctcctgctctttctttaacctagtgctgctgcctctgctaactgytgggggcaagcgatgtctcctgcctttctaaaagactgtgaaaccactccaggggcagagaaatcacatgcagtgtccctttccaaatcctcccatgcca

SEQ ID NO: 10332 - DNA, 201 bp, Homo sapiens
aagcgaagtggtcctggtgagtatttcagtgaaaaactgcattcttgctcagatattgtcaagacttttcacccaaagattcttatttatgtctcagtccrtaccttgtgtgaaaattaatactggatgtcagaacgctgttgtgtttttaaagttccctggggttaagagcagtttccattaggtgttctctgcttttta

SEQ ID NO: 10333 - DNA, 201 bp, Homo sapiens
atgttcattgtggaaaatgctgaagacttggaaaatacaaaaatgctgagatcaaacactattgatacgttagtgtatttcttcctgtcctgttctacttwctttctttgaattctgctcacgtgtttctgactgatgaggtctgacttttgggttccttttccagaggagaagccttctttcagcttgccatttgttacc

SEQ ID NO: 10334 - DNA, 201 bp, Homo sapiens
tggttgttgggttgagaagagactgggatgggggaaagggaggacaaaggacattgtgctggattgagaaagcagtaagtcagtttcattcattcactcarccgatgatgttcaaataccaccatcatccgtgggctaaaggatgaagagccatccctccctgagagtcaggaagcacttcccagataaagtttggagtgt

SEQ ID NO: 10335 - DNA, 201 bp, Homo sapiens
tatccaggattctggttttctactcaccagatagattctcttaaaaccagggaaagattcctggaggaaggatgtatctggaaagagatgttccttattayaataaaatgaaattgtaatactcttggattttgtgcagcacgaattctttatagagagttggtcctcccagagaattaagaatactcagtttctggaccc

SEQ ID NO: 10336 - DNA, 201 bp, Homo sapiens
tgatgcaggggaacctttctccatttccaaccacaggtgtgtctttcagacactgagtgaggcaggttttgtactttattgtaacacaagaaccttttctyctctggagtaaagcactccagacattcgcaagttgctttacaagccttaaaaggatggtattgtaggcaactttaattaaatcccatctcctcctctccc

SEQ ID NO: 10337 - DNA, 201 bp, Homo sapiens
aactataaaacagccaatatttattaggcactgatttcatgccagagacactctgggcatgaaagaaagtaatgataatagttaattttatatagcgttgwtaccatttacaaccttttttttttttttaacctctatcatctcaattaaagtgcagagagaccctgggaagaaggtaactatatttattatcccagatga

SEQ ID NO: 10338 - DNA, 201 bp, Homo sapiens
tgttaaagcttagagagtggtgggagagactggagaagttgattaattagtaaatgaagttgtctgtggatttcccagatcccagtggcattggatatccrtattatttttaaatttacagtgttctatcttatttcccactcagtgtcagctgctgctggaagtggcctggcctctatttatcttcctgatcctgatctc

SEQ ID NO: 10339 - DNA, 201 bp, Homo sapiens
tgggttcatttctgtcttctctcctgtcacagtctgcatggaggaggaacccacccacttgaagctgggcgtgtccattcagaacctggtaaaagtctacygagatgggatgaaggtggctgtcgatggcctggcactgaatttttatgagggccagatcacctccttcctgggccacaatggagcggggaagacgaccac

SEQ ID NO: 10340 - DNA, 201 bp, Homo sapiens
ccttgcctgagatggttggcaaaggcctcattgcagcattcattggcaggccacagttcttttggcagctctgcttcctgacctttcaccctcaggaagcraggctgttcacacggcacacacatgccagacagggtcctctgaagccacggctgccagtgcatgtgtcccagggaaagctttttcctttagttctcacac

SEQ ID NO: 10341 - DNA, 201 bp, Homo sapiens
tcaagcgattctcctgcctcagcctcatgcgtcaccacgcccagctaattttgtatttttagtagagacagggtttctccatgttggtcaggctggtctcsaactcccaacctcaggtggttcgcccgccttggcctcccaaagtgctgggattgcaggcatgagccactgcgcccagccccaaattttggtttttgcttg

SEQ ID NO: 10342 - DNA, 201 bp, Homo sapiens
atttttttattttcaaattttccataaaaatataaggacttgaagatcaagaaaaaatttctgctttggctcagtgcagtggctcacgcctgtaatcccarcagtttgggagccctaggggagaggatcacttgaacccaagagtttgacgttccagtgagctatgatctccggatcgtaccgcctggacgatggagcaag

SEQ ID NO: 10343 - DNA, 201 bp, Homo sapiens
gccatgggatactcttctgttatcacagaagagataaagggcattgagactgagattcctgagaggagatgctgtgtctttattcatctttttgtccccarcatggtgcactaaatttatggttagttgaaagggtggatgcttaaatgaatggaagcggagaggggcaggaagacgattgggctctctggttagagatct

SEQ ID NO: 10344 - DNA, 201 bp, Homo sapiens
tctgaattcagccttctggttgcccctcaagagtcagtttaaatgttggtcatgttagttgtcagtgaaaacaatggtgaggctggcatgagagtgtgaayctggatgggagggcttgtgcttcacgaaaacatttttccagatcagctcagtcgtgagttatccgtcattgacgttataataagctctgattatttatca

SEQ ID NO: 10345 - DNA, 201 bp, Homo sapiens
taattgcagtaccctattttcctttttggctgcagcctctcagccagccacagcatctccctgtgtcttggtaggttttggaaagaagtgtgggagcaaamgcatgatgttacatgtagactggcctgagatactcattctcagggcactgtgtgaatgatgagctgctgttactgtgtggaggggaaatgcacttagtgc

SEQ ID NO: 10346 - DNA, 201 bp, Homo sapiens
ctggatctgtgctctctaagataactgttagtggtggcgtgtgtgttctcacactcagacatttgatctgctctttgtttcccattcttagctgcaaggcrgtgttaaagaaccctgtgtctccatatccactccccacacttaagcacttttgtgggcccgtgtgccgtatgcctcgtggcagcagggatccaatgtcac

SEQ ID NO: 10347 - DNA, 201 bp, Homo sapiens
ggaaaacaggtaagaggctctccagtgacttacttgggcgttattgttttgtttcgaggccaaggaggcttcgggaagtgctcggtttcggggactttgayccggagccccacatccccaccacttgcaactcagatgggaccggaggcggtgttaaatggggagacgatgtcctagtacgagctctggtgaccccaggac

SEQ ID NO: 10348 - DNA, 201 bp, Homo sapiens
caagagccaggattcaagcccaaatctgcctggatctgtgctctctaagataactgttagtggtggcgtgtgtgttctcacactcagacatttgatctgcyctttgtttcccattcttagctgcaaggcagtgttaaagaaccctgtgtctccatatccactccccacacttaagcacttttgtgggcccgtgtgccgtat

SEQ ID NO: 10349 - DNA, 201 bp, Homo sapiens; identical to SEQ ID NO: 1712

SEQ ID NO: 10350 - DNA, 201 bp, Homo sapiens; identical to SEQ ID NO: 1714

SEQ ID NO: 10351 - DNA, 201 bp, Homo sapiens; identical to SEQ ID NO: 1707

SEQ ID NO: 10352 - DNA, 201 bp, Homo sapiens
caggtatggacctctaaaataaggcttcctctccattccggttgtcattgcctttgtccaaacacagcacacaaggccttttacagttgcacaactcttcytgtccatacccaccacaccctttcccagctgtaagcttcagatgagttgcctccaaccaccatgctcctgtaggcctggcttgaaatgcccttcttctgt

SEQ ID NO: 10353 - DNA, 201 bp, Homo sapiens
tctgggggaagatgagtaatgtctcgttccacccctgattccagtgctgactgattctggagtggcagagagggttggaggctcaccgctctgctcacccsaccctctggccatctcctcttagaatgcaagggcagggattttgttacacagcgcctcttttgttataggctagctcctgccttcaaggagcactgagaa

SEQ ID NO: 10354 - DNA, 201 bp, Homo sapiens
gtatgagacattcatcgaaaaaaatccatcaagtgtttattgtatgtctgctttataccagcactgttctaggcactgaagttcgaccaccaacaaggcarttgtgatgcacttggagctttcattctgatgggcattgagatccaggctgaaggctgagtctgggaatttgaggaattctttgtaggtcctgggtctaca

SEQ ID NO: 10355 - DNA, 201 bp, Homo sapiens
ctgttgggactgttctatgcagggcaccctcttgtgtggcataggatttgtgcctcaccacacactgttgtagctttgctgtcttgatgatgagtagagggcagtgtccaggccatggtataagcatctactgccccccagggttaccaaaaccaagccaagttgtgtctcagcgagctccgtgaagcatggagaagttga

SEQ ID NO: 10356 - DNA, 201 bp, Homo sapiens
gaccaggaaaggagcagctgccgtatagagcaggagacgctctgctgggtgtgatacagtccctgatggggcctcctactgcagtctttccagtcaggaargaaacatcctctaagtggggacctaaagaatggatgtcagccaggtaaagaacagggagtagaatgttccaggtagaggacatagtatatgcattggtcc

SEQ ID NO: 10357 - DNA, 201 bp, Homo sapiens
ccttgaaagcatctggcttctgaggttcaactatgggaatatggtctcttaatgaacattaagttgagtttgccttttaggtccacatgttgacaaatgtrtcagagtaatctctgtcctaggatcagagggcctgtaggcacttgcaaaagcagttagctctgactcccagccagtgcacactccacctttctgactccc

SEQ ID NO: 10358 - DNA, 201 bp, Homo sapiens
cagctactggaaagaaatgaataaacccttgtccttgtaatggtggtgaaggggagggaggtagtttgaatacaacttcacttaattttacttccctattsaggcaggaattgccaaaccatccaggagtggaatatgcaacctggcgtcatgggccagctggttaaaataaaattgatttctggcttatcacttggcatt

SEQ ID NO: 10359 - DNA, 201 bp, Homo sapiens
gcagaggaaagtgctagcatacattaccctgtggctgcatgactttgtgaataggttagttagcaccctttcagccacttcttcttacctgttaatgagawaaaacatgtaattgcttaaaaacagtatttggcacataggaagcacttagtgaatatgaattatgattttttttggagtggtgacatctcaaccaagcca

SEQ ID NO: 10360 - DNA, 201 bp, Homo sapiens
ccctgaaacgggtgctgggaagagtcaatagtttggaataactcaataatttatggtgcttctttagaaagatttgctggctttatgtgggaagaaatttktttttttgattggggagtggtgggttggtggtgaggctgcctgtggaaagagaagtgagtgttttgactcactgttatttaaaaatctctagggctgttc

SEQ ID NO: 10361 - DNA, 201 bp, Homo sapiens
cgtcttttctctctgccttttccccaagggccaggacccctggatctctgggcagagcagacgcaggcccctataatagccctcatgctagaaaggagccrgagcctgtgtataaggccagcgcagcctactctggacagtgcagggttcccactctcccaactccccatctgcttgcctccagacccacattcacacccg

SEQ ID NO: 10362 - DNA, 201 bp, Homo sapiens
ccggagcctgtgtataaggccagcgcagcctactctggacagtgcagggttcccactctcccaactccccatctgcttgcctccagacccacattcacachcgagccactgggttggaggagcatctgtgagatgaaacaccattctttcctcaatgtctcagctatctaactgtgtgtgtaatcaggccaggtcctccct

SEQ ID NO: 10363 - DNA, 201 bp, Homo sapiens
acaccacatggatgaagcggacgtcctgggggacaggattgccatcatctcccatgggaagctgtgctgtgtgggctcctccctgtttctgaagaaccagytgggaacaggctactacctgaccttggtcaagaaagatgtggaatcctccctcagttcctgcagaaacagtagtagcactgtgtcatacctgaaaaaggt

SEQ ID NO: 10364 - DNA, 201 bp, Homo sapiens
cggtttgggggcattaccttgtacctggtatgttttctttcaggtgtggttcaataacaagggctggcatgcaatcagctctttcctgaatgtcatcaacratgccattctccgggccaacctgcaaaagggagagaaccctagccattatggaattactgctttcaatcatcccctgaatctcaccaagcagcagctctc

SEQ ID NO: 10365 - DNA, 201 bp, Homo sapiens
gtctctaggttctgtgttgctcacactcaaaatttctgggccttctcatttggtgcatgtgaatggtgcatatgagtgaagtctaggatggggccttagcrttaaagccctggggtagtgtgactgagattgttggtaaagaatgtgcagtggttggcatgacctcagaaattctgaaatgggactgcacctgcagactga

SEQ ID NO: 10366 - DNA, 201 bp, Homo sapiens
ctcaagagtcagtttaaatgttggtcatgttagttgtcagtgaaaacaatggtgaggctggcatgagagtgtgaatctggatgggagggcttgtgcttcaygaaaacatttttccagatcagctcagtcgtgagttatccgtcattgacgttataataagctctgattatttatcaagcatcattctttatagatatctca

SEQ ID NO: 10367 - DNA, 201 bp, Homo sapiens
acctcaagtctgatgcagaccagagctgggccagctccccagtcgtgggtatagaatcatagttacaagcaggcatttcttggggatggggaggactggcrcagggctgctgtgatggggtatcttttcagggaggagccaaagcgctcattgtctgtgcttctcctcctttttctgcggtccctggctccccacctgact

SEQ ID NO: 10368 - DNA, 201 bp, Homo sapiens
attgtttttatctttgaataatatgttcttgtttgtccattttccatgcatgcgatgttaggcatacaaaatacattttttaaagaatactttcattgcarattggaaacttcgtttaaaaaatgctcatactaaaattggcatttctaacccataggcccacttgtagttatttaccgaagcaaaaggacagctttgctt

SEQ ID NO: 10369 - DNA, 201 bp, Homo sapiens
aaggatgatgtactggtcttaatattaccattgagataagctttataataacataaaaagaaataacagtaatgataatagcaacaacaacaacaacaaaraactaacatttaagtagaatttcttgtgcactgtgcattctgtttaagttatctcattttaccctcatgataaccctgcagggaagattctttaacccca

SEQ ID NO: 10370 - DNA, 201 bp, Homo sapiens
ggactggcacagggctgctgtgatggggtatcttttcagggaggagccaaagcgctcattgtctgtgcttctcctcctttttctgcggtccctggctcccyacctgactccaggtgaacaagaccttccaggaactggctgtgttccatgatctggaaggcatgtgggaggaactcagccccaagatctggaccttcatgg

SEQ ID NO: 10371 - DNA, 201 bp, Homo sapiens
gggcagtcttaggtctcctgcccctcacgagcaccccagagaggccacgtgctcagtgatctcagtgggcgcatctttctagtcttgctattctttttggycatgttgttcagaaaccatactgggcagggccgacttcaccctaaaggctgcgtctcttcactctgcttttgtttgttccaaataaagtggcttcagaat

SEQ ID NO: 10372 - DNA, 201 bp, Homo sapiens
gttaacaaaaatacatacataccttcctggtgatggtataaattgctattctctattggaaagcaatttggaatgaaaatttaaagaaccattttaaaatrtgctatcctgcgtacctccattccacccacccccagggatgtagcctactgaaataattttaaagaagtcaccatatgagagaaaatgttattgctatat

SEQ ID NO: 10373 - DNA, 201 bp, Homo sapiens
tggagtgcagtggcgcaatctcggctcactgcaacttccgcctcccagattcaagcagttctcctgcctcaacctcctgagtagctgggactacaggcgtrtgccaccatgtccggctaatttttgtatttttttaatagagacggggttttactatggtggctaggctggtctttaactcctgaccttgtgatctgccca

SEQ ID NO: 10374 - DNA, 201 bp, Homo sapiens
gcaaggggggaaaagcttataatgttagtgaaactaagactgatttttttataaagcagcagttttcagacccttggagactccaattcggtagaaccagrgcttcatcttctctgtcgaagctgtgacaggagttgcaaatgcctctcctttttgctgagtttgcagctgctgtttttccggcagcacatctgtgcaggc

SEQ ID NO: 10375 - DNA, 201 bp, Homo sapiens
gaaataggcctcctttgcatcatgacctgtacatcctgcaattggaaaagattgtactttagttggtttaaccagcagcattatttttctaaactaagcaktaagaaggaattaggttttatgtgggatcaacagactgggtctcaaaagaggaaggtgatagaacacagtggggagggggaggtgcactagaaacagagg

SEQ ID NO: 10376 - DNA, 201 bp, Homo sapiens
tcacttgagcccaggtgttcaagaccagcccaggcaacatggcaagactctgtctctatgaaaaaattaaaaattagccaggtgtggtggtgtgcacctgkagtcttagctacttggtaggctgagatgggaggatcacttgggcttgggaggtcaaggctgcggtgagctgtgattccatcactgcactccagcccgggc

SEQ ID NO: 10377 - DNA, 201 bp, Homo sapiens
gtctggggctggtcctggagtttgtcttgctctgtttttttgtaggtggaatgcagagaaagctatctgtggccttggcctttgtcgggggatctaaggtkgtcattctggatgaacccacagctggtgtggacccttactcccgcaggggaatatgggagctgctgctgaaataccgacaaggtgcctgatgtgtattta

SEQ ID NO: 10378 - DNA, 201 bp, Homo sapiens
aaataaaaatgaataggtgcttagaatggggcctgacattagtaagtgcttagttttgtgtgtgtatatgttatttttattttggaggagaacataaaaargacaaagtgtagaaaaactggttgggtgtattcagctgtcataacatgagagttgttatgcccagatgcacttgacatgtgaatttattagaaacatgat

SEQ ID NO: 10379 - DNA, 201 bp, Homo sapiens
ctcaagagaatatttctacccattttcttctaggttttcctatctcagtgactaatggtagcaaagcattcccttaaaaaggcattatttgtgaaacttayctaaaatcgaattcgggtccaattaaatttttgaaattttatattaaaaattatattagtagggatgggtaagaggtgttttggtctggttggttggtta

SEQ ID NO: 10380 - DNA, 201 bp, Homo sapiens
acccaaataggccctaaataaacatttatagcctcctgcctgcctgagaaaccagggtggacatggagagaaggcacttctgaaagttcaagcgcagtgcsctgtgtccttacactccactcctcagtgctttctgtgggttcatttctgtcttctctcctgtcacagtctgcatggaggaggaacccacccacttgaagc

SEQ ID NO: 10381 - DNA, 201 bp, Homo sapiens
ggcttctctcccaggtaactctgagaaagtgttattaagaaatgtggcttctactttctctgtcttacggggctaacatgccactcagtaatataataatygtggcagtggtgactactctcgtaatgttggtgcttataatgttctcatctctctcattttccagatattcctcaaggtggccgaagagagtggggtgga

SEQ ID NO: 10382 - DNA, 201 bp, Homo sapiens
tttaaatttggtggaatatgtttttattagcttgtatctttaattcctaaattaagctgtgtgtgtgtgtgtgtgtgtgtgtgtgtgtgtgtgtgtgtgtgaagtttaaagccaggatgagctagtttaaagtatgcagcctttggagtcatacagatctgggtttgaatctggtctctaaactttatagatgtatgatat

SEQ ID NO: 10383 - DNA, 201 bp, Homo sapiens
cagagcaagactccatctcaaaaaaagctctcagaacaaccaggtttacaaatttggtcagttggtaaataaactgggtttcaaacatactttgctgaaayaatcactgactaaataggaaatgaatctttttttttttttttttaagctggcaagctggtctgtaggacctgataagtactcacttcatttctctgtgtc

SEQ ID NO: 10384 - DNA, 201 bp, Homo sapiens
tctgactgggaatccatcgttcagtaagtttactgagtgtgacaccttggcttgactgttggaaagacagaaagggcatgtagtttataaaatcagccaargggaaaatgcttgtcaaaatgtattgtcgggtattttgattaatagtttatgtggcttcattaattcagagttactctccaatatgtttatctgcccttt

SEQ ID NO: 10385 - DNA, 201 bp, Homo sapiens
aacctcctgagtagctgggactacaggcgtatgccaccatgtccggctaatttttgtatttttttaatagagacggggttttactatggtggctaggctgktctttaactcctgaccttgtgatctgcccaccttggcttcccagagtgctgggattacagatgtgagccacagtgcccggcctaagttttacttcttata

SEQ ID NO: 10386 - DNA, 201 bp, Homo sapiens
cctgagtagctgggactacaggcgtatgccaccatgtccggctaatttttgtatttttttaatagagacggggttttactatggtggctaggctggtcttkaactcctgaccttgtgatctgcccaccttggcttcccagagtgctgggattacagatgtgagccacagtgcccggcctaagttttacttcttataatgga

SEQ ID NO: 10387 - DNA, 201 bp, Homo sapiens
gctgggctcagtgggtggattgacactgcagaaatggccagatctaaaggatcaacatttacgtagctgggaaatgtagctgggacttcagtttcactgcsctagtgatttttcctaccactaagcagctcagtccatacccctacgagacccacaagcttatgagatactgttcttccaggaaagcagtggggccagggc

SEQ ID NO: 10388 - DNA, 201 bp, Homo sapiens
attttccagatattcctcaaggtggccgaagagagtggggtggatgctgagacctcaggtaactgccttgagggagaatggcacacttaagatagtgcctyctgctggctttctcagtgcacgagtattgttcctttccctttgaattgttctattgcattctcatttgtagagtgtaggtttgttgcagatggggaaggt

SEQ ID NO: 10389 - DNA, 201 bp, Homo sapiens
aaaggaatgggagaggtgatagacttcaggcagtgtaactagttgtctgaacactactggctcaattatattgtgtctagtgatttccatcttgtccgtckgctaatttatcgcctggtaactcactgaggcagggttttcctttggagaaacctcattgttttaaccagtgtatcatgcttgtttagaagttcaatgatc

SEQ ID NO: 10390 - DNA, 201 bp, Homo sapiens
aagcattggatcatacgtacatttcagagtctagagggcctgtccttctgtggcccagatgtggtgctccctctagcatgcaggctcagaggccttggccyatcaccctggctcacgtgtgtctttctttctccccttgtccttccttggggcctccagctttctgcgggtgatgagccggtcaatgcccctcttcatgac

SEQ ID NO: 10391 - DNA, 201 bp, Homo sapiens
taactttttactgattttgtttttatttacttattttatttgtttaaatttatttttagttttttttttttttagagacagggtctctttctgttacccargctagagtgcagtggtgcccttagagctcactgagctcactgcagcctcgaattcctgggctcaagtgatcctcctgccttagcctcccgaagggctggg

SEQ ID NO: 10392 - DNA, 201 bp, Homo sapiens
cctggatttactcagtggctgtgatcatcaagggcatcgtgtatgagaaggaggcacggctgaaagagaccatgcggatcatgggcctggacaacagcatmctctggtttagctggttcattagtagcctcattcctcttcttgtgagcgctggcctgctagtggtcatcctgaaggtaaggcagcctcactcgctcttcc

SEQ ID NO: 10393 - DNA, 201 bp, Homo sapiens
gatgtgtcgtgggcggctgaacgtcgcccgtttaaggggcgggccccggctccacgtgctttctgctgagtgactgaactacataaacagaggccgggaasggggcggggaggagggagagcacaggctttgaccgatagtaacctctgcgctcggtgcagccgaatctataaaaggaactagtcccggcaaaaaccccgt

SEQ ID NO: 10394 - DNA, 201 bp, Homo sapiens
tgctagtggtcatcctgaaggtaaggcagcctcactcgctcttccctgccaggaaactccgaaatagctcaacacgggctaagggaggagaagaagaaaaraaatccaagcctctggtagagaaggggtcatacctgtcatttcctgcaatttcatccatttatagttggggaaagtgaggcccagagaggggcagtgact

SEQ ID NO: 10395 - DNA, 201 bp, Homo sapiens
aaaaaagaagacaaaaagggattttataccagtattatcttggctgtgtgactctgaagccacagttgtaagttataattactctgaaacacaaggccctrtgactcttttgggctctttggtgtttatcttgattacaacgttggaatatagaaatgaaaggaatgggagaggtgatagacttcaggcagtgtaactagt

SEQ ID NO: 10396 - DNA, 201 bp, Homo sapiens
ctcgctcttccctgccaggaaactccgaaatagctcaacacgggctaagggaggagaagaagaaaaaaaatccaagcctctggtagagaaggggtcatacmtgtcatttcctgcaatttcatccatttatagttggggaaagtgaggcccagagaggggcagtgacttgcccaaggtcaacccagccgggtagcagctaag

SEQ ID NO: 10397 - DNA, 201 bp, Homo sapiens
aggcaaaatggcctggttctctgtcccctttctgtctgtatgcctcgtacaggttatgaaaagaaaaagttgggaaaagctgtccacctcacctaattgtrttcttgtggagtgtgctagatgccccctctctggagaaaaaaaatccttgtggcctctgacccacctctggagagcctagttcccttctggaggcagaag

SEQ ID NO: 10398 - DNA, 201 bp, Homo sapiens
gaagaaaaaaaatccaagcctctggtagagaaggggtcatacctgtcatttcctgcaatttcatccatttatagttggggaaagtgaggcccagagagggrcagtgacttgcccaaggtcaacccagccgggtagcagctaagtaggatgagagtgcagggttcatgctttccagataaccacatgctcaactgtgccatg

SEQ ID NO: 10399 - DNA, 201 bp, Homo sapiens
ggtgaaaggttattatgaatggtacaaaactttgttacaaaaccattttcttggactgttttgggctgcttcactgcatgacaaatgctcaccctttcagytggaatgattgaaattttggaaaagatgggtgtttttagaagacattgtaatttgttccggtgctgtgcccattcattccatttcacttctgtttactca

SEQ ID NO: 10400 - DNA, 201 bp, Homo sapiens
actgcaaggggaaggtcagtggcagaggtagtggtcccatggttggtgcataagagctgctctgagacaactgcatgctggtgggtcctgcagacatgtasccatcagccggagataggctcaaaatatccacaagagtttggatgattgtgggaatgcagaatccatggtgatcaagagggaaagtcaagttgcctggcc

SEQ ID NO: 10401 - DNA, 201 bp, Homo sapiens
tttccttggcttttagacagaaaagttacgtgggatattatctcccacagctcttctgtggtgccaccagtcatagtccttatataaggagaaaccagttraaattacctattgaagaaacaaagagcaaactcgcccactgaaatgcgtagaaagccctggactctgttgtattcataactctgccattatttttctgcg

SEQ ID NO: 10402 - DNA, 201 bp, Homo sapiens
cctgtggaaagagaagtgagtgttttgactcactgttatttaaaaatctctagggctgttccaataagcaacaaaaggcaaaatggcctggttctctgtcmcctttctgtctgtatgcctcgtacaggttatgaaaagaaaaagttgggaaaagctgtccacctcacctaattgtgttcttgtggagtgtgctagatgccc

SEQ ID NO: 10403 - DNA, 201 bp, Homo sapiens
aagaaacaaagagcaaactcgcccactgaaatgcgtagaaagccctggactctgttgtattcataactctgccattatttttctgcgtagttttgggtaartcacttatcttctttaggatggtaatgatcagttgcctcatcagaaagatgaacagcattacgcctctgcattgtctctaacatgagtaggaataaaccc

SEQ ID NO: 10404 - DNA, 201 bp, Homo sapiens
tttcctaaagcctggcagacctgggttttggagctttgtatcacatgttttatgtttggaatgaaaatgagaccatgtctgtgaaggcactttgatatgcrtaatgcactctgccagtgtttgtcaaaacatggtccccaggtcagcagcatcagcatcacctgtaagtgattctccagtcgcatcccagggccgctgtat

SEQ ID NO: 10405 - DNA, 201 bp, Homo sapiens
tctgttgtattcataactctgccattatttttctgcgtagttttgggtaagtcacttatcttctttaggatggtaatgatcagttgcctcatcagaaagawgaacagcattacgcctctgcattgtctctaacatgagtaggaataaaccctgtcttttttctgtagatcatacaagtgagtgcttgggattgttgaggca

SEQ ID NO: 10406 - DNA, 201 bp, Homo sapiens
actaaaattctggattcttagtgctgctttttctgttttgttgcactggattgaagccttttctaactgtactcagagggcctattatttagggagattcygtatgaaatcctttagcaatcaaatcatttaatagggctgatggtttaaatatatgttaatgtgttttcctaaagcctggcagacctgggttttggagct

SEQ ID NO: 10407 - DNA, 201 bp, Homo sapiens
ttcgctgtgagtacctctggcctttcttcagtggctgtaggcatttgaccttcctttggagtccctgaataaaagcagcaagttgagaacagaagatgatwgtcttttccaatgggacatgaaccttagctctagattctaagctctttaagggtaagggcaagcattgtgttttattaaattgtttacctttagtcttct

SEQ ID NO: 10408 - DNA, 201 bp, Homo sapiens
ttctactttaagaaccccttcctggcattgtttggctcctcattgttctggaatctcatgtccatctcatgtatttgccttggttcacacttgatcttctrctcatattcctcacctactgaaattttacccatcaaccagaccgtgggtgatggaacacagcatgggctagttcttcttatatatgatctcatttaattt

SEQ ID NO: 10409 - DNA, 201 bp, Homo sapiens
ttctgagcttcaaagccaggctgactgtgcccttccacgccctggccagtgtgaccaggacatcctttccctctggggctgcactggctctttgggggaaktgttaccattcagggtcttcaaccctcattctagggacttccagtaacttctcccaccttccctcttctcagtaagacatgggtattgtcttattctgtt

SEQ ID NO: 10410 - DNA, 201 bp, Homo sapiens
ctttgggatagtgcctagtgagaaggcttgatatttattcttttgtgagtatataaatggtgcctctaacataaagggaaataaaactgagcaaaacagtrtagtggaaagaatgagggctttgaagtccgaactgcattcaaattctgtctttaccatttactggttctgtgactcttgggcaagtgacttaactactgt

SEQ ID NO: 10411 - DNA, 201 bp, Homo sapiens
tctaaaaagacaggttaaaaagtaagttcacttttattttgagcttcagaatcattcagaagccagtcgccacaaacgcagaccaaggctcttggcacatyaaatatgcctatggcttagggttattgacaagtcttatgttgcagtgtatgtggtttatagtcctgccttccacagttgcttgggagagctgtgagtcac

SEQ ID NO: 10412 - DNA, 201 bp, Homo sapiens; identical to SEQ ID NO: 1734

SEQ ID NO: 10413 - DNA, 201 bp, Homo sapiens
actccacatagaagactactctgtttctcagacaacacttgaccaagtaagctttgagtgtcaaaacagatttacttctcagggtgtggattcctgccccsacactcccgcccataggtccaagagcagtttgtatcttgaattggtgcttgaattcctgatctactattcctagctatgctttttactaaacctctctga

SEQ ID NO: 10414 - DNA, 201 bp, Homo sapiens
attttttttttaaagggatcttctctcccgtaagccgggatacttaagctatatatgtagtggctacaaattaaggtcttcactgttttcatttttagctsctagaataagtgaacattaccttagatagactcttctaattatgaagatatctagatgtctagaaaatatcaaaatgcatgtggtttttgcatttctaaa

SEQ ID NO: 10415 - DNA, 201 bp, Homo sapiens
caggcctctctcatctggctcctctcctcctcctttatcattactcttcttcgtagcttatcctactccagccatgctgtcttcctattattcctaaaaartagaaatgcatttcttcctagggcctttgtacctgcacttgccatcgcttttgctcagaatgttctttttgccaagcttttgcccagcttgttctccatc

SEQ ID NO: 10416 - DNA, 201 bp, Homo sapiens
ttagctttttattatcttctgtagtacttacctttttggagaggagttggttgggatatttttccatttaaattttttttttaaagggatcttctctcccrtaagccgggatacttaagctatatatgtagtggctacaaattaaggtcttcactgttttcatttttagctgctagaataagtgaacattaccttagatag

SEQ ID NO: 10417 - DNA, 201 bp, Homo sapiens
tttaaatagttttctggagatcctccatttgggtattttttcctgctttcaggtttggagatggttatacaatagttgtacgaatagcagggtccaacccrgacctgaagcctgtccaggatttctttggacttgcatttcctggaagtgttctaaaagagaaacaccggaacatgctacaataccagcttccatcttcat

SEQ ID NO: 10418 - DNA, 201 bp, Homo sapiens
ttgattgttttcaaggattggttccttctgctcaaggaagtcccattgtaaacataaaaaaatgaatgaaactgaagaagttcagtgacttagctttttaktatcttctgtagtacttacctttttggagaggagttggttgggatatttttccatttaaattttttttttaaagggatcttctctcccgtaagccgggat

SEQ ID NO: 10419 - DNA, 201 bp, Homo sapiens
gttttttttttttttttttttttttttttttttttttttttttttttaaaggctacaaaactgtgctttccttgggcagtaaaagaggcaatgggcaatgkgggacctgatgacaaagggaagcaaagctgtcttaggggtggcatggaggaggtgctgcttcacagcagagagaggtatggctgtgcttggagtgtccac

SEQ ID NO: 10420 - DNA, 201 bp, Homo sapiens
taatgattgaattctccacccatttttctacttgtatgaccttaatttgatggcacctgttccatcctcatgagtttgctacaattatactggtgccaacrcaatcataaacacaaatataaacttgggctttgaaatcttgtgccagaacttggctttaaagtaagcatttaaaaaatccatatgtgtttattagacttt

SEQ ID NO: 10421 - DNA, 201 bp, Homo sapiens
aactttttttcaaatatgcatataattgtcagtggttactatattttggggaagagattgttgacttctttgaagaaagatacggattttctcttcagaaraaatacacatgggctcatataatccaaattttatgtgtaattacagggtgttcatgaatgcccacaaatccattaagccatgtgaccttggacaagtcat

SEQ ID NO: 10422 - DNA, 201 bp, Homo sapiens
cagctaatttttgtatttttagtagagacggggtttcaacttgttggccaggctggtctcgaaccctcgacctcaggtgatccaccggcctcggcctcccmaagtgctgggattataggcgtgagccaccgcgcgcggccgagttttgtttcttttaaaaacaagacttaggagagcctgcggagacccggaggtggggtg

SEQ ID NO: 10423 - DNA, 201 bp, Homo sapiens
atattcctcaaggtggccgaagagagtggggtggatgctgagacctcaggtaactgccttgagggagaatggcacacttaagatagtgccttctgctggcyttctcagtgcacgagtattgttcctttccctttgaattgttctattgcattctcatttgtagagtgtaggtttgttgcagatggggaaggtttgttttgt

SEQ ID NO: 10424 - DNA, 201 bp, Homo sapiens
taactgtaggctgacagcctagcagcaaggaccagttaaagaaatgagtagaactgaagtgtgcttgagtatctctggcagtcagcaaaaacttaatgggratcatggtaggccaaatgttctgcagtatttcaaaagctgcatgggttttgagaggcttttggtccatcactcaccttaggttgttctacaagcacatca

SEQ ID NO: 10425 - DNA, 201 bp, Homo sapiens
tgtgagcccctacaagtgcaagttgtcagatgtccccaggtcacttatcaggaaagctaagagtgactcataggatgctcctgttgcctcagtctgggctycataggcatcagcagccccaaacaggcacctctgatcctgagccatccttggctgagcagggagcctcagaagactgtgggtatgcgcatgtgtgtgggg

SEQ ID NO: 10426 - DNA, 201 bp, Homo sapiens
  misc_feature (1)...(201): n = A,T,C or G, or insertion/deletion polymorphism (see Tables 1-2)
tgagtactttgccctttttgaggagcagggcattggagtgcagtgggacaacctgtttgagagtcctgtggaggaagatggcttcaatctcaccacttcgntctccatgatgctgtttgacaccttcctctatggggtgatgacctggtacattgaggctgtctttccaggtacactgctttgggcatctgtttggaaaat

SEQ ID NO: 10427 - DNA, 201 bp, Homo sapiens
acggaattcccaggccctggtattttccttgcaccaagtcctactggtttggcgaggaaagtgatgagaagagccaccctggttccaaccagaagagaatrtcagaaagtaagtgctgttgacctcctgctctttctttaacctagtgctgctgcctctgctaactgttgggggcaagcgatgtctcctgcctttctaaaa

SEQ ID NO: 10428 - DNA, 201 bp, Homo sapiens
gcaaagagcaatttgggagtccagtttgtttctcattgaaagctttcccatttctggtcctcttgtcactgttgcattgaggcaccaaaaggcaatctcartgcgacactattcaacagactaagttgcaccggataatgataccattttacatttttcatatattattacattgaaggcttcaaacagcactagcagggg

SEQ ID NO: 10429 - DNA, 201 bp, Homo sapiens
ccacagagctcagcctatgcttcataatgtaatcattacccagatccctaatcctctcttggctcttaactgcagacagagatgtccacagctcatcaaakgctctgccttctgggttctttgtgcttagagtggcttcctaaatatttaataggtcccttttctgccagtctcttctgtgcccatcccctgattgccctt

SEQ ID NO: 10430 - DNA, 201 bp, Homo sapiens
ggcaccacctctccagaagtacaggccatggtgcagagataacgctgtgcatatcagcatccatgccactcacggtcaaatagcagttttctgcaaaactyagtgagggctggtgtttggaagtggagttgagtaattgcagtaccctattttcctttttggctgcagcctctcagccagccacagcatctccctgtgtct

SEQ ID NO: 10431 - DNA, 201 bp, Homo sapiens
atatctgtcacatctaatcagtttaaaataaggggcatcctaagcatggagatggtccttggatggtccttggagtttctgtattttcagtattctttttyttgagcatacaagacatttattgaaaaattcttgggatcaatacttgtgtaaggaaaggaaagggaacaaagcatgattgggcagaggcagaagatgaca

SEQ ID NO: 10432 - DNA, 201 bp, Homo sapiens
ccccctgccaatttcatatctgtcacatctaatcagtttaaaataaggggcatcctaagcatggagatggtccttggatggtccttggagtttctgtattktcagtattcttttttttgagcatacaagacatttattgaaaaattcttgggatcaatacttgtgtaaggaaaggaaagggaacaaagcatgattgggcag

SEQ ID NO: 10433 - DNA, 201 bp, Homo sapiens
aacccccctgctgctccaggcagttctccttctacagtgctctattgtgctgttttaataatctttcaactgggaagaactcccatttcaggaattaagcygtggacaaatcttttaattatccttgaaatcatcctaataagaaatccaaggaggaagtcttacagggtgcctcacccacttttctcatcactggaactt

SEQ ID NO: 10434 - DNA, 201 bp, Homo sapiens
tgggtagcaccagacccagcttgcatggttattgatttttcagagacactttttgagcttattctctggcagaaaggggaactgcttcctcccctatctcrtgtctgcatactagcttgtctttacaagaagcagaagtagtggaaatgtttattcttgaaaataagctttttgcttcacatgatctagaatttttaaaat

SEQ ID NO: 10435 - DNA, 201 bp, Homo sapiens
acctgagctctgcaatcttgggcaaggcttttcccttatgtttcttcttatctaaagtgaacagctggggctcatgtgctccctcctcatctaaagtgaayacatggggctcatgtgcagggtcctccccgctttcagagcctgaggtcccctgaggctcaggaaggctgctccaggtgagtgccgagctgacttcttggt

SEQ ID NO: 10436 - DNA, 201 bp, Homo sapiens
atttctattctagagaagaatctgacccagaagggggaagtgactgtcccaagtctacacaaccacagaagggatattctgggaataaatcacggctaaahccccctgctgctccaggcagttctccttctacagtgctctattgtgctgttttaataatctttcaactgggaagaactcccatttcaggaattaagccgt

SEQ ID NO: 10437 - DNA, 201 bp, Homo sapiens
gctctggcctttctgtccatacctgaacaggtccttgggttaagagcccctcgtccagggcctattaatcttgatcctcataagcagcatccatgtattamggccgcaaaccaaactgtgccagaccgaatcctaggaccaagcccaaatatgtcccatcatccttttggtaagaagctcattgtaagaaagaaagaggag

SEQ ID NO: 10438 - DNA, 201 bp, Homo sapiens
ctccacatagatgttatgaattttacttttacagaggagccaactgaggctcagataagttacttattatatgactagtagtggtagagctggggtttcarctaagaactctctggctccaaagcccttgtaagtttctatcagtatatgaccatgcatatgagcatttgtctctcctcttcttcatagctccttactgca

SEQ ID NO: 10439 - DNA, 201 bp, Homo sapiens
attctgagtaaatggactgagagagagcggggggcttttgagaagtgtggctgtatctcatggctaggcttctgtgaagccatgggatactcttctgttakcacagaagagataaagggcattgagactgagattcctgagaggagatgctgtgtctttattcatctttttgtccccaacatggtgcactaaatttatggt

SEQ ID NO: 10440 - DNA, 201 bp, Homo sapiens
aagaatgtgaagctctttgcactaggatggcaatcatggtcaatggaaggttcaggtgccttggcagtgtccagcatctaaaaaataggtaataaagatartttctttgggatagtgcctagtgagaaggcttgatatttattcttttgtgagtatataaatggtgcctctaacataaagggaaataaaactgagcaaaac

SEQ ID NO: 10441 - DNA, 201 bp, Homo sapiens
acagggtcctctgaagccacggctgccagtgcatgtgtcccagggaaagctttttcctttagttctcacacaacagagcttcttggaagccctccccggcraaggtgctggtggctctgccttgctccgtccctgacccgttctcacctccttctttgccatcaggaggacagtgtttctcagagcagttctgatgctggc

SEQ ID NO: 10442 - DNA, 201 bp, Homo sapiens
actgagaggcctcacctgtcccacatccttgtgtttgtgcctggcaggccgcaccattattctctctacacaccacatggatgaagcggacgtcctggggkacaggattgccatcatctcccatgggaagctgtgctgtgtgggctcctccctgtttctgaagaaccagctgggaacaggctactacctgaccttggtcaa

SEQ ID NO: 10443 - DNA, 201 bp, Homo sapiens
ttactctaattctttgattcatcaagaaataactagaatggcaagttaaaatttaagctgtttcaaagatgcttctgcatttaaaaacaaatttatctttkattttttttccccccagcaaataagacttattttattctaattacaggatgaacccaccacaggcatggatcccaaagcccggcggttcttgtggaattg

SEQ ID NO: 10444 - DNA, 201 bp, Homo sapiens
aaaaaaaaaaaaaaaaaaaaaaaaaaaaaaaaaaaaagatgtgtagggagcaattttggagttattcatttggtcatttgatatgtagttttagttttggbgctgatagagcccagaatgtaccctgaatttgatgaacattctgatatatgggggagctcattgtcccccacttacctttttgcctctcagaatatcttt

SEQ ID NO: 10445 - DNA, 201 bp, Homo sapiens
gcaggtgtgggtagggatttcatttagattgacaggttgtcacattaaagctgagagccctgaagttcaagcaatggttagccaggcaaagatcagaggcytagagatagggaaatccattccaggcagagagactgggggtgcctgtcccctaggtcagggaacagaagaaagccagtggcactggtggagtgaataaga

SEQ ID NO: 10446 - DNA, 201 bp, Homo sapiens
ttgtcaggttatgattatagaatctagtcctactcagtgaaagaactttcatacatgtatgtgtaggacagcatgataaaattcccaagccagaccaaagycaaggtgctttttatcactgtaggttggtgagtgggcgattcggaaactgggcctcgtgaagtatggagaaaaatatgctggtaactatagtggaggcaa

SEQ ID NO: 10447 - DNA, 201 bp, Homo sapiens
ggggctggaaaatcatcaactttcaagatgttaacaggagataccactgttaccagaggagatgctttccttaacaaaaataggtgagaaaagaagtggcytgtattttgctgcaaagactttgtttttaatttatttaaagaaataggttgttatttttgattacagtggtatttttagagttcataaaaatgttgaaat

SEQ ID NO: 10448 - DNA, 201 bp, Homo sapiens
catattcctcacctactgaaattttacccatcaaccagaccgtgggtgatggaacacagcatgggctagttcttcttatatatgatctcatttaattttcwctggaactctgagataggtagcatttcagcccactcaagttgactcaaatttttgtaatcatcaatatattttaaaataactttatatttgacctgtaat

SEQ ID NO: 10449 - DNA, 201 bp, Homo sapiens
atctctacccaatcaagcaacgatgctcgttaagaggtaaaagtggattttaaaggcttctgtatttatgccaggatggagcaattagtcatcgagaagaragggaccctgtatgtcaagagaatgatttcagagaatccaatacaatttaagaaaaagcatggggctgggcgcagtgattcactcctgtaatcccagcac

SEQ ID NO: 10450 - DNA, 201 bp, Homo sapiens
cgggccaacctgcaaaagggagagaaccctagccattatggaattactgctttcaatcatcccctgaatctcaccaagcagcagctctcagaggtggctcygtaagtgtggctgtgtctgtatagatggagtggggcaagggagagggttatggagaaggggagaaaaatgtgaatctcattgtaggggaacagctgcaga

SEQ ID NO: 10451 - DNA, 201 bp, Homo sapiens
ctgctgtgatggggtatcttttcagggaggagccaaagcgctcattgtctgtgcttctcctcctttttctgcggtccctggctccccacctgactccaggygaacaagaccttccaggaactggctgtgttccatgatctggaaggcatgtgggaggaactcagccccaagatctggaccttcatggagaacagccaagaa

SEQ ID NO: 10452 - DNA, 201 bp, Homo sapiens
gttgattacctgtggtttggttttaggtactgggaccctggtcctcgagctgacccctttgaggacatgcggtacgtctgggggggcttcgcctacttgcrggatgtggtggagcaggcaatcatcagggtgctgacgggcaccgagaagaaaactggtgtctatatgcaacagatgccctatccctgttacgttgatgac

SEQ ID NO: 10453 - DNA, 201 bp, Homo sapiens
tgggttttaatgtcaggctgttcttttaggtatggcggcttttccctgggtgtcagtaatactcaagcacttcctccgagtcaagaagttaatgatgccaycaaacaaatgaagaaacacctaaagctggccaaggtaaaatatctatcgtaagatgtatcagaaaaatgggcatgtagctgctgggatataggagtagtt

SEQ ID NO: 10454 - DNA, 201 bp, Homo sapiens
cctacttgcaggatgtggtggagcaggcaatcatcagggtgctgacgggcaccgagaagaaaactggtgtctatatgcaacagatgccctatccctgttasgttgatgacatgtaagttacctgcaagccactgtttttaaccagtttatactgtgccagatgggggtgtatatatgtgtgtgcatgtgcatgcatgtgtg

SEQ ID NO: 10455 - DNA, 201 bp, Homo sapiens
tccccatctgcttgcctccagacccacattcacacccgagccactgggttggaggagcatctgtgagatgaaacaccattctttcctcaatgtctcagctrtctaactgtgtgtgtaatcaggccaggtcctccctgctgggcagaaaccatgggagttaagagattgccaacatttattagaggaagctgacgtgtaact

SEQ ID NO: 10456 - DNA, 201 bp, Homo sapiens
ctggtaaaagtctaccgagatgggatgaaggtggctgtcgatggcctggcactgaatttttatgagggccagatcacctccttcctgggccacaatggagyggggaagacgaccaccatgtaagaagagggtgtggttcccgcagaatcagccacaggagggttctgcagtagagttagaaatttataccttaggaaacca

SEQ ID NO: 10457 - DNA, 201 bp, Homo sapiens
atacatttttaggataaaccatgaatgacacccgtttcttctccctcaccctcccttccctcccattttttttttttttttttagaagctgaataatatcmatgatatcctgaagtccgtgttcttgatcttcccacatttttgcctgggacgagggctcatcgacatggtgaaaaaccaggcaatggctgatgccctgga

SEQ ID NO: 10458 - DNA, 201 bp, Homo sapiens
tattctctgtggttggtggtggtggtgggatgtgtgtgtgtgtgtgtgtgtgtgtgtgtgtgtgtagggatcaggatgcgggaggagctgggttctgcttktattggttctctgttttgcattgaatagtgtgtttccttgtatggctatctatagcttttcaaggtcaccagaaattatcctgtttttcaccttctaaac

SEQ ID NO: 10459 - DNA, 201 bp, Homo sapiens
cagtgctgacaatcttatactctaggttgaacctccggggaaggtgcccttgcttgatggcatgtttaccaggggttctagagcctcaatcacagattctstctagctcacatgaagttaatgaaaatgaatgtgcttccctacaaattagagaggctttgaggaaaaatcagattaaatgcactcctgcttgaacttatg

SEQ ID NO: 10460 - DNA, 201 bp, Homo sapiens
attgtatccaggtgtttataggctccctgagttcctgacttgagcctatctatgggtttagagttcaaggctctttaccagtgctgacaatcttatactcyaggttgaacctccggggaaggtgcccttgcttgatggcatgtttaccaggggttctagagcctcaatcacagattctctctagctcacatgaagttaatg

SEQ ID NO: 10461 - DNA, 201 bp, Homo sapiens
ccttcctggcattgtttggctcctcattgttctggaatctcatgtccatctcatgtatttgccttggttcacacttgatcttctgctcatattcctcacctactgaaattttacccatcaaccagaccgtgggtgatggaacacagcatgggctagttcttcttatatatgatctcatttaattttcactggaactctgag

SEQ ID NO: 10462 - DNA, 201 bp, Homo sapiens
gctgtagaggtgacatcagcccagccagtggatgggggcttgggaaacattgcttcccattattgtcatgctggagggccctttagcccatcctctcccccgccaccctccttattgaggcctggagcagacttcccagacctggtagtgcttcagggccctggtatgatggacctatatttgctgcttaagacatttgct

SEQ ID NO: 10463 - DNA, 201 bp, Homo sapiens
agaaatgataaagttctagagtttaaaccagactcagatttgagttttttttttttttttttttttttttttttttttttttttttttttaaaggctacaraactgtgctttccttgggcagtaaaagaggcaatgggcaatgggggacctgatgacaaagggaagcaaagctgtcttaggggtggcatggaggaggtgct

SEQ ID NO: 10464 - DNA, 201 bp, Homo sapiens
gatgatgctgagcttggctcatacctgtgctttgctttcaggccagtacggaattcccaggccctggtattttccttgcaccaagtcctactggtttggcraggaaagtgatgagaagagccaccctggttccaaccagaagagaatatcagaaagtaagtgctgttgacctcctgctctttctttaacctagtgctgctg

SEQ ID NO: 10465 - DNA, 201 bp, Homo sapiens
gagctctggcctttctgtccatacctgaacaggtccttgggttaagagcccctcgtccagggcctattaatcttgatcctcataagcagcatccatgtatwacggccgcaaaccaaactgtgccagaccgaatcctaggaccaagcccaaatatgtcccatcatccttttggtaagaagctcattgtaagaaagaaagagg

SEQ ID NO: 10466 - DNA, 201 bp, Homo sapiens
actaatgcgttcctcgtttttacagttttattatttctagaatgttacataaatggaaccatacagtaggtatccttttgatactggctttttttttttttcactcagcagtattcccttagatctatccaagttgtgtgtgtcaacagttcattcctcttcactgctgagtagtgttccctgggaggggtgtatcacagt

SEQ ID NO: 10467 - DNA, 201 bp, Homo sapiens
actggagatgagatacacaaaacgtcttgagtacacagtagctgcccaatattggctgtaagtattataaatctacaagctgtgaattaattttacctctstggatcctgttgatatttctagaccattccacctagtggggccatttcctacctgagtcacccgtggtgtcaaatagaatgtcatgtggcctcctgagtt

SEQ ID NO: 10468 - DNA, 201 bp, Homo sapiens
ctgggaaaagacattcgctctgagatgagcaccatccggcagaacctgggggtctgtccccagcataacgtgctgtttgacatgtgagtaccagcagcacrttaagaataggccttttctggatgtgtgtgtgtcatgccatcatgggaggagtgggacttaagcattttactttgctgtgtttttgttttttcttttttt

SEQ ID NO: 10469 - DNA, 201 bp, Homo sapiens
ttcccaagtgcttccacaaaccattaaataattccacaaaccattaaaataattaatgctagggaattttaggaaaacattggtttacaatcagaaggacmggggaagtgggtcttcagccttcacgatgactacaagccatttaagggactagaattgctactgttgtcagagcaatttaggagtctgtatttgagcacc

SEQ ID NO: 10470 - DNA, 201 bp, Homo sapiens
tgattcatcaagaaataactagaatggcaagttaaaatttaagctgtttcaaagatgcttctgcatttaaaaacaaatttatctttgattttttttccccycagcaaataagacttattttattctaattacaggatgaacccaccacaggcatggatcccaaagcccggcggttcttgtggaattgtgccctaagtgttg

SEQ ID NO: 10471 - DNA, 201 bp, Homo sapiens
aggaagtatattttgctgaatcagaaagaaaagtgatttatttcaggttgctgatgcttagattgttagagttggaaagatctggcttgcatcttgtacarctgacagaactggggctcaggggggcacaggtgcccagagttggtcagtcaggaaagtagcaccagaaccagtctcctggtggccctacagttgcagacc

SEQ ID NO: 10472 - DNA, 201 bp, Homo sapiens
agcacccgcatagtgttccagaatgacatatctgactgtaacctggacacgtgtgatatgttgtctcccctgcagatgagcatttgaaatctcaaccctcrtatttctacgagtgcaggcctataatggaccctgggcacattttttttttttttgagatgcagtctcgctctgtttcccaggctggagtgcagtggcacg

SEQ ID NO: 10473 - DNA, 201 bp, Homo sapiens
ttgagtactcagagacatgacgtgacttttcaaaggctgtaagctgacgagggacatagctagggttcagacttgagtttttctttttctttttctttttcttttttttttaagactgagtcttgcttttgtcgcccaggctggattgcagtggtgcttggctcactgcaacctctgcctcccgggttcaagcaattctcc

SEQ ID NO: 10474 - DNA, 201 bp, Homo sapiens
aaaatacacatatttgccaggcaggcgtggtggcgcacacctgtaatcccagctactgaagaggctgaggcacaagaatcgcttgaacccaggaggtggargttgcagtgagctgagatcactccactgcattccagccagcgtgacagagtgagactctgtctcagaaaaagaaaaaaaagatagaagttttcttctgta

SEQ ID NO: 10475 - DNA, 201 bp, Homo sapiens
aattttaaagtaaggtatatttctctacagggatctttgcaaccctaagtaactggcctaaaaagttagagaagctgacttgtgcagacatttgcagcctrttggtcttttttgtgctgtgaatcatagagggtgaaaggttattatgaatggtacaaaactttgttacaaaaccattttcttggactgttttgggctgct

SEQ ID NO: 10476 - DNA, 201 bp, Homo sapiens
caactgtgatgaggattatgaaggaaaaaatccggcaaactatggtactggtgttagatactagcaggtgtgggtagggatttcatttagattgacaggtygtcacattaaagctgagagccctgaagttcaagcaatggttagccaggcaaagatcagaggcttagagatagggaaatccattccaggcagagagactgg

SEQ ID NO: 10477 - DNA, 201 bp, Homo sapiens
accacgcccagctattttttgtatttttagtagacatagggtttcactatgttgcccagctggtctcgaactcctgagctcaagtgatctgcccacctcgkcctcccaaagtgttgggattaaaggcatgagtcaccgtgcctggtcccatgttataattttaaagtaaggtatatttctctacagggatctttgcaaccc

SEQ ID NO: 10478 - DNA, 201 bp, Homo sapiens
agtatcttatcaaacatccatgaagtacatcagaacatgggctactgccctcagtttgatgccatcacagagctgttgactgggagagaacacgtggagtyctttgcccttttgagaggagtcccagagaaagaagttggcaaggtactgtgggcacctgaaagccagcctgtctcctttggcatcctgacaatatatacc

SEQ ID NO: 10479 - DNA, 201 bp, Homo sapiens
ttaaactcctatgcacttatttaccctttaatgagcctctttacttaagtacagtgtgaggaacagcggcatcaggatcacttgggaacttgttagaaatwcagcaacttgggcccagctcagacctactgaatcagaatcaggagcaattctctggtgtgactgtgtcacagccaggtatcaactggattctcatacata

SEQ ID NO: 10480 - DNA, 201 bp, Homo sapiens
gcctaggaggtggaggctgcagtgagctgagatctgtctcactctgttgcccaggctggagtgcagtggcgcgatctcgactcactgcaacctccgcctcycaggcttaagtgattctcatgcctcagcctccgagtacctgggactacaggcacctgccaccacgcccagctattttttgtatttttagtagacataggg

SEQ ID NO: 10481 - DNA, 201 bp, Homo sapiens
tctcatgctctcacctgttttctttggatggcctttagccaaggtgatagatccctacagagtccaaagagaagtgaggaaatggtaaaagccacttgttytttgcagcatcgtgcatgtgatcaaacctgaaagagcctatccatatcacttcctttaaagacataaagatggtgcctcaatcctctgaacccatgtatt

SEQ ID NO: 10482 - DNA, 201 bp, Homo sapiens
gaggatcgcttgagcctaggaggtggaggctgcagtgagctgagatctgtctcactctgttgcccaggctggagtgcagtggcgcgatctcgactcactgsaacctccgcctctcaggcttaagtgattctcatgcctcagcctccgagtacctgggactacaggcacctgccaccacgcccagctattttttgtattttt

SEQ ID NO: 10483 - DNA, 201 bp, Homo sapiens
aaaatcctgcttgtctgtgccaaagggataattgtgaaagcacttttgaaatacttaatgagttgattttcttcaaattaaaaaaaatatataaatgtatmtgtgtatgtacatgtgtgtacacatacacacctttatacatacagcccatttaaaacaagctccactttggagtgctctacgtcaccctgatgccgaata

SEQ ID NO: 10484 - DNA, 201 bp, Homo sapiens
ctactcgggaggctgaggcaggaggatcgcttgagcctaggaggtggaggctgcagtgagctgagatctgtctcactctgttgcccaggctggagtgcagwggcgcgatctcgactcactgcaacctccgcctctcaggcttaagtgattctcatgcctcagcctccgagtacctgggactacaggcacctgccaccacgc

SEQ ID NO: 10485 - DNA, 201 bp, Homo sapiens
ctttacacttactgatgaaatgcttttcctttctttctctcccagcccctgtacttaagtgcttcaataggctctcattatatatgatttttaggttttgyttatcagcttcttcgcttttataatctgaaaagatggcatatgaatttttataaaaagggacactttcttcttctcaaattgtatatttttattgtactt

SEQ ID NO: 10486 - DNA, 201 bp, Homo sapiens
taactatcaactgtgatgaggattatgaaggaaaaaatccggcaaactatggtactggtgttagatactagcaggtgtgggtagggatttcatttagattkacaggttgtcacattaaagctgagagccctgaagttcaagcaatggttagccaggcaaagatcagaggcttagagatagggaaatccattccaggcagag

SEQ ID NO: 10487 - DNA, 201 bp, Homo sapiens
tcccaccactttcggatgccacggcgggcagatcacgtgaggtcagcagtttgagaccagcctggccaacatggtgaaaccctgtctctacaaaaatacamaaaatagccgggcgtgatggtgggcacctgtaattccagctactcgggaggctgaggcaggaggatcgcttgagcctaggaggtggaggctgcagtgagc

SEQ ID NO: 10488 - DNA, 201 bp, Homo sapiens
atggcatatgaatttttataaaaagggacactttcttcttctcaaattgtatatttttattgtactttccttcaaaacccccttttaaaaagtaagcagtrgataaataaattcagtgaagcatccatatgactcttaagtgagtgtaggggaagggaggtcaccagatcactgtgagtgaagatggtggagaggtgagga

SEQ ID NO: 10489 - DNA, 201 bp, Homo sapiens
aaaagaatgaactatccaaaaattaaaactcctcatttatgagcttttagagaattttacagagtagatggaaactctctgcatcctttccccacttctastttcacctgacacatttcttccctgtccttactcctgggccggcagcagtggtcatgattccaatcccagcttggccaccatctgcctcagtggcctagg

SEQ ID NO: 10490 - DNA, 201 bp, Homo sapiens
tctggaccctgttcccagatcataccctagaatgtgaccttagaaacacacttcaggattcatacctttgattgaccatcaaaaagtttttgtatcggccwggtgtggtggctcacgcctgtaatcccaccactttcggatgccacggcgggcagatcacgtgaggtcagcagtttgagaccagcctggccaacatggtga

SEQ ID NO: 10491 - DNA, 201 bp, Homo sapiens
gggtggtaaatcctagcagctaatattggttcccaaataaccagatgacaaggatagagaaggacacagacacggcctatctggatttcatggtgcctttsattttccacatgaaggttgtgtagggaagatagaagcatgagatgagatgataatatagttatctggattcatcactggccagctgaaccatatgaactc

SEQ ID NO: 10492 - DNA, 201 bp, Homo sapiens
acacctggctaattgttgtatttttagtagagacggggtttcaccatgttggttggccagactggtcttgaactcctgacctcaggtgatccgtctgcctyggcctcccaaagtgttggaattacagacatgacccactgcacccggcctgttgtcagtattcttaaacatagacactaactgtaggctgacagcctagca

SEQ ID NO: 10493 - DNA, 201 bp, Homo sapiens
cttcaggacctgacaggaagaaacatttcggattatctggtgaagacgtatgtgcagatcatagccaaaaggtgactttttactaaacttggcccctgccktattattactaattagaggaattaaagacctacaaataacagactgaaacagtgggggaaatgccagattatggcctgattctgtctattggaagtttag

SEQ ID NO: 10494 - DNA, 201 bp, Homo sapiens
tgatttccgtcttttctctctgccttttccccaagggccaggacccctggatctctgggcagagcagacgcaggcccctataatagccctcatgctagaarggagccggagcctgtgtataaggccagcgcagcctactctggacagtgcagggttcccactctcccaactccccatctgcttgcctccagacccacattc

SEQ ID NO: 10495 - DNA, 201 bp, Homo sapiens
tttgtggttgttacggaatgatcctgtgctcctgaggcaacagaaaggccaggccatctctggtaatcctactcttgctgtcttccctttgcagagacacrccctgccaggcaggggaggaagagtggaccactgccccagttccccagaccatcatggacctcttccagaatgggaactggacaatgcagaacccttcac

SEQ ID NO: 10496 - DNA, 201 bp, Homo sapiens
aaaactccatctcaaaaaacaaattaaatccagagatttaaaagctctcagaggctgggcgcggtggcttacacctgttatcccagcattttgggatgccraggcgggcaaagcacaaggtcaggagtttgagaccagcctggccaacatagtgaaaccctgtctctgctaaaaacatagaaaaattagccgggcatggtg

SEQ ID NO: 10497 - DNA, 201 bp, Homo sapiens
caacatggggaaaccctgtctctactaaaaatacaaaataagctgggcgtggtggtgcgtgcctgtaatcccagctacttgggaggctgaggcaggagaaytgcttgaatctgggaggcggaggttgcagtgagctgagttcatgccattgcattccagcctgggcaacaagagcgaaaccatctcccaaaagaaaaaaaa

SEQ ID NO: 10498 - DNA, 201 bp, Homo sapiens
tgagctgcagtcttggtgctgggctggtgttgggtctgggcagccaggacttgctggctgtgaatgatttctccatctccaccccttttgccatgttgaarccaccatctccctgctctgttgcccctttgaaatcatatcatacttaaggcatggaaagctaaggggccctctgctcccattgtgctagttctgttgaat

SEQ ID NO: 10499 - DNA, 201 bp, Homo sapiens
tccctatccctctcccctcctcctccggctacacacatgcggaggaaaatcagcactgccccagggtcccaggctgggtgcggttggtaacagaaacttgyccctggctgtgcccctaggtcctctgccttcactcactgtctggggctggtcctggagtttgtcttgctctgtttttttgtaggtggaatgcagagaaag

SEQ ID NO: 10500 - DNA, 201 bp, Homo sapiens
attaactgcaaattaaaatcttagtctcttgcctctttaatccaggcttcttcatactataccagaatttaggataactattacagtgccctttataggaragaaagaagaaattgtgtctgtagatgtctgttcctttcagcttaaaatggacactgaaatgttaaatattggactggcctcatttatttctcctgtctg

SEQ ID NO: 10501 - DNA, 201 bp, Homo sapiens
ctcgaaggaactatagctggttttctcaccagactgattaacatatagtatggtttggtacctgttaaatgagtctctctctacaggttttcatcttctaytttaagaaccccttcctggcattgtttggctcctcattgttctggaatctcatgtccatctcatgtatttgccttggttcacacttgatcttctgctcat

SEQ ID NO: 10502 - DNA, 201 bp, Homo sapiens
actaggtgctggacagaggtcaaaagacttttaagaatctgccaccattaatgatctctttctgcttggcattcaaggctctttgaaataagactgtgacscactttgatagttttgtcctggattataagacacatgctcgaaggaactatagctggttttctcaccagactgattaacatatagtatggtttggtacct

SEQ ID NO: 10503 - DNA, 201 bp, Homo sapiens
cacactcttctccagagccaacctggcagcagcctgtgggggcatcatctacttcacgctgtacctgccctacgtcctgtgtgtggcatggcaggactacrtgggcttcacactcaagatcttcgctgtgagtacctctggcctttcttcagtggctgtaggcatttgaccttcctttggagtccctgaataaaagcagca

SEQ ID NO: 10504 - DNA, 201 bp, Homo sapiens
gctagttctgttgaatcccgttttccttttcctatgaggcacagagagtgatggagaaggtccttagaggacattattatgtcaaagaaaagagacttgtyaagaggtaagagccttggctacaaatgacctggtgttcctgctcattacttttcaatctcattgaccttaacttttaaactataaaacagccaatattta

SEQ ID NO: 10505 - DNA, 201 bp, Homo sapiens
caattttttacttggttcataatgaaaactatactattgcttcagtcagatgtttgcgaatagctgtgtgatctcaaaatgttttcctatgtgatctatakaaaatggaatgatagagtattaggctgtaagggcctaagaaacaaaggaaaaagagaagtgaactgttagtttagttgtaaaacctaactttggtgaatt

SEQ ID NO: 10506 - DNA, 201 bp, Homo sapiens
tgttccagaatgacatatctgactgtaacctggacacgtgtgatatgttgtctcccctgcagatgagcatttgaaatctcaaccctcgtatttctacgagwgcaggcctataatggaccctgggcacattttttttttttttgagatgcagtctcgctctgtttcccaggctggagtgcagtggcacgatatggctcactg

SEQ ID NO: 10507 - DNA, 201 bp, Homo sapiens
tgagtagctgggattacaggcatgcgccaccacacccggctaattttgtatttttagtagagacggggtttcttcatgttggtcaggctggtctcgaactyccgacctcagttgatccacccgtcttggcctcccaaagtgctgtattagccccattttatatccaaggaaactgaggcttagggagatttaaataggggg

SEQ ID NO: 10508 - DNA, 201 bp, Homo sapiens
gtgatttaattagcattcaataaaaattcatgttgaatttttctttagtacttctttcttaatataatacatcttcttgaccaagtccaagaggaacctgygttggacagttttcatatgagatcaaattctgagagagcaagatttaaccctttttggttcaccttctgatcctcccctaaggaggtatacatgaaatat

SEQ ID NO: 10509 - DNA, 201 bp, Homo sapiens
gacagggtcctctgaagccacggctgccagtgcatgtgtcccagggaaagctttttcctttagttctcacacaacagagcttcttggaagccctccccggyaaaggtgctggtggctctgccttgctccgtccctgacccgttctcacctccttctttgccatcaggaggacagtgtttctcagagcagttctgatgctgg

SEQ ID NO: 10510 - DNA, 201 bp, Homo sapiens
agtgaagcctgtcatctactggctctctaattttgtctgggatatggtaaggacacaggcctgctgtatctttctgatgtctgtcagggccatggattgayatggataagaaagaaagagctctggctatcatcaggaaatgttccagctactctaaagatgtatgaaaaagaaatagccagaggcaggtgatcactttca

SEQ ID NO: 10511 - DNA, 201 bp, Homo sapiens
ttctcatctgaaatgcaaaggaaggaggagttggtttaattcaataagtttcagttgagtaaacatgatttagtgagacactgttcttgcttctgactcaycatttggaaaatctctctaaaataaaattggactctccatctcggacatcattttgggtgtaggttttgcttttttttttgagatggagtctcgttatgt

SEQ ID NO: 10512 - DNA, 201 bp, Homo sapiens
atttgaaatctcaaccctcgtatttctacgagtgcaggcctataatggaccctgggcacattttttttttttttgagatgcagtctcgctctgtttcccargctggagtgcagtggcacgatatggctcactgcaacctccacctcctgggttcaagagattctcctgcctcagcctcctgagtagctgggactataggcg

SEQ ID NO: 10513 - DNA, 201 bp, Homo sapiens
acctcttccagaatgggaactggacaatgcagaacccttcacctgcatgccagtgtagcagcgacaaaatcaagaagatgctgcctgtgtgtcccccaggkgcaggggggctgcctcctccacaagtgagtcactttcagggggtgattgggcagaaggggtgcaggatgggctggtagcttccgcttggaagcaggaatg

SEQ ID NO: 10514 - DNA, 201 bp, Homo sapiens
tttgcctcagtttcatcatctgtaaaataggtatttgtgtttgtgtataatgtgaaccgtataatataatgcttggcctatagtgaaatttattcatacgmgtgttttcagtgattttaaaagcttgctttaggccgggcgcgatggcttctgcctataattccagcactttgggaggccaaggtgggcggatcatgaggt

SEQ ID NO: 10515 - DNA, 201 bp, Homo sapiens
acttatatagcactgtgtggcaagtactgtttgaaatgtttttcacgtgtttattcattgtatttattttgagatagggtcttgctctgttgcacagggtrgagtgcagctgcacagacaaggctcactgcaacctcagcctcctgcgctcacgtgatcctcatacatcagcctcttaaggagctggggccacaggcacgc

SEQ ID NO: 10516 - DNA, 201 bp, Homo sapiens
cctcctagtgtaggatttgtctcagccactgcttgttgtcctggctgccaacgttctcatgaaggctgttcttctatcagtgtgtcaacctgaacaagctrgaacccatagcaacagaagtctggctcatcaacaagtccatggagctgctggatgagaggaagttctgggctggtattgtgttcactggaattactccag

SEQ ID NO: 10517 - DNA, 201 bp, Homo sapiens
acacttgttttgtttatgctgagagaaggcctactccaaaaaatgcaaccatcttcgtatctgcatgtggatacaaccatgaatggccaaagttattgcartgttgaatagacacttatatagcactgtgtggcaagtactgtttgaaatgtttttcacgtgtttattcattgtatttattttgagatagggtcttgctct

SEQ ID NO: 10518 - DNA, 201 bp, Homo sapiens
ccaccatgcctggctagtttttgcattttcagtagagacagagtttcaccatgttggccaggatggtctcgatttcctgacctcttgatccacccgcctcrgcctcccaaagtgctgggattacaggcgtgaggcaccgcgcccgacccctggacacattttgacttagaacatattttcggtttgtgtgagacagtgcat

SEQ ID NO: 10519 - DNA, 201 bp, Homo sapiens
gtgaccccctgcccctgcccaccagagaacaaccccctttgactgtaattttccattaccttcccaaatcctataaaacggccccacccctatctcccttygctgactctcttttcggactcagcccacctgcagccaggtgaaaaaaacagctttattgctcacacaaagcctgtttggtggtctcttcacacagacgca

SEQ ID NO: 10520 - DNA, 201 bp, Homo sapiens
cctaggtgacagggtgagactccgtctcaaaataaaaaaaaaaaaagaaaaggaaaggctgtgtgtgtgtgtatgtgtgtgtgtgtgtgtgtgtgtgtgtgtaacagcaccatcacactgtttgagttgaggagcacatgctgagtgtggctcaacatgttaccagaaagcaatattttcatgcctctcctgatatggcga

SEQ ID NO: 10521 - DNA, 201 bp, Homo sapiens
taaaagtctaccgagatgggatgaaggtggctgtcgatggcctggcactgaatttttatgagggccagatcacctccttcctgggccacaatggagcgggraagacgaccaccatgtaagaagagggtgtggttcccgcagaatcagccacaggagggttctgcagtagagttagaaatttataccttaggaaaccatgct

SEQ ID NO: 10522 - DNA, 201 bp, Homo sapiens
ggaagcatcaggtaggtagcagtttgcaggagcactgattctgagggacactaactgggcctaagaacagctactggctgtcatgaggaataactaggagctagccatagaggggtagcagtgaatcatttctctagcgatgtaaatcttgctcaatttattctgtctatataactcaatattactgaagtttgcctaaag

SEQ ID NO: 10523 - DNA, 201 bp, Homo sapiens
ggtgctttaaggagacaattagagatcaatctggaaaacttcatttgaatttttaatacataagaaaacaataagaaatagttaaaaatatatatttatawaatatatatgtgtgtgtgtgtgtgtgtgtgtatatatatatatatattttatttatttatttttttttgagatggagtctcgctctgttgcccaggctgg

SEQ ID NO: 10524 - DNA, 201 bp, Homo sapiens
ctgaccgagagtaaccccgtctggctcagctcagctcagcaaagggctttcctcctccgccttcctgagctgctctccctcctctcctttcctccttctttcccagcctcccccaagctccttcacccctctcttccctctcctccctcctcccaccttccttgtcctctatgctcagagaactgaaggaacactgaatgg

SEQ ID NO: 10525 - DNA, 201 bp, Homo sapiens
tccttaactctcttcctgatttctaaaggaagtatattttgctgaatcagaaagaaaagtgatttatttcaggttgctgatgcttagattgttagagttgsaaagatctggcttgcatcttgtacagctgacagaactggggctcaggggggcacaggtgcccagagttggtcagtcaggaaagtagcaccagaaccagtc

SEQ ID NO: 10526 - DNA, 201 bp, Homo sapiens
tgagcaaaacagtatagtggaaagaatgagggctttgaagtccgaactgcattcaaattctgtctttaccatttactggttctgtgactcttgggcaagtkacttaactactgtaagagttagtttccctggaagatctacctcctagctttgtgctatagatgaaatgaaaaaaatttacatgtgccagtactggtgaga

SEQ ID NO: 10527 - DNA, 201 bp, Homo sapiens
gttaccattcagggtcttcaaccctcattctagggacttccagtaacttctcccaccttccctcttctcagtaagacatgggtattgtcttattctgtttstgctgctagaagaaaattctcgagactgagtaatttatacacaatagaaatttacttctcacagttctggaggctgggaaatccaaaatcaaggtgttgg

SEQ ID NO: 10528 - DNA, 201 bp, Homo sapiens
atgcctttagccttgatcataaccttgaactctaatctcaaattctcacttgcctagtggattgctccatttagatagtatatagataccccaacctggayatgtcctagttttctttccccttggaacttaatgcttttcttgccatccctgtcacactcagtggcactaccatccactcggttgcccaagctggctctt

SEQ ID NO: 10529 - DNA, 201 bp, Homo sapiens
gggggctgccccccacctccctcccggacggggtggctggccgggcgggggctggcccccacctccctcccggacggggcggctggccgggcgggggctgscccccacctccctcccggacggggcggctggctgccctgctaatttttgtattttcagtagagatggggttttaccatgttggtcaggctggtctcgaac

SEQ ID NO: 10530 - DNA, 201 bp, Homo sapiens
ggacggggcggctggccgggcgggggctgccccccacctccctcccggacggggtggctggccgggcgggggctggcccccacctccctcccggacggggyggctggccgggcgggggctgccccccacctccctcccggacggggcggctggctgccctgctaatttttgtattttcagtagagatggggttttaccatg

SEQ ID NO: 10531 - DNA, 201 bp, Homo sapiens
tgttcctgctcattacttttcaatctcattgaccttaacttttaaactataaaacagccaatatttattaggcactgatttcatgccagagacactctggkcatgaaagaaagtaatgataatagttaattttatatagcgttgttaccatttacaaccttttttttttttttaacctctatcatctcaattaaagtgcag

SEQ ID NO: 10532 - DNA, 201 bp, Homo sapiens
actgcagcctcgaattcctgggctcaagtgatcctcctgccttagcctcccgaagggctgggatgacaggcatgagccactgcacctggccaactttttgytgattgcgaatagcactcttgtcaatttcggagagaagctgagactggcatatgtcagtatggatccccacttagagacctgtgtttatctgcactgaca

SEQ ID NO: 10533 - DNA, 201 bp, Homo sapiens
gtgttcctgctcattacttttcaatctcattgaccttaacttttaaactataaaacagccaatatttattaggcactgatttcatgccagagacactctgkgcatgaaagaaagtaatgataatagttaattttatatagcgttgttaccatttacaaccttttttttttttttaacctctatcatctcaattaaagtgca

SEQ ID NO: 10534 - DNA, 201 bp, Homo sapiens
tggcaaaagaagaaatgataaagttctagagtttaaaccagactcagatttgagttttttttttttttttttttttttttttttttttttttttttttttwaaggctacaaaactgtgctttccttgggcagtaaaagaggcaatgggcaatgggggacctgatgacaaagggaagcaaagctgtcttaggggtggcatgg

SEQ ID NO: 10535 - DNA, 201 bp, Homo sapiens
aatagagatttcaggtttacatttgaattcagaaacaaagttttctttctcattacagagaacactaaactctacatctcccttcccgagcaaggagctgrctgaagccacaaaaacattgctgcatagtcttgggactctggcccaggaggtaagttgtgtctttccagtaccaggaagcggatcatccactgtatcagt

SEQ ID NO: 10536 - DNA, 201 bp, Homo sapiens
ataagtactcacttcatttctctgtgtctcaggtttcccatttttaggtgagaattaaggggctctgataaaacagaccctaggattgtggacagcagtgrtagtcctagagtccacaagtctgcttttgagtgatgggcccatgtatctggcacatctgcaggcagagcgtggttctggctcttcagatgatgccggtgg

SEQ ID NO: 10537 - DNA, 201 bp, Homo sapiens
taagagccttggctacaaatgacctggtgttcctgctcattacttttcaatctcattgaccttaacttttaaactataaaacagccaatatttattaggcwctgatttcatgccagagacactctgggcatgaaagaaagtaatgataatagttaattttatatagcgttgttaccatttacaacctttttttttttttta

SEQ ID NO: 10538 - DNA, 201 bp, Homo sapiens
ctctttcatgagattgatgaccggctctcagacctgggcatttctagttatggcatctcagagacgaccctggaagaagtaagttaagtggctgactgtcrgaatatatagcaaggccaaatgtcctaaggccagaccagtagcctgcattgggagcaggattatcatggagttagtcattgagtttttaggtcatcgaca

SEQ ID NO: 10539 - DNA, 201 bp, Homo sapiens
atgggacggacagacttggcatgaagcattgtataaatggagcctcaaaatcgcttcagggaattaatgtttctccctgtgtttttctactcctcgatttsaacaggccattttccaaataaagccatgccctctgcaggaacacttccttgggttcaggggattatctgtaatgccaacaacccctgtttccgttacccg

SEQ ID NO: 10540 - DNA, 201 bp, Homo sapiens
tcttcttctcaaattgtatatttttattgtactttccttcaaaacccccttttaaaaagtaagcagtagataaataaattcagtgaagcatccatatgacycttaagtgagtgtaggggaagggaggtcaccagatcactgtgagtgaagatggtggagaggtgaggatcttatgaggccgtgctcaaggctggtagaggt

SEQ ID NO: 10541 - DNA, 201 bp, Homo sapiens
tagtgcatggggcctcattgttttaattagtgacaaaacaacaataataacaacaaaacccccgaagcttcacagatgacatcagaccccaagcctgtgtgtttttcaggtgcccttgaggagctttgtagctggcagaggaggtgaaactgacaaatgtttggcagatggaggagagtaccagaggggtttgagatgagc

SEQ ID NO: 10542 - DNA, 201 bp, Homo sapiens
ggcactgtgtgaatgatgagctgctgttactgtgtggaggggaaatgcacttagtgcttcagagccacttgaaagggataagtgctctagagacaattggrttcaaatgtggagcaggctgagcaagaacagaatgtctcctttgcctgagcctgagtgctgttaatcacatcttcctgccttgggctgagttagagaatc

SEQ ID NO: 10543 - DNA, 201 bp, Homo sapiens
tgcacttatttaccctttaatgagcctctttacttaagtacagtgtgaggaacagcggcatcaggatcacttgggaacttgttagaaattcagcaacttgsgcccagctcagacctactgaatcagaatcaggagcaattctctggtgtgactgtgtcacagccaggtatcaactggattctcatacataggaaatgacaa

SEQ ID NO: 10544 - DNA, 201 bp, Homo sapiens
ttgttataccactgcctgctaacctgttttccttaactctcttcctgatttctaaaggaagtatattttgctgaatcagaaagaaaagtgatttatttcargttgctgatgcttagattgttagagttggaaagatctggcttgcatcttgtacagctgacagaactggggctcaggggggcacaggtgcccagagttggt

SEQ ID NO: 10545 - DNA, 201 bp, Homo sapiens
tcaccatgttggccaggctggtcttgaactcctgacctcaggtgatccacccgcctcgacctcccaaagtactgggattacaggtgtgagccactgcaccsggcccagactcgagtttttcatcttaatgctttttcattgcctgacactttactgagaccaagatagggaacttcacatacagtaccttttctcccaagg

SEQ ID NO: 10546 - DNA, 201 bp, Homo sapiens
aagatctgggtgaatgagtttaggtaagttgctgtctttctggcacgtttagctcagggggaggatggtgttgtaggtgtcttggattgaagaaagccttrgggattgtttgtcactcacacacttgtgggtgccatctcactgtgaggaggacagaagccctgtgaacatgtggagcacacaggggcacagacagattta

SEQ ID NO: 10547 - DNA, 201 bp, Homo sapiens
ccctttagcttttgcaaacctcctttaagacccgatttaaatgcttccctcctcatgaagctcttctggatccactccttcccatcactaagttgaaagtmagatccccttctctttacttccattagacttggattacagcactctttgtatcatgtatttaattctgttttttaattacagttaacatttatttgtctt

SEQ ID NO: 10548 - DNA, 201 bp, Homo sapiens
ttgaaaacaaagttggtacaaaaccctttagcttttgcaaacctcctttaagacccgatttaaatgcttccctcctcatgaagctcttctggatccactcyttcccatcactaagttgaaagtaagatccccttctctttacttccattagacttggattacagcactctttgtatcatgtatttaattctgttttttaat

SEQ ID NO: 10549 - DNA, 201 bp, Homo sapiens
tttgaaatcctgtctttcccatgttgaaaacaaagttggtacaaaaccctttagcttttgcaaacctcctttaagacccgatttaaatgcttccctcctcrtgaagctcttctggatccactccttcccatcactaagttgaaagtaagatccccttctctttacttccattagacttggattacagcactctttgtatca

SEQ ID NO: 10550 - DNA, 201 bp, Homo sapiens
atttacttgctgattttctaatgcacatcacacatagtcatattaaacacacacacacacacacacacacacacacacccctcaagaaacattttctgagrcgtgatttcctgatttcatcaaaaaagaaaagagcgggccaggcacagtgggaagtcaaggtgggtggatcacttgaggtcaggagtttgaaaccagcct

SEQ ID NO: 10551 - DNA, 201 bp, Homo sapiens
ggattacaggcatgagccaccatgcctggccttctttgagaagctggagacatgagttaagtggtgaagaagccaaatctgtatctaaaaaccctacagtwgtgtgcagagctctgaggagagaaggtcccttagattttgagtgtattattatgtcagtgcttgttttacatctctctgttcacgcagtatgtccccttt

SEQ ID NO: 10552 - DNA, 201 bp, Homo sapiens
caaaataaagtttgaaatcctgtctttcccatgttgaaaacaaagttggtacaaaaccctttagcttttgcaaacctcctttaagacccgatttaaatgcytccctcctcatgaagctcttctggatccactccttcccatcactaagttgaaagtaagatccccttctctttacttccattagacttggattacagcact

SEQ ID NO: 10553 - DNA, 201 bp, Homo sapiens
ataaaattgatttccggtggggccttcagttactctccattctacgaagaccacaaatagcattcaggcaaagagcatttattccaacaatggaggagcaytggatttggttcctaaaacaaaataaagtttgaaatcctgtctttcccatgttgaaaacaaagttggtacaaaaccctttagcttttgcaaacctccttt

SEQ ID NO: 10554 - DNA, 201 bp, Homo sapiens
gccttgctccgtccctgacccgttctcacctccttctttgccatcaggaggacagtgtttctcagagcagttctgatgctggcctgggcagcgaccatgasagtgacacgctgaccatcggtaaggactctggggtttcttattcaggtggtgcctgagcttcccccagctgggcagagtggaggcagaggaggagaggtg

SEQ ID NO: 10555 - DNA, 201 bp, Homo sapiens
acattaccctgtggctgcatgactttgtgaataggttagttagcaccctttcagccacttcttcttacctgttaatgagataaaacatgtaattgcttaaraacagtatttggcacataggaagcacttagtgaatatgaattatgattttttttggagtggtgacatctcaaccaagccatttaacccctcagccttact

SEQ ID NO: 10556 - DNA, 201 bp, Homo sapiens
gacccacaagcttatgagatactgttcttccaggaaagcagtggggccagggccaccttttaattgtgtttcttggcctggtcccatctttctcacaatayatagcaacagttatttacttgctgattttctaatgcacatcacacatagtcatattaaacacacacacacacacacacacacacacacacccctcaagaa

SEQ ID NO: 10557 - DNA, 201 bp, Homo sapiens
ggtaatctccaatttaaaagcctcaatagaatgataagattgagcttttctgtagttccatgacctccagcagagtctgcaaggccacagctgcctgaagrttgattctgtaattagaagatgccagggtcatctcagaatagaacctcaagccacccaggctacatttacagaatcagcctctccagaaaaacagcaaca

SEQ ID NO: 10558 - DNA, 201 bp, Homo sapiens
agggtgctgacgggcaccgagaagaaaactggtgtctatatgcaacagatgccctatccctgttacgttgatgacatgtaagttacctgcaagccactgtwtttaaccagtttatactgtgccagatgggggtgtatatatgtgtgtgcatgtgcatgcatgtgtgaatgatctggaaataagatgccagatgtaagttgt

SEQ ID NO: 10559 - DNA, 201 bp, Homo sapiens
ccagacagggtcctctgaagccacggctgccagtgcatgtgtcccagggaaagctttttcctttagttctcacacaacagagcttcttggaagccctcccyggcaaaggtgctggtggctctgccttgctccgtccctgacccgttctcacctccttctttgccatcaggaggacagtgtttctcagagcagttctgatgc

SEQ ID NO: 10560 - DNA, 201 bp, Homo sapiens
gcctttgccacccctgctaagggataacctgaaataccttcaccatcactgccctgtgctgcttttcacctatgccagtctgtctacagtgccagtgtctyctggcattgaaaggggagaatcttttggtcctttgagtatttggttgggttacataaatctccctgaatgaagagcagctgacttaggcaaggggccttg

SEQ ID NO: 10561 - DNA, 201 bp, Homo sapiens
gcccctctccaggaggcattggtgaagaaactaggggagctggttgccacagacagtgatgtactaatcttctctgggaagacagaagaaaagtccccagrgaagaatactacagacttggccttagggacagctaggggtgcagattgctgccaactgcattttttctgaagttggccatatggttgcagtgaatggatt

SEQ ID NO: 10562 - DNA, 201 bp, Homo sapiens
cactgagcctactgtggttcatggataagttggccctgggggcatgtgtgtgcatgcatgtgtgtgcacatgcatgatgagccgggccttgaagggtggtragatttgggtgtgtagaccaatggagaaaggcatttggggcagtgatgatgggtgggggagggaacatggtgatgaatggagctgggtgtggggagccat

SEQ ID NO: 10563 - DNA, 201 bp, Homo sapiens
aacagaggccgggaacggggcggggaggagggagagcacaggctttgaccgatagtaacctctgcgctcggtgcagccgaatctataaaaggaactagtcycggcaaaaaccccgtaattgcgagcgagagtgagtggggccgggacccgcagagccgagccgacccttctctcccgggctgcggcagggcagggcgggga

SEQ ID NO: 10564 - DNA, 201 bp, Homo sapiens
cgtgggtatagaatcatagttacaagcaggcatttcttggggatggggaggactggcacagggctgctgtgatggggtatcttttcagggaggagccaaagcgctcattgtctgtgcttctcctcctttttctgcggtccctggctccccacctgactccaggtgaacaagaccttccaggaactggctgtgttccatgat

SEQ ID NO: 10565 - DNA, 201 bp, Homo sapiens
atctttctcacaatatatagcaacagttatttacttgctgattttctaatgcacatcacacatagtcatattaaacacacacacacacacacacacacacmcacacccctcaagaaacattttctgagacgtgatttcctgatttcatcaaaaaagaaaagagcgggccaggcacagtgggaagtcaaggtgggtggatca

SEQ ID NO: 10566 - DNA, 201 bp, Homo sapiens
gcctggtcccatctttctcacaatatatagcaacagttatttacttgctgattttctaatgcacatcacacatagtcatattaaacacacacacacacacmcacacacacacacacccctcaagaaacattttctgagacgtgatttcctgatttcatcaaaaaagaaaagagcgggccaggcacagtgggaagtcaaggt

SEQ ID NO: 10567 - DNA, 201 bp, Homo sapiens
agttctgttgaatcccgttttccttttcctatgaggcacagagagtgatggagaaggtccttagaggacattattatgtcaaagaaaagagacttgtcaakaggtaagagccttggctacaaatgacctggtgttcctgctcattacttttcaatctcattgaccttaacttttaaactataaaacagccaatatttatta

SEQ ID NO: 10568 - DNA, 201 bp, Homo sapiens
tcaggagactgttttcagtcctagtgaatggtgataattgtaattataacagtagacaacatctcttttacacattttaaatcatgaaaatagaataaccktactgataattttagaaagtggtgattaaaagcacatttaagataatgccttaacacctagtcttttccatatgcatgatgtcttaatcacacattgcaa

SEQ ID NO: 10569 - DNA, 201 bp, Homo sapiens
ttgaatcttgaagattatttttcagaaattgataaagttattttaaaaagcacggggagagaaaaatatgcccattctcatctgttctgggccaggggacwctgtattctggggtatccagtagggcccagagctgacctgcctccctgtccccaggctgactgtcgaagaacacatctggttctatgcccgcttgaaagg

SEQ ID NO: 10570 - DNA, 201 bp, Homo sapiens
gagtggtgggagagactggagaagttgattaattagtaaatgaagttgtctgtggatttcccagatcccagtggcattggatatccatattatttttaaawttacagtgttctatcttatttcccactcagtgtcagctgctgctggaagtggcctggcctctatttatcttcctgatcctgatctctgttcggctgagct

SEQ ID NO: 10571 - DNA, 201 bp, Homo sapiens
cagcagatcaagaaatccagctcaagtaagtaaaaaccttctctgcatccgtttataattggaaattgacctgcaccagggaaagagagtagcccaggtgkctggggcttgttcccattagatcttccccaaggggtttttctccttggtggctggcctgtggggcccctctccaggaggcattggtgaagaaactagggg

SEQ ID NO: 10572 - DNA, 201 bp, Homo sapiens
aaagcttagagagtggtgggagagactggagaagttgattaattagtaaatgaagttgtctgtggatttcccagatcccagtggcattggatatccatatyatttttaaatttacagtgttctatcttatttcccactcagtgtcagctgctgctggaagtggcctggcctctatttatcttcctgatcctgatctctgtt

SEQ ID NO: 10573 - DNA, 201 bp, Homo sapiens
ctgtcccagtgagatgttgacacttgtatgatccctgcttggagacttccctcttctggaacctgccctggctcaggcatgagggctgactgtcacccttygataggagcccagcactaaagctcatgtgttggcagtgttcttgcgggaaggaaaaagaccagccagcccatttgttactgcacaagcaaacagcttctg

SEQ ID NO: 10574 - DNA, 201 bp, Homo sapiens
gtggctcacgcctgtaatcccagcagtttgggagccctaggggagaggatcacttgaacccaagagtttgacgttccagtgagctatgatctccggatcgkaccgcctggacgatggagcaagaccctgtctcaaaaaaaaaaatctttgctttttttttttgtttgtttttgagacggagtctctctctgttgccccagc

SEQ ID NO: 10575 - DNA, 201 bp, Homo sapiens
agtggctcacgcctgtaatcccagcagtttgggagccctaggggagaggatcacttgaacccaagagtttgacgttccagtgagctatgatctccggatcstaccgcctggacgatggagcaagaccctgtctcaaaaaaaaaaatctttgctttttttttttgtttgtttttgagacggagtctctctctgttgccccag

SEQ ID NO: 10576 - DNA, 201 bp, Homo sapiens
ccagcctgggtagacagagcaagaccctgtctcaaaaaaaagaaatgaaagagaaagaaagaaagaggagaggagaggagatgaggggaggggaggggagsagggagggggggaggaaggaaggaaggaaggaaggaaaaaaagatgaaaaaagaaaaaaacaagatgaaacagaggcagaaagactttacgtaaattgct

SEQ ID NO: 10577 - DNA, 201 bp, Homo sapiens
tttttattttcaaattttccataaaaatataaggacttgaagatcaagaaaaaatttctgctttggctcagtgcagtggctcacgcctgtaatcccagcastttgggagccctaggggagaggatcacttgaacccaagagtttgacgttccagtgagctatgatctccggatcgtaccgcctggacgatggagcaagacc

SEQ ID NO: 10578 - DNA, 201 bp, Homo sapiens
ctcccaccacacgagtcccttctccctgctttggctcctcaccagttgtcaggttatgattatagaatctagtcctactcagtgaaagaactttcatacaygtatgtgtaggacagcatgataaaattcccaagccagaccaaagtcaaggtgctttttatcactgtaggttggtgagtgggcgattcggaaactgggcct

SEQ ID NO: 10579 - DNA, 201 bp, Homo sapiens
tatcaaaggtctttggaaataaaaaacagttttttaaaaatatcagaaataaaacaacaaataaataaataaataaaaacacccaaaacaatctgaagcaygagcacctagcagaaaggttcaattatgatctattcatagagtggaatatcaagtagacattacaggacatgttttaagattatattttatgtcatggga

SEQ ID NO: 10580 - DNA, 201 bp, Homo sapiens
tatgtaaggaagttcagggaatagtataagtcactccaggcttgaggcaaaatttacaaatgctgctgactttgtatgtaaggggaggcattttcttagaraagagaggtaggtctctgggattccagtatgccatttccatcctcagtgtttttggccacctgagagaggtctattttcagaaatgcattcttcattccc

SEQ ID NO: 10581 - DNA, 201 bp, Homo sapiens
gatttttcttgggtagcgtgtgtaggaggccagtgtcaccagtagcatatgtggaacagaagtcttgacccttgctatctctgcctagtcctaatggctgrcttttcccaggaaggcttctgcttccatggactgttagattaaccctttatttaggtaaatgagggaacctactttataagcataggaaagggtgaagaa

SEQ ID NO: 10582 - DNA, 201 bp, Homo sapiens
ctgggcatgaaagaaagtaatgataatagttaattttatatagcgttgttaccatttacaaccttttttttttttttaacctctatcatctcaattaaagkgcagagagaccctgggaagaaggtaactatatttattatcccagatgagggaagtgaggcttgtagggaattggtagctgattcaaggtcacccagcagg

SEQ ID NO: 10583 - DNA, 201 bp, Homo sapiens
acaagtgatttaagtttcttttaaacagagaatagtaatacctacctcatattattattgtcagtgtatcatcttacaatcacagtctttctcttagggcygggctcagtgggtggattgacactgcagaaatggccagatctaaaggatcaacatttacgtagctgggaaatgtagctgggacttcagtttcactgccct

SEQ ID NO: 10584 - DNA, 201 bp, Homo sapiens
atttggggagttttctgcatggtagaatagacccaaaggaaaagaaagaaagacagtgactaagatttgggtttgtctgccccaccaaatgctttgagcastttcataaatataaatccttcaggttgggagaaggttgaacatctgaagacactgattcttcagagatgtaatccaaacaaagtgatctttggtgatatg

SEQ ID NO: 10585 - DNA, 201 bp, Homo sapiens
tctgagaagttccccagcttccctctgttccccgtttccacacttagcgaggctcttgtccactgctacatcccccatagccagtccctcagccttgccaytgcttatgctggtctggaaacaattcctagacttgtggggcatctggggaagttctccatctttttttagctggcatgacccaagtggtgtgggcagggc

SEQ ID NO: 10586 - DNA, 201 bp, Homo sapiens
catggggcctcattgttttaattagtgacaaaacaacaataataacaacaaaacccccgaagcttcacagatgacatcagaccccaagcctgtgtgtttttcaggtgcccttgaggagctttgtagctggcagaggaggtgaaactgacaaatgtttggcagatggaggagagtaccagaggggtttgagatgagctaaat

SEQ ID NO: 10587 - DNA, 201 bp, Homo sapiens
gtttcctatctcacagggttgtcctgaggattaaattaagtaattaatataaaatgtgccttgtacatattgggccctaaataaacagtagctactatttrtccttaaagtacaaatggtagtttcagagcttcaaggctgatggctatttatcttactcatactctttgtttagcttcatttttttcccctaatttcatt

SEQ ID NO: 10588 - DNA, 201 bp, Homo sapiens
tctccaattttagctctgtgagatggcactggggaaacagaaatgaacggactagtgtcacaaagctcaggtgggatggacgagatcacttcaaaggtctrtaatcccacgtctataatcccagcactttgggaggccaaggcgggaaaatcacttgaggtcaggagttcgagaccatcctggccaacatggcaaagcctg

SEQ ID NO: 10589 - DNA, 201 bp, Homo sapiens
ccctccatggccgaatccctgcttcccacgaagagaacctcacaaaaatttcccccaagttaaagagtggaattttcttgatttttttttcttttttttttaacggccgtagtttagaacccagacttaaattatgatcttcttttcaaacaaaacttaaagtccttaagttttcatctccccttttatttcaacctattc

SEQ ID NO: 10590 - DNA, 201 bp, Homo sapiens
ttgagttaaacttaaaaaatattcacagttctgaggcaataaccgtggttaagggttattgatctggaggagctctgtctaaaaaattgaggacaggagamtttagacaagggtgtatttggagacttttaagaattttataaaataagggctggacgcagtggcactgagttgagaactgttgcttgctttgcattaaat

SEQ ID NO: 10591 - DNA, 201 bp, Homo sapiens
gactctgaattcagactggtctgactttgagtctcagctccacatctagtaatactatgaccaagccctggttaaaatcatgtttttttttcttcagcctyagtcttctcacatataaaatagggacactgtcatttacctcagttttctgtgaggataaaacaacgacagtgtatatgcaagtattttgtaaattttgta

SEQ ID NO: 10592 - DNA, 201 bp, Homo sapiens
ttagcgtgtttgccaactcccaggccattggtaaagcaggaaggttcttggggcggcggacggtgccagggttatgtgtaggtgcctctttaggtatatcktttatcaaaaagaagcaaagaaataagattaaaaataaacaaagaaaaaagttgtctggcactggcagtaattggcctgcctttgcagcactgataccat

SEQ ID NO: 10593 - DNA, 201 bp, Homo sapiens
ctggcttatcacttggcatttgtgatgatttcctcctacaagggatacattttaagttgagttaaacttaaaaaatattcacagttctgaggcaataaccrtggttaagggttattgatctggaggagctctgtctaaaaaattgaggacaggagactttagacaagggtgtatttggagacttttaagaattttataaaa

SEQ ID NO: 10594 - DNA, 201 bp, Homo sapiens
gaggtagtttgaatacaacttcacttaattttacttccctattcaggcaggaattgccaaaccatccaggagtggaatatgcaacctggcgtcatgggccmgctggttaaaataaaattgatttctggcttatcacttggcatttgtgatgatttcctcctacaagggatacattttaagttgagttaaacttaaaaaata

SEQ ID NO: 10595 - DNA, 201 bp, Homo sapiens
tggcagtcacagacactgcctagggtttctgactcacgctgttgggactgttctatgcagggcaccctcttgtgtggcataggatttgtgcctcaccacasactgttgtagctttgctgtcttgatgatgagtagagggcagtgtccaggccatggtataagcatctactgccccccagggttaccaaaaccaagccaagt

SEQ ID NO: 10596 - DNA, 201 bp, Homo sapiens
gcttcgggaagtgctcggtttcggggactttgatccggagccccacatccccaccacttgcaactcagatgggaccggaggcggtgttaaatggggagackatgtcctagtacgagctctggtgaccccaggactctgcgctgctgcgcttggggcttgcccgacggtggagaccggggagcatctctgggcgtggagacc

SEQ ID NO: 10597 - DNA, 201 bp, Homo sapiens
catctactagacgaatgattttctggaatgattacaagcaggcaagatggtgtagtggaaatagcaaatgtcttcggcatcagacaagttggggtttgtttgtatcctgcctctgcccttcaccgaggttgtgatcttgggcagattgttgagttttaacctagattcctctgactccagatcataaattttcagaaaagt

SEQ ID NO: 10598 - DNA, 201 bp, Homo sapiens
attatatccaacattgctgagaagatgagtaaggaatgtaaatgagtaaaggcaggaatggctattgaatttgttaagacagaggtccttggtgaccttcmtaagagtcatttcagcatgacaaggatgcagacctaactggaatagattttcagggaagactgagaggcaaggaaggggagactgcaaatatatgcaaat

SEQ ID NO: 10599 - DNA, 201 bp, Homo sapiens
gaaagctaaggggccctctgctcccattgtgctagttctgttgaatcccgttttccttttcctatgaggcacagagagtgatggagaaggtccttagaggrcattattatgtcaaagaaaagagacttgtcaagaggtaagagccttggctacaaatgacctggtgttcctgctcattacttttcaatctcattgacctta

SEQ ID NO: 10600 - DNA, 201 bp, Homo sapiens
tttcacccttttgaccaggctggtcttgaactcctgacctcatgatcaacccacctcagcctcccaaagtgctgggattacaggtgtgagccaccacgccmggcctcataagtattttctaaatttatttacagtcatgccatttaaaaggaaagttgtattcctgtctttgttaatatttataagtgattttattcagct

SEQ ID NO: 10601 - DNA, 201 bp, Homo sapiens
gagtacacagtagctgcccaatattggctgtaagtattataaatctacaagctgtgaattaattttacctctctggatcctgttgatatttctagaccatkccacctagtggggccatttcctacctgagtcacccgtggtgtcaaatagaatgtcatgtggcctcctgagttgggtagaattggctgctcatctcaaccc

SEQ ID NO: 10602 - DNA, 201 bp, Homo sapiens
aaaaaaaaaaaaaaaaaagatgtgtagggagcaattttggagttattcatttggtcatttgatatgtagttttagttttggtgctgatagagcccagaatktaccctgaatttgatgaacattctgatatatgggggagctcattgtcccccacttacctttttgcctctcagaatatcttttgatatttttatctgtttt

SEQ ID NO: 10603 - DNA, 201 bp, Homo sapiens
gcctggctaatttttgtatttttagtagagacatggttttagcatgttggccaggctggtcttgaactcctgacctcaagtgatccacccacctcagcctyccaatctgctgggattacaggcatgagccactgcacccagccagagtaccactatttgggcattctttaatgaaaaagaatgaactatccaaaaattaaa

SEQ ID NO: 10604 - DNA, 201 bp, Homo sapiens
tcaaaagggcacaatgttttggtgaggaagaggtgggagaacacgtgccaggtgctaactagggtcatcatttcccccttcacagccagcttcctgtgaaygtgtgtgtgtgtgtgtgtgtgtgtgtgtgtgtgtgtgtgtgtatttcttttgccagcatcactgaatctgtctgctgtctggtattccaggttttggttt

SEQ ID NO: 10605 - DNA, 201 bp, Homo sapiens
gtttctgtagctcagggtgtttatgaattcactaatcccttcccttcagatcccttttattctggtgttatgattgtgactgaaaaaaattgattttttttctatgacatagaatgttgaaaggttgatttcttttctagaggaaagattctttttttctatgtgctacataccccccgaccagggaaaaggcaaatagtg

SEQ ID NO: 10606 - DNA, 201 bp, Homo sapiens
gatttctctctttttttttttttttaagatggagtttcactcttgttgcccaggctggaattcaatggcatgatctcggctcactgcaacctctgcctccygggttcaagtgagacttgatggtctcacttgatggtttcctggctcagcctcctgagtagctgagattacaggcacccactaccatgcccagctactttt

SEQ ID NO: 10607 - DNA, 201 bp, Homo sapiens
actagagaagattgtaggtagagctgaaaagatggaggaattataaggctcagatttctctctttttttttttttttaagatggagtttcactcttgttgyccaggctggaattcaatggcatgatctcggctcactgcaacctctgcctcccgggttcaagtgagacttgatggtctcacttgatggtttcctggctcag

SEQ ID NO: 10608 - DNA, 201 bp, Homo sapiens
tgacaggtggctggctaaggctcaggctcctgtgggggtggtgaggatgacaagaaaggaatgaaggccagagacattgtggagaaaaagtcaacaggaawgggtgactccatgtgagaggaaaggagggtcgtgtctacacaatcactgtcatagatcagcctcctccttgggcgtggccttggccagggggccgcagga

SEQ ID NO: 10609 - DNA, 201 bp, Homo sapiens
ggtgcttggctgatgagatctgtggggtttgtgtatccgagtttagtccttttccattggggttgggccatggtgactggcacttattagctgttagttcktattggaacagaagctggcatttattgggctcttcctgggagtcaggcagggtgacaggtgcatctcacacatcttatttagtcctcacaccaactcttg

SEQ ID NO: 10610 - DNA, 201 bp, Homo sapiens
tccgtgccctagacctgctccccagaggaggggccttgacccacaggacgtgtggtggcgcctggcactcagggacccccagctgccccagccctggtctytggcgcatctcttccctcttgtcccgaagatctgcgcctctagtgccttttgaggggttcccatcatccctccctgatattgtattgaaaatattatgca

SEQ ID NO: 10611 - DNA, 201 bp, Homo sapiens
ggagctccttcgagaggttccatcactgccattgataacaccagcccacatttgcccaggctctgtgggtttattcatttcattgaatccttatgacaccytgcaagatgggggatcgtaaagttgctgggttttttttgtttgtttttttgtttttgaggtggagtttcgctcttgttgcccaggctggagtgcaatggt

SEQ ID NO: 10612 - DNA, 201 bp, Homo sapiens
cagccctgcatcctccgtgccctagacctgctccccagaggaggggccttgacccacaggacgtgtggtggcgcctggcactcagggacccccagctgccscagccctggtctctggcgcatctcttccctcttgtcccgaagatctgcgcctctagtgccttttgaggggttcccatcatccctccctgatattgtattg

SEQ ID NO: 10613 - DNA, 201 bp, Homo sapiens; identical to SEQ ID NO: 1875

SEQ ID NO: 10614 - DNA, 201 bp, Homo sapiens
accgcccctaggagggggtctcctgagagtaggtctggtctgtcccagagggccccggctgcgtgactccgggcagccgttcccctccaaggccgtccctrtagacggggaggggctgctggggactaggggcagaggctgtgaggccagggctgttggagtcctcgtggggcctgcagtttgaggaaagagggaacatta

SEQ ID NO: 10615 - DNA, 201 bp, Homo sapiens
aaagaaaaaaagaataacagccatgtgcccttatagggttcatgcagccctatcctggtgttagcaacaaaagccaacatctcctgagtgctccctgcccyagcaaccttgtgaggtggtggtggaggactatgacattatacccattttacagataaggaaactgaggcccagagaggctgttctgagctcagggtttgc

SEQ ID NO: 10616 - DNA, 201 bp, Homo sapiens
ggctcctagtaattgtagtttttgttgacaatctgcctccctcattagggtactctctcctgagtacccagtggccaggattgctgaatgaatgagtgagrgcagcataaaccctttcttggccatcgtgatgaagcctcagagcctcgcctgaacttggtgactcgcctgacatctgccattttggcttggcccgcgctg

SEQ ID NO: 10617 - DNA, 201 bp, Homo sapiens
cagagtgttctccatgccagtgtcacagagcaggggggctgtggtcggtcgaggttctcaggggtgcggtacgtttgggtgttggctttcagaagtcttcrttgatgtttcttgctccacttctccttcctgatgaattaacctgagagatgagggtccagaaagattggaccccaagcatgtcaccttttaatctcatga

SEQ ID NO: 10618 - DNA, 201 bp, Homo sapiens
gccggcaccgcccctaggagggggtctcctgagagtaggtctggtctgtcccagagggccccggctgcgtgactccgggcagccgttcccctccaaggccrtccctgtagacggggaggggctgctggggactaggggcagaggctgtgaggccagggctgttggagtcctcgtggggcctgcagtttgaggaaagaggga

SEQ ID NO: 10619 - DNA, 201 bp, Homo sapiens
ctagtccttcccacacacgctgccaaagggacctttctaaacccacgcggggccatggctgccctccctgctgtccaaggagtgaagcggaaaaacaggamtaggaaccactcacccgccgtcctgcgataaccacttcatcctctgggagtacttcccatctgtgtcgatcattacactttaccgggaccatgactcaag

SEQ ID NO: 10620 - DNA, 201 bp, Homo sapiens
tgccctccctgctgtccaaggagtgaagcggaaaaacaggactaggaaccactcacccgccgtcctgcgataaccacttcatcctctgggagtacttcccrtctgtgtcgatcattacactttaccgggaccatgactcaagtttgtgtcttgcttctttcactacatgatctatagtaaacatctctcccaggtcattaa

SEQ ID NO: 10621 - DNA, 201 bp, Homo sapiens
ccaggaattgagcccagagctggggtctaggttgctgtggatgccacactgccccaatcaccatgatagtgacattctcccctctgttcctctcttgcctyttcttcctttcccttctcctccccactttgggccacactgagtagggccttgaagccaggtgggatttgggcttggccgcaccttaaccctcagggaccc

SEQ ID NO: 10622 - DNA, 201 bp, Homo sapiens
tcaaattcctcatctgtaaagtggacacagcagtatcccaggcccctgaggctgttgtgcagggtcggtgagatgatgtggccttagctctttgtgcttarggagcatcggctcctggttcatccactgttaccgttctatgtggttcacataggacattggccaagggaggccctcctcttgcagatcagaagtgccggg

SEQ ID NO: 10623 - DNA, 201 bp, Homo sapiens
gctttcggaggcggggagaggaagtgggaggaggagccgagtgggaatagagcagcttgtgtcagtctccctcccataggttgcacaaatctatcccaccygtcattactcagtctgagactcacagcctctgaccagccccattctccgtccctgcgcccccctcctccttccccgcgggcagagctcatgactcactgc

SEQ ID NO: 10624 - DNA, 201 bp, Homo sapiens
ccgtcattactcagtctgagactcacagcctctgaccagccccattctccgtccctgcgcccccctcctccttccccgcgggcagagctcatgactcactscaccccgggctcctgcaagcatcatcctgcggttgcagaaattcctgcactgctttttccttcccctgccccaccccatccacttctgtgctggaggaag

SEQ ID NO: 10625 - DNA, 201 bp, Homo sapiens
aaggagaggagggaaggagggaaggagaggagggaaggagggaaggagaggaggggagagggaagggcgggcttcaggtggagtaatgagattgataaggmagaattcacaagtcacgcgccctccaaatggagacagccgttgcccttacttgacctcagttatctggctctcggggtgaacgtccttccacagtctcca

SEQ ID NO: 10626 - DNA, 201 bp, Homo sapiens
gctgctgggcagaggtttaaggaaggagtccgggcagatgcctaggtttaaaacccgtgagggtggagcaaagccattctcttctcctggtagaatcttakggcctgagtcatggaagggtacaatcttttgatctcaaaaattttaaaactggaagaacaggaagtgtccaccccctgggactggtcccatttttttgga

SEQ ID NO: 10627 - DNA, 201 bp, Homo sapiens
gagcaggaaagctctctcccaattttgaagctgaggaaactgaggctcagagagggtgaatgacttgcccaaggtcacccagcacctcagaagggatgagygccttctgccggcaccgaggctgcctctccacagcgctgtgccactggactgcgccctccatgccttcagagcctcatgcttctgtcctgggccctcctg

SEQ ID NO: 10628 - DNA, 201 bp, Homo sapiens
tcgtaattctgggggcctaagatattttcctttcacaccaccagcagtgtacggaggttcccttttctccacatcctcgctagcatttgttattgtctgtyttttggataaagccattttaactggggtgacgtggcatctcattgtagttttgatttgcagttctctgatcagtgatgtcaagtaccttttcatatgcct

SEQ ID NO: 10629 - DNA, 201 bp, Homo sapiens
cagggagcccagaggttttggggtaaggctttgcagtcagactgggtttgagtcctggctctgccactggatggactggtgttcgggggcaagttagtcamcctgtctgagtcttagagccctccttacatgaggatgagagttctggcatctcaaggtatgaaggtcaagtcccctggtcagcgcagaacagtgttggtg

SEQ ID NO: 10630 - DNA, 201 bp, Homo sapiens
acgcttgcctggcacgctctctcctcctctgcttggaacatctgtgcctctgcccacctggctaattctgactcacttcccaggtctcagcttagagaccycttcctccaggaagctctccttgcgcccccaggccccttcccatatttcctgttgccttgaggcagggacttgctccagcgtgcagagctgtgagtgggc

SEQ ID NO: 10631 - DNA, 201 bp, Homo sapiens
ccctcctgcaccaggagctggggaaggggcccaccaaggaggagctgtgcaagtccatccagcgggtcctggagcgggtgctgaaggtgagcggccccacrccgtgccccggaccgtcctaggcgaggccgagccccgagcctcatccccggccaccaccaggattgctgtccctgcaaggaggcgccatggtcctcttgt

SEQ ID NO: 10632 - DNA, 201 bp, Homo sapiens
tcctgcaccaggagctggggaaggggcccaccaaggaggagctgtgcaagtccatccagcgggtcctggagcgggtgctgaaggtgagcggccccacgccstgccccggaccgtcctaggcgaggccgagccccgagcctcatccccggccaccaccaggattgctgtccctgcaaggaggcgccatggtcctcttgtgcg

SEQ ID NO: 10633 - DNA, 201 bp, Homo sapiens
aaggggcccaccaaggaggagctgtgcaagtccatccagcgggtcctggagcgggtgctgaaggtgagcggccccacgccgtgccccggaccgtcctaggsgaggccgagccccgagcctcatccccggccaccaccaggattgctgtccctgcaaggaggcgccatggtcctcttgtgcggatgaggactcggaggcttg

SEQ ID NO: 10634 - DNA, 201 bp, Homo sapiens
tgcctcagcctcctgagtagctgggactacaggcacacgcgcgccaccatgcccggctaacttttgtatatttagtagtgatggggtttcaccatgttggycaggctgatcttgaactcctgacctcgtgatccgctcaccttggcctcccaaagtcctgggattacaggcatgagccactgtgcccagactgtacgcctt

SEQ ID NO: 10635 - DNA, 201 bp, Homo sapiens
caacctccgcctcccggattcaaacaattctcctgcctcagcctcctgagtagctgggactacaggcacacgcgcgccaccatgcccggctaacttttgtrtatttagtagtgatggggtttcaccatgttggccaggctgatcttgaactcctgacctcgtgatccgctcaccttggcctcccaaagtcctgggattaca

SEQ ID NO: 10636 - DNA, 201 bp, Homo sapiens
ctcccctcccacccccactcctatatttcaggctgccaggaaaagaggagggggaaggggcagccctttcttccaaggaggtaggggctgaccccctaggrctctcctggggtcagccctcctggcccagcttgggacagtcacagctcactgtgtgaccttggtcaaggggcgtctctcctctgggcctcagttccccat

SEQ ID NO: 10637 - DNA, 201 bp, Homo sapiens
tttttaattttatatatatatatatatatatatatatatatatatatatatatatattttttttttttttttttttttttaaaaccaccaacctgcagggkgatttggaaacttcactgcctccctcagggcctcattgctctcatctgtaaacttatggggtgactcttccagctcactcatttattcaacaaacatttt

SEQ ID NO: 10638 - DNA, 201 bp, Homo sapiens
catgcttggtaaagattttttttttaattttatatatatatatatatatatatatatatatatatatatatatatattttttttttttttttttttttttwaaaccaccaacctgcagggtgatttggaaacttcactgcctccctcagggcctcattgctctcatctgtaaacttatggggtgactcttccagctcactc

SEQ ID NO: 10639 - DNA, 201 bp, Homo sapiens
cctgggcgacagagcgagactccgtctcaaaaaaaatataataataatgataataatagtaatacagtagcctccagcacctgggctctgggatggctgggaggtgctccttggggagcccctgctgacccggctccctcggggcacagccttcatcctccccaaggcagaggtgtgcgtgcggaaccatgtccagcccta

SEQ ID NO: 10640 - DNA, 201 bp, Homo sapiens
tcttcccaaaacattgggattacaaagcatgcacagcatgttttacttgtaaaataaataacagaaagcttaactttttttttttgagacagagtcttgcyctgtcacccaggatggagtgcagtggcgcaatctcggctcactgcaagctctgcctcccgggttcatgccattctcctgcctcagtctctggagtagcta

SEQ ID NO: 10641 - DNA, 201 bp, Homo sapiens
aacaccttgtcatttttcctgcatggatttctcatctttatccactatttctctgaaatcattcagcttgctaatgttgcccccagtggttttttttttttaaataatattggccaggtacggtggctcatgcctgtaatcccagcacttgggaggccaaggcaggaggatcacttgagcccagggagtttgagaccagcc

SEQ ID NO: 10642 - DNA, 201 bp, Homo sapiens
aagtgtctgcttttctttttcaggcccagacccttcctcgtcctagttctggaggaccccatgagctcctctaaccaatcccctcctttttctcatgcccsagtaaactgaggcccaggaagatgatgggacatgcctatgctctcaggggcaccagagcttggctggaacccagggccttgaccccagcatgaagctttt

SEQ ID NO: 10643 - DNA, 201 bp, Homo sapiens
tgctccctgcctttgggctgggtgaaggttctgggaggtgcactgcgcagttcctggcctgtgcagggtgctcagtaaatggcaattgcgttttagctgarttcttagggaagctgtgtgtcctttgcccggcctgtcagagatttaaggggtgattcaggcatctagaggaggagggagctgacaattgcacttctgttt

SEQ ID NO: 10644 - DNA, 201 bp, Homo sapiens; identical to SEQ ID NO: 1872

SEQ ID NO: 10645 - DNA, 201 bp, Homo sapiens
ccaggaagttgacatgacccactcctttcctaagcagccctaaatatgagaatcttcttcccttccaaggtcagaggagcaccagcctatggccctggacmcctggggtattcagcgagttcctggaggacggtgggatggggctgtggttccagcaaggtcagtcactccgcagcagcatccactctgtgcctggcattt

SEQ ID NO: 10646 - DNA, 201 bp, Homo sapiens
cggcctcgcctactcagagctgctccagcctcctcggagcctctagtccttcccacacacgctgccaaagggacctttctaaacccacgcggggccatggstgccctccctgctgtccaaggagtgaagcggaaaaacaggactaggaaccactcacccgccgtcctgcgataaccacttcatcctctgggagtacttccc

SEQ ID NO: 10647 - DNA, 201 bp, Homo sapiens
gcctgacttcagtgctgttggatccaaccacggaatttgtgcctgggaaggcggtaaggcacccccttcctggaagtttacaagcagaagctctgcacagkagcagaggcccacatgcactatagaacggactttgtaccccatgatgtgtcatggccactgcaggcatgagtgtttcagtataggtctatgaacaaacct

SEQ ID NO: 10648 - DNA, 201 bp, Homo sapiens
caggaggacagcaagaagtggagaaaccgcttcagcctcgtgccccacaactacgggctggtgctctacgaaaacaaagcggtgaggcctggccccgggcrccacactgagcctccccgctttctccatgtgtgccccctcccccaactcggaaacttaggccccagacgccaccgtcacagcctgcacgcggtcaccagg

SEQ ID NO: 10649 - DNA, 201 bp, Homo sapiens
cctggaggacagaaatcagcaagacctaaaggggagaggaaggagggccaggctggggtggaggtgccccacccgggagcccgggcgcagcctcaccgcargctgattcacagaaggctcagagggttgcgagggcccaatcggcactgtcatcctgcccaggctctgagtcaccagctggtgaggggcagctgcagccca

SEQ ID NO: 10650 - DNA, 201 bp, Homo sapiens
caggagagtggaaattactggctccattttacaaaaaaggatgcccagagtggtgagagccgatccgaggcctcacagctgtaatgaagttgaggaacttycacccgccactgcccactcaccccgagggcggccagaagcttccctgaatgggcagagaggaaggactttgcatcttcaaaactcttcagagttatgcaa

SEQ ID NO: 10651 - DNA, 201 bp, Homo sapiens
actgtagggtgggtggggtcggcacccccctctttcccccacctccccatgctggacctgctccctatgccctgggaaccaggcgggcaggttctgagccygccccaccctacagggtgctgctacctgcctggtttcagtcggcaaacctctcagccctgaaaccctgaaaccgggctgggcctcgtgggtgaggtgtgt

SEQ ID NO: 10652 - DNA, 201 bp, Homo sapiens
tctagtccccctgactctgttccttttccactgctggggcctgagtgccggcctcgcctactcagagctgctccagcctcctcggagcctctagtccttcmcacacacgctgccaaagggacctttctaaacccacgcggggccatggctgccctccctgctgtccaaggagtgaagcggaaaaacaggactaggaaccac

SEQ ID NO: 10653 - DNA, 201 bp, Homo sapiens
gaggggtgtttgagctcaatcttggaggacaggagggatttttaaccagcagacttggggtaagggtgagtggagggcatggcctggcatagacccttgcytatccaaggcagggagctgagcacagccttgagtgccaggcaaaggggttggggaatggagagtccttcccatgaacacttgttagctggactttagaat

SEQ ID NO: 10654 - DNA, 201 bp, Homo sapiens
aggcctggaatgagtcacatcccaaccacagacccccaaggcgggatgagacgggtctcctttgagcagagtccagcacaggggcggctgtgggatcagtrctgtgtcctgacccttcccctgtggccctgtagctgtgaaggaggccgcggtgcagaggaagcacaacctctaccgggacagcatggtcatgcacaacag

SEQ ID NO: 10655 - DNA, 201 bp, Homo sapiens
ttagcttcgtaattctgggggcctaagatattttcctttcacaccaccagcagtgtacggaggttcccttttctccacatcctcgctagcatttgttattktctgtcttttggataaagccattttaactggggtgacgtggcatctcattgtagttttgatttgcagttctctgatcagtgatgtcaagtaccttttcat

SEQ ID NO: 10656 - DNA, 201 bp, Homo sapiens
ttcgagaccctcctgcaccaggagctggggaaggggcccaccaaggaggagctgtgcaagtccatccagcgggtcctggagcgggtgctgaaggtgagcgkccccacgccgtgccccggaccgtcctaggcgaggccgagccccgagcctcatccccggccaccaccaggattgctgtccctgcaaggaggcgccatggtc

SEQ ID NO: 10657 - DNA, 201 bp, Homo sapiens
catgttggccaggctggtctcaaactcctgacctcaagccatctgactgccttagcctcccaaaatgctgggattacaggcaggtgtgagccactatgtgyggcttattcattttttttttttttcagactgggtcttgctgttgcccaggctggagtgcagtggcgcaatcatgcctcactgcagcctcaaccttcctgg

SEQ ID NO: 10658 - DNA, 201 bp, Homo sapiens
cccaaaatgctgggattacaggcaggtgtgagccactatgtgcggcttattcattttttttttttttcagactgggtcttgctgttgcccaggctggagtrcagtggcgcaatcatgcctcactgcagcctcaaccttcctggctcaagtgatccttccacctcagtctccccagttactgggactacaggtgcacaccat

SEQ ID NO: 10659 - DNA, 201 bp, Homo sapiens
cctgtgggtcagcactgtgttcgtcaggagttactcttcttggcatcctgcttttgcttcaccttggctgaaattccctagaagccttacgggaacaacaytggcctctctgatgatccctgggaactagagggcaggggacatgcctgcctggggggcaggtcatgccccagggacttgagagtagagtcatgccttcat

SEQ ID NO: 10660 - DNA, 201 bp, Homo sapiens
agaatgacacgttctgttcattgagagatgatggaccctggtgccaggcactatgctgggcactttgtgatatcatttaaccctcccgcaaaaagcatcaytctcttttgacagatgaggtagctgaagttcaaaggggtaatgccacttgtccagggtcacagaggggagggcagcttgggcttccttctcttttcaccc

SEQ ID NO: 10661 - DNA, 201 bp, Homo sapiens
ggtggataggcacctatccctggcaaactctggggatccaggggcagagttaggaggactggcttgtgagggggtccttctcagtcaccctcaataacccrataggatgcagcccttggagacagggttccagtcatatggggagcagagcccccctgagatccacagagcacccccttattcaaccaacttgctgaaagg

SEQ ID NO: 10662 - DNA, 201 bp, Homo sapiens
ctgttgtgcagggtcggtgagatgatgtggccttagctctttgtgcttagggagcatcggctcctggttcatccactgttaccgttctatgtggttcacayaggacattggccaagggaggccctcctcttgcagatcagaagtgccgggtgtgggtcagggtgctgggtagagggtccacgtgcaggggtgggggcccag

SEQ ID NO: 10663 - DNA, 201 bp, Homo sapiens
atagtcacatcatgggaaatggggtatctatcccctcaagcatttatcctttgtgttacaaacaatccaagtatattcttttagtttttttttttttttttggacacagagtctcactcttcttgcccaggctggagtgcagtggtgccatctcagctcaccgcaacccctgcctcccaggctcaagtgattcttctgtct

SEQ ID NO: 10664 - DNA, 201 bp, Homo sapiens
tgtgacttattacccactctaagaaatgggtctgcacggatgctggactcaggttttgggctgaggagaacacagccagaaagaaggctgctcccaccccygccggcttgctggtcaccttgggacaggctggccttctctgggcctgagcctgacctcagagctgatgccaagggatcagttctctgacatcctctggtg

SEQ ID NO: 10665 - DNA, 201 bp, Homo sapiens
gtctggaatctgccaagcaggaggaaccaggtcttcaatcaggccagcccctgccacctgggcccagctgcccacaaagggcctcctgttcccaggtcccrgggactgtgggctgggactgggtggaggcactcaaggctctggctgcctggcccagggccctcccgcctccccagcccctggcctggtgccatctctcca

SEQ ID NO: 10666 - DNA, 201 bp, Homo sapiens
tgcccctagggaaggaacaacccagtcctggacactgaactgcttccaggtgatctggcctgagggaagctcctgcccccgccccacccttgggcgcagtsccacatggtgcagaggtggaaggttgcaggggacggagtgggcgccaatggcctctgggctgctgccgtgggactcagctcaccccacccctcctgctcg

SEQ ID NO: 10667 - DNA, 201 bp, Homo sapiens
gggcctgtccgtcatcgaatgcagcctctcagtgcatgggggaaacccaggctcagagaggggagccgcacagcgggccagcacaaatcccagttgggacrcgagctgcagcttcttaggaccaggaagcctctcccctcatgggtccgagaccctctctgggcctcctccttcatctgaacatgggggcacccaggagca

SEQ ID NO: 10668 - DNA, 201 bp, Homo sapiens
ttgtttgtgctttacagagtttaaaacctaacccaagagtggggtggatgtgacttattacccactctaagaaatgggtctgcacggatgctggactcaggttttgggctgaggagaacacagccagaaagaaggctgctcccacccccgccggcttgctggtcaccttgggacaggctggccttctctgggcctgagcct

SEQ ID NO: 10669 - DNA, 201 bp, Homo sapiens
tgaaacctggaatccaagactgtcagagatggcagggcctgtccgtcatcgaatgcagcctctcagtgcatgggggaaacccaggctcagagaggggagcygcacagcgggccagcacaaatcccagttgggacacgagctgcagcttcttaggaccaggaagcctctcccctcatgggtccgagaccctctctgggcctc

SEQ ID NO: 10670 - DNA, 201 bp, Homo sapiens
tgagaaaggaccaggtctttgaaacctggaatccaagactgtcagagatggcagggcctgtccgtcatcgaatgcagcctctcagtgcatgggggaaaccsaggctcagagaggggagccgcacagcgggccagcacaaatcccagttgggacacgagctgcagcttcttaggaccaggaagcctctcccctcatgggtcc

SEQ ID NO: 10671 - DNA, 201 bp, Homo sapiens
gatctgtctgtgggctgggtgcactggggctggctgggggccctggagccacggccaaaggaaccctgagacctgcaggcccaagcctgcccatcctgccraccacgttgatagaatgcctgtggggtgcgtggcttgactcctcatccctgaaataggaaaacaacagcactggcttcctggggttctcatggagattct

SEQ ID NO: 10672 - DNA, 201 bp, Homo sapiens
tagcagtaagggaggaactggggctcgaacaagggtctctgggtgcctctagggccattctgggtggctgcttatgggacgggagcttttagtcctggctytgccactccctgctctgtgaccctgggcccgtggcctgtcccctaacggttgtctcttcatctgtaatcatctgtaaagcaataaggtgaatgatagtgc

SEQ ID NO: 10673 - DNA, 201 bp, Homo sapiens
tcctccctggcaggcctcggggtggggggctggttgaggatgaggacccctcagcggcacccaggaaggggctgtggtcaccctgggggcttcacatgtcygcggtatgccctgcagcaaatggacaatgccgtgtatacgttcgagaccctcctgcaccaggagctggggaaggggcccaccaaggaggagctgtgcaag

SEQ ID NO: 10674 - DNA, 201 bp, Homo sapiens
ccagggcctgctccgtgagggccagggtggcagactccagccctttgggatctgtctgtgggctgggtgcactggggctggctgggggccctggagccacrgccaaaggaaccctgagacctgcaggcccaagcctgcccatcctgccgaccacgttgatagaatgcctgtggggtgcgtggcttgactcctcatccctga

SEQ ID NO: 10675 - DNA, 201 bp, Homo sapiens
gggagtgcctgcaggtaacgcactgtccagattttccagtcaaaacttggtttctaggaaaccatgcccttctgagaggcgggtggggtggcggggggacytccttccctggcccaggtgggcagcccccacccagggctctgcatgctgctccagctggaacatccctgccctgctcctgtcactcctgcctgacttcag

SEQ ID NO: 10676 - DNA, 201 bp, Homo sapiens
caaaaggagaccagacccctccagcagagttcctggccctccctacctgacccatttggctcctgaattctgagagcaagcctggatagtgagcgactccrgccccacctggggccaacgtgacaaacctagagggaactgcatcctggacccctggcccttgcctgggtcccctcagcccgaggccctaggcctgtgggc

SEQ ID NO: 10677 - DNA, 201 bp, Homo sapiens
ggggttttgccatgttggccaggctggtctcgaactcctgacctcaggtgatctgtctaccttgtcctcccaaagtgctgtgaaccaccgcacctggccaracttttgtatttttttgtagggatgaggtcttgctgtgttgctcaggctggtctcaaactcctgggctcaagcgatccacctgccttagtctcccaaagt

SEQ ID NO: 10678 - DNA, 201 bp, Homo sapiens
tgggaggctgagttggaaggattgcctgagcaaaagtaacacatgtacaaacaatttaggagggtaaaataaaacatgaaaacaccctccatctttctccsttaaatcccacttcccagaagaagtcacttaagtgtggtgtgtcaccatttccaaacctacctctctctgtacatgctcataatagcttggtttataaaa

SEQ ID NO: 10679 - DNA, 201 bp, Homo sapiens
cccatctctaacccccctggcctaggcctccagcccagccaagaagatgcctctggtgtccagatgccagctagctccagctagctcctccctgggcagarcagaccctgcagtttgggctatgagaaaaatgaaaagaggttatcagcatcacttgcttctggttgctcagagagaatcagacactgggtgccaggagac

SEQ ID NO: 10680 - DNA, 201 bp, Homo sapiens
gcctgtggttccagctaattgggaggctgagttggaaggattgcctgagcaaaagtaacacatgtacaaacaatttaggagggtaaaataaaacatgaaarcaccctccatctttctccgttaaatcccacttcccagaagaagtcacttaagtgtggtgtgtcaccatttccaaacctacctctctctgtacatgctcat

SEQ ID NO: 10681 - DNA, 201 bp, Homo sapiens
accgcttgccattcctccctggcaggcctcggggtggggggctggttgaggatgaggacccctcagcggcacccaggaaggggctgtggtcaccctggggrcttcacatgtccgcggtatgccctgcagcaaatggacaatgccgtgtatacgttcgagaccctcctgcaccaggagctggggaaggggcccaccaaggag

SEQ ID NO: 10682 - DNA, 201 bp, Homo sapiens
ccctggtagcaggcgccagccccagggcctggacttcgaggacccaggcaaagtgtgtggggggtgctgcctggccacagggcggccctgctcagcccccrcggccccggcccctgcagtacatggagaagctgtcccggctggcgtaccaccccctgaagatgcagagctgctatgagaagatggagtcgctgcgactgg

SEQ ID NO: 10683 - DNA, 201 bp, Homo sapiens
cctcggtacctggagactggccatgggaggggcaggttcctgccagctcctgttttgagaaaggaccaggtctttgaaacctggaatccaagactgtcagmgatggcagggcctgtccgtcatcgaatgcagcctctcagtgcatgggggaaacccaggctcagagaggggagccgcacagcgggccagcacaaatcccag

SEQ ID NO: 10684 - DNA, 201 bp, Homo sapiens
tggaatctggacagacatgacctcactccaggaaaggggagtacagggagggacagggtctgtggagaggggttggggggcatccctccacccccatcacygaggcagggcccggggtgtgggcagacacccaggaaggtcacatgcctgggaccctggttatgagctgtgaggcatggtgtgtgacatgccctttcagcc

SEQ ID NO: 10685 - DNA, 201 bp, Homo sapiens
ggccctaggagagtgtcaccacctttctggaccccaagctctccctgctgtctcaggcacatgatggagatggtggtgcttgggacaactctgagacctgsgagaatggagtccctgccccgactctgcctctgctggtccctggactgtagggtgggtggggtcggcacccccctctttcccccacctccccatgctgga

SEQ ID NO: 10686 - DNA, 201 bp, Homo sapiens
accatgcctacctaattttttgtattttttagtacagacaaggtttcaccgtgttagccaggatggtctcgatctcctgacctcatgatccgcccacctcrgcatcccaaaatgctgggattataggcgtgagccaccgcgcctggccgcccggcctgttttttaagagacagagtctcgctctgtcttccaggtagagag

SEQ ID NO: 10687 - DNA, 201 bp, Homo sapiens
agtgggagcccctggtgaatagagacagcgtccagagtcttagaaaaagaacagatatccctctgccttgcagatttcagaaatccttgctatagaaagarctcttacaaatcaataagaaaaagatagacattcccacagaaaagcaggcagaggatataaattttaaaaaccacaaatggccaggctgggtacggtggc

SEQ ID NO: 10688 - DNA, 201 bp, Homo sapiens
aattgagcccagagctggggtctaggttgctgtggatgccacactgccccaatcaccatgatagtgacattctcccctctgttcctctcttgcctcttctycctttcccttctcctccccactttgggccacactgagtagggccttgaagccaggtgggatttgggcttggccgcaccttaaccctcagggaccctctct

SEQ ID NO: 10689 - DNA, 201 bp, Homo sapiens
ggctggtctcaaactcctgacctcaagccatctgactgccttagcctcccaaaatgctgggattacaggcaggtgtgagccactatgtgcggcttattcawtttttttttttttcagactgggtcttgctgttgcccaggctggagtgcagtggcgcaatcatgcctcactgcagcctcaaccttcctggctcaagtgatc

SEQ ID NO: 10690 - DNA, 201 bp, Homo sapiens
agtaagagggagtttagcagcctgaggccaggtgacagacggaacaggctgtaagctacggacctttccaccacccaacagttaataaagagaggaggtcygggctgggtgccagggtcccttctgcacaatgggccatgccaactgggtaaacagaggtagatacatgatattccttaaaaacaaaatcctgattcattc

SEQ ID NO: 10691 - DNA, 201 bp, Homo sapiens
tcccaggttcaaggcactctcctgactcagcctcccgagtagctgggaccacaggcgtgcaccaccatgcctggctaagtttttgtatttttagtagagayggggttttaccatgttggccaggctggtctcaaactcctgacctcaagccatctgactgccttagcctcccaaaatgctgggattacaggcaggtgtgag

SEQ ID NO: 10692 - DNA, 201 bp, Homo sapiens
gtttactggaggtgtttgttttttttctcctggtctatttcaggtttgacaggtttgtggggagagcagagctgggactccgtgccaactgggagggagarggactcatggggagagaaagggcctctccttcttcctacaggactagcaaggggtcttgggctgggctcctgcggaatgctcttgggcaaattgctttcc

SEQ ID NO: 10693 - DNA, 201 bp, Homo sapiens
cgggggagtgaccttacttttctgggcctcagtttcccattgttactgtgatggcctctaagggtctccccagcttctttttttaaaattaattattttttcttttttgagacagagtctcgctctgtcactcaggctggagtgcagtggcacaatctcagctcactgcaacctccgcctcccaggttcaaggcactctcc

SEQ ID NO: 10694 - DNA, 201 bp, Homo sapiens
ctacccctgccaaggagccatccgtggccctgtttcccatggtcctccctttctagctctcccgtggtcgccacccttcttctgagcggagctggcttccyggtgctgcctgggctccgtccttaaggtccttaaccccttgctaatgctgtccccctacctgcagcatggcgctccctcagtaccccctccgatgcctgc

SEQ ID NO: 10695 - DNA, 201 bp, Homo sapiens
agccccccagttcctgggcccaggacctgcgggccagccctgcctctgtagatgggggcacagccagtttcctctctgccctctaaggggaggtagggggyctgtggggccctgtagacaatggccagagctaggaccaggagggtggcatgcagccgactatggctcgaacctaattgcctccatctggctgtgtgacct

SEQ ID NO: 10696 - DNA, 201 bp, Homo sapiens
ggggcagagtcaatgcagggaggcagaatggatgagataatgtggaaagtgacgaagctggcacacaccttcacaccaccccaccccagcctctctgtagytcacagaagcgagtgatttctaccaccagctggagccccccagttcctgggcccaggacctgcgggccagccctgcctctgtagatgggggcacagccag

SEQ ID NO: 10697 - DNA, 201 bp, Homo sapiens
caccatgcctggctaatttttgtatttttggtagagatggggtttcaccacgttggccaggctggtctcaaactcctgacctcaagtgatctgcctgcctyggcctcccaaagtgctgggattacaggcgtgagccactgtgcccggccgcacaactgcatttcttttttttttttttttctttgagatggagtctcactg

SEQ ID NO: 10698 - DNA, 201 bp, Homo sapiens
ttggaatgcagtggcgcgatcttggctcacagcaacctctgcctctcagattgaagtgattctcctgcctcagcctcctgagtagctgggattgcaggcaygcatcaccatgcctggccacacaactgcgtttctaaatagccatgtgacactcactgagtgcttcctgggtggcagccgctgtgtttagcctgagtctca

SEQ ID NO: 10699 - DNA, 201 bp, Homo sapiens
agatccttatattttctgattattaatctcttgtcagatggcagttttcttagttttttgccatcatggtttcagaaagatcagagtccaatctcagaacrccttgtcatttttcctgcatggatttctcatctttatccactatttctctgaaatcattcagcttgctaatgttgcccccagtggttttttttttttaaa

SEQ ID NO: 10700 - DNA, 201 bp, Homo sapiens
gagctcggcccgcggctgaaggggaaaccgcaggagcggcagcggcagtggatccaggtgggtgggcctggggccctggagcggggacgggacctgcagcyggtgcggtgccctcagccctggtgccaattcagctgctctgcccacagatctcggacgccgtgtaccacatggtgtacgagcaggccaaggcgcgcttcg

SEQ ID NO: 10701 - DNA, 201 bp, Homo sapiens
gtgatttggcagaggtacccagttctcggtcacctggtctgaaatgttctgccagtaccaataccacctggcccgaggttgagttgaagaatcgggggcaygtgtccaagcaaaatgcttagcacaggagcggcacatggtggctttggggagcgtcatgacaaggcaaagaaggaactccttagcttggcattcgaggcc

SEQ ID NO: 10702 - DNA, 201 bp, Homo sapiens
gaaggtctccaaagcaagaggagaccttttggatgctcaagttgcctccccatctggggtcccaccctgggccagggaggaacccgtccctgggccagggaggaacccgtccctgggccaggggcctcacatggtaggcaggctgtgggtgttccaggcttgggtgtgccacgaagcctggggaaaggccactgtggcccc

SEQ ID NO: 10703 - DNA, 201 bp, Homo sapiens
ggtttctccatgttggtcaggttggtctcgaactcccgacctcagatgatctgcccaccttggcctcccaaagtgctgggattacaggcgtgagccaccgygcccggtggtgctgttttttgttgttgttgttgttgttgtgttttttgagatggagtctcgctctgtagcccaggctggagtgcagtggcgcgatctcag

SEQ ID NO: 10704 - DNA, 201 bp, Homo sapiens
gcaattatcctgcctcagtctcccaagtagctgggattacaggcgcccaccaccatgcctggctaatttttgtatttttggtagagatggggtttcaccaygttggccaggctggtctcaaactcctgacctcaagtgatctgcctgccttggcctcccaaagtgctgggattacaggcgtgagccactgtgcccggccgc

SEQ ID NO: 10705 - DNA, 201 bp, Homo sapiens
gcctcgggaaagtcactttgccctctgagcctcggtttcctcgtctgtaagatgaggatagtaaagccttgtgttgcctcattcttgggattgggcaagamcccagcaagagagtggaaaaccaggggtttgaaagcggcattgcgggtcctcgtgaggggtcactgggatgagaggctttgcggggtagggctctgtgca

SEQ ID NO: 10706 - DNA, 201 bp, Homo sapiens
ccactggggccaaaccagggctggcgccggcgtgcagcccccatggtggacatgagctggatgtggtcgcagctggagatgactctcttcctcttgggtcycccgtccgtgtggaacagggtttcaggcttaggcatcaggtcgggaccagggtgcagatcctacctctgcctcttctcagcagagtgatttggcagaggt

SEQ ID NO: 10707 - DNA, 201 bp, Homo sapiens
aaccattgccaccatcaatgttggagcattttcatcagcccggaaagaaatcctctactccttagtagtcgctcctgtttcctcctagtccctcctaaatctaggcaaccactgaacattttgtctaattgcaaaagtaatgtgtgcacaggccaggcgtggtggctcacgcctgtaatctcagcactttgggaggctgag

SEQ ID NO: 10708 - DNA, 201 bp, Homo sapiens
gcttgaacccaggaggctgagtttgcagtgagccgagatcgcaccactgcactccagcctgggtgacagagcgagactccatctcaaaaaaaaaaaaaaaagaatccatatttcataagctgtgaggtgggatggagcagggctagtttgaggatgtgaaatctcagtgtggctagagaatggggaggggaagtgggggga

SEQ ID NO: 10709 - DNA, 201 bp, Homo sapiens
aggttgaaggctgaatgctgcttggtggggcaagatgcgggaaaaaaatccatgtttcacacagccaggcacggtggctcacgcctgtaatcccagcactktgggagccaaggcgggcggatcacctgagctcaggagtttgagaccagcctgatcaatatggtgaaaccctgtctctactaaaaataccagaattaacca

SEQ ID NO: 10710 - DNA, 201 bp, Homo sapiens
ctggggcctcagtttcccaagactgccataacaaataccacagaccgggcagctacacagcagaaatatgttctctcccagctggaggtctgagtcgaggkcaaggtgtcagcagggctggtttctccgagacctctctccttggctggtggccggccgccttctccctgagtcctcacagggtcatgcctctgtgtgcct

SEQ ID NO: 10711 - DNA, 201 bp, Homo sapiens
gtgttctgcacatcatacgtgctccctcaagctcccattgcgactgacgctagtgatgtcatgtcgaaggaggacagtcctggtcctcagagagaaagatytatttaaacagataattgcacacacacaaaatcatgttgaatgtgatgcttgccatgaaggaggagtttaggacactggggagggggtgataataatggc

SEQ ID NO: 10712 - DNA, 201 bp, Homo sapiens
ccacggaatttgtgcctgggaaggcggtaaggcacccccttcctggaagtttacaagcagaagctctgcacagtagcagaggcccacatgcactatagaasggactttgtaccccatgatgtgtcatggccactgcaggcatgagtgtttcagtataggtctatgaacaaacctgtgaggtcccaaggaccaggtgggtcc

SEQ ID NO: 10713 - DNA, 201 bp, Homo sapiens
agtggttctcaactggtagcacgtccaaatcacctgaagggcttgctgaaagacacggtgctgggctttcccccagagtttgattcaggttgggagccaakatttgcatctcttttttttttctttttttttttttttttgagatgaagtctagctctgtcgccaggctggagtgcagtggcgccatctcagctcactgca

SEQ ID NO: 10714 - DNA, 201 bp, Homo sapiens
agcaggagccctgtgtctgcccttcccgtggaggccacccacaggctggtgctgcggaggccagggtgagatggttttgcccaaacgttggttccctgttsagagttcatgtcatttacaagctgtgtgtccctggagaagtcccttaacctctctgagcctcagtgttctctgggaagtgaggacagtgcgtgaaataat

SEQ ID NO: 10715 - DNA, 201 bp, Homo sapiens
cttcctctccctgggtctcagtttccctagttgtgaaccgaagtgggtgggccactcgatggctgaagtccctttcagctctgagggcctaacaatcccarattttccccacaaatctcccccagactgaagccagctcaaggtcccagtataatgcctgcaaccttggagtaatatctttttttttttgagacaaggtct

SEQ ID NO: 10716 - DNA, 201 bp, Homo sapiens
gctaggctcacgggaagagctcaggaggggtgaccctgaaacttgtcacactcagcggctgggtgtgcagaaagagagaatcccaagggtcaaggctggcyggcctccctcccgctgtcccggccctctgcctcaccttctcgccacctggaaagcaggcctgccctgcacacctgacttggtgcatgcaggatgaaaatt

SEQ ID NO: 10717 - DNA, 201 bp, Homo sapiens
cggggctggtggcaggatgactcctgcctccttacacgaggcagtgtgccgtgaggaagaatccctggcctgggatctgggaggcctgaggatccttgggyaggccacttcctctccctgggtctcagtttccctagttgtgaaccgaagtgggtgggccactcgatggctgaagtccctttcagctctgagggcctaaca

SEQ ID NO: 10718 - DNA, 201 bp, Homo sapiens
tacaggcgtgagtcactgtgcccggccaaaatgtactattcttttaagggcactagttgtattggatttggtcccatcctcatcccctctgtttaacttamttctttaagactctaggaccaagggcgggtgcggtggctcaggcctgtaatcccagtgctttgggaggctgaggtgggtggatctcttgaggtcaagagt

SEQ ID NO: 10719 - DNA, 201 bp, Homo sapiens
tttcaaagcccctggcaagcagaggcttgtttccacaccaggagccccacggggctggtggcaggatgactcctgcctccttacacgaggcagtgtgccgkgaggaagaatccctggcctgggatctgggaggcctgaggatccttgggtaggccacttcctctccctgggtctcagtttccctagttgtgaaccgaagtg

SEQ ID NO: 10720 - DNA, 201 bp, Homo sapiens
ggtgttggaagggggcagcggggaagcctcccagtctccccagaggaagtgagctgcctttgaaatctctgctggaagggaatgagggcgtgtatttgcckcctccagtgatccaggcaccctcctcaccccacccaaggagcagtaggtactctcaaagctggcaattaaaattccagaaccctccctacctgaggcctt

SEQ ID NO: 10721 - DNA, 201 bp, Homo sapiens
gacctctcatctctgccgccccacccgggcaggagctgccccggttccaggagctgatcttcgaggactttgccaggttcatcctggtggaaaacacgtaygaggaggtggtgctgcagaccgtcatgaaggacatcctgcagggtgggtgccgtcccggggtggggactgttgccaggaggatgctgggggcgcagctga

SEQ ID NO: 10722 - DNA, 201 bp, Homo sapiens
ggggctggctgggcacaggggtgactggggtgatgtgaaaatgaatcggaccctctctagcctctgaccagcgtggggttaagtcctggaaagcctccttrtccgaccaggcctggactgtgggaggaggaagggccagggcggagtcttcctgtcccctccctgtcgcagcaagctcctggggctctgtaacagtccctc

SEQ ID NO: 10723 - DNA, 201 bp, Homo sapiens
ggtgtcctttaactccatgtctccagggccgcacccatgctgggcaccagggaggtgctggggagatctgccaagtgactgtggtcccgggccaagtcccraggccagagtccctcccttgtgccaggcctggggctggctgggcacaggggtgactggggtgatgtgaaaatgaatcggaccctctctagcctctgacca

SEQ ID NO: 10724 - DNA, 201 bp, Homo sapiens
cagagggggcctgggttccttttccccacagactctggagaacagtgagataggatgaggatctcggctgcctgagaaactcctctctggccgatctctcmtggctggtggagctgccctgggtggaatcccagcatttgcttcccagacatctgtcctgtacaccttggttttctcctttttgaaatggggtcagtgatt

SEQ ID NO: 10725 - DNA, 201 bp, Homo sapiens
cctctagggttcaagcgattctcctgcctcagcctcctgagtagctaggattacaggcatgcgccaccacacctggctacttttgtatatttagtagaggyagggtttctccatgttggtcaggttggtctcgaactcccgacctcagatgatctgcccaccttggcctcccaaagtgctgggattacaggcgtgagccac

SEQ ID NO: 10726 - DNA, 201 bp, Homo sapiens
gcatgcatgtgtgtgcacatgtgtaagtgtgcgtatgtgtgtgagtggatgcacggtgtgtgagtgtacatgtgtgtgggcatgcacatgtgtgaatgtgygtgtgtgtgcctgcacatgtgagtgcatgcgtgtgggcgtgcatgtgagtgtgtgtacgtgcatgtgcatgcacatgtgagtgcatgtgtgtggcatgca

SEQ ID NO: 10727 - DNA, 201 bp, Homo sapiens
cccaccttggcttcccaaagtgctaggattacagatgtgagcgactgtgcccagccattattattattattattttgagatggagtcttgatctgttgcccaggctggagtgcagtggcacaatctgggctcactgcaaccttgcctctcgggttcaagcaattctcctgcctcagcccctcaagtagctgggattacagg

SEQ ID NO: 10728 - DNA, 201 bp, Homo sapiens
cctgggttctagcaattctcctgcctcagcctcccaagtagctgagactacaggcatgtgcaccacgcctggctaattttgtatttatttatttatttatwtttttatttatttatttttgagacagagtctcgctctgttgcccaggctggagtgcagtggcgcaatctctactcactgcaacctctgcctcttgggttc

SEQ ID NO: 10729 - DNA, 201 bp, Homo sapiens
ctcctgggttctagcaattctcctgcctcagcctcccaagtagctgagactacaggcatgtgcaccacgcctggctaattttgtatttatttatttatttwtatttttatttatttatttttgagacagagtctcgctctgttgcccaggctggagtgcagtggcgcaatctctactcactgcaacctctgcctcttgggt

SEQ ID NO: 10730 - DNA, 201 bp, Homo sapiens
ctggagtgcagtgacgtgatctcagctcactgcaacctccgcctcctgggttctagcaattctcctgcctcagcctcccaagtagctgagactacaggcaygtgcaccacgcctggctaattttgtatttatttatttatttatatttttatttatttatttttgagacagagtctcgctctgttgcccaggctggagtgc

SEQ ID NO: 10731 - DNA, 201 bp, Homo sapiens
ggctgagattgcagtgagccaagatcgtgccatagcactccagcctgggtgacagagcaagaccctgtctcaaaaagcaaaaaaaaaaaaaaaaaaaaaaagaaaaagaaaaagaaaagaataaccctattgactgtatttagtggaacaatttgattcctgtctgacttcagaatctaagccattctggcccgactggag

SEQ ID NO: 10732 - DNA, 201 bp, Homo sapiens
aggctgagattgcagtgagccaagatcgtgccatagcactccagcctgggtgacagagcaagaccctgtctcaaaaagcaaaaaaaaaaaaaaaaaaaaaaagaaaaagaaaaagaaaagaataaccctattgactgtatttagtggaacaatttgattcctgtctgacttcagaatctaagccattctggcccgactgga

SEQ ID NO: 10733 - DNA, 201 bp, Homo sapiens
acgcctgtaatcccagcactttgggaggctgaggtgggcagatcacctgaggtcaggagtttgagaccagcctggccaacatggtgaaacccccacccccygtctctactaaaaatacaaaaattagccgggcatggggttgcacacctgtggtcccagctactcgagaggctgaggcaggaggattgctttaacttggga

SEQ ID NO: 10734 - DNA, 201 bp, Homo sapiens
atgctgaggagtcaataactgtaatgaacatttattagtgcaaattgttttagttccctagcaggaatgaatgaatgaatgaatgaatgaatgaatgaatgccattgcaaggtcctacatcctgggagcatggggatcccaaagctctctggatgaaggtcctggtaggtgcagaatgtgtgtgtgtgtggttggtggggg

SEQ ID NO: 10735 - DNA, 201 bp, Homo sapiens
ggcttggcccgcgctggctgatggaggacatgggatctgggctgggtcctgtcctcagccctgccccagtggttgtgacctgtctgatggggcggggctgrgtggttgacactgcggacatcttgggggaagggcttgaccacaggctcttcctgcatatctcaaggtccaacaccaggctggacgctgaggggaacattg

SEQ ID NO: 10736 - DNA, 201 bp, Homo sapiens
aatgctgaggagtcaataactgtaatgaacatttattagtgcaaattgttttagttccctagcaggaatgaatgaatgaatgaatgaatgaatgaatgaatgccattgcaaggtcctacatcctgggagcatggggatcccaaagctctctggatgaaggtcctggtaggtgcagaatgtgtgtgtgtgtggttggtgggg

SEQ ID NO: 10737 - DNA, 201 bp, Homo sapiens
cctagtaattgtagtttttgttgacaatctgcctccctcattagggtactctctcctgagtacccagtggccaggattgctgaatgaatgagtgagggcarcataaaccctttcttggccatcgtgatgaagcctcagagcctcgcctgaacttggtgactcgcctgacatctgccattttggcttggcccgcgctggctg

SEQ ID NO: 10738 - DNA, 201 bp, Homo sapiens
atgcctgtggggtgcgtggcttgactcctcatccctgaaataggaaaacaacagcactggcttcctggggttctcatggagattctctgggttcacatacrtaaaacctgccgtagcacgggtttaatgctctgcaagtggtggccatgacgatgacaaccatggtaccgatgttattgtcagcttccatcctcttttctc

SEQ ID NO: 10739 - DNA, 201 bp, Homo sapiens
ggagatggtggtgcttgggacaactctgagacctgggagaatggagtccctgccccgactctgcctctgctggtccctggactgtagggtgggtggggtcsgcacccccctctttcccccacctccccatgctggacctgctccctatgccctgggaaccaggcgggcaggttctgagcccgccccaccctacagggtgct

SEQ ID NO: 10740 - DNA, 201 bp, Homo sapiens
gtgtgagtgtacatgtgtgtgggcatgcacatgtgtgaatgtgcgtgtgtgtgcctgcacatgtgagtgcatgcgtgtgggcgtgcatgtgagtgtgtgtrcgtgcatgtgcatgcacatgtgagtgcatgtgtgtggcatgcatgtgagtgtgagtgtgcatgcgtgtgggcatacacgtgtgtgtgaatggtgggtgag

SEQ ID NO: 10741 - DNA, 201 bp, Homo sapiens
tatgatataaatagtaggatgctgtttgctaaggacatatttgttgagtgagagattagaagctgcctggctccagcctgagggtcagcgtgggccagagsgggctggcaaagccttctgggaagaggaacctgtgattgactcggacacggggccgggggcgggactcaagagatcctcccaccttggcctcccaaagtg

SEQ ID NO: 10742 - DNA, 201 bp, Homo sapiens
cggtggtgccgacacaggagttccagttatctgaccttggggcctgtgctgtctctgaccgaggcattggagagcttcgcagagtctaaaatattttgccygggctgtcgagttctgtttcatttcctgcaggccttccaattgaacacgactctgccatttgaaagtcttaaaaataaaacccaaacccacagccagcca

SEQ ID NO: 10743 - DNA, 201 bp, Homo sapiens
ccccagccctggtacacgtggcggaggcttcctgaaggacgggcccatgaaggcccgggactgattctggggagtggggccagggatcgatggggcgcccyggaggcggtggggttgcatgtcctttggcgcagacagcaggctgcccctgctagcagcaggggcccagggaccggtcaccagagtggggggccctcaggg

SEQ ID NO: 10744 - DNA, 201 bp, Homo sapiens
aagttatcattgccctgaggggaaacagaagcctagagctggggagaggcttgcccaggcactggggccctcgcagttctggcctgtgggtgtgtcccccstgcccggagcgacctcggggcaccagtgctgtagctgtaggtgggtggggagcaaccatctctccagacccttccaaggtagcggtgacagcccaaggct

SEQ ID NO: 10745 - DNA, 201 bp, Homo sapiens
gacccagccagctcgcgctcaccttcctccccagccgtcccgtccccagctccgccgggccccagccctggtacacgtggcggaggcttcctgaaggacgsgcccatgaaggcccgggactgattctggggagtggggccagggatcgatggggcgccctggaggcggtggggttgcatgtcctttggcgcagacagcagg

SEQ ID NO: 10746 - DNA, 201 bp, Homo sapiens
ggggccctcgcagttctggcctgtgggtgtgtcccccctgcccggagcgacctcggggcaccagtgctgtagctgtaggtgggtggggagcaaccatctcyccagacccttccaaggtagcggtgacagcccaaggctgggatggagagggagagcctggctgtggccaggccctacatcagtgcctgtcctgggttcaag

SEQ ID NO: 10747 - DNA, 201 bp, Homo sapiens
ggacatgctaggcagggggtgcgcacacaggctctgctggctgggccatcagcttcatggggagcaccacccccccagacctgggcctcactccccacccsctcctgcccacaggtgccactggacgagcgcatcgtcttctcggggaacctcttccagcaccaggaggacagcaagaagtggagaaaccgcttcagcctc

SEQ ID NO: 10748 - DNA, 201 bp, Homo sapiens
cgtctgcctcctgggttcaagggattcctcatgcctcagcctcccggatgggatttcaggcacaggccactacgcccagctaaatttttttttttttttttgagatggagtcttgctctgtctctcaggctggagtgcagtggcgcgatctcagctcactgcaacctccgcctcccagatacaagtgattctcctgcttca

SEQ ID NO: 10749 - DNA, 201 bp, Homo sapiens
gatgatccacctgcctcggtctcctaaagtgctgggattacaggtgtaagccatggcgcctggccacttttttttttttttttttttgagaccaagtctcrctctgttgcccaggctggagtgcagtggctggatcttggctcactgcatcgtctgcctcctgggttcaagggattcctcatgcctcagcctcccggatgg

SEQ ID NO: 10750 - DNA, 201 bp, Homo sapiens
cacaatctcagctcactgcaacctccgcctcccaggttcaaggcactctcctgactcagcctcccgagtagctgggaccacaggcgtgcaccaccatgccyggctaagtttttgtatttttagtagagacggggttttaccatgttggccaggctggtctcaaactcctgacctcaagccatctgactgccttagcctccc

SEQ ID NO: 10751 - DNA, 201 bp, Homo sapiens
aaatgctgaggagtcaataactgtaatgaacatttattagtgcaaattgttttagttccctagcaggaatgaatgaatgaatgaatgaatgaatgaatgaatgccattgcaaggtcctacatcctgggagcatggggatcccaaagctctctggatgaaggtcctggtaggtgcagaatgtgtgtgtgtgtggttggtggg

SEQ ID NO: 10752 - DNA, 201 bp, Homo sapiens
gaaatgctgaggagtcaataactgtaatgaacatttattagtgcaaattgttttagttccctagcaggaatgaatgaatgaatgaatgaatgaatgaatgaatgccattgcaaggtcctacatcctgggagcatggggatcccaaagctctctggatgaaggtcctggtaggtgcagaatgtgtgtgtgtgtggttggtgg

SEQ ID NO: 10753 - DNA, 201 bp, Homo sapiens
catgatgaaaccacgtctctactaaaaaattagccgggcctggtggtgcgtgcctgtagtcccagctacttgggaggctgcggcacaagaatcgcttgaamccgggaggtggaggttgcagtgagacgagatcgcaccattgcactccagcctgggtgacagagtgagactctgtctcaaaaaaaaaaaaaatctacctct

SEQ ID NO: 10754 - DNA, 201 bp, Homo sapiens
gcctcagcctcctgagtagctgggattacaggcgtgcaccaccatgcccggctaattttggtatttttagtagagacagggtttcaccatgttggccaggstggtcttgaactcctgacctcaggtgatccacccacctcgacctcccaaagttctgggattacaggcatgagccaccacgcccaacctataaaaagagat

SEQ ID NO: 10755 - DNA, 201 bp, Homo sapiens
taatagcttggtttataaaaacagattttttttttttttttgagatggcgtctcactcaggctggagtgcagtggcaagatctcagctcactacaacctcygcctcccaggttcaagcaattctcctgcctcagcctcctgagtagctgggattacaggcgtgcaccaccatgcccggctaattttggtatttttagtaga

SEQ ID NO: 10756 - DNA, 201 bp, Homo sapiens
gcgtgggcaacatggcaaagccccgtctctagtaaaaatacaaaaaattagccgggcattgtcgtatgcgcctgtggttccagctaattgggaggctgagktggaaggattgcctgagcaaaagtaacacatgtacaaacaatttaggagggtaaaataaaacatgaaaacaccctccatctttctccgttaaatcccact

SEQ ID NO: 10757 - DNA, 201 bp, Homo sapiens
gggaggctgaggagggcggattgcttgagctggggagttcaagaccagcgtgggcaacatggcaaagccccgtctctagtaaaaatacaaaaaattagccrggcattgtcgtatgcgcctgtggttccagctaattgggaggctgagttggaaggattgcctgagcaaaagtaacacatgtacaaacaatttaggagggta

SEQ ID NO: 10758 - DNA, 201 bp, Homo sapiens
ggatgctcaagttgcctccccatctggggtcccaccctgggccagggaggaacccgtccctgggccagggaggaacccgtccctgggccaggggcctcacatggtaggcaggctgtgggtgttccaggcttgggtgtgccacgaagcctggggaaaggccactgtggccccatctctaacccccctggcctaggcctccag

SEQ ID NO: 10759 - DNA, 201 bp, Homo sapiens
ggccgtcatccgaactgacatggaccaaattatcacctccaaggagcaccttgccagcaagatccgaggtaggcagccacccccgtgctcgacgggccctscaggggccaaggtggactttctttttatttcatgattcatgtaaatttcacagcaatgacttgctcattgatcatttgtaagaattagagccaaatctgc

SEQ ID NO: 10760 - DNA, 201 bp, Homo sapiens
tggatgctcaagttgcctccccatctggggtcccaccctgggccagggaggaacccgtccctgggccagggaggaacccgtccctgggccaggggcctcacatggtaggcaggctgtgggtgttccaggcttgggtgtgccacgaagcctggggaaaggccactgtggccccatctctaacccccctggcctaggcctcca

SEQ ID NO: 10761 - DNA, 201 bp, Homo sapiens
tttggatgctcaagttgcctccccatctggggtcccaccctgggccagggaggaacccgtccctgggccagggaggaacccgtccctgggccaggggcctcacatggtaggcaggctgtgggtgttccaggcttgggtgtgccacgaagcctggggaaaggccactgtggccccatctctaacccccctggcctaggcctc

SEQ ID NO: 10762 - DNA, 201 bp, Homo sapiens
gtagagatggggttttgccatgttagccagactggtctcgaactcctgacctcaagtgatttcccccacctcagcctcccaaagtactgggattgcaggcrtgagccaccacacccagcttcattctttaacaaagttattcaagcatctgtgccaggtactgacctggacttagcagtaacaggacagaccccgggccca

SEQ ID NO: 10763 - DNA, 201 bp, Homo sapiens
tgcactgctttttccttcccctgccccaccccatccacttctgtgctggaggaagaagggtattctgtagacgctgctgggcagaggtttaaggaaggagyccgggcagatgcctaggtttaaaacccgtgagggtggagcaaagccattctcttctcctggtagaatcttagggcctgagtcatggaagggtacaatctt

SEQ ID NO: 10764 - DNA, 201 bp, Homo sapiens
cacctcagtggcaggcctggatcggatagtccaaggccttagctatttaaaccacgttctgctattagtatgtcatccgtggtgcccagactgggcagggkgacactgaaaaaggcctccaagagaggtaagctttcggaggcggggagaggaagtgggaggaggagccgagtgggaatagagcagcttgtgtcagtctcc

SEQ ID NO: 10765 - DNA, 201 bp, Homo sapiens
gggaatatcgctgactccttctgtccctcataaccaactgtcactcactcctccccatccctcctaatctctcttcagtccctccagctggctccagggcrttcctcctgccacctccttcctcactgggcttcctgcctctcctccgacccctcccaccctcgacagccacagagagctgttggaggcacaatctggcca

SEQ ID NO: 10766 - DNA, 201 bp, Homo sapiens
tcctcacgtccgtggaccaatacctggagctcattggcaactccttaccaggtaaaggagcacccatcccaggccacaatgccctgcacaggcatctggakctggccaggggaggggtggccctgagcccattgctttcagccccatgtttgcggagagaccaactaggcttagagctgtggatggagacctcattgtttg

SEQ ID NO: 10767 - DNA, 201 bp, Homo sapiens
gaaattgaaggagggaaaaattccttttgctgtattttgtccctccccacatgcctccctccccctgtggacacttaagccacactttggcctccacagcygaaatctgaagggaaacccaagaaggtagtgcttgacccttgaacctgggggctctgaccttgtgttgtttgtgctttacagagtttaaaacctaaccca

SEQ ID NO: 10768 - DNA, 201 bp, Homo sapiens
gttacaacactagaccctctaaggctatcagtgcttccccccaaaccaccatttcgagggggcattcatatatatatatatatatatttttttttagacarggtcttgctctgtcacccaggctggagtatagtatcatgatcacagctcactgcagcctcaacctcccaggctcaagcaatcctcctacctcagcctcca

SEQ ID NO: 10769 - DNA, 201 bp, Homo sapiens
cacccaccttggcctcctaaagtgttgggattacagacatgagccaccgcacctagccggtagttttttttcaaagtgccgttccatctgtccctttgtgsggtggggatcactggcttcccttttcttaatgggaacacagaagcagagtgacgtgcgtgccccagggaagtggctggcggacccaggcctttcaccggc

SEQ ID NO: 10770 - DNA, 201 bp, Homo sapiens
aaggctgttacaacactagaccctctaaggctatcagtgcttccccccaaaccaccatttcgagggggcattcatatatatatatatatatatttttttttagacagggtcttgctctgtcacccaggctggagtatagtatcatgatcacagctcactgcagcctcaacctcccaggctcaagcaatcctcctacctcag

SEQ ID NO: 10771 - DNA, 201 bp, Homo sapiens
agtggctggcggacccaggcctttcaccggcccagcacacgggacagggggttgaagtgcaggatccgccagctctggtttcccggctctttgcaggtgcyggatcacttgacaggatccaagcaggaagaggacgcggaggatctgagcttaggtgaccgccttagtttccatgaggaggtagtgaccttttctgctgct

SEQ ID NO: 10772 - DNA, 201 bp, Homo sapiens
tccccctgtggacacttaagccacactttggcctccacagccgaaatctgaagggaaacccaagaaggtagtgcttgacccttgaacctgggggctctgaycttgtgttgtttgtgctttacagagtttaaaacctaacccaagagtggggtggatgtgacttattacccactctaagaaatgggtctgcacggatgctgg

SEQ ID NO: 10773 - DNA, 201 bp, Homo sapiens
tcgatctggatgtcttagtcaatgcaataagagaagagagaaaaaaagagaagtacaaatgcaagacagcgggaaagccctcatggagttcagggactggygacaacaaagcactgttggtctttggacttctccaccccctaaggctgcctacaggaagcagagtcttggagagaccagaacttgcccagggccacacgt

SEQ ID NO: 10774 - DNA, 201 bp, Homo sapiens
gacaggctggccttctctgggcctgagcctgacctcagagctgatgccaagggatcagttctctgacatcctctggtggagggcaaccacagagggcagcygctcatcaggcactgtctccacagggaccacggcaaagtcgggcagtgcccccatcctcaagtgccccacacagttcccgctcatcctctggcatcctta

SEQ ID NO: 10775 - DNA, 201 bp, Homo sapiens
cttcgtaattctgggggcctaagatattttcctttcacaccaccagcagtgtacggaggttcccttttctccacatcctcgctagcatttgttattgtctktcttttggataaagccattttaactggggtgacgtggcatctcattgtagttttgatttgcagttctctgatcagtgatgtcaagtaccttttcatatgc

SEQ ID NO: 10776 - DNA, 201 bp, Homo sapiens
tggggccctggagcggggacgggacctgcagctggtgcggtgccctcagccctggtgccaattcagctgctctgcccacagatctcggacgccgtgtaccrcatggtgtacgagcaggccaaggcgcgcttcgaggaggtgctgtccaaggtgcagcaggtgcagccggccatgcaggccgtcatccgaactgacatggac

SEQ ID NO: 10777 - DNA, 201 bp, Homo sapiens
gtcatttacaagctgtgtgtccctggagaagtcccttaacctctctgagcctcagtgttctctgggaagtgaggacagtgcgtgaaataatgagtgtgcaygtgcagtgccgtgctgggcacagaggtggtgctgacaagtggctgctgctattgtgtgtcgattgtgacagtaggtggggggcaagtagaaagtagaaag

SEQ ID NO: 10778 - DNA, 201 bp, Homo sapiens
tctcttgcctcttcttcctttcccttctcctccccactttgggccacactgagtagggccttgaagccaggtgggatttgggcttggccgcaccttaaccmtcagggaccctctctcttgcctccctcaggcctatgagcggcaggtcccaccacgagccgtcatcaacagtgcaggctacaaaatcctcacgtccgtgga

SEQ ID NO: 10779 - DNA, 201 bp, Homo sapiens
aaagccaacatctcctgagtgctccctgccccagcaaccttgtgaggtggtggtggaggactatgacattatacccattttacagataaggaaactgaggyccagagaggctgttctgagctcagggtttgcttcttgttttaagcatggctccagaaatacccgtctctgtgagaaacccaccctcctctcccaaggcca

SEQ ID NO: 10780 - DNA, 201 bp, Homo sapiens
ttttggatgctcaagttgcctccccatctggggtcccaccctgggccagggaggaacccgtccctgggccagggaggaacccgtccctgggccaggggcctcacatggtaggcaggctgtgggtgttccaggcttgggtgtgccacgaagcctggggaaaggccactgtggccccatctctaacccccctggcctaggcct

SEQ ID NO: 10781 - DNA, 201 bp, Homo sapiens
tctcgggtcttctgcttggcacacactcccttcccggtgtcctccctcccctagcagggactctttgtgtctcagctgctacctccctctgggaggcttcygtgaccctgcaggcttggtcagtcaccttcctgggctcctgtgacctcctgtgcttctcccagttggggctcctagtaattgtagtttttgttgacaatc

SEQ ID NO: 10782 - DNA, 201 bp, Homo sapiens
cttttggatgctcaagttgcctccccatctggggtcccaccctgggccagggaggaacccgtccctgggccagggaggaacccgtccctgggccaggggcctcacatggtaggcaggctgtgggtgttccaggcttgggtgtgccacgaagcctggggaaaggccactgtggccccatctctaacccccctggcctaggcc

SEQ ID NO: 10783 - DNA, 201 bp, Homo sapiens
gaccttttggatgctcaagttgcctccccatctggggtcccaccctgggccagggaggaacccgtccctgggccagggaggaacccgtccctgggccaggggcctcacatggtaggcaggctgtgggtgttccaggcttgggtgtgccacgaagcctggggaaaggccactgtggccccatctctaacccccctggcctag

SEQ ID NO: 10784 - DNA, 201 bp, Homo sapiens
agaccttttggatgctcaagttgcctccccatctggggtcccaccctgggccagggaggaacccgtccctgggccagggaggaacccgtccctgggccaggggcctcacatggtaggcaggctgtgggtgttccaggcttgggtgtgccacgaagcctggggaaaggccactgtggccccatctctaacccccctggccta

SEQ ID NO: 10785 - DNA, 201 bp, Homo sapiens
ctggctggcacaaggctgagcaggagcccggggctcacagtggccgaggcagggctaggaccaggcccaggtgggcgggcagcactcagctgctgtggtaratgcggaggcgctgggcgatgtcctggcggcacagcgggcaggtgcgcagtggctggcagcactgctggcagcagcagacgtggccacagttgaggaaga

SEQ ID NO: 10786 - DNA, 201 bp, Homo sapiens
gagaccttttggatgctcaagttgcctccccatctggggtcccaccctgggccagggaggaacccgtccctgggccagggaggaacccgtccctgggccaggggcctcacatggtaggcaggctgtgggtgttccaggcttgggtgtgccacgaagcctggggaaaggccactgtggccccatctctaacccccctggcct

SEQ ID NO: 10787 - DNA, 201 bp, Homo sapiens
ccaaagcaagaggagaccttttggatgctcaagttgcctccccatctggggtcccaccctgggccagggaggaacccgtccctgggccagggaggaacccgtccctgggccaggggcctcacatggtaggcaggctgtgggtgttccaggcttgggtgtgccacgaagcctggggaaaggccactgtggccccatctctaa

SEQ ID NO: 10788 - DNA, 201 bp, Homo sapiens
agcggcacccaggaaggggctgtggtcaccctgggggcttcacatgtccgcggtatgccctgcagcaaatggacaatgccgtgtatacgttcgagaccctyctgcaccaggagctggggaaggggcccaccaaggaggagctgtgcaagtccatccagcgggtcctggagcgggtgctgaaggtgagcggccccacgccgt

SEQ ID NO: 10789 - DNA, 201 bp, Homo sapiens
tccaaagcaagaggagaccttttggatgctcaagttgcctccccatctggggtcccaccctgggccagggaggaacccgtccctgggccagggaggaacccgtccctgggccaggggcctcacatggtaggcaggctgtgggtgttccaggcttgggtgtgccacgaagcctggggaaaggccactgtggccccatctcta

SEQ ID NO: 10790 - DNA, 201 bp, Homo sapiens
gtctccaaagcaagaggagaccttttggatgctcaagttgcctccccatctggggtcccaccctgggccagggaggaacccgtccctgggccagggaggaacccgtccctgggccaggggcctcacatggtaggcaggctgtgggtgttccaggcttgggtgtgccacgaagcctggggaaaggccactgtggccccatct

SEQ ID NO: 10791 - DNA, 201 bp, Homo sapiens
ggtctccaaagcaagaggagaccttttggatgctcaagttgcctccccatctggggtcccaccctgggccagggaggaacccgtccctgggccagggaggaacccgtccctgggccaggggcctcacatggtaggcaggctgtgggtgttccaggcttgggtgtgccacgaagcctggggaaaggccactgtggccccatc

SEQ ID NO: 10792 - DNA, 201 bp, Homo sapiens
aggtctccaaagcaagaggagaccttttggatgctcaagttgcctccccatctggggtcccaccctgggccagggaggaacccgtccctgggccagggaggaacccgtccctgggccaggggcctcacatggtaggcaggctgtgggtgttccaggcttgggtgtgccacgaagcctggggaaaggccactgtggccccat

SEQ ID NO: 10793 - DNA, 201 bp, Homo sapiens
tcaaggggcgtctctcctctgggcctcagttccccatctctagagtggaggtcaccccatctctcaaggagggtggcaggatggggaaagatttgagccarctggttgaatacactgagccctttcactcaccctgacccgaggccaactgggatctcagaaactcttcatttctctctggccagaggcaggggcccctct

SEQ ID NO: 10794 - DNA, 201 bp, Homo sapiens
ctcctcggcgcgattcttttcccgcgcgggcaaggttggggaggggaggggggtgacactcaggctggagtcccccagagcacccccagtttttcagatgyccccaccagccccgtctctttctctgcttaggtacagggcgggtgcgctcttcgcagtctctccgcggtctccctttctgggaccttctctttgtctcct

SEQ ID NO: 10795 - DNA, 201 bp, Homo sapiens
tcagtgatttcttccttattaatgagttgttgggaggcttacgtgaagtaactcatgtggcttgcttagcacagagcctggcataggagaggcacttgtaygtggggtgacggttcaggtgggtcgcccctcgctgtctagtgggccctgagcaccgcgtccgcctgcacttatttttgtgtcctgtagaatttcaccacc

SEQ ID NO: 10796 - DNA, 201 bp, Homo sapiens
ctgcctctcctccaagcctcagtttcccccatggttcaatggaggggttggataagagcctctggtagtagagtgaccttgctactaaccatgtgtcaccytccttcagactgacccttccaggctgtcctgtgccctcgaggtcaagcccagaccctgaaatgccctcacagaccaagccctgcagccagtagccccact

SEQ ID NO: 10797 - DNA, 201 bp, Homo sapiens
atgaaggtcctggtaggtgcagaatgtgtgtgtgtgtggttggtgggggttggttacagaggggcagggcagatgtgggaggggcttggggtggtgacgtwccccctgcccttgtggaaggagtggtttgggcccctccgtgtctcagacccgcaggcacgaagccatgtggccatccacaacttccttcctcctgcctgt

SEQ ID NO: 10798 - DNA, 201 bp, Homo sapiens
gggcttggatctgagctggtgtggctgaaacagcccagtcaagctcacctgggccctgcccctgtagagctcctgtctggtcaggagacacacagaacaaytaccactcagtcattaattaaaatcattaccggagggcgaattgctataaagaaatggccactcttccctgggagctcacgtgtcctgggatctccccag

SEQ ID NO: 10799 - DNA, 201 bp, Homo sapiens
gccttgacccacaggacgtgtggtggcgcctggcactcagggacccccagctgccccagccctggtctctggcgcatctcttccctcttgtcccgaagatytgcgcctctagtgccttttgaggggttcccatcatccctccctgatattgtattgaaaatattatgcacactgttcatgcttctactaatcaataaacgc

SEQ ID NO: 10800 - DNA, 201 bp, Homo sapiens
gggcctggagatagcatcacggccttgctgctttcagcaacgaggcctggaatgagtcacatcccaaccacagacccccaaggcgggatgagacgggtctyctttgagcagagtccagcacaggggcggctgtgggatcagtgctgtgtcctgacccttcccctgtggccctgtagctgtgaaggaggccgcggtgcagag

SEQ ID NO: 10801 - DNA, 201 bp, Homo sapiens
attaactctttcatgcctgtccgaatcttggcctttctcgggtcttctgcttggcacacactcccttcccggtgtcctccctcccctagcagggactctttgtgtctcagctgctacctccctctgggaggcttccgtgaccctgcaggcttggtcagtcaccttcctgggctcctgtgacctcctgtgcttctcccagtt

SEQ ID NO: 10802 - DNA, 201 bp, Homo sapiens
cctgggtttacctttgtggccatgagcaccaggtggccatccctggtagcaggcgccagccccagggcctggacttcgaggacccaggcaaagtgtgtggrgggtgctgcctggccacagggcggccctgctcagcccccgcggccccggcccctgcagtacatggagaagctgtcccggctggcgtaccaccccctgaag

SEQ ID NO: 10803 - DNA, 201 bp, Homo sapiens
taaatctttgtggaatggattaactctttcatgcctgtccgaatcttggcctttctcgggtcttctgcttggcacacactcccttcccggtgtcctccctyccctagcagggactctttgtgtctcagctgctacctccctctgggaggcttccgtgaccctgcaggcttggtcagtcaccttcctgggctcctgtgacct

SEQ ID NO: 10804 - DNA, 201 bp, Homo sapiens
tgagcggaggggtgactttgaatagaacgggaggtgggtttgctttaagcaattcccagcttgacttttccctttagcttcgtaattctgggggcctaagmtattttcctttcacaccaccagcagtgtacggaggttcccttttctccacatcctcgctagcatttgttattgtctgtcttttggataaagccattttaa

SEQ ID NO: 10805 - DNA, 201 bp, Homo sapiens
caaggacccagcaggggagggcagggggtggggtacagagatggggctctggggcgctgccggtttggaaggagatgacatgcttagatttggacaagtgsagggccagtgcacgtggagatactcgctgtcttattcatcacttactgggcatctgagcacctaccctggacgaggcactggggtgcagctgggaatgat

SEQ ID NO: 10806 - DNA, 201 bp, Homo sapiens
ggcttcactgaggtgcgagatgtcttcttcaaggaggtcacggacatgaacctgaacgtcatcaacgagggcggcattgacaagctgggcgaggtgaggcyggcaccgcccctaggagggggtctcctgagagtaggtctggtctgtcccagagggccccggctgcgtgactccgggcagccgttcccctccaaggccgtc

SEQ ID NO: 10807 - DNA, 201 bp, Homo sapiens
tgtgaacagagccgcaacaaacacgggagtgcagatatcgctgcgatgggctgatttcctttatttgggtatatacccagcagtgggattgctggattgtrtggtagctctattagttttttgaggaacctccaaactgttctccatagtggttgtactcatttacattcccactgtgaaccctgaaaatttgaggcaggt

SEQ ID NO: 10808 - DNA, 201 bp, Homo sapiens
tgggattacaggtgtgagccactgtgcctggcctgtgtttttttttgtttttttttttttttttgagacggagtctcgctctgtcgcccaggctggagtayagtggcgtgatctcggctcactgcaagctccacctcccgggttcacaccattctcctgcctcagcctcctgagtagctgggactacaggcgcccgccacc

SEQ ID NO: 10809 - DNA, 201 bp, Homo sapiens
gcatccgtttgatgcatctgtacagtttgataaatttagataaatatgttctcttaccaacacctcagtcaagacataggaccatttttatccccctaaarttccctccagatttttttttgccatcaattctccttcatcccatccctagacaaggcagtttttttttggtgtgaaatgaatgaatcttgaattgtcagg

SEQ ID NO: 10810 - DNA, 201 bp, Homo sapiens
ctgggattacaggtgtgagccactgtgcctggcctgtgtttttttttgtttttttttttttttttgagacggagtctcgctctgtcgcccaggctggagtrtagtggcgtgatctcggctcactgcaagctccacctcccgggttcacaccattctcctgcctcagcctcctgagtagctgggactacaggcgcccgccac

SEQ ID NO: 10811 - DNA, 201 bp, Homo sapiens
tcttgaattgtcagggactggccccagatttgcggagagctattcacatgtgtgcatagcaccctactgttcacaatgcctttccactttctgtttttttctttggttttgttttgtttttaatggagtctcactctgtcaccaggctggagtgcagtggcacgatcttggctcactgcaacctctgcctcccgggttcaa

SEQ ID NO: 10812 - DNA, 201 bp, Homo sapiens
ggactacaagcatgcaccaccaggcccagctaattttttaaaaaaattatttaacgacggggtctcattctgttgcccatgctcgtctcaaactcctggcytcaagcaatcctcttgcctcagcttcccagagtgctggcattatgagtgtgagccaccgtgctcagcctgaatatcattaaaaaaaaaatcctcgcaaca

SEQ ID NO: 10813 - DNA, 201 bp, Homo sapiens
ccctcccctcccccaaactgggctgccctgggtgccctctctggacggcagctcattcttcatctctggggaatatcgctgactccttctgtccctcataaccaactgtcactcactcctccccatccctcctaatctctcttcagtccctccagctggctccagggcgttcctcctgccacctccttcctcactgggctt

SEQ ID NO: 10814 - DNA, 201 bp, Homo sapiens
caggccccctcccctgctgctttgcggggggcagggcagaaatggactccttttgggtccccgaggtggggtcccctcccagccctgcatcctccgtgccstagacctgctccccagaggaggggccttgacccacaggacgtgtggtggcgcctggcactcagggacccccagctgccccagccctggtctctggcgcat

SEQ ID NO: 10815 - DNA, 201 bp, Homo sapiens
cctcaagtgatccacctgcctcggcctcccaaagtgctgggattacaggtgtgagccactgtgcctggcctgtgtttttttttgtttttttttttttttttgagacggagtctcgctctgtcgcccaggctggagtatagtggcgtgatctcggctcactgcaagctccacctcccgggttcacaccattctcctgcctca

SEQ ID NO: 10816 - DNA, 201 bp, Homo sapiens
gcattttagagttgagaaattctctgatgtcaaacttcctggaatccttcatagtgctgatgactatgtttatttttctttccttgaaaaaaaaaaaaaaagggcaaataacttcattccttccccacccaaagactgtaacttttttttattacaataattgatttcttaacatatagtagagagagttgagaaagttta

SEQ ID NO: 10817 - DNA, 201 bp, Homo sapiens
gaaatgagaaaggcccagaacgtgcaggtctgcggaggggaagtgtcctgagtgaaggaggggacccccatcctgggggatgctgggagtgagtgagtgakatggctgagtgagggttatggggagcctgaggttttatgggcctgtgtatccccttctcccggccccagcctgcctccctcctgcccgcctggcccacag

SEQ ID NO: 10818 - DNA, 201 bp, Homo sapiens
ttggccaggctggtcttgaattcttaacctcaagtgatccacctgcctcggcctcccaaagtgctgggattacaggtgtgagccactgtgcctggcctgtktttttttttgtttttttttttttttttgagacggagtctcgctctgtcgcccaggctggagtatagtggcgtgatctcggctcactgcaagctccacctc

SEQ ID NO: 10819 - DNA, 201 bp, Homo sapiens
agcattttagagttgagaaattctctgatgtcaaacttcctggaatccttcatagtgctgatgactatgtttatttttctttccttgaaaaaaaaaaaaaaagggcaaataacttcattccttccccacccaaagactgtaacttttttttattacaataattgatttcttaacatatagtagagagagttgagaaagttt

SEQ ID NO: 10820 - DNA, 201 bp, Homo sapiens; identical to SEQ ID NO: 1879

SEQ ID NO: 10821 - DNA, 201 bp, Homo sapiens
gttggccaggctgatcttgaactcctgacctcgtgatccgctcaccttggcctcccaaagtcctgggattacaggcatgagccactgtgcccagactgtaygcctttctcttcccagccagatgggatcctttcaccagcttggtccccataacacatctgcagagctcagttttagcaattgtcagttgcccatgggacg

SEQ ID NO: 10822 - DNA, 201 bp, Homo sapiens
cagcattttagagttgagaaattctctgatgtcaaacttcctggaatccttcatagtgctgatgactatgtttatttttctttccttgaaaaaaaaaaaaaaagggcaaataacttcattccttccccacccaaagactgtaacttttttttattacaataattgatttcttaacatatagtagagagagttgagaaagtt

SEQ ID NO: 10823 - DNA, 201 bp, Homo sapiens
tgtcatgtcgaaggaggacagtcctggtcctcagagagaaagatctatttaaacagataattgcacacacacaaaatcatgttgaatgtgatgcttgccaygaaggaggagtttaggacactggggagggggtgataataatggcaggcctgacctagtaggggggcagggtgcagaaatgtcctctctgatgaagggtaa

SEQ ID NO: 10824 - DNA, 201 bp, Homo sapiens
gctgtgcagaagctctttagtttaattagatcccatttgtcaattttggcttttgttgccattgtttctggagttttagacatgaaatccttgcccatgcstatgtcctgaatggtattgcctaggttttcttctagggtttttatggttttaggtctaacatttaaatctttaatccatcttgaattaatttttgtataa

SEQ ID NO: 10825 - DNA, 201 bp, Homo sapiens
ggcgtcttcctctcacccatccactgaaggcctggatctccctctctatctatctctctctctctctctcacacacacacacacacacacacacacaaacacacacacacacaatgataatgccaaccctaatgctaatgcctaagttctatgttctgcttggtaattagctcactctgccttgatctcttattgcgttac

SEQ ID NO: 10826 - DNA, 201 bp, Homo sapiens
accctaatgctaatgcctaagttctatgttctgcttggtaattagctcactctgccttgatctcttattgcgttacctcagcattctcactatagttctayaactaggaatgattataactcttactgggtcattttgcaaatgaagaatttggaaattgaagttaattacttaaactcacacatgtactaagtggggcag

SEQ ID NO: 10827 - DNA, 201 bp, Homo sapiens
ccaccatgcccagataaattttttttgcattttttgtagagctagagttttgccatgttgcccaggcagatcttgaactcctaagcttaagctatctgccyaccttggcctcccaaagtactaggattgcaggtgtgagccactgtgcccaactatttaacaatgtttctacctatcttttcattagatagcattccattt

SEQ ID NO: 10828 - DNA, 201 bp, Homo sapiens
ttgaccaggaaaccaggttgacctgcccagggccttagcagccagcctgcccaagaggcttttcagcaaaatgctcaggtgtgtccagagccctctgaccygaagggcctcaaggagaacctctagattatgctggactgaagccctcatcaagctgctcctattcgcagaggctcaagaccatggcaaggtggggtgctc

SEQ ID NO: 10829 - DNA, 201 bp, Homo sapiens
aaaataaatgccctgtagggcagtatttgaggaataggatattggtgagagagattcactactaagaggttcctatttttgttaactgcattcctggtcaygaaatcatgttaatcctagtgctacacatggggttgaccaggaaaccaggttgacctgcccagggccttagcagccagcctgcccaagaggcttttcagc

SEQ ID NO: 10830 - DNA, 201 bp, Homo sapiens
tgagaatagaggaagcttgatgtgggcctcagtccaacttaatctggaaagtctgcctaaggcatattttagagagggaggacacattttggggcacatawgttttatattgttgcaccccaaaatatatataactattatgtctcaataaaataaataaattgatgaattagttaattaaaaataaaaataaatgccctg

SEQ ID NO: 10831 - DNA, 201 bp, Homo sapiens
gaactcactttctagctcttcttccctccccagaggttgggggatggggctgaaagttccaaccctctaatcatgccttggtctttttggcaaccagcccmcataatgaactatctaggggcccccagtagtgtgacttcattaacataaactcaggcatggttgaaaggggtctgttatgaataagaaaacatgcttcct

SEQ ID NO: 10832 - DNA, 201 bp, Homo sapiens
cacctatccacgtggttgtggcagcaatatcagcacttctcctttatcactgcacccctttgtcactcttgatatgtcttgtgttaggtacctggcacctkccagaccaatcagacttctgagaatttgcaattggaattgacaacttccattttcagtctactaggtcagctgttcaaaggagatttatattcagggagt

SEQ ID NO: 10833 - DNA, 201 bp, Homo sapiens
ttggctcaccaagataagtgtcctggcaagggacacatatactcacagaaaagggcactcttttctaatttacacaagcaccatagagactagaagtggtrcatgtgaggctaagagtgatggtttaaaaagaattggatttttactagagatgggttttctccatgttggtcaggctggtctcgaactcccaacctcagg

SEQ ID NO: 10834 - DNA, 201 bp, Homo sapiens; identical to SEQ ID NO: 1892

SEQ ID NO: 10835 - DNA, 201 bp, Homo sapiens
cctctctatctatctctctctctctctctcacacacacacacacacacacacacacaaacacacacacacacaatgataatgccaaccctaatgctaatgyctaagttctatgttctgcttggtaattagctcactctgccttgatctcttattgcgttacctcagcattctcactatagttctataactaggaatgatta

SEQ ID NO: 10836 - DNA, 201 bp, Homo sapiens
cctcccttggaaagaggtaaaaaaaaaaaactccttgatgtttattaggggctttaaattggagtttgacttgtgacctgccatagtttgaataatttgcytccatggtattttgcctatctcagtttcccagctgcatacctaacttctgcctctctttttcagcaggttagttgaacttatttttaaggagaaccagtc

SEQ ID NO: 10837 - DNA, 201 bp, Homo sapiens
caggtacagtggctcacacctgtaatcccagcactgtgggagcccaaggtgggtggatggcctgaggtcaggagtttgagaccagcctggacaacatggtraaacgctgtctctactaaaaacacaaaaattacttgggcgtggtggcatacgcctgtaatcacagctactccagaggctgaggcaggagaatcacttgaa

SEQ ID NO: 10838 - DNA, 201 bp, Homo sapiens
ccagcaggatgaaatctcaattaattgcttgacagagaattaaaacaaaggcaagtggtgcttttaaaaaagataaaaataggtgaatataaagttgaaargaggccaggtacagtggctcacacctgtaatcccagcactgtgggagcccaaggtgggtggatggcctgaggtcaggagtttgagaccagcctggacaac

SEQ ID NO: 10839 - DNA, 201 bp, Homo sapiens
tctggtctgtacttgtggtccagcttaagcagctgagtagctgtttaatggtccagggcctgggtgaactggttaataatctcaggaagtgctttcagccrcttgtaataggatggctctgctgctgcaacctgatatagtggggccatttcacaaagcgagttaagtcccttttgggctgcatatcctgtccaatgccaa

SEQ ID NO: 10840 - DNA, 201 bp, Homo sapiens
agagaggctgcatcagagtttgttagtcaaatgccattataaaacagagactccagttgtttcactcctctctctaaaatactactttaaaaaacaaaggrcataagcaacttgtagagtgtgttgccttacaaagaaagaaaaaagagccttgaaatttccaatcatgacaaatagagcaaaccttaaagtcaacacttt

SEQ ID NO: 10841 - DNA, 201 bp, Homo sapiens
gtccctgattctcccacctctcagctcctggcaacaacctttctttgcttctatgacttcagcgtttttaggttctacctgtggatcatgcagtgtttgtstttctgtgtctagcttattacacttagcataatgtcctccaggttcatctattttgctacaaatggcaggatgtccttctcttttatgactgaataatat

SEQ ID NO: 10842 - DNA, 201 bp, Homo sapiens
ggaaatcacccattttccctcttgctataagaaaaaaaagggttgctctagatgtgaagggaggccaacagcagttaacaatataaaaagcaaattaattmgagaaatagttctagtgcttaaaagataccccttcacagtaattgccttggggtacaagtacacagttaacaactttcctaagaaacctgaaagcataaa

SEQ ID NO: 10843 - DNA, 201 bp, Homo sapiens
ctgtaggaaaataaaaacattcttcagataagaaagcctatctaaaatatattttcttgtacaaaaagaatacatcattttctgtaaattgtacatttccrtaacagattaaaaaataactctgccccctactctagacaaatgtaatattttcacttatatggaatacattctattctgtatgtagtatgcattgatttg

SEQ ID NO: 10844 - DNA, 201 bp, Homo sapiens
aaagtgtaaatgggtgaaaaatgttaagtgttcttttattaggaaaaccatgcactggagcttatgactcaagatgtttatgaaggtgagataatcatctstaggaaaataaaaacattcttcagataagaaagcctatctaaaatatattttcttgtacaaaaagaatacatcattttctgtaaattgtacatttccgta

SEQ ID NO: 10845 - DNA, 201 bp, Homo sapiens
gattgtgggttaatgtgactaaatgtcccttgtgttctttttaaaaactgtcaaggctaggtacagtgggtcacaactttaatcccagcactttgggaggytgacgtggaaggattgcctgaggccagtagttcaagaccagactaggcaatgtaggaagaccccatctctacagtcaaataataaaaaaaaaaaaattag

SEQ ID NO: 10846 - DNA, 201 bp, Homo sapiens
agtgtggtcttagccaaaatcagtggcaatgctggttcttgaatgctaagtaaggtattcctcttctagttgacttttttaaaaaatgtggttttagcttkttaggcacaattttgactttggtaagtaacttgtaacctctgtcaagtatatgtgagggaactgaattttctccaatgctccattcctaagaagtggaag

SEQ ID NO: 10847 - DNA, 201 bp, Homo sapiens
gttgcccaggctggtctcaaactcctggcctcaagcaatcctcctgcacttcagcctgggattacaggagctgcgattacaggcacgagctatcatacctrgcttgatttatcctgttcttaacccttctttcaaaaattgttaaatgttttacattccttaaggtaagcaacgctgtacaatagaaatataatgcaagtc

SEQ ID NO: 10848 - DNA, 201 bp, Homo sapiens
ctgctgtacagtagtggcaggaacttactcttcttcctaagtgtcaggcccccagtaaactagaaaaaaacatactaaataaattggagagaacaataaamctagattcaaaaaataggtccaataaattcagaatgccactaggtatatactaaaattgatttgggattgtgggttaatgtgactaaatgtcccttgtgt

SEQ ID NO: 10849 - DNA, 201 bp, Homo sapiens
acagaagaaaaataactggctaacatcaggttacattttgttgtaaggattaaagatagagggaactttattgtcatgccgattgaaactggtctgtggasttttagaatgtgtgattccatttggtttggtctggtttgtttgggtctaatgcaggaacttagtccaaaactatggcctcctataatttttatttaacaa

SEQ ID NO: 10850 - DNA, 201 bp, Homo sapiens
tgatagggtttggctctatgtcctcacccaaatctcatgtcaaattgtaattcccacatgtcaggggagggacctggtgggtgttgattggatcatggggrcggatttcccctatgcgggccttgtgatagtgagttctcatgagatctgaagttttaaaagtgtggcaggtcctcctttgtgctgtctctcctgctgcca

SEQ ID NO: 10851 - DNA, 201 bp, Homo sapiens
gattgatgtcaattgagttgccttaaaatttttttctacccaattccccaggggagttggtaggaccaagcaagaaatccagcaaatcacctagcaaaccrttgtccaaaattgccaacaggtgaactgttctgtatcttgatctggtggcagtaacatgggtgtagaaatatataaaattaattgagctgtatgcctaga

SEQ ID NO: 10852 - DNA, 201 bp, Homo sapiens
gggaaattgattttgtagacaagagctaaagaaagcagaaaaaaggaaaaagtggatgaccattgcaaagttactttccttgtaaggtgggaacagggaarcagaacagaagaaaaataactggctaacatcaggttacattttgttgtaaggattaaagatagagggaactttattgtcatgccgattgaaactggtctg

SEQ ID NO: 10853 - DNA, 201 bp, Homo sapiens
ttgaagtagaacctgaagatatgactgaatttcggcaatctcatgataaaacttgaacagatgaggagttgcttctaatggatgaacaacaaaagtggttyctttgagatggaagctacttgatagggtttggctctatgtcctcacccaaatctcatgtcaaattgtaattcccacatgtcaggggagggacctggtggg

SEQ ID NO: 10854 - DNA, 201 bp, Homo sapiens
tataaggtagaatgagtgttccaatgacccgagaaggggaaattgattttgtagacaagagctaaagaaagcagaaaaaaggaaaaagtggatgaccattkcaaagttactttccttgtaaggtgggaacagggaagcagaacagaagaaaaataactggctaacatcaggttacattttgttgtaaggattaaagataga

SEQ ID NO: 10855 - DNA, 201 bp, Homo sapiens
ggcaaggacagaggtgtgggtgttccctctaatgggagagattttttacctaagaaataaatatacactcatttgaactcttcttggattaaaaaagaaaygaaaacaatccgctaatgcctcttatactaattatcttagtattattcactctctcctttaggacttattggaatgttgtatttttatgataatctatta

SEQ ID NO: 10856 - DNA, 201 bp, Homo sapiens
cccaaagtgctgggattacaggcgtgagccaccgcgcccggccgcctgtttttcttatctgcagtcactctatctactattattattattttggacagacrttaattattgcactatgatgcagagtaatgacgtcaaggtcaagccacactgcatcagcaaagagggtattcctgtagaaaggcacagtggagttcttca

SEQ ID NO: 10857 - DNA, 201 bp, Homo sapiens
atcacctgagcaagcccagaagatcaaggctatagtgagccatgactgcaccactgcactccagcctgggcaacacagcaagaacctgtctcaaaaaaaawaataataataataataatttgtagtaatataatgaatatccatgatggtttgtaatggagcatttctgatcattgcgttaatatggattactgggtgtgg

SEQ ID NO: 10858 - DNA, 201 bp, Homo sapiens
ctaatctaatatgacttgtgtccttataagaagagaagattaggacagacacaccaagaaaagaccatgtgaaggcacagagaaaggatagccatctgtawgccaaggagaagcctcagaagaaatcagccctgctgatatcttcatcttggacttagagcctccagagctgtaaataaattcctgttgcttaagccaccc

SEQ ID NO: 10859 - DNA, 201 bp, Homo sapiens
tccttaaagaagtaattaaggtaaaatgaggtcattggggtaggacctaatctaatatgacttgtgtccttataagaagagaagattaggacagacacacmaagaaaagaccatgtgaaggcacagagaaaggatagccatctgtaagccaaggagaagcctcagaagaaatcagccctgctgatatcttcatcttggact

SEQ ID NO: 10860 - DNA, 201 bp, Homo sapiens
ggtagaatccttaaagaagtaattaaggtaaaatgaggtcattggggtaggacctaatctaatatgacttgtgtccttataagaagagaagattaggacaracacaccaagaaaagaccatgtgaaggcacagagaaaggatagccatctgtaagccaaggagaagcctcagaagaaatcagccctgctgatatcttcatc

SEQ ID NO: 10861 - DNA, 201 bp, Homo sapiens
gtgccccctacccatgcaccacaaattcgtatgttgaagttctaagaatgactatttggaggtagaatccttaaagaagtaattaaggtaaaatgaggtcrttggggtaggacctaatctaatatgacttgtgtccttataagaagagaagattaggacagacacaccaagaaaagaccatgtgaaggcacagagaaagga

SEQ ID NO: 10862 - DNA, 201 bp, Homo sapiens
tcacataggcttttaaaactggctttgatggtttcataaggaatctcagataagactttcttgatgctaagcccaacaacgggtttctaccctcaaatatstataagtttgtgtacattcctctcctctcgaggtcccaggataacttggggtttctgggcctgtcagaaagtgaacacacccattaatttttaaatgttg

SEQ ID NO: 10863 - DNA, 201 bp, Homo sapiens
ctcttcaattctttgaaggctgagaggagtgaggaaactgcagaagaaatgtttgaagctagcagaggttgtttcatgatatttgaagaaagaagctaccwttataatatgaaagtgcaaggtgaagcagcaagtgctgacgtagaagctgcagcaagttatccagaagctctagctaagatcattgagaaaggtggctac

SEQ ID NO: 10864 - DNA, 201 bp, Homo sapiens
aaaaattatttttcacataggcttttaaaactggctttgatggtttcataaggaatctcagataagactttcttgatgctaagcccaacaacgggtttctrccctcaaatatctataagtttgtgtacattcctctcctctcgaggtcccaggataacttggggtttctgggcctgtcagaaagtgaacacacccattaat

SEQ ID NO: 10865 - DNA, 201 bp, Homo sapiens
ggagaaaggatgtttgcaggtacagaccacagcgcattaggtggggaagaagactttactgagcttctgcttcacattgagtgtcaagcactgagctttaygtatgcataggtatgttagctccactaaacagggactgaaatagctaagagatgacgtgcccaaagtcatagaacttgtgagtggagaaactgggatttg

SEQ ID NO: 10866 - DNA, 201 bp, Homo sapiens
ctgctttattatacttggcgtgattatttgtataaagtgcagcaagaaaaattatttttcacataggcttttaaaactggctttgatggtttcataaggartctcagataagactttcttgatgctaagcccaacaacgggtttctaccctcaaatatctataagtttgtgtacattcctctcctctcgaggtcccaggat

SEQ ID NO: 10867 - DNA, 201 bp, Homo sapiens
aaggatgtttgcaggtacagaccacagcgcattaggtggggaagaagactttactgagcttctgcttcacattgagtgtcaagcactgagctttatgtatrcataggtatgttagctccactaaacagggactgaaatagctaagagatgacgtgcccaaagtcatagaacttgtgagtggagaaactgggatttggaatg

SEQ ID NO: 10868 - DNA, 201 bp, Homo sapiens
tgaggaatgttcatagtgttttccatagcagctctaccattttgtatccccaatgacagtgcacaaggattctaatttctttacatccttgtcaacacctrttattttctgttttttcagtagtggccatcctacgtggaaaagatggtacttcattgtggcttcatttgcattccctgataattagtgatgttgaacatc

SEQ ID NO: 10869 - DNA, 201 bp, Homo sapiens
ttaataaatgtttaatttaagagaacattggttgggcacggtgtcttatacctgtaatcccagcactttgggaggccgaggtaggcggatcatttgaggtyaggagttcgagaccagcttgaccaatatggtgaaactctgtctctactaaaatacaaaaaattagccaggtgtggtggtgggtgtctgtaatcccagcta

SEQ ID NO: 10870 - DNA, 201 bp, Homo sapiens
accagttaacaaaagctttgtttattttatgtttccttttaatagcaaaagttaaaagtgtctcagcttttaaaagtactcatacatatgttttgcaaagragtatcctttgctctctttaggaacacaaatattccaaaatacttatatcagtattttaaaatggaatcgtattataaagtataactttacttttatata

SEQ ID NO: 10871 - DNA, 201 bp, Homo sapiens
cgtgatcatggctttctgtaacctcgagctcctgtgttcaaatggcccttctacctcagcctcagctatagcctagcctgtagctaggactacagatgtgygccaccacgttggctaatttttaattttttttaaagacaggttcttactttgttgcctagattggtctcaaactcctggcctcaagctgtcctcaaacct

SEQ ID NO: 10872 - DNA, 201 bp, Homo sapiens
aaatagaaacgatctggttactaaagaccagtgctgcattggatcacttccttgagcttttgctatgatcgttaaaggcaaagttagacagctgctgtagrttttgccagtggcctcacaaaataaattgtttaaccctattagtttcaaacactatcatttctactttgcagatatgctagctgtgttttatatgaatct

SEQ ID NO: 10873 - DNA, 201 bp, Homo sapiens
aaccttttgtcttatcctgtgactaagactgccttaatcttctgggaatgtagcccagtaattctcagccttattttacccagcccctattcaacatggasttgctctggttcaaacacctctgacatattgcccccctcccttttataagagaacccttaatcctaagggttgaagagggatgaagatccatcttctgta

SEQ ID NO: 10874 - DNA, 201 bp, Homo sapiens
gcaaaaaaacttttacacataacataaaactcaccctccaatagtttccaaatgtacagtatacttttgccaaccacatgcatgttgctatgaaacagttycccagaactccttccacccaccctgtgtgattacaactctgtacccatctaacaatggatcccctccccttcaccccaggcctcaggcagccaccattct

SEQ ID NO: 10875 - DNA, 201 bp, Homo sapiens
tatacggggaagaatccagtggcagcaggctggacagggtaactgcacaggccaatggcagcaggctgggcagaagaactgcaactgcttgcagaaggcaygcagtttatgtagcatttttacttagcaccctcctctaacagtctccacctggcaaccttcgttcaacccgaaacaaagagcctcgatcccctgtatggc

SEQ ID NO: 10876 - DNA, 201 bp, Homo sapiens
tagatcacttgagcccaggagtttgaaaccagcctgggcaacatggtaagacctcatctctacaggaaaaaaaaaagtatatgagtacaagaatataacayatctcaatttttaatattcactacaaagtggaactatttttggtatattaaataaaatattatgttaatgtcaccagtatctgttgtgccaaactcctat

SEQ ID NO: 10877 - DNA, 201 bp, Homo sapiens
ttgggaggaatgtcaaggtagattattttgggtccttaaaaataaactgcttatcagaaactcaaaactcgtctttattatcacacctatcactgggctcrtaggttctgttctcgcctcttctactctcaaaccgtctattctgccccaacaacaacaacaacgataacaacaacaaactgggaaggagatgttctagca

SEQ ID NO: 10878 - DNA, 201 bp, Homo sapiens
atggctccccagctggccgctctccccactcctgcgtcccctccctgccacccccccagcaggaacctgttactttaagcgaggctttccagtgtggcgckgcgggccgccggggtttcgggaggtggcaggtgattggctctttcgagctccccctggctcgctcgctctgcctccccgcgcgctccgccccgcccgcaa

SEQ ID NO: 10879 - DNA, 201 bp, Homo sapiens
atacaagtcaagtagtcaaatgaaaatttagcatctgaattgagatgtgctataggtgtaaaatgtgtaccaacttttattttgttttatttttgagatargatcttgctgcgttgtccagatgggagtgcagtcatgtgatctcagtttattgtagccttgagctcctgggcttgagggatcctcccacctaagcctcct

SEQ ID NO: 10880 - DNA, 201 bp, Homo sapiens
gataaagaattggattacagtgggatgccatggctcatgcctgtcagctttgggaggccaaggcaggggaattgttaaaggccaggcgttagagaccagcytgggcaacacagtgagaaccccatccctaccaaaaaaaaaaaaaaaaaaaaaaaaggattggattaatcatcttttctagtctctgaattttgtttgtca

SEQ ID NO: 10881 - DNA, 201 bp, Homo sapiens
ctaccttttcaactgtaaagtttttttggactctagatacaagtcaagtagtcaaatgaaaatttagcatctgaattgagatgtgctataggtgtaaaatrtgtaccaacttttattttgttttatttttgagataagatcttgctgcgttgtccagatgggagtgcagtcatgtgatctcagtttattgtagccttgagc

SEQ ID NO: 10882 - DNA, 201 bp, Homo sapiens
caacaaatattgcccatcagtctttcaaaggcattcaggtgagtagtttattctttttgcagctccttgctgcctttttatcagcctgctgcccagagccygcagaagagattacacctgggacaggggatgacttttcttcaatcttactcttaacagggccattccaaatggattttagaacaatttcacataattagg

SEQ ID NO: 10883 - DNA, 201 bp, Homo sapiens
gatgagatagatgctttttcctgttcctgttagacatatgctgtccaatatggcagtcactaggcaaatttgactgttgagtacttgaaatgtggttagaytagagaattgaattctaaatttcatttaattttaaacttaaacaagaggcttgattcaattaatggaaaattgtaaatatgtttagagcaacttgggtat

SEQ ID NO: 10884 - DNA, 201 bp, Homo sapiens
cgcaatgtcagagaactggagaagatagagccaactgatgagatagatgctttttcctgttcctgttagacatatgctgtccaatatggcagtcactaggsaaatttgactgttgagtacttgaaatgtggttagattagagaattgaattctaaatttcatttaattttaaacttaaacaagaggcttgattcaattaat

SEQ ID NO: 10885 - DNA, 201 bp, Homo sapiens
gagagccatcataaacgcaatgtcagagaactggagaagatagagccaactgatgagatagatgctttttcctgttcctgttagacatatgctgtccaatrtggcagtcactaggcaaatttgactgttgagtacttgaaatgtggttagattagagaattgaattctaaatttcatttaattttaaacttaaacaagagg

SEQ ID NO: 10886 - DNA, 201 bp, Homo sapiens
gtcacagtgaatggatcactgcgcaaagatctttggtgagtaaatgtggaaagaagttttcatgtatttgtatttctgtcagggtgggattaaaaggtctkagtaggtagtggtctttataattctcagaccagccaaggtgaatttgatagtcttggctgtacagcgtagtggttaaaagcatgccatttggagccagac

SEQ ID NO: 10887 - DNA, 201 bp, Homo sapiens
tttgtctttggttccattaggaagtggaagtaagcaagaaagagctcttcttttagtattgatgtggatttttgcatgtccaggatcttctctgtttcttrttcttactattaatggtagaggttcacaaatatggtaagtatggacttagattttgttcctaaacagaaagattatatataggttatatattctgatatg

SEQ ID NO: 10888 - DNA, 201 bp, Homo sapiens
acttgaggccaggagtttgagactagcctggttaatgtagtgagaccccatttctaccaagaaaaaaatgaaaaaaatttagctgggcatgatggcacatrcctgtagtcctagctacttgggaagctgaggtgggaggattgcttgagcccaggaggttgtagttatagtgagctatgatcatgccactgcagtccagcc

SEQ ID NO: 10889 - DNA, 201 bp, Homo sapiens
gggaatttatggaagttgatttaagtatacagtagttagcactctattaaatactgaagtcatgcactgtgtcaccttgatcaatgagcaagttttttttkcttttctgattctggaatttcagcactttcagctttgaaggttgccttgggtttgtttttgaattaaaagtgtcacaggagaaaggctgattgttacatt

SEQ ID NO: 10890 - DNA, 201 bp, Homo sapiens
caattctgcaatgttcattactccagcgactgggcctccaaacaaagcttgatgacaggagccagatcaactccttgttggtctttctttagcaaagctayagccacgaaggaaaagccacacataattcagaggctaacttgtcagactttgggtttattggcttctgaggtagtaggcttgggactgctgaccagagag

SEQ ID NO: 10891 - DNA, 201 bp, Homo sapiens
gctatgatcacatcactgcactccagcataagcaatgtagtgagaccgtttcaaaatcaaaaactaaaactaaacaggtttagctttgtagtagagagccrtaaaatgtggatttaataattagtaatgctcaccttattatagatgcaaattgccattcaggtattagttcaagcaaaatattaatgatgtcatagatga

SEQ ID NO: 10892 - DNA, 201 bp, Homo sapiens
atgttttcctatataggaaaccagctccagcatgttttattgcgttgtctatgcttttatcaatgatccgccatgtcaagcatcagcttttaaaatatttrtgagtctgtttggaagggtgtacatttctgttccattgatcagtttgttgatctctgtagcaatactacaatgttgtaattactatcatttcataaagag

SEQ ID NO: 10893 - DNA, 201 bp, Homo sapiens
gtctttagagacccaggagaacacagtcatgcgtgtgtccttagggcaaccccatctttcatgagtgattgtagttcacattttatggcctgccttttatstttctatttctctttcatatactcttgattcttgaactttttctttatttttttaacggcccagcaatgaagttttgttgtaattatctaatatctagtt

SEQ ID NO: 10894 - DNA, 201 bp, Homo sapiens
acacagggaggggaacataacacaccaaggcctttcaggggtcaggggctaggggagggatagcactaggagaaatacctaacgtagatgatgggttgatrggtgcagtaaaccaccgtggcacatgtatacctatgtaacacacctgcatgttctgcccatgtatcccaaaacttaaagtataataaagaagtattttat

SEQ ID NO: 10895 - DNA, 201 bp, Homo sapiens
atatttgtttagcttcacgaaacacttcttaattcgacaccagctgactacttggtctagttgtagttaattaattagaaaggaataattaaaattaagaytaaaattattgtttcttacagacttaaattctctttccaccgttcattaggcagttattaatttagccacttccgtttgagtatctgcaaagtagttaat

SEQ ID NO: 10896 - DNA, 201 bp, Homo sapiens
aaatgttatacatagcccggtttaaagaccatcagtgtagaatgtagtagagtagtgagattttaagttttatgttttctcagctttatgggttcaagaaytcagttgcagcctgggtctggtggctcacgcctgtaatcctaggactttgggtgggagaactgtttgaacccaggagttcaagaccaccctgggcaacat

SEQ ID NO: 10897 - DNA, 201 bp, Homo sapiens
atatttccatttgtggaatggagttgatcaaaataacatgattatattacaaattctgataaatgattgataaaaaataaaaatatttctgtttatacatycatctattgcatatatacaggtgttttattctttataaattcgtttattactagatgagaaaagatttggcatcatttttattttccctttttcttttct

SEQ ID NO: 10898 - DNA, 201 bp, Homo sapiens
aaggccaaatatggggctgcgtttattagggcaaatcatttgttaaaaagaaacattctttcctgaagatatgattttggggatggttgttgtagtggtcrctgaaatcaatggttctgtgttcatacacctgccagcccatgttctccagagctgctgtttagtactgtccttggcttccttcctgcagcctctttttct

SEQ ID NO: 10899 - DNA, 201 bp, Homo sapiens
taagttggataatgaaaacttgtggctgattctttttcttcttttacagattctgtttgtcattcctgcaactcactttcctttttcttattatagcagtrttggacgccaacgtctttcccacataaagaaggtcaagtacagaaatctgtaggtctgactactctttgttctgtctgtctgtggccaagaggtatagac

SEQ ID NO: 10900 - DNA, 201 bp, Homo sapiens
tttggctaagtgtattagtcagtgtctcatttttcaaaacatgaaaactccagcatgctgctctaaaaatgctgtgctggagatggattttacttgccaartggatttctatcctgactagattcacttgcttatttatttatttttaaaagtcatcttttgttatatcctaagttggataatgaaaacttgtggctgatt

SEQ ID NO: 10901 - DNA, 201 bp, Homo sapiens
ctttagttttgtaaaactgctgctcttccctggtcaggtctagaaatggctttattattttggatctgcgaggatatattgtagagttccctctaactttytggttgaatgtcaccttaaaaaatgggagattattcaaaagtcgaaacaagtaaaaccttccaaagcattgtatttcataacaggagacctttctttttc

SEQ ID NO: 10902 - DNA, 201 bp, Homo sapiens
tttcagggttgttgtgagaattaaatgggttcctgtgtccaaatacttgcatatggtaagttctcgcattaattttctgttgctgctatagcaaattaacrcaaatttagtggcttaaaacgagactgtctcatgattctctgggtcagaagctgggactgccccaacttgtttctctgctgtgggtttcctgaggctgaa

SEQ ID NO: 10903 - DNA, 201 bp, Homo sapiens
catattttctttggggatttggaatatattagtttcaatatatttaatatttttgaaaaggtaccgtaattcgtggttaggttttcagtgaacctgggcaygttttaaaaactcatggtatagataactgtagacttggactgtgactaactttgtttcaatgggaatattaagttgaattacctagcagtgtgtattaga

SEQ ID NO: 10904 - DNA, 201 bp, Homo sapiens
cctgggattacaggagctgcgattacaggcacgagctatcatacctggcttgatttatcctgttcttaacccttctttcaaaaattgttaaatgttttacrttccttaaggtaagcaacgctgtacaatagaaatataatgcaagtcacagttgcaattttaggttttctagtagctttactcgaaaaagtaaaaagaaac

SEQ ID NO: 10905 - DNA, 201 bp, Homo sapiens
tcaaataaaagtactttgtagcctgttcaaatggagtataatgtaattctctctgaaattgagcacttattactttgtttatgtagctgttttaaaagtaygggtgggtgaagggggtacggcaggaacctctgctttagaaattactgtttttttctgagttttcctcccccatccactcatgaatccgccttcacccct

SEQ ID NO: 10906 - DNA, 201 bp, Homo sapiens
aaacatataatttgcccatacatacaattcctttattgaaattctgaccacatttaaccttattgaaagcttctagcttgaatgagttttgctacattgamtaaatactatgctgtatagttatttatgtgcttaagaagctgaactttcattccatcccagtaagttcccatgggataagttattttagtaaatcagaaa

SEQ ID NO: 10907 - DNA, 201 bp, Homo sapiens
gtaagttcccatgggataagttattttagtaaatcagaaaatttctctgaaagcaaagtaattcttaatttttggaggcttgaaaatggagaaaatagccrtacgagttagcgggaagaagttctcattgattcatatcgctaaaaaataatttaaaatacttgtactcttaaattatcgtgagggggaagaacccaccac

SEQ ID NO: 10908 - DNA, 201 bp, Homo sapiens
gccagagacatctttttgaatacaaaacgccttaattatttgttcctctcacctggagaatattctgaactaaaggtgggcagtgtatcatggtatgtctytacttaagtgggtagcccaaagtgaagtttgactgtttccagaatgtcattctgacgttttgacgttgtcaaatgcttcattgttttgcctccaaacccc

SEQ ID NO: 10909 - DNA, 201 bp, Homo sapiens
atgctaaattaagagttttactgggccgggcacggtggctcactcctgtaatcccagcactttgggaggccaaggcgggcggatcatgaggtcaggagatygagaccatcctggctaacacggtgaaaccccatctctactaaaaatacaaaaaaaaaattagacttgcgtggtgctgggtgcttgtagtcccagctactc

SEQ ID NO: 10910 - DNA, 201 bp, Homo sapiens
gtaggataaaagaagtggaaatgggtggagataattgggtgttcaggcagtcagttctggctttgaaagaagagtaaggtttaagatggtgtgtgaaggawcagaagcttctgagtaaggatttaaaatgggaatctcccaaaagcctaaaatctagttggatttcaaggtgggttccttaatcgggaaataggtgacatc

SEQ ID NO: 10911 - DNA, 201 bp, Homo sapiens
aggccaaggcgggcggatcacctgaggtcaggagctcaagaccagcgtgcctaacatggtgaaaccccgtctctactgaaaatacaaaaattagctgggcrtggtggtgggtacctgtaatcccagctactggggaggctgagggaggagaattgcttgaacctgggagatggaggttgtagtgagccaagattgcgccac

SEQ ID NO: 10912 - DNA, 201 bp, Homo sapiens
aaaactattaacggagacttgaatatgctcttgctttaaaatctggtgaagaaatataattggccgggcatggtggcttatgcctgtaatcccagtacttygggaggccaaggcgggcggatcacctgaggtcaggagctcaagaccagcgtgcctaacatggtgaaaccccgtctctactgaaaatacaaaaattagctg

SEQ ID NO: 10913 - DNA, 201 bp, Homo sapiens
tggttatgtttaccatggacaatggggagaaacatgagaggtttcatgctaccttttttttttttttttaaacatctggttactaattgtttcagaatgtratttagttttccttcagaaattctgaaggcatttgaggaactttatgtcttaggattgtatttataaatattagtcatcattgcatgatactcaaagaaa

SEQ ID NO: 10914 - DNA, 201 bp, Homo sapiens
gacaatggggagaaacatgagaggtttcatgctaccttttttttttttttttaaacatctggttactaattgtttcagaatgtgatttagttttccttcaraaattctgaaggcatttgaggaactttatgtcttaggattgtatttataaatattagtcatcattgcatgatactcaaagaaaattctcttttttttttt

SEQ ID NO: 10915 - DNA, 201 bp, Homo sapiens
tccccaatttgcttctggtaagaaatcactgtttgttttatagctttccagtctttatgtattaaatcacatcacacacacatgcacacacacacacacacgtgtgtatatgtgtatgtgtatattcttttattaaaattgagtgatttaaagcagaaaatgtagtgattttttaaaaaaacttgccaatgtattgtgtac

SEQ ID NO: 10916 - DNA, 201 bp, Homo sapiens
tttttttttttttttggagacagagtcttactctgtcgcccaggctgacgtgcagtggcacgatcttggctcactgcaacctccatctccctggttcaagkgattctcctgtctcagcttcctgagtagctgggactgcaggcgcgtgccaccatgcccagctaatttttgtatttttagtagagacagggtttcaccatg

SEQ ID NO: 10917 - DNA, 201 bp, Homo sapiens
ttccccaatttgcttctggtaagaaatcactgtttgttttatagctttccagtctttatgtattaaatcacatcacacacacatgcacacacacacacacacgtgtgtatatgtgtatgtgtatattcttttattaaaattgagtgatttaaagcagaaaatgtagtgattttttaaaaaaacttgccaatgtattgtgta

SEQ ID NO: 10918 - DNA, 201 bp, Homo sapiens
cctaatcagaagcctaaagcagcagaatagggtttgaggaaagtaactctaatttggaaaagaaaattggaaacttatgttgtgatttgcttaaattgatkagcattgccaccaggttttctggacagcttttgagtgaatcacctttatttggtttcacttaaatagctcagcacttcataaaggtagttttagaagtgt

SEQ ID NO: 10919 - DNA, 201 bp, Homo sapiens
aaaactttcttatcttattggtcaagtgcaatacatgacaccactctgcagtaatactggtgttcagaagagttatggaagaatctagtaataaacatagkaagaagaaggagggatgaacctcatttgtatggttgaaaagtagatggtcttctgaggctcttaacagtatatgaaggtaaatttgttgtaaaggaaatc

SEQ ID NO: 10920 - DNA, 201 bp, Homo sapiens
gtggtagggaaatttgtctgtttcaaggatgaaaatggggaattaatttgaaaagactttttagctgtcaccactttgttttaccttttaaagtgggcagsctgaaaacactggtaaaatgccatcacgtgctgttaaaatagataggttttgaatatttttaaagaaaacttcaggcaattagattatatttgggaaata

SEQ ID NO: 10921 - DNA, 201 bp, Homo sapiens
taggtggtattgaaggaagacagggatggaataagaggcatctctgaatgcagatttagagttgtcactgcattaacacctgttcccccacatttttttttaagagacaggttcttgctatgatgtccaggctggattcaaagccctaggctcaaataatcctctcgcctcagccttctgagtagctgggactacaggagg

SEQ ID NO: 10922 - DNA, 201 bp, Homo sapiens
atgaacaaagcattggtgagaaacaaatataaactgactgagattctcatcctcatttagtgatttctggttgtgctcttagtttgtcctcaaatttggtyaccttgaattaaaaagatttgttctatacacaggaaaccacaaatattctcaaatatatagttaagactatgagcatattaaaaataggatggaaataaa

SEQ ID NO: 10923 - DNA, 201 bp, Homo sapiens
ttactgcaacctccgcctcccatgttcaagtgaatctcctgccttagcctccccagtagctgggattacaggtgtgtgtcaccacccccagctaatttttrtatttttagtagagacgaggtttcaccatattggccaggctagtctcgaactcctggtctcaggtgatctgcctgctttggcttctcaaaatgctgggat

SEQ ID NO: 10924 - DNA, 201 bp, Homo sapiens
aaaacacacaaaagagaaagagaaaacacagctaaaacatatgtctttggcatcacaactaagtggtgtagttaaaggtcagttgtgaaattcaacttctrtacatgtgaactttgctcaaaaatagtactgtgtttataggtggtgtgactgtaagtggtctgttttcagatgatttctcattctcaaagctcttaacaa

SEQ ID NO: 10925 - DNA, 201 bp, Homo sapiens
ttttaactttgtcaacaatcagtactcttcgttttattattgtcagatatttacctacttttccttaaaaggtagtcccccccccccccttttttttttttgagatggagtttcgctcttgttgcccaggctggagtgcaatggcaccatattggcttactgcaacctccgcctcccatgttcaagtgaatctcctgcctt

SEQ ID NO: 10926 - DNA, 201 bp, Homo sapiens
ttatgtaggcactgccatccctgaatattccttgtaaagatgcagtgaagaagtcaatttaaaaggaagacaaagccaccgctgtctgtaaactgtaaatrtgtattttggcacttgtactccagtattctgaaaatagagttatgatggaaatgctgacagatccttaatggtggccagagctaccatgcagtgcaaaaa

SEQ ID NO: 10927 - DNA, 201 bp, Homo sapiens
catacccttttcagaaatattcctgaaaacagtgagttctgacaaataaattgtaaatagcagcatctgacaagtgctgcaagtaggtctggggaggcaarcattgtagttgggcagctctcagaaaaacggccttccgttaataaaaaaaaattaaggaataaatcgatattagggagttagtttgcagcatctgttatt

SEQ ID NO: 10928 - DNA, 201 bp, Homo sapiens
tcttaattatatagtaagtatatgattgacatgaaaagcctctgtgggcatagctgtgtgtttgtgtttctgtatgtgtgtggatatgtgtggaagacttsttgaaagttctgttactaataactaataaaacaaatgtgtgtccattttagatcttttagtgttaataagatcttgttggatacatttttacataaatgt

SEQ ID NO: 10929 - DNA, 201 bp, Homo sapiens
tcctgcgactggctgtcacccgggagtctaaccggattaatactcagagatggattacgctggttgtcaccaatacgcctaaagattataatccaatttaygcacattacagtcagtattaactttatctgctattttaagactcccggttgccccgcgcgtcctcagaggacaatcctccacgttctgatgcaactcagt

SEQ ID NO: 10930 - DNA, 201 bp, Homo sapiens
catattgctggttttacacgacatccttgattaattttcaggccttgaggtgctacttattaaattaaggatacagcccactaaattaataaattattacwgtggaggcactcttgtcttctgcatgtataagtgcattgcttaaattactctcagggaataatttacacatgaagaggcactggtggttaaaaaagctct

SEQ ID NO: 10931 - DNA, 201 bp, Homo sapiens
tttttgcttacattttaactttgtcaacaatcagtactcttcgttttattattgtcagatatttacctacttttccttaaaaggtagtcccccccccccccttttttttttttgagatggagtttcgctcttgttgcccaggctggagtgcaatggcaccatattggcttactgcaacctccgcctcccatgttcaagtga

SEQ ID NO: 10932 - DNA, 201 bp, Homo sapiens
tgttgaaaatgacaggatttccttctttttaaaggctgaatagtattcagcctttaatataattatatttgtacacacacacacacacacacacacacacmattccattggggatatatatttcacattttctttgtccattcttctcttcatggacacttaggttgattccatatcttgactattgtaactagtactgca

SEQ ID NO: 10933 - DNA, 201 bp, Homo sapiens
ctgattcccaggatctttgtgagagctgctgggagaactgaaaattaacagcgaggacacaggacgccctaggtaacgtcctccccgctattctgctcttctcaattcaagggccgagacaacttgcttttgtggaaaagggaagtaaagggaaaagaggaaagcaaggaagttcagtcagaaagaggaagagggacaaag

SEQ ID NO: 10934 - DNA, 201 bp, Homo sapiens
agaccaaagatttgggaagaaaggaggaaacctataagggtctcttttttaaaggcaagctttaagaaatgttatataaactaggacctttttatgaataygtttttgtagggttaacattctcattttaaaaaaatgaaggaagttttgagcataggctgcagtcaacttgggggaggcaattttaggcttcagaaatat

SEQ ID NO: 10935 - DNA, 201 bp, Homo sapiens
agtcgtcttccacttgcacgaaagctttcctaggccaaaaagaggtagggctcgaatacaaaagggtcttgataaaaaatgtctttgaaacaatcgcttgrcccgggcggtcccgctgtcccgctccccgccccccgcgccgcgctcgccggcgtagcctcgggatccgggtgcgcggcgccgcgcgggccaggtcccggc

SEQ ID NO: 10936 - DNA, 201 bp, Homo sapiens
tgatattctcatctttatgaagaacctgagcttccaggaagccaactggcctgcctaagtttgtaagtggtggatatcagatgtaaaaaaaaaaaaataawaattgtaccctgatcattatactgtgctctgattgacagttcttttacaataaaacttagttaatcatttggcaggatataaaacaaaaatatgtggtag

SEQ ID NO: 10937 - DNA, 201 bp, Homo sapiens
aagctttcctaggccaaaaagaggtagggctcgaatacaaaagggtcttgataaaaaatgtctttgaaacaatcgcttggcccgggcggtcccgctgtccygctccccgccccccgcgccgcgctcgccggcgtagcctcgggatccgggtgcgcggcgccgcgcgggccaggtcccggctcccgcctgcccgcgcgcgcg

SEQ ID NO: 10938 - DNA, 201 bp, Homo sapiens
tgttgatattctcatctttatgaagaacctgagcttccaggaagccaactggcctgcctaagtttgtaagtggtggatatcagatgtaaaaaaaaaaaaawaataattgtaccctgatcattatactgtgctctgattgacagttcttttacaataaaacttagttaatcatttggcaggatataaaacaaaaatatgtgg

SEQ ID NO: 10939 - DNA, 201 bp, Homo sapiens
aactaatgtctggttgttttagttggattagtgaaggtaacagtacaaatacaataaggtgctttgtttgtgagcaggtttatttatctaagtcgacacartggttagtagttatcttccatttgatccgtaatctttattggcatctagaactcctgtcgtttcttagagtaatatcataataaatccattctgcttaga

SEQ ID NO: 10940 - DNA, 201 bp, Homo sapiens
cctattaaaaatagattgtcccatgggccaggcagtttctcatttgatatgggggacctatttgagcttaaatctccaccaccaaaaaaaaaataaaaaaataataaaaacccctatatggtacagctacatatcattttgttgaatattagtctcattgctactggtttgggtgtttaatggtttacagtccagaggcct

SEQ ID NO: 10941 - DNA, 201 bp, Homo sapiens
attcctcaatttttatactcaactgtggaggttctctatgcagtctataagccattgttttaaaatgtttatttttggatttttatttgtatgcgtgcttyccatgatgtgacaagtcctgggaaaagtgccagcttacatcacccaggagagaccttgtcatactgtaattacacatgattcagattgcaagagaaggtt

SEQ ID NO: 10942 - DNA, 201 bp, Homo sapiens
cctgggacctattaaaaatagattgtcccatgggccaggcagtttctcatttgatatgggggacctatttgagcttaaatctccaccaccaaaaaaaaaawaaaaaaataataaaaacccctatatggtacagctacatatcattttgttgaatattagtctcattgctactggtttgggtgtttaatggtttacagtcca

SEQ ID NO: 10943 - DNA, 201 bp, Homo sapiens
gatgcaggaagatcttcaagaataattaagtgaaataaggcaagttgctaaatcattgtgatctcattttttcaaaaaagtgcttgtgcagataagtataygtatgtctatacaagtgtatgtctgtaaataagtaaatttgcattagcgggcatcaaactcttactagtagtttagtagctacttgtggtggtgatggga

SEQ ID NO: 10944 - DNA, 201 bp, Homo sapiens
atggtacatgatatcagtatgtattactggtgttaaccttgttcacttgtttaaggtggtatctgttaggatccttcactataaaattttattttatctttatgattactaagtgtcttgggagagatactttgagattgcgtgatatcttgtttgtgcttaaaattttgcccacttatttttgtttccattcttgcattt

SEQ ID NO: 10945 - DNA, 201 bp, Homo sapiens
aagttgtatcattattctcttattttgcattgcagtgattatatgttcattaatgaagctgaacatatatttcattggccattcatgtttcttattctgtraaatgtttgttcatgtcttccacttatttttctatttacttattagaggtcttttaatatcctggagataggagttcattgttgtttctatttactattg

SEQ ID NO: 10946 - DNA, 201 bp, Homo sapiens
tgtgctccagcttgggtgacagagcaagactctctcctttaaaaaaaaaagaaagaacaaaaaaaaagtttacagcttagctgtgcaactcatttaaattwaaaaaaattatttcaaaggttctgtgaattcttccacatcctcagcctgtctacaactcttttgtcttagaagaaatcctgccttttccactattctaca

SEQ ID NO: 10947 - DNA, 201 bp, Homo sapiens
tgatgattccatgatacttttttttttcccagtactactttgacagtttagctgttagatgtcttagttcttttctatttcttatgaggagtaaatttttrcttttaaaatttcacttatgcctcactctcttttttctttcataatttttgttaacctccaggaagaacctaggaaagtccgctttgattatgacttatt

SEQ ID NO: 10948 - DNA, 201 bp, Homo sapiens; identical to SEQ ID NO: 1895

SEQ ID NO: 10949 - DNA, 201 bp, Homo sapiens
tgcatttggccttagttaacaaaattcagaggaaaaaacataatgaaatttgagagattacataatcacattattttgaggaaatttagtactaagttgcrggtgccagatttgacctaagaggtaaaagtggtgttcttgagatcagagctgaaacaggtggctctaagttttctggttataaatagaaggctaacctat

SEQ ID NO: 10950 - DNA, 201 bp, Homo sapiens
tgtattagaaattaaaatggagacattttaaagaaattaatttgtctaaaggtagtaacctattatatgttaacatacaggtaacattttaatgaaaaatraacattttcttaaaaacagtgacaagaggggcattgtttacttttcttttctttttttttttttttttcaaatctctttgttttaatagaagacaactag

SEQ ID NO: 10951 - DNA, 201 bp, Homo sapiens
cttaccagcttctcttttcagtctattgtgttatcacatgtcctgtagcctctggaaaactctgctacacactcacgagagaatgggaaggaaaaaggcamataacttaatagattttattatatatatagatttaacgtcaccaatcacctgaaaagatcatagggatcctgagatcctaactctacactccgagaactg

SEQ ID NO: 10952 - DNA, 201 bp, Homo sapiens
agctcattgcaacctccatctcctggactcaagccatcctcccatctcctggtctcaagccatttcccaaacagctcagactataggcgtggaccaccatscctggcagtttgtgtgtgtgtgtgtttttggtagagatggggtttcactatgttgcccagactggtctccaactcctgggcccaggtgacccaccagcct

SEQ ID NO: 10953 - DNA, 201 bp, Homo sapiens
cacattattttgaggaaatttagtactaagttgcgggtgccagatttgacctaagaggtaaaagtggtgttcttgagatcagagctgaaacaggtggctcyaagttttctggttataaatagaaggctaacctatatacttataagagttggcttattatatagattttgaaaaacaatgtggctatatgtctttggataa

SEQ ID NO: 10954 - DNA, 201 bp, Homo sapiens
gaatcgcttgaactcaggaggtggaggttgcagtgagccgagatcgcccattgtgctccagcttgggtgacagagcaagactctctcctttaaaaaaaaaagaaagaacaaaaaaaaagtttacagcttagctgtgcaactcatttaaatttaaaaaaattatttcaaaggttctgtgaattcttccacatcctcagcctg

SEQ ID NO: 10955 - DNA, 201 bp, Homo sapiens
ctttatatatatacacatacacatcaatattaactattaacattcattcattcaacaagtgtgtgcttttttttagctcctactatgtgcgtgcctgcctrcctccctccctccctccctccctcctttccttccttccttctttcattttgggacagggtttccctcttgtcacccaggctggagtgcagtggcatgatc

SEQ ID NO: 10956 - DNA, 201 bp, Homo sapiens
gttggaatcatacagatgtagtcttttcagactggcttctttcatttagtaaaatgcatttcagtttcctcatggcttgatagctcatttccttttagtgytgaataatattccattgtgtggtggaggtaccacagtttatctcttcatctactgaaggacatcttggttgctttcaagttttggcaactatgaataaag

SEQ ID NO: 10957 - DNA, 201 bp, Homo sapiens
ttccttctttcattttgggacagggtttccctcttgtcacccaggctggagtgcagtggcatgatcttggctcactgcaacttctgcctcccgggttcaastaattctcctgcctcagcctcccgagtagctgggattataggcatgcgccaccacgcccggctaattttgtatttttagtagagacagggtttcaccatg

SEQ ID NO: 10958 - DNA, 201 bp, Homo sapiens
tttataacaatgaaataataactaccctttattaaatagctatattggttatcatgctagacaatagacatgtggagtatttaatttctgactcttcctawgtagtagttcggagaatgatattcttgagaaaataaaataccaatatatgaacatcagtgtattggaattttatcctttcttatggtgaatggacagtga

SEQ ID NO: 10959 - DNA, 201 bp, Homo sapiens
ttttccagtttgactcttggatattcaatttgagcacatttttttgaaatgcattatataagaagaccaaacattacctatatgaaattctaaagcttttratgttccagtttagttattgtttttgtcttcagttcccaggagctaccatagtgggaactttaattttgcttgttgagatacagactgttcagtggaaaa

SEQ ID NO: 10960 - DNA, 201 bp, Homo sapiens
agttcattttctgtgttagaatggctagatttgttcatctttaccccacattttgagaagtatgtgatagataaaaatacatcactgaaaagatgggaagraatactatcgtagaatgttaatataagtgatctctgggacgtgggatatcaggaacttcttattgttgtcagtaaaattcgttggctttttcaagttttc

SEQ ID NO: 10961 - DNA, 201 bp, Homo sapiens
ggccaaggcaggggaattgttaaaggccaggcgttagagaccagcctgggcaacacagtgagaaccccatccctaccaaaaaaaaaaaaaaaaaaaaaaaaggattggattaatcatcttttctagtctctgaattttgtttgtcatttctcatgccttagtgtagtggtctttgatataaaaataaaatcatgaaacagc

SEQ ID NO: 10962 - DNA, 201 bp, Homo sapiens
cacttgaacctggaaggtagaggttgcagtgagccgagatcgcgccattacactccagcctgggtgacaagagcaagactatgtttccaaaaaaaaaaaaagcaactgaatattggatagagaggagaaaaagggcaatgtatcaaaaaaaaaaaaaaaagctaaaagcaaaactggattattcttggatttttctttttt

SEQ ID NO: 10963 - DNA, 201 bp, Homo sapiens
aaaatcaactacaaataaaaagactgtcatcatgttgcttagatatatggtgattatgttgaagaataaatagtattgataattggaaataaaagactcawttccagtgtgtgcatctttgtatataatttggaagttaaacatgaacttttaagaaataaaaagtaccaaaacaagtaccaaacataaggcatagagaaa

SEQ ID NO: 10964 - DNA, 201 bp, Homo sapiens
gtaggataaataccacaaagccattttcttctttctgttttgctatccatttattccctgctgtccagtttttttgttttgttttgttttgttttgttttgtttttaaagatgctggtagtaatggtagtcgcatggctgaattaatgacaaagcatagatttctggctctttgatttttctaatggattgattggctctt

SEQ ID NO: 10965 - DNA, 201 bp, Homo sapiens
aactacaaataaaaagactgtcatcatgttgcttagatatatggtgattatgttgaagaataaatagtattgataattggaaataaaagactcatttccartgtgtgcatctttgtatataatttggaagttaaacatgaacttttaagaaataaaaagtaccaaaacaagtaccaaacataaggcatagagaaaaaaaga

SEQ ID NO: 10966 - DNA, 201 bp, Homo sapiens
ggagtcagaaaaggctttctcatggtgtcttcttttattactgtgtgccctgccaaaaccctggacacttgctcactcccaaggacaagcatgagctagamgtatgagctctacctcacttgtaggataaataccacaaagccattttcttctttctgttttgctatccatttattccctgctgtccagtttttttgtttt

SEQ ID NO: 10967 - DNA, 201 bp, Homo sapiens
ttattactttgaattttacaaataaaagtgagaatagtagctaaattcttaggttctaaaaaaactaacctttctaattccatcagcaataatgaacacayggggcacacataatttttttccataagaattctaacacccagatggtataatgggagactttatcttctcaagtcagtggaggtttccaaatcttttaat

SEQ ID NO: 10968 - DNA, 201 bp, Homo sapiens
cggagctttcagtgagccgagattgcgccactgcggtccgcagtccggcctgggcgacagagcaagactccgtctcaaaaaaaaaaaaaaaaaaaaaaatattactgctcattgaccatgtgcctggttacagaagagctgtgatgggaatgtatgaggagattgatactattttcttgcctggcaacacaacacccattc

SEQ ID NO: 10969 - DNA, 201 bp, Homo sapiens
gtatgtgtgtggatatgtgtggaagacttcttgaaagttctgttactaataactaataaaacaaatgtgtgtccattttagatcttttagtgttaataagrtcttgttggatacatttttacataaatgtagcactttaaccataattgggtacactccttctaagaatttcttgatgcatgtaacagaaccttgagtcta

SEQ ID NO: 10970 - DNA, 201 bp, Homo sapiens
ttcaagtagttttaatacctctcttaaagtaaccccttcagttctgtcacatttatatacacccaactttgaagcctattaagaatatctttgacatgtgagtaccctaacagtggctctggtttcttaagcacaaagggaaaatggcagggtttaatttctttggtgtacatatataaatagatgtttcaaataaaatta

SEQ ID NO: 10971 - DNA, 201 bp, Homo sapiens
ttctgctgacaaatttctgcttaactatgtctattccttttgagagaattctaaatgtgattgataatggcctggaatcccttcttcaggattaaggtgtrtacaagaatgaggaaaatatactctttggcacaatgagtacagatggcaatgtttatttgctgcttttattagtaagttaatttatatagatgtcttaac

SEQ ID NO: 10972 - DNA, 201 bp, Homo sapiens; identical to SEQ ID NO: 1896

SEQ ID NO: 10973 - DNA, 201 bp, Homo sapiens
attgcctattctttatcaagtacttaccgcacaggactctttaagaagattaaatgagacactgtgtttgtgttttgctcatagcagctaataaataagtrtctgctgaatttgaatgtgaatttctcttcctagactagaagattttgacatcaggaattttgaatttttcttataataaaaatgttatattacaaacca

SEQ ID NO: 10974 - DNA, 201 bp, Homo sapiens
agtgcttgccttatctggaggacatataaatacttttcattttgaagtatttgagtacctactgtgggccacacttaatgccagattttgggtatatagtsaaagatcactgagttgttttgctttctatcaagccttaacccttggtcaacttttaagggataataaattctcatcttttaataggattggaataatcta

SEQ ID NO: 10975 - DNA, 201 bp, Homo sapiens
aaggacttgatttaacaccccctctccggctgctgagggctctaagcagtggctacattccagcagttttaatccgttttttattgtagggcgagcagagyttacacaggggctgggatggctccccagctggccgctctccccactcctgcgtcccctccctgccacccccccagcaggaacctgttactttaagcgagg

SEQ ID NO: 10976 - DNA, 201 bp, Homo sapiens
cgcgagccgaggctcggcggctgtccgcccgccgccctgcctttctgaatttcattttttggggggaggtgggagatactttggagccacttgggctcttkaaagtgtgttgcgggggctcggttcgactggcctcgccgatcgcgtggggcttttcgctggggggtgcggggtgctctaagttatggatgcctcggcgtg

SEQ ID NO: 10977 - DNA, 201 bp, Homo sapiens
agcggagctttcagtgagccgagattgcgccactgcggtccgcagtccggcctgggcgacagagcaagactccgtctcaaaaaaaaaaaaaaaaaaaaaaatattactgctcattgaccatgtgcctggttacagaagagctgtgatgggaatgtatgaggagattgatactattttcttgcctggcaacacaacacccat

SEQ ID NO: 10978 - DNA, 201 bp, Homo sapiens
tgaatagtttaaacccactgttgagccctactgctcagaaaaaaaagactcctttaaaaatattactgctctggctcacgcctgtaatcccagcactttgrgaggccgaggcgggtggatcatgaggtcaggagatcgagaccatcctggctaacaaggtgaaaccccatctctactaaaaatacaaaaaattagccgggc

SEQ ID NO: 10979 - DNA, 201 bp, Homo sapiens
ctcccaggttcaagagattctcttgcctcagcctcccgagtagctgggattacagtgcccaccaccacacccagttaatttttttgtattttaatagagayggggtttcatcatgttggccgggctggttgtaaactcctgacctcaggtgatccacccacctcggcctcccagagtgctgggattacaggcgtgagccac

SEQ ID NO: 10980 - DNA, 201 bp, Homo sapiens
agtcttgaactcctgggcccaagtgatctatctgcttccacctccgaaagtgctggaattacaggcgtgagccactgtccagtgtatgtaccttttttttttttttttttgagatggagtttcactcttgttgtccaggctggagtgcaatggtgcgatctcggctcactgcaacctccgcctcccaggttcaagagattc

SEQ ID NO: 10981 - DNA, 201 bp, Homo sapiens
gaggatcagctgagccgggggaggtcgaggatgcagtgatggtgccactgcactctagcctggctgacacagtgagaccctgtttggaaaaaaaaaaaaaatctttgagcaaaatatgtgttttggtaagtttgagaatattgaaattcccaacaaatattgcccatcagtctttcaaaggcattcaggtgagtagtttat

SEQ ID NO: 10982 - DNA, 201 bp, Homo sapiens
ctctgtataactcagctgctatacatatggtgagagtgttgtcgcaaaagagaagcagccttggaagcttagatcaatttccttatcatcaactgtgttgktttttttttttttttttttttagttctacttttctgactcagcatttcagatctaagtaattcattttccaaggaaaataagattagagagaagaaggaa

SEQ ID NO: 10983 - DNA, 201 bp, Homo sapiens
gggatccgggtgggtggatctgatgacttggcaactcagagagggaagcaagtgtaattgttgattttatcagagcaggtttgtgtatttgtttgtgcacrtagggggatgggggttgaatgaagacttaacaacatgaatttcgtgaggttacaaaagtctactgctgcataaatcgtaggtaatatgttcatgtctata

SEQ ID NO: 10984 - DNA, 201 bp, Homo sapiens
attttgggtccttaaaaataaactgcttatcagaaactcaaaactcgtctttattatcacacctatcactgggctcataggttctgttctcgcctcttctrctctcaaaccgtctattctgccccaacaacaacaacaacgataacaacaacaaactgggaaggagatgttctagcagctagagtctagctgctagtggtg

SEQ ID NO: 10985 - DNA, 201 bp, Homo sapiens
acgtgggatttttatatggtaatactagtcttatatttgacttcttaaactttctattaaaactatttcctaagtaaatctaaggtttatttggataacarttatattgttatcaagaaaaacatgaatgtattacttgggaggaatgtcaaggtagattattttgggtccttaaaaataaactgcttatcagaaactcaa

SEQ ID NO: 10986 - DNA, 201 bp, Homo sapiens
agccaccattcattaaaaaaatcagtgaacaagctctttaattggaaacttatctctccctgtttacttgaactcttttgttatcttatttctcccccaamttttatttatttatttatttattttgagatggagttttgctctttcgcccaggctggagtgcagtggtgcgatctcggatcactgcaacctcctactctt

SEQ ID NO: 10987 - DNA, 201 bp, Homo sapiens
gcgactggctgtcacccgggagtctaaccggattaatactcagagatggattacgctggttgtcaccaatacgcctaaagattataatccaatttacgcamattacagtcagtattaactttatctgctattttaagactcccggttgccccgcgcgtcctcagaggacaatcctccacgttctgatgcaactcagtaggc

SEQ ID NO: 10988 - DNA, 201 bp, Homo sapiens; identical to SEQ ID NO: 1897

SEQ ID NO: 10989 - DNA, 201 bp, Homo sapiens
tattgttatagtttctggagaagaaataaaggatagatcggagactcaactgggagtttggcaaggggctatgaaaattgcgtgtgatctagatggtagartgggatttttttttttaaaagaagaatgtctttttgtctattattctcatcttacctattttcttttttaatgttgcagtgtgcaaagatccaccttaca

SEQ ID NO: 10990 - DNA, 201 bp, Homo sapiens
gtcctctggggttagccgcgggttctgtggggaaggtgcaattagttgttgagtttggagatgtggggaatcgggctggagggaataaacactttgcgcgygtgtgtgtgtgtgtgtgtgtgtgtgtgtgtgtgtgtgtgttttcctagagaaattaagatttacctgtgttattagcaaagaatgtattggatgtagtta

SEQ ID NO: 10991 - DNA, 201 bp, Homo sapiens; identical to SEQ ID NO: 1898

SEQ ID NO: 10992 - DNA, 201 bp, Homo sapiens
  misc_feature (1)...(201): n = A,T,C or G, or insertion/deletion polymorphism (see Tables 1-2)
ttcctccctttgtctcccaacagtggatataagtttattaagtgcaggggacctgtcaattacgtttattgctctatccacagtccctagaatagaacttntacttagcaggcaacggtctctggttagactgagcaggactcgtcttatctttgtagccttaagattttgtagtgcttgttgaatttaattaatttggct

SEQ ID NO: 10993 - DNA, 201 bp, Homo sapiens; identical to SEQ ID NO: 1900

SEQ ID NO: 10994 - DNA, 201 bp, Homo sapiens
aattaacatatctgagaagagactgcagaggtagaggaataagatgcagcttctcagtgcagccactgccagtccaccgagaatctgtgatcaccaagcasttgcaaaggatctacccaagttcttgtcatgcctgaaacacagcgacactaagccccagggcagggtttaggggacttgttatttcaaggtggctttgtt

SEQ ID NO: 10995 - DNA, 201 bp, Homo sapiens
tttccaaggcacttaaaagctgaattgttggtggaaatctcatattctgtgggtgagaatgtaaatcgggcaggggtattttggagaacattggcaaggtytattaagatttttaatgtttatactgtttagcctagcaaatttacttctaggaattttctgacaaatatgttctcacaagtacacaaagatacagcatgt

SEQ ID NO: 10996 - DNA, 201 bp, Homo sapiens
atgattacctaacaaaattgttttcagaaaaggataatttaaacttgggtttttctgggcatattttatagctactattactatccattcttttttttttktttttttttttttttttttttttttcacatggtctggccctgtcacccaggctgggttgtaattgcgtgatttcagctcattgcaacctccatctcctgg

SEQ ID NO: 10997 - DNA, 201 bp, Homo sapiens
gaaatgtttataaaggccttagtgtatgcaaagaatgccgtgttaacttcaattaacatatctgagaagagactgcagaggtagaggaataagatgcagcytctcagtgcagccactgccagtccaccgagaatctgtgatcaccaagcagttgcaaaggatctacccaagttcttgtcatgcctgaaacacagcgacact

SEQ ID NO: 10998 - DNA, 201 bp, Homo sapiens
gtcatagaagctgggaaattacatggcacaattttgtggtgtagcttttatgaagaaccttgttcatttttttaaacaaatgaaatgttttttttttctawtttgtagatatttgttcattgtagaaaagtcaaaccatggacgagttatctgaaattttcatatataactatagttaatatttgttagacatctttatat

SEQ ID NO: 10999 - DNA, 201 bp, Homo sapiens
acagaacaactcttttcacagaacttacatctcttctcctcactgtagctctttagtgaaagccagaaatgtttataaaggccttagtgtatgcaaagaawgccgtgttaacttcaattaacatatctgagaagagactgcagaggtagaggaataagatgcagcttctcagtgcagccactgccagtccaccgagaatct

SEQ ID NO: 11000 - DNA, 201 bp, Homo sapiens
ttttaaaattgttggatttttctggtatgacattgtatatggatttattatacttcttttggattgttcccagttttgatttgttatgaatagtgctgtgrtggacatctttgacattcattttaatggtttttctaataatttgtttatgttaaatttctagaagggaggttgtggagtcaaaaggtatacagagttaaa

SEQ ID NO: 11001 - DNA, 201 bp, Homo sapiens
agttacaaacgtgatttttaaaggaatcttttctccctaacgagaagaggtggttgcattaaattggtaaaaaaataacaaaaacaaaccaaaaacagttyactgtataattaaggtctccatcctattttgttattctgttgggctagtggtttttcaaacctggttgcacatttggatcacctgagttaataaaaaaaa

SEQ ID NO: 11002 - DNA, 201 bp, Homo sapiens
cttgtcattttcttgtttgtaggatgttcttcctttgttatttttgttgaaaatatcttgcctcatttttttcttttatcttgatttatggtatctttttrccatatgcaagcttttaattttgtcaaactgatgtgctttattttgttttgttttcctctctgggcttagggtcttatttaagaatttagttcgtggcca

SEQ ID NO: 11003 - DNA, 201 bp, Homo sapiens
atggcggtatgtggtggggcagaccagagaaaaggagtaatttttgggttaagtttacccatatagttgggtagtaggtgcatctcatagggttgagggartaaaagccaaaagtatataaatatttctggttctataaactgcacacagttgagtgtggcaattgaggaaaaattaggcgatagatagcttcctccaata

SEQ ID NO: 11004 - DNA, 201 bp, Homo sapiens
ggttacagactaatgggagagacaaagaagcaaatttcatggattccggggagaaattggtaattttgggcttaggaggaagatgcagagaaatcatggcrgtatgtggtggggcagaccagagaaaaggagtaatttttgggttaagtttacccatatagttgggtagtaggtgcatctcatagggttgagggagtaaaa

SEQ ID NO: 11005 - DNA, 201 bp, Homo sapiens
ggcttagtgtctgcattatattattatggtggtgacatttcatggcttcttatgtttggaacgtgtgagaaataaacaagtgtagtgatattatagtaaaygaattattcgaaaataagatatattgtttaggttttcatacatagcaatcattctaggagccaattagccaaaagtggtctcaaaataatgtatgaaatt

SEQ ID NO: 11006 - DNA, 201 bp, Homo sapiens
agtgatttaaagcagaaaatgtagtgattttttaaaaaaacttgccaatgtattgtgtaccttttaaatgtgatttaaaacatcttggcttagtgtctgcrttatattattatggtggtgacatttcatggcttcttatgtttggaacgtgtgagaaataaacaagtgtagtgatattatagtaaatgaattattcgaaaa

SEQ ID NO: 11007 - DNA, 201 bp, Homo sapiens
tgtttttgtgtaaaatatttcaaattctctctcttcctaatgacagcctataggggcccttataagattctccagttttcttaaaacagtgacctctcccscctcatcctttttggaggtgattatttatgtgatttgagcactataaatttttatgacttcaaaatttgaaaacatttaatgtgagatgagaagtatctt

SEQ ID NO: 11008 - DNA, 201 bp, Homo sapiens
gtgtatattcttttattaaaattgagtgatttaaagcagaaaatgtagtgattttttaaaaaaacttgccaatgtattgtgtaccttttaaatgtgatttwaaacatcttggcttagtgtctgcattatattattatggtggtgacatttcatggcttcttatgtttggaacgtgtgagaaataaacaagtgtagtgatat

SEQ ID NO: 11009 - DNA, 201 bp, Homo sapiens
aaatttgtgtgtgtcaggtactgtttttcattttatacttccagccattatttgtgattagtaatataatctgaagattggctattctctgttatttaacrattatttatcaaggctaattatcagaaatcaagctagtactaagagagaaggctggaatgatctggccaatgtgtttttaagctggtttaataaagcagg

SEQ ID NO: 11010 - DNA, 201 bp, Homo sapiens
ccagaacttattccttccatttaactgcagctttgtgccctttggccaacatctccccattcctccacccctctgtccctgcccctggtaaccaccattcyactctctacctctgtgagtttgactttttagattccacatacaagtgggattatgcagtgtcttttcatgtctggtttatttcacttagcataacgtcct

SEQ ID NO: 11011 - DNA, 201 bp, Homo sapiens
ggcgtgagccaccatgcctggcctaatattttgtattaatatataaataaataacaaactatatatttttggagtataatgtgatattttgagagctttawagattgtggaatgactaaatcaagctaattaacatatccaacacctcacataccattttgagatggcaagaacatttaatatctactctctcagcaattt

SEQ ID NO: 11012 - DNA, 201 bp, Homo sapiens
tttcattaagtctcctagtcagtaatctggaggtacttcattttatatgcaagtgtataattttttgaaggagaaactatatctatggatggagaaaacayatctttgagcaaggagaggttttctaattttagttttctttcaactaataaaaaggtagttcagaaattttctgtttctagacctaattaactgagaaat

SEQ ID NO: 11013 - DNA, 201 bp, Homo sapiens
cctgggtgaccaagtgagactgtctcaaaaaaaaaaacaaaacaaaaaaaaacaaacaaaaacaggaacaaaaacaaaacacaacagcgaaaaaaaaaaaagttctcctgttgtgatagttttactttgacctagttttcaaacttggtgggagatatgaaagtatcaacaggtgaataaaccaaatgatttcattaagtc

SEQ ID NO: 11014 - DNA, 201 bp, Homo sapiens
ggcaggaggatcacttcagccctggaatttgaggttgcagtgagcagtaatttcgccactacactcagcctgggtgaccaagtgagactgtctcaaaaaamaaaacaaaacaaaaaaaaacaaacaaaaacaggaacaaaaacaaaacacaacagcgaaaaaaaaaaaagttctcctgttgtgatagttttactttgacct

SEQ ID NO: 11015 - DNA, 201 bp, Homo sapiens
tccactattgagacctactgctcagaaaaaaagatttctttcaaaatattactgctcattgacaatgcacctcatcacccaagagctcgatggagatacaygaggaaattactgtagttattatgcctggtgacacagcatctattctgcagtctgtgggtcagggagtaattttgacattcaagttttgttatttaagaa

SEQ ID NO: 11016 - DNA, 201 bp, Homo sapiens
ctgaagaatgagttaagcagtttacacactcttccttttccactacccatatgtacctggttgcctgtttttctttctttctttttttgagacggagtctsgctctgtcgcccaggctggagtgcagtggcgggatctcggctcactgcaagctccgcctcccgggttcacgccattctcctgcctcagcctcccaagtag

SEQ ID NO: 11017 - DNA, 201 bp, Homo sapiens
gatgagatctcactatattgcccagactggtcccaaactcgtgggctcaggtgattctcatgacttagcttcctgactagctgggactacaggcatgtgccaccacatctggctggatattgtgttttcgtaagttgaaagtttgtgccacaacccttcattgagcaaatctatttgctccatttctccaacagcatgtgt

SEQ ID NO: 11018 - DNA, 201 bp, Homo sapiens
actcagctgctatacatatggtgagagtgttgtcgcaaaagagaagcagccttggaagcttagatcaatttccttatcatcaactgtgttgtttttttttkttttttttttttagttctacttttctgactcagcatttcagatctaagtaattcattttccaaggaaaataagattagagagaagaaggaaaatgtatag

SEQ ID NO: 11019 - DNA, 201 bp, Homo sapiens
tgtggggtcggagcccccacacagagtccctactggggcactgcatagtggaactgtgagaagaaggctactgtcctccagaccccagaatggtagatccrccgactgcttgcacagtgctcctggaaaagccacagacacttaacactagcccatgaaagcagcagagagggaggctgtaccctgcaaagccacaggggc

SEQ ID NO: 11020 - DNA, 201 bp, Homo sapiens
gttggtgggagtgtaaattagttcaaccattgtggaagacagtgtgggatttctcaaggatctagaaccagaaataccatttgacccagcaatcacattayggggtatatacccaaaggattataaatcattctactataaagacacatgcacacgtatgtttattgtggcactattcacaatagcaaagacttggaacca

SEQ ID NO: 11021 - DNA, 201 bp, Homo sapiens
attgcgttctttcaagctgcctctggataagtcaatttttttctaatttttctcatgatatatatagtcatgctttcttaaatttaaaattctttcaaaartgtgtttttgtgtgtgtgtttaaggaagaaaggcagactaatatagaatcagtggcctcatcctgtagttttcaccagtatctcttgtgagctttttata

SEQ ID NO: 11022 - DNA, 201 bp, Homo sapiens
  misc_feature (1)...(201): n = A,T,C or G, or insertion/deletion polymorphism (see Tables 1-2)
tttcaatgtattttggccttctgtgctgtagcacttacggaatgtgtggggtgggacttcagcgtccaaatgttctattttctgctttgaagaaaaggtgncagaactctctaaacctagttagcaaagttctattgcaaatacagcgtcctcaagtcacttcaacacccagagtacaggagttggaggaggggatcgtgg

SEQ ID NO: 11023 - DNA, 201 bp, Homo sapiens
tccttcattttacttatttctctgtttctctataataagcagctgttttatagagtcaatgaaacatgggggatttgggctgttgagatttagttgcattkagtggaacacgttatttgaaaatgttgacccagttcaagattgtctgatgcttgttgtatgactttttctctgtatgcacagaaatagtaactagtgggc

SEQ ID NO: 11024 - DNA, 201 bp, Homo sapiens
tccctccatcaaaaaagaagttggtgggggagggtgggcacagctttttaaatgggcccattttaaaaagttgaaataagccaagatttcctgtttactgscatgtcattcttttgtggaagccttatttctccatactgtttctccagcattttattccttattttcttttctgagaaagagtttaaaaatacgttccat

SEQ ID NO: 11025 - DNA, 201 bp, Homo sapiens
ttatattccctctaatgtttacagtgctcttgaaattattggaacgggtaaaatgccccttgtataccgtgtaaaagggacttgcttcccccactcccccmatttctgtgtcctcaggttgcataattgtcaagacagaatagctttaaattaataagcttaatttggctgttaaatatttattaaaccatcacatctgag

SEQ ID NO: 11026 - DNA, 201 bp, Homo sapiens
cactcctatgagaaacaatctaatgccaccactgatctgagaggaggtggagctcaggcggtaacgctagctcacctgccgctgacctgccgtgtggcccsgtacctaacaggccagggttcctaacagtaccagtattaggccctgggagttggggacccctgctataaaagacttagtctttgaagtttgatctgctca

SEQ ID NO: 11027 - DNA, 201 bp, Homo sapiens
atatgattatattccctctaatgtttacagtgctcttgaaattattggaacgggtaaaatgccccttgtataccgtgtaaaagggacttgcttcccccacycccccaatttctgtgtcctcaggttgcataattgtcaagacagaatagctttaaattaataagcttaatttggctgttaaatatttattaaaccatcaca

SEQ ID NO: 11028 - DNA, 201 bp, Homo sapiens
tgtgtctttggaagcattttgataaactcctacgttcctgtgtgttgggagttcatgttctggaagaggtcagagaaataaaaatcatctggaaataataytagcttaatatatgttgaatatgaaaataatctcaatcttgtccctttcataatttctttttttatgactgtttttttagagatgagatcttgctgtgct

SEQ ID NO: 11029 - DNA, 201 bp, Homo sapiens
ccagtgaatagtagaataatatttagagatgaattttctgtcataggcatgggataaactctatttcagtagaaaggcaagataatgagcaggatcttatrtagacaaatcgttcattccaaacatgctggctctaggaggtgttcagtgtgtttgttgaatgagtgttacagatgaattgaggtcagatggaattgaggt

SEQ ID NO: 11030 - DNA, 201 bp, Homo sapiens
ttccccccaagaagacagataaaatgaaatacctcttttgtgctgagtagttgaaacactttttgccaaagtgctttgcttgccttgctgcctttgaattytattacagaggctggctgggcattcacatggtgagtcttttcaagaatgcctttctgtctaaatctggatcagcagtgtccactcaccatttatctgatc

SEQ ID NO: 11031 - DNA, 201 bp, Homo sapiens
ttgtttaatatactttgtggaatagtgttcactttgttacttctctttgttcataaatggtattaatgtcttggaatctttctgacacttagatactgtcyaaaaatatgtctatcttccccccaagaagacagataaaatgaaatacctcttttgtgctgagtagttgaaacactttttgccaaagtgctttgcttgcct

SEQ ID NO: 11032 - DNA, 201 bp, Homo sapiens
ggtaccatgtattcctttttgtatccttagcaccttacagtttgccatgtatttatttgagtacttgccattggttgttagcttgaatgtaatttctctcyttatttttttcattttctttccctgactcagaaaaagtattacaggagtttgatttggtatctctggcacctgcttggaaaattaattacaacatgtagt

SEQ ID NO: 11033 - DNA, 201 bp, Homo sapiens
cattgcatgtgattgactggctgtttatcttcctcataaaataaatattagatttcatttttggtttgtattttgcccctgatgtctttctatattattgygtttatctggatttttctgctttcttgagcagggatgtatctcctctaaatagtgtggtactgtatatagttcctcatttttctctttcttgaaaaaact

SEQ ID NO: 11034 - DNA, 201 bp, Homo sapiens
ctgactgtagctgaagaaagttcttcacttttaaagtctcatgtggttagattaggaccatctggataatcttcatatcctatggtcagttgattagtaamcttatatttgcagaatcccttcacaatagtacctagattagtgtttggttaaatagccagaagacaggaatctttggggggcagctttagaattctgcct

SEQ ID NO: 11035 - DNA, 201 bp, Homo sapiens
cagtagaagaaagtgctactgatgaataaagctccaggtgtatatgtggttatttaaagatcatctccccaaatattatttctcccatttgtactttttgmcacttactgttttggaatataactgttgttgatttctcacttgagttttgactgagtctctcttaacagaaactcaaattctttttaaatttttactatc

SEQ ID NO: 11036 - DNA, 201 bp, Homo sapiens
tactagatcctagattctgtgttcttaagcagattatttaaaactctctattccttagtttcctcatgtgtaaaatggaggatgataacttttcagggttsttgtgagaattaaatgggttcctgtgtccaaatacttgcatatggtaagttctcgcattaattttctgttgctgctatagcaaattaacacaaatttagt

SEQ ID NO: 11037 - DNA, 201 bp, Homo sapiens
ttcttgaatatacagtaaaccactctagtcattactagatcctagattctgtgttcttaagcagattatttaaaactctctattccttagtttcctcatgkgtaaaatggaggatgataacttttcagggttgttgtgagaattaaatgggttcctgtgtccaaatacttgcatatggtaagttctcgcattaattttctg

SEQ ID NO: 11038 - DNA, 201 bp, Homo sapiens
gactttgttatccaggataataaatgaaaacttaggaactgattgcatcttcctgaagacaagtctattgttagtttctatctgagaatttttcatctgcrtttcagatggttgagtatgttggaaatgtgcgttccagaaaagtgaggaaggaggtatgtgcttcatggggactaggtgttaaaatggttgtggtaccag

SEQ ID NO: 11039 - DNA, 201 bp, Homo sapiens
tcaaattctactcaggttttatataaaaatgtcagtagtattaagatgggttaggaagcttagattattaattgatatggtcctttttggtaggattttcrtatcctttgtatgtgagaagagagaaagaagttggacatccatggtttgtatgtctggctggtgtttgagggatcgatcacttatttgttgataagtgaa

SEQ ID NO: 11040 - DNA, 201 bp, Homo sapiens
taggttttgaatatttttaaagaaaacttcaggcaattagattatatttgggaaatatcattgcagtatgaatttgaggttaggaaaaaatattcccagarataaattcaaatacttcaaagaattatttgcttatttcttaaaccattatttcttaattttaagttgaccctttatagtgaaattgatgattaaaaacaa

SEQ ID NO: 11041 - DNA, 201 bp, Homo sapiens
ctgttaaaatatcctaagaaatgatttatctttgagttactgttaatataactgaaagaataatttttaaatacattttgtgattattgaaatgtttctcmtaaagagatgtaatactgtcacatgaaagtttgtcaacaaatttcccctacagaagaatttggtaggggcttggataaggtagacaggcagaaggactgt

SEQ ID NO: 11042 - DNA, 201 bp, Homo sapiens
attgaaagccatcttgggctgcatgtggcctgtggtcggcgggttggacaagcttgatctagattatatgaataacctacagctgaataataagatggttsagttataaaatgggcaaaagatttgaatagacacttcatcaaaggagatatacagatgtgaaagaagcacaagaaaagatactcgacatcataagtgatt

SEQ ID NO: 11043 - DNA, 201 bp, Homo sapiens
tacactactgatagctgatgagctaaaaaaaatacaaatcacacacaaaaaaatctcataatgttttaagaaagtttacaaatttgtgttgggccgcattsaaagccatcttgggctgcatgtggcctgtggtcggcgggttggacaagcttgatctagattatatgaataacctacagctgaataataagatggttgagt

SEQ ID NO: 11044 - DNA, 201 bp, Homo sapiens
aaacattgtagttgggcagctctcagaaaaacggccttccgttaataaaaaaaaattaaggaataaatcgatattagggagttagtttgcagcatctgttrttgcatccactatgagagtagcttattttaatattaaggctgtagttatatccctaaaaaatagttccagagattgggtaagacaataacagctcaatct

SEQ ID NO: 11045 - DNA, 201 bp, Homo sapiens
atcacagcaaaggtgtgaaacaccaaaaacggcagtagatggtcacattcatttgatgcagggtctccttggtatgcctacacacactttacagggaactrtttctcctttttctcagaaagaggcttttcctctaaaaatttttataggaaaaagtcacattagatgtccttgtccttggaaaagtatgccaagtggcag

SEQ ID NO: 11046 - DNA, 201 bp, Homo sapiens
tagaaggctcccttgagccccctctggtcactatctgttaagggggtgggattgtagacagtttctttcttttcctttttttttttttttttttttgggarttcctgtattttccaaattattaacaattatataatgataaaggaaaatgattttatataggggtgtgtgtgtgtatgtgtttgtacttaagtaaaagta

SEQ ID NO: 11047 - DNA, 201 bp, Homo sapiens
cccacgtgttttgggagggacctagggggagataattgaatcttggggcctggtctttcttgtgctattcttgtgatagtgaataagtctcgtgagatctratgggtttatcagaggtttccacttttgcttcttcctcatttatctcttgctgctgccatgtatgaagtgcctttcacctcctgccatgatactgaggcc

SEQ ID NO: 11048 - DNA, 201 bp, Homo sapiens
cttgaattgtatctcccagagttcccacgtgttttgggagggacctagggggagataattgaatcttggggcctggtctttcttgtgctattcttgtgatrgtgaataagtctcgtgagatctgatgggtttatcagaggtttccacttttgcttcttcctcatttatctcttgctgctgccatgtatgaagtgcctttca

SEQ ID NO: 11049 - DNA, 201 bp, Homo sapiens
ctaagccccccagtgattttctaggggttatgtacgaagtcagtgatatcacttttgggatttgggcaaacgtcaattttcaatctccttttttttttttytttccagtcacagaatgactttgatttcctgattatgtcagtacccatccatacccatccatattacttttttttttctctgagatggggtcttgctctg

SEQ ID NO: 11050 - DNA, 201 bp, Homo sapiens
ctagatccctgaggaatcgccacactgtcttccacaatggttgaactagtttacagtcccaccaacagtgtaaaagtgttcctatttctccacatgctctycagcacctgttgtttcctgactttttaatgattgccattctaactggtgtgagatggtatctcattgtggttttgatttgcatttctctgatggccagtg

SEQ ID NO: 11051 - DNA, 201 bp, Homo sapiens
cactatctatggcacctatagccttacaaaatgtatttcttaaataataaaacttgaaagccaaaactacttcttgattcatgagctacagaatagatgtrttagcaggcatgaaaacaacattaatctccttgtgcatctcctgcagagctttcaggtgaccaggtacattgtcaatgagcaataatattttgaaacgga

SEQ ID NO: 11052 - DNA, 201 bp, Homo sapiens
tgccacattttcttaatccagtctatcattgttggacatttgggttggttccaagtctttgctattgtgaatagtgccgcaataaacatacgtgtgcatgygtctttatagcagcatgatttatagtcctttgggtatatacccagtaatgggatggctgggtcaaatggtatttctagttctagatccctgaggaatcgc

SEQ ID NO: 11053 - DNA, 201 bp, Homo sapiens
cactggaactcaggaggcagaggttgcagtgagccgagattgcaccactgtgctccagcctgggtgacagagcgagactccacctcaaaaaaaaaaaaaaatcaccgattaaaaccatgggctgggatactattgccatcatagaagaaactttcaagaaatacaaagtttttgaatacctcaattctcaaattctttttt

SEQ ID NO: 11054 - DNA, 201 bp, Homo sapiens
gaggttgacgtggaaggattgcctgaggccagtagttcaagaccagactaggcaatgtaggaagaccccatctctacagtcaaataataaaaaaaaaaaaattagctaagtatggtgatgcatgtccatcatccatcccaactactcaggaggctgaggtcagaggattgcttgagcccaggaattcgaggctgcagtgca

SEQ ID NO: 11055 - DNA, 201 bp, Homo sapiens
tagattggtttacaggttaatatacatggcaaatataatctaatataagtagttacaaaatttaaagaacacagcatttgttcagagttaggtgcttttttacacataggcaataagttctgccattttcttcctagagaaatataacagttatggagttttatatttggaatatcggaaagcgtgcacattcttcagcag

SEQ ID NO: 11056 - DNA, 201 bp, Homo sapiens
ggacatggggtgatgggtgattttagacataatgggcagagatcatggactttggaaacagaaaaaagacacaaataaatcagaagaatttgaagtataargaaggctggggaaaatgattatttgtctagtatgtctataaagaaaacatctcgcctcagtataggtcttatagtttaaaaagatgaacattttaaagaa

SEQ ID NO: 11057 - DNA, 201 bp, Homo sapiens
tgtgagtgagactacatttttaatgttttcaagcagcttattattttattttatttatttattttttgagatggagtcttgctttgtggcccagcccaggmtggagtgcagtggcacatctcagctcattgcaacctccagctcctgggctcaagcgattctcatgcctcagcctctcaagtaactgggactacaggcatg

SEQ ID NO: 11058 - DNA, 201 bp, Homo sapiens
cttcaggatatttttaatattaaaaaatatttattgggtttaccttaaattctttagaacaaaaggctgggcaaatgaaaatttactacttattcttttckcttcatagttgaaataaattttttcatgtgtttctatttctcaattataaatataatttgtagatttttttcatcttattaatgatgtaagctaaatgta

SEQ ID NO: 11059 - DNA, 201 bp, Homo sapiens
ctgaagggctctctgcacagtaaataaagtaaagccaataattatcaatgggcaactgggccatgttcttaacaaaagtattcagatggccataaatcatrgcatcaaaacaaatagggtaaagggatgctctggagaggaatctaccagctgttttcctgaggtttcgggaaaaaactgttgcctaataatacttctaaa

SEQ ID NO: 11060 - DNA, 201 bp, Homo sapiens
tcgtgaaatatgattatattccctctaatgtttacagtgctcttgaaattattggaacgggtaaaatgccccttgtataccgtgtaaaagggacttgcttyccccactcccccaatttctgtgtcctcaggttgcataattgtcaagacagaatagctttaaattaataagcttaatttggctgttaaatatttattaaac

SEQ ID NO: 11061 - DNA, 201 bp, Homo sapiens
tcgcctcttgagttcattttaaactgtaacacttggaacatataaatgcatgtaaagtataaactgtaaaacaaaataataaaatgaacatccttgaaatkaccatccaacctaagaactaggatatgaccaaaactatctgtaagttctttttctagcccattcagttttgcagagtttacaggttaaaaaggatcttgg

SEQ ID NO: 11062 - DNA, 201 bp, Homo sapiens
cactgcatgaggtggtccagatagtacaaagttagaatttgagctggtctttgaaggaaagaggcatgaattagtagagatgagggtgtggggtcagtggragaagactttctatttatttttgagacagggtctcgctatatggcccagactggtctcaagctcctgggctctagtgatcctcctgcctcagcctcccaa

SEQ ID NO: 11063 - DNA, 201 bp, Homo sapiens
tgtctcccctaccccaccccattgggcactatctggagacatttttaaatgttgtgacttgggagtgggagtggtgtcagccaaaattttcagctgagatkttaacattttaggacaaattattaagtctttctaaaatctttttggacttggaaaagtatttcttattgctttaggatgttctcgattgaaccaaaaaca

SEQ ID NO: 11064 - DNA, 201 bp, Homo sapiens
agtttttcccatgtgcttttgcaagagaatttatgtttcacagagctgagctgcaatatcaacctttcccagaagatgccaccaaataacaaatggtgtcytccagtttggagactcctttctgaatttcctagttacattttgtaaattcatgttataacctctctaagttattcaaaatgtaggctgtgctttctttga

SEQ ID NO: 11065 - DNA, 201 bp, Homo sapiens
ataataaaaatagaataaaaaattttttaataagagtgtaaggctatcctctctgcatagaatgctgtctcctgttagcccacaatgctccccgcccacartccttaaaatcttagatgaaatgttattccctgaggaccttcacacccagcttcttctactattaggttttcgggcacaccctatatctacttcttttgt

SEQ ID NO: 11066 - DNA, 201 bp, Homo sapiens
aaagaaaaataataaaaatagaataaaaaattttttaataagagtgtaaggctatcctctctgcatagaatgctgtctcctgttagcccacaatgctcccygcccacagtccttaaaatcttagatgaaatgttattccctgaggaccttcacacccagcttcttctactattaggttttcgggcacaccctatatctact

SEQ ID NO: 11067 - DNA, 201 bp, Homo sapiens
atataaccttatttttccagtaatttttattttattttattgttttttgagatagggtcttgctctgtcactcaggctggagtgcagtggtatgtatgaasacgattcactgctgcctcagtctcctgggatcaagcgatcctcctgtctcagcctcttgtgtagctggatccacaggcacacacctccatgcctggctaa

SEQ ID NO: 11068 - DNA, 201 bp, Homo sapiens
ttgccattttatggatgaaaaagctgaggctccaagatgaagaatcttccccaaggttgccatctttagaagtgatggagctaggatttgaacccacttgrtaggtagtgtacctacctaagaggaggttggtggtaaaacaaatcttattcttccttggattcatactaaaattgtagaggtgtgctacatgaagttggc

SEQ ID NO: 11069 - DNA, 201 bp, Homo sapiens
ctagtatgtctataaagaaaacatctcgcctcagtataggtcttatagtttaaaaagatgaacattttaaagaaccttttctagaatcaaattctactcargttttatataaaaatgtcagtagtattaagatgggttaggaagcttagattattaattgatatggtcctttttggtaggattttcatatcctttgtatgt

SEQ ID NO: 11070 - DNA, 201 bp, Homo sapiens
ttggcttctttgggccacattggaagaagaattgtcttgggccccacatgaaatacactactgatagctgatgagctaaaaaaaatacaaatcacacacamaaaaatctcataatgttttaagaaagtttacaaatttgtgttgggccgcattgaaagccatcttgggctgcatgtggcctgtggtcggcgggttggacaa

SEQ ID NO: 11071 - DNA, 201 bp, Homo sapiens
tttgctcttcaaaagttacaaaagttaagccacagcctgggagaaaatatttgttaacatatgtctgacaagggcatgaatccagatcaggggtgtccaaycttttggcttctttgggccacattggaagaagaattgtcttgggccccacatgaaatacactactgatagctgatgagctaaaaaaaatacaaatcacac

SEQ ID NO: 11072 - DNA, 201 bp, Homo sapiens
gaggacaatcctccacgttctgatgcaactcagtaggctgtcaggaggggaagccccccgaagaaaacaactccaagcctggtccccgagggtctgtaccyggcactcccaggtgtcttgctttcacctgggcaccgctttatgaagcttcccagccggggattaccaaagcggaaggcgttcccttgcaaggaaatagca

SEQ ID NO: 11073 - DNA, 201 bp, Homo sapiens
atccacgtctgggggaagaaaactctgtgggaaaccaggtttcctaagagagtagtttagcaatttagaagccagccgtcattcttttcgaattgtctgcrgggaatggggaatctgtggcgtattagaatattccttctaagaacccagagaaccctccctgagaaatgttctgatgaaaatgatgttctccatcctggg

SEQ ID NO: 11074 - DNA, 201 bp, Homo sapiens
attcttttctagagctttcagagggaatatggccctactgacactttgatttcagaattctagcatgaatggttaaattcctgttgtttcaagccaccctrtttgtggtattttgttacaatagccctaggaatctaatacactaatactaaggcagtatgctttagtgcttaaagttatattgaaacaataaaaacaatt

SEQ ID NO: 11075 - DNA, 201 bp, Homo sapiens
aaagattgccagcaacctccagaagctaggagagtcaaggaaggattcttttctagagctttcagagggaatatggccctactgacactttgatttcagamttctagcatgaatggttaaattcctgttgtttcaagccaccctgtttgtggtattttgttacaatagccctaggaatctaatacactaatactaaggcag

SEQ ID NO: 11076 - DNA, 201 bp, Homo sapiens
tctgggcattgaacttaaagaagacattgaactggagggagttgaaaatgatgcagctgtgcatcaagagattgctattagtttctctatatgacctgtgktaagtaacttctgaattcggtttttgtaacacagaacacctggaggaccaaagtcaatagggtatactcaactgtagtagacaagatggaaaacagtatt

SEQ ID NO: 11077 - DNA, 201 bp, Homo sapiens
ttaactttgtcaacaatcagtactcttcgttttattattgtcagatatttacctacttttccttaaaaggtagtcccccccccccccttttttttttttgrgatggagtttcgctcttgttgcccaggctggagtgcaatggcaccatattggcttactgcaacctccgcctcccatgttcaagtgaatctcctgccttag

SEQ ID NO: 11078 - DNA, 201 bp, Homo sapiens
gggacccataataatattttgtgagtgagactacatttttaatgttttcaagcagcttattattttattttatttatttattttttgagatggagtcttgstttgtggcccagcccaggctggagtgcagtggcacatctcagctcattgcaacctccagctcctgggctcaagcgattctcatgcctcagcctctcaagt

SEQ ID NO: 11079 - DNA, 201 bp, Homo sapiens
actctgtcgcccaggctgacgtgcagtggcacgatcttggctcactgcaacctccatctccctggttcaagtgattctcctgtctcagcttcctgagtagstgggactgcaggcgcgtgccaccatgcccagctaatttttgtatttttagtagagacagggtttcaccatgttggctagcatggtctcgatctcttgacc

SEQ ID NO: 11080 - DNA, 201 bp, Homo sapiens
cctaagtctggcttagtacaatattcagttcttggttatgtttaccatggacaatggggagaaacatgagaggtttcatgctaccttttttttttttttttaaacatctggttactaattgtttcagaatgtgatttagttttccttcagaaattctgaaggcatttgaggaactttatgtcttaggattgtatttataaa

SEQ ID NO: 11081 - DNA, 201 bp, Homo sapiens
cccaccataaaaagagaaaagaaaaagttaaagggatattttggaaacaggaactaagctgtaaatgcaaattgcttcattttctcaaaggaacaaaaaaagaaagggtttaggaagtttttattgaagctacattattgaggatctgtctgctttcaggacactcaatattgtactcacattgaaactacacttctttct

SEQ ID NO: 11082 - DNA, 201 bp, Homo sapiens
gcattactgttttaaagatttttcttattattacaagtaataatttttgtttttgtagaaaaatgagaagatccaaataagcaaaaagaaaaaaatacttytcatataagcatccagcacaaagtgctacacagaagcctttaataaatatctattgattgaatgctaggaattaactcactgacctctgagtaaattgct

SEQ ID NO: 11083 - DNA, 201 bp, Homo sapiens
attttaacatgattatattttcatgtcttggaatataacaaatctcaacatttttgcttatattgggacagatttaaaaacttcagcttagactgtttaaagttagactttgttttttgtatctgaagacttttagaaaactgtgaaaattgagtttgacttataatccttgataattggatatttaaatgtcatttttag

SEQ ID NO: 11084 - DNA, 201 bp, Homo sapiens
ataggtggaagacctagacctcagtcctccttgactttctgaatatttcaaattccagagaccttgcatttctccgaattcctcttaatttcactcaacaycgcattactgttttaaagatttttcttattattacaagtaataatttttgtttttgtagaaaaatgagaagatccaaataagcaaaaagaaaaaaatact

SEQ ID NO: 11085 - DNA, 201 bp, Homo sapiens
gttaacatacaggtaacattttaatgaaaaatgaacattttcttaaaaacagtgacaagaggggcattgtttacttttcttttctttttttttttttttttcaaatctctttgttttaatagaagacaactaggtcctcttaccagcttctcttttcagtctattgtgttatcacatgtcctgtagcctctggaaaactct

SEQ ID NO: 11086 - DNA, 201 bp, Homo sapiens
tttcaggtgatgctggtgttactgatcctgagaccactgttctaggtgtaattaaactaatggactcttagctaagaaactttcttttcttttttttttttgttagcatagtgctagtaaaaagaaataaatggaaagaatagcagttgaagtttctttgggagtgtggccaacttttgaatgactaggagaggattgaat

SEQ ID NO: 11087 - DNA, 201 bp, Homo sapiens
tgttaacatacaggtaacattttaatgaaaaatgaacattttcttaaaaacagtgacaagaggggcattgtttacttttcttttctttttttttttttttttcaaatctctttgttttaatagaagacaactaggtcctcttaccagcttctcttttcagtctattgtgttatcacatgtcctgtagcctctggaaaactc

SEQ ID NO: 11088 - DNA, 201 bp, Homo sapiens
tcagtgtcctgagtatcgagaggctggttatattatcatcgtttaagggaatcaactttattccaagtctgtaggcatttgatacttctattgggcatcawctctggccttctaggaacagacatgaagcaagagtgtggtagaataaattctatttgtgcagtgactagaaagtacagtagtaatttacaagttgcataa

SEQ ID NO: 11089 - DNA, 201 bp, Homo sapiens
atgttaacatacaggtaacattttaatgaaaaatgaacattttcttaaaaacagtgacaagaggggcattgtttacttttcttttctttttttttttttttttcaaatctctttgttttaatagaagacaactaggtcctcttaccagcttctcttttcagtctattgtgttatcacatgtcctgtagcctctggaaaact

SEQ ID NO: 11090 - DNA, 201 bp, Homo sapiens
tatgttaacatacaggtaacattttaatgaaaaatgaacattttcttaaaaacagtgacaagaggggcattgtttacttttcttttctttttttttttttttttcaaatctctttgttttaatagaagacaactaggtcctcttaccagcttctcttttcagtctattgtgttatcacatgtcctgtagcctctggaaaac

SEQ ID NO: 11091 - DNA, 201 bp, Homo sapiens
taacatttttaccaataatacttagtttttaaggctagttttagggatacctcttaaatacctcctatgaaactgatcctgactcttttttgtgtgtgtgygtgcttcgccattacttttaaaattatagttctcatgacaatttatttatttataggtttgccttttattctcctttgaataaggtccctctgacctagc

SEQ ID NO: 11092 - DNA, 201 bp, Homo sapiens
gatcacctgagcaagcccagaagatcaaggctatagtgagccatgactgcaccactgcactccagcctgggcaacacagcaagaacctgtctcaaaaaaawaaataataataataataatttgtagtaatataatgaatatccatgatggtttgtaatggagcatttctgatcattgcgttaatatggattactgggtgtg

SEQ ID NO: 11093 - DNA, 201 bp, Homo sapiens
atatgttaacatacaggtaacattttaatgaaaaatgaacattttcttaaaaacagtgacaagaggggcattgtttacttttcttttctttttttttttttttttcaaatctctttgttttaatagaagacaactaggtcctcttaccagcttctcttttcagtctattgtgttatcacatgtcctgtagcctctggaaaa

SEQ ID NO: 11094 - DNA, 201 bp, Homo sapiens
ggagatcacctgagcaagcccagaagatcaaggctatagtgagccatgactgcaccactgcactccagcctgggcaacacagcaagaacctgtctcaaaawaaaaaataataataataataatttgtagtaatataatgaatatccatgatggtttgtaatggagcatttctgatcattgcgttaatatggattactgggt

SEQ ID NO: 11095 - DNA, 201 bp, Homo sapiens
agatgggagatcacctgagcaagcccagaagatcaaggctatagtgagccatgactgcaccactgcactccagcctgggcaacacagcaagaacctgtctyaaaaaaaaaaataataataataataatttgtagtaatataatgaatatccatgatggtttgtaatggagcatttctgatcattgcgttaatatggattac

SEQ ID NO: 11096 - DNA, 201 bp, Homo sapiens
gggaggcggaccttgcagtgagccaagatggcgccactgcactctagcctgggtgacagagcgatactccatctcggaaaaaaaaaaaaaaaaaaaaaaaaagagttttactgactgtgttatctcgttagtgtaacatcaagtcatattgagtcttacattcaggggcatcttacacttaaaatatggtattaacagttt

SEQ ID NO: 11097 - DNA, 201 bp, Homo sapiens
atggggtgatgggtgattttagacataatgggcagagatcatggactttggaaacagaaaaaagacacaaataaatcagaagaatttgaagtataaggaargctggggaaaatgattatttgtctagtatgtctataaagaaaacatctcgcctcagtataggtcttatagtttaaaaagatgaacattttaaagaacctt

SEQ ID NO: 11098 - DNA, 201 bp, Homo sapiens
tataaattataaagtaatataaccttatttttccagtaatttttattttattttattgttttttgagatagggtcttgctctgtcactcaggctggagtgyagtggtatgtatgaagacgattcactgctgcctcagtctcctgggatcaagcgatcctcctgtctcagcctcttgtgtagctggatccacaggcacacac

SEQ ID NO: 11099 - DNA, 201 bp, Homo sapiens
gtggcttggggcaggcccaacttcaggggtgactgtgcacattgtcctagttgtgtgtctgcctctgagtaagtgtgattagatgacctgatctctctaargtcctttccagctttattagttgaatatgagccagattcgtattcatttgtgggacatggggtgatgggtgattttagacataatgggcagagatcatgg

SEQ ID NO: 11100 - DNA, 201 bp, Homo sapiens
tcttcattgctatttagttttgggagtttcattttcttctcccctttttgcaggaccctaataggagtattcataccagcagcagcagcagcagcagcagyagcagcagcagcagcagcagcagcagcagcagtagcagcagcagcagcagcagcagcagcagcagtagcagcagcagtagcagcagcagcagcagcagta

SEQ ID NO: 11101 - DNA, 201 bp, Homo sapiens
gggttgtttgtctacagtcattcctcagtatctgcaggggattggttccaggacctcctgtggatacccaaacccatggattctgaaatctctgatataaratagcatagtatttgcatataacctatgcacattctcctgtatactacacattatctctagattacttataataactaatacattgtaaatgttatataa

SEQ ID NO: 11102 - DNA, 201 bp, Homo sapiens
acatttattacatgtacaaacatggagactggtgacaagacccccatatatatataatatataatatatatatataaatatcagataggctgaaaatcagygaaagcttttattctgtgtcagtgacaatttaatgtctggctgtgtatctgagctactgttttacatttattacatgtacaaacatggagactggtgaca

SEQ ID NO: 11103 - DNA, 201 bp, Homo sapiens
agagtgagaaccatttttatctagagtcaaagaattataaagaaacagtaaaagcttttcccccactacatttcagctgaactttgaacagaataaatatrcctttcagtacatattttaatgagtatactgtccatggtgaacatacttaaaaaaaaggaatccaccataaaacaaaaagattgccatctttggtagact

SEQ ID NO: 11104 - DNA, 201 bp, Homo sapiens
gagaaacacatcttcaacaaattcaaaagggccacctcttactcaatgcctgggtgtttcaatgacttaaagccactacaagcacaactaaagagtgagawccatttttatctagagtcaaagaattataaagaaacagtaaaagcttttcccccactacatttcagctgaactttgaacagaataaatatacctttcagt

SEQ ID NO: 11105 - DNA, 201 bp, Homo sapiens
ctcgaatccctgacctcaagtgattcgcctgcctcggccttccaaagtgctgggattacaggcgtgagccaccatgcctggcctaatattttgtattaatrtataaataaataacaaactatatatttttggagtataatgtgatattttgagagctttatagattgtggaatgactaaatcaagctaattaacatatcca

SEQ ID NO: 11106 - DNA, 201 bp, Homo sapiens
ttaaacatctaagaaaaatctactgtggagtgaaaatatgattgctaatggaatttcagatcaggagccagatagggagacatctgttgttccacagtccstaaaacagcaccattgcagcctttcttggaggcatatcaagaatgagtattttaggttagtatttattaaaggaatacttttgaaagcttgctcttgtag

SEQ ID NO: 11107 - DNA, 201 bp, Homo sapiens
ttaaaaaatttaattttaaaaatgctttattgctaaaaaaattgctaatgatcatctgggtcttctgcgagttgtatctgtaattttgacattcaagcctrctatctatggctatagctgccatagatagtaatttctctggtggatctgggtaaagtaaactggaaaccttctggaaaaggttcactattctagatacta

SEQ ID NO: 11108 - DNA, 201 bp, Homo sapiens
cagtttgagagccactgttttaaggttaggagaacataccaacctatcaaagtgggcgggcatctgatattgctgattcatggtggcatgctgttgctgtrttaaacatctaagaaaaatctactgtggagtgaaaatatgattgctaatggaatttcagatcaggagccagatagggagacatctgttgttccacagtcc

SEQ ID NO: 11109 - DNA, 201 bp, Homo sapiens
catataggatagtcttggtaacagaaagatacccatgtgtaatatatcagtacagtatacatttttggagtacttaggaatgttttgaaaagttctggccyttttttcctgtggagttttgataactttgataattaacatgtctatcttgctgtgtagtgttaaaaatttttctagagcctacatctgactttaaaaatc

SEQ ID NO: 11110 - DNA, 201 bp, Homo sapiens
atctcttctatcatgccagccactaataattccctttgtggtggagtatttccttttgcaaatgataggaacttaaaggaatccttttctgtttagtagtrtgtaggtctggattcagttgttgatagcagagaccactttagccagttttagcagggagagatttgatactgggaactacagaggatactggaggatcag

SEQ ID NO: 11111 - DNA, 201 bp, Homo sapiens
tggtgatggtcatagctattttagtaacttcagttactgacttctgggaacaaagtttcttgaaaataaaatcagctgcattaaaaaaccaaaaacaatamatgaactttgcttaatgacataacatggcatgctagtgaaacagcatttttaactattaaacttagggggtgtataggataaaaacacttgtactcatag

SEQ ID NO: 11112 - DNA, 201 bp, Homo sapiens
aatttctgatttacaggaaggtagtatagcagaaaatgagtaattttaacatgattatattttcatgtcttggaatataacaaatctcaacatttttgctkatattgggacagatttaaaaacttcagcttagactgtttaaagttagactttgttttttgtatctgaagacttttagaaaactgtgaaaattgagtttga

SEQ ID NO: 11113 - DNA, 201 bp, Homo sapiens
tcagtgtggtcgagccagatacctgccgtgtacaaccacctccctcatggacatacagatacagcctacttgactgaccccccgtaccctgcatggactgytgcagatacgccacggtagccactctcattcacagtgtgactccacagaacttttgcctgcttgctctaaacccaccaactagaacttcccacaggaaac

SEQ ID NO: 11114 - DNA, 201 bp, Homo sapiens
gttcacagccactgtacataaaattttagtgggcttttcattaatctaaaataactggtctataagtactttatcagtgaaaactgctcagcatgtaaaaygaggagtagaagagcacaaaggcttcctgcaaattaagggcacaatgagtactaacggactttccagccatctccagctgtgagattattatagtttttg

SEQ ID NO: 11115 - DNA, 201 bp, Homo sapiens
ctcaaatgtacacccctacacttccatactgcaaggaaaatccggaatgagttactacaattaatggtgactgttgctttcctcaggagacacctgcctcrtatcagtcaaccccttactccctaggggagaggaccacctacccactggtgtctttccctactaccccttccaactttccatcagaatctcctgacttgt

SEQ ID NO: 11116 - DNA, 201 bp, Homo sapiens
ttttttgttttttttttttggacaacattgcaagtgaaatgtttgataagaaagagaatcagtgtggatttaaaaaaattatcctgaatctgtcaaagatrgattttcatctctttgagggttctctttataaggctgtataagtgcagtgttcttgcaatttctgaactcactgggttagcatcgtacaatataatatta

SEQ ID NO: 11117 - DNA, 201 bp, Homo sapiens
aaacccctatatggtacagctacatatcattttgttgaatattagtctcattgctactggtttgggtgtttaatggtttacagtccagaggcctgcatcarctcgagtgggcagtcacttaaaaagccataccccagtctcacatcccagatgatatcacccaacccaggacctctccattggagatgactttgcccctgt

SEQ ID NO: 11118 - DNA, 201 bp, Homo sapiens
ctttggatgatagattatatagtcacccttttttagagtggcataactaagatttaaactcaggccttttgactccaagtcctaagctcatcactgttttrctctgtttataccatgcttctaggtcatatctctacttttaggttggtctaatgagaaggattctgaggcctaagtctggcttagtacaatattcagttc

SEQ ID NO: 11119 - DNA, 201 bp, Homo sapiens
gcagcctcttcatgaattacagctgagggggggcggaggaggggggggtaccacacaacaccccagcaaacctccgggcccccaggcatggctagctcggkaagtacgcgcaaaaataataataaaagccctcccccactttccttcctcgccctgcgccgccgcagcccagacagcgccagcgctccgcggttccaatta

SEQ ID NO: 11120 - DNA, 201 bp, Homo sapiens
tgaccccagaattctgaattttaatactccattcgtagtttcagttagcagtaattgtgcctcgcataaacctcattggctatgatcctgccactgcacaragctatttgtagtttcagatggcttgtcatccctctgtgttattcattgtgtgtttattgacattttagaggagacttgtattttggaaccttacctttg

SEQ ID NO: 11121 - DNA, 201 bp, Homo sapiens
gtgtttattgacattttagaggagacttgtattttggaaccttacctttgactgtcacggtttttcctacccctacatatgcataacctcttggaccacastacaatttttaggaagtgtccttgtaaaaatgcagtttgaacaaataaacttctaggagagtttgttggttttgataagtaaaactcttctgggagagtt

SEQ ID NO: 11122 - DNA, 201 bp, Homo sapiens
tttcattgaacaaaatatgattgatctgaaaatctttcacaagacagaagccagttaaagtagaacagagaccaaaaataagagggatagccagcgggaakaaacggaagccaagaatcagctatgagttgtcagtggttcttaaaagtagacttggagataacatggaaactgaaagccacatataatcagaaaacctta

SEQ ID NO: 11123 - DNA, 201 bp, Homo sapiens
tttcatctgtaacagagagggaggaggaaaggaaaataaaggtagtaatcaacaaactaattttgctgaccttctgtaagcttgagtagcatgcttgatcrtagtaggtagggagagcaggagaagggagatgaatgaataaatgaccccagtaaagtatagtggctgagcactagctttgggccacttgcttgtatttga

SEQ ID NO: 11124 - DNA, 201 bp, Homo sapiens
tatctagcagttcttacattcttatttagtcaaggtcagcagaagagctgactgtagtacagatcctccaaattgttgtctatctcttctatcatgccagmcactaataattccctttgtggtggagtatttccttttgcaaatgataggaacttaaaggaatccttttctgtttagtagtatgtaggtctggattcagtt

SEQ ID NO: 11125 - DNA, 201 bp, Homo sapiens
gaatagaatttgaaccttggtgagattttttttttttttttttttttttttttttgagatggagttttgctcttgttgcccaggctggagtgcaatggcgygatcttggctcactgcaacctccgcctcctgggttcaagcgattctcctgcctcagccccgcgagtagctgggactacaggtgcatgccaccacgcccag

SEQ ID NO: 11126 - DNA, 201 bp, Homo sapiens
tcaatccctgtttttcattatgcttccataatacttagaatagatgttagttcagagtgattcaaaattttaatacatcttatgtgccagatatgactagrgaagggaggacttacatggacttcttttgagtttatctagcagttcttacattcttatttagtcaaggtcagcagaagagctgactgtagtacagatcct

SEQ ID NO: 11127 - DNA, 201 bp, Homo sapiens
tcatgctgaaacagcagaatgaataggaaaaaaattcttgccagagggaactataatctctgtataactcagctgctatacatatggtgagagtgttgtcrcaaaagagaagcagccttggaagcttagatcaatttccttatcatcaactgtgttgttttttttttttttttttttttagttctacttttctgactcagc

SEQ ID NO: 11128 - DNA, 201 bp, Homo sapiens
catggagctttcaagttgttacccatttgaaatacccagtatggagttggaggccaggggagaagattaagcagatgtcaggtttgtttcagcaggatgcrctgcttaaccaccttccctccaaagtgctttgtgcctagcatcctgggaagggcagtgactaattcatttgctccatctgttgccttgggagacgctatg

SEQ ID NO: 11129 - DNA, 201 bp, Homo sapiens
taaaagtagacttggagataacatggaaactgaaagccacatataatcagaaaaccttattctggccagtagttctgatttttttcttaagtcctccactkgagttgctgacaagtagtattagaagagattaaacattaaagatacccattctgttccaaaaaattaaaacaaggaagcattcagtgcaatctgaataga

SEQ ID NO: 11130 - DNA, 201 bp, Homo sapiens
cgttctctttgatccctagattcttgaagtgaaaagtccaataaagcaaagcaaatcagataagcaaataaagaatggtgaatgtgacaaggtaggtttcyagtctgttactaggagggctccaacactgacaagccttccgtttctttgtgttgcccttgatcatccttgctggttctcctttcattttcttcatcaaag

SEQ ID NO: 11131 - DNA, 201 bp, Homo sapiens
ttcatagtcattttgtattggaatttggcaatatccttttgtacaaattaccaaatgcagtgtagcttggcatgcattgcttgtttggaatataatgtagrtttaaaaacaaaatatgttgacagaggcttttctgttcaggtggttaggcaggttagccctgtgtaaattgttgtagttctggttcagttcctctgaact

SEQ ID NO: 11132 - DNA, 201 bp, Homo sapiens
tctgttactaggagggctccaacactgacaagccttccgtttctttgtgttgcccttgatcatccttgctggttctcctttcattttcttcatcaaagtgyccaagatgcccaaatgatgagtatttcatcccagtgctttgtagtttgttttccatgtgttgtttatatcttcagtattaagcttggccttatgctgtca

SEQ ID NO: 11133 - DNA, 201 bp, Homo sapiens
tatcatgattctgaggcctccccagccatatggaactgtaagtccaattaaacctctttttcttcccagcagcatgaaatgggtatgtctttatcagcagrgtgaaacaggactgatacaagtgcatattgccaattgaaagaagccaatctgaaaagcctacatattatatgacttcaattttataacattctgaaaaag

SEQ ID NO: 11134 - DNA, 201 bp, Homo sapiens
tgagtatttcatcccagtgctttgtagtttgttttccatgtgttgtttatatcttcagtattaagcttggccttatgctgtcatttgccatgatgcctacrttgccaagggatttcaggcacattgaattgggaattaagagaattgtggtagagatagaatattaaggaatctcagatgtagatgagcaagacatctgat

SEQ ID NO: 11135 - DNA, 201 bp, Homo sapiens
cttattagtctaatgatccctatgaattgaggtactacctgtactatccccataatggatgaatttatcaaggttatagcatacaagattagtataaaaaratagtatttctacgtacttgcagtgaacaatctgaaaatgaaattaaggaaacaattttatttataatagcatcaaaaagagtaaaatacttaggaacac

SEQ ID NO: 11136 - DNA, 201 bp, Homo sapiens
gctgctgccatgtaagaagtgtgtttcacctcctatcatgattctgaggcctccccagccatatggaactgtaagtccaattaaacctctttttcttcccrgcagcatgaaatgggtatgtctttatcagcagggtgaaacaggactgatacaagtgcatattgccaattgaaagaagccaatctgaaaagcctacatatt

SEQ ID NO: 11137 - DNA, 201 bp, Homo sapiens
aaaaaatacaaaaactgcgtaagtatattatttcctatagctaattaataaagtaaaacatttatccttaaactgcatagcagtttccagcatattactgmaaatttctagcatattactgaaaattgagtagatgcttaaaatgcatgagttggatttattataatacattttaaattatctcatcctgttgtaaaaata

SEQ ID NO: 11138 - DNA, 201 bp, Homo sapiens
gttctccctcctctagtgcagtggatggtgagaactgggcaatttgggaagtgatactggattgtagtgatccctcagatggctggtgtaatgtgggctcmgggaggggacagtagaaatgcaaaaagctttggggccaggcttctggtttcatgggaaaacagtgataagaatttgagtcaagtgttgtaaacatttgtg

SEQ ID NO: 11139 - DNA, 201 bp, Homo sapiens
gaattgaggtactacctgtactatccccataatggatgaatttatcaaggttatagcatacaagattagtataaaaaaatagtatttctacgtacttgcartgaacaatctgaaaatgaaattaaggaaacaattttatttataatagcatcaaaaagagtaaaatacttaggaacacatttaacaaaacagatgtgaaat

SEQ ID NO: 11140 - DNA, 201 bp, Homo sapiens
ggtttatcaggggtttctgcttttgcttcttcctcatttttctcttgctgctgccatgtaagaagtgtgtttcacctcctatcatgattctgaggcctccscagccatatggaactgtaagtccaattaaacctctttttcttcccagcagcatgaaatgggtatgtctttatcagcagggtgaaacaggactgatacaag

SEQ ID NO: 11141 - DNA, 201 bp, Homo sapiens
ttttcttttttttttcctgagacagagttttgctcttgtctcccaggctgcaatgcagtggcaggatcttggcttcactgcaacctccgtcttccaggttsaagcaatttttctgcctcagcttcccaagtagctggtattacaggcaccacaccagcacacccggcttattttgtatttttagtagagatgaggtttcac

SEQ ID NO: 11142 - DNA, 201 bp, Homo sapiens
accctccctgagaaatgttctgatgaaaatgatgttctccatcctgggaaattacttgtcatatctcagcaccccttgtagattggagcctgatggcctaycccttaaccaagggtagggcacacatttttatgtggtggttgtccgtgctttccagaccatagtagaggccattctatgggaagacctatgttatcccag

SEQ ID NO: 11143 - DNA, 201 bp, Homo sapiens
tcaacttgaattgtatttcccagaatttccatgtgttgtaggagggacccagggggaagtaattgaatcatggaggccggtctttcctgtgttattctcaygatagtatgtctcacaagatctgatgggtttatcaggggtttctgcttttgcttcttcctcatttttctcttgctgctgccatgtaagaagtgtgtttca

SEQ ID NO: 11144 - DNA, 201 bp, Homo sapiens
cattcttgcattttgcctggagcagttaccactgtaatgttctcatggtgtttttctgtttctcttattttcttctgcatttgttaattataatttttctrtaaggaaaagttgcctttttttgtttgtttgtttgtttgttttgagacggagtttttgctctcttgcccaggttggagtgcaatggcgcgatcttggctc

SEQ ID NO: 11145 - DNA, 201 bp, Homo sapiens
tttttttttttaattcaagccggcctttctgagttttagtttctgcattttcttgcctcatttattttagtgctaatgaaatggctaacactcattggggkcgagaggaaaaagcatcaggtctataattcatgtgcagtttagtcacctcccagataattaaggatcagtttataaggtaatcataatcatgttatcctg

SEQ ID NO: 11146 - DNA, 201 bp, Homo sapiens
attgggaaggcatggttggttttaaaatgtgagaacatgagattttgaggggccaggggtggaatgatatagtttgactgtgcccccacccaaatctcaayttgaattgtatttcccagaatttccatgtgttgtaggagggacccagggggaagtaattgaatcatggaggccggtctttcctgtgttattctcacgata

SEQ ID NO: 11147 - DNA, 201 bp, Homo sapiens
ttgagattgcgtgatatcttgtttgtgcttaaaattttgcccacttatttttgtttccattcttgcattttgcctggagcagttaccactgtaatgttctmatggtgtttttctgtttctcttattttcttctgcatttgttaattataatttttctgtaaggaaaagttgcctttttttgtttgtttgtttgtttgtttt

SEQ ID NO: 11148 - DNA, 201 bp, Homo sapiens
tttacaggcttataggtagaagggacttgccttttctcacatgagactttggactgtggacttttgggttagtgctgaaatgagttaagactttgggggastattgggaaggcatggttggttttaaaatgtgagaacatgagattttgaggggccaggggtggaatgatatagtttgactgtgcccccacccaaatctca

SEQ ID NO: 11149 - DNA, 201 bp, Homo sapiens
agatactttgagattgcgtgatatcttgtttgtgcttaaaattttgcccacttatttttgtttccattcttgcattttgcctggagcagttaccactgtartgttctcatggtgtttttctgtttctcttattttcttctgcatttgttaattataatttttctgtaaggaaaagttgcctttttttgtttgtttgtttgt

SEQ ID NO: 11150 - DNA, 201 bp, Homo sapiens
tttttaccttttataggaaggaagaattaactcattgttaattaatgaaagcattagttaatttaaagagtattgcagggtcagcaaaatcaggatccaarccaggatcccacattgcagttagttgtcatgtttctttagtctcctttatctgtgagttgctcagtctgtctttgtctttcatgaccttgatatttttga

SEQ ID NO: 11151 - DNA, 201 bp, Homo sapiens
tttgtgtttcaagatctaatctaggataccacattgattgtatttagcaaatatttattttaaaagtctgtaatttaaagagtaatctaaatttcttctgkttaataagtatttccaacttttttctatttaatgatttaaaaacactattccttttttaccttttataggaaggaagaattaactcattgttaattaatg

SEQ ID NO: 11152 - DNA, 201 bp, Homo sapiens
ccattaatgtgttctattgctttctttctccgccatccccccactccccttcctggtgctctgcttctcaaaattaaacttactggcttaagacccagaarttttaacattgagaacaaaagaactgttttgcacaaatttgaaattttctcttcatggttttgacaatacagaagtatgatgtactagcttttttttttt

SEQ ID NO: 11153 - DNA, 201 bp, Homo sapiens
ctgtttattttcatccaaaaggctacatggcaattgggtgttttatgtttagatttcctccctggcttcagtcacttactgagaacttatgcgccaggccstgtgctgcatcttttacacacatcactgtgcttacccattcaggatgctttaacaaagtaccatccactggatggcttataaacaacacaaatggatttc

SEQ ID NO: 11154 - DNA, 201 bp, Homo sapiens
tccagaactctattctgaatgctttgtcaattacctactgggcagctcgctgaggaaaggagtcaaattctggtcagcttgttatttgcctccattgcatraatttgaaattataatagctctaaagagactacttgtttccatcctgaaatttacacattttcactagattcatagtatttttgcacaaaatggcaaaaa

SEQ ID NO: 11155 - DNA, 201 bp, Homo sapiens
accgcgcccggctaattttttgtatttttagtagagacggggtttcaccttgttagccaggatggtctcgatctcctgacctcatgatccacccgcctcgrcctcccaaaatgctgggattacaggcgtgagccaccgcgcccggccgggtgtggttttaactgagtctcctaggtcttaatgagggctcctttggatatt

SEQ ID NO: 11156 - DNA, 201 bp, Homo sapiens
aatctccccaaaatattcaggggaatcaagtgaacacaactaaaagtaataaatatgtttttatttttatgttaaagtataacaaagcattcaggtagatrcattttcaccaagtgacaacatcttatgtaactagcacccaagtcaaacaacaaaacagttccagtactctagaaggctcccttgagccccctctggtca

SEQ ID NO: 11157 - DNA, 201 bp, Homo sapiens
gagatgaggaacttgttgggaacaggagcaaaggtgactcttgttacgttttagcagagagactggtggcgttttgccctgccttagagatttgtggaacyttgaacttgagagagatgatttaggatatctggcagaaaaaatttctaagcagcaaagtattcaagagatgagttgggtgctgttaaaagcatttagttt

SEQ ID NO: 11158 - DNA, 201 bp, Homo sapiens
tcagaggtttccacttttgcttcttcctcatttatctcttgctgctgccatgtatgaagtgcctttcacctcctgccatgatactgaggcctcccagccaygtggaactgtaagtccaattaaacctcttttttcttcccagcagcgtgaaatgggtatgtctttatcaacagtgtgaaaatggactaatacagtaaattg

SEQ ID NO: 11159 - DNA, 201 bp, Homo sapiens
gtgtgaattcaaggcacactgtaagatgtatttcccttctctaaaatccatgttgaaatgtaagtacagattgatagaaataggtgttttacttaaactcrtataatctgtttcagcaccttttttaaaatgtataattgtactgatttgctgagagtcatttgaccaaagtttggctttattttgcatacaggaaaaatt

SEQ ID NO: 11160 - DNA, 201 bp, Homo sapiens
gtccacacagaaacctgcccatgaatgtttataacagctttatttataactgcccaaaatttgaagcaatcaagatgtccttcaataggtaaatggaggarctggtgcatccacacaatggaatactgtttagcaatgaaaagaaatgagctatcaaactacgaaaagacatggaagaaccttaaatgctgatgcagtttg

SEQ ID NO: 11161 - DNA, 201 bp, Homo sapiens
ttgtttgaggacacggtgagaagttggccatctacaagtcagaaagagagtcctcaccggaaacagaatcagttggcccctttattttggactttccagcytccaaaactgtgagaaacaaattactaagccaccaagtttatggtattttgttaaggcaacctgaacagattaatgcatcatgtgattcagaaatcatgc

SEQ ID NO: 11162 - DNA, 201 bp, Homo sapiens
tagtgtctttataagaagggacaggatgttgtgtaccataaatatgtacagtttttgtcagttgaaaaataagagactgaaaagaggcctgcctgcccccyggttgtttgaggacacggtgagaagttggccatctacaagtcagaaagagagtcctcaccggaaacagaatcagttggcccctttattttggactttcca

SEQ ID NO: 11163 - DNA, 201 bp, Homo sapiens
gtgcacagtgacacagccacttttgaagatggtttcacggttctttacaaaactaaacacactattactgtacgttgtggactgactgtttttgtgccccyaccaaattcatacgttgaaaccctacccttctacgactgtatttgtagatagagcctttgtggaggttaaagggtgggaccctgatctgatggaattagt

SEQ ID NO: 11164 - DNA, 201 bp, Homo sapiens
tcttcttcattctttcctcttcttttagactgctgttaaccttgaatactaagctgcattggataaatagaatgagaatattacggctattttttcagcarttaatgagttctagctggtcttaattgcttatggcatcacgaacaataagggatttttctccattaaatccaggattcaatacctatttaaagaacagaa

SEQ ID NO: 11165 - DNA, 201 bp, Homo sapiens
tctatgaggacttaacatttacttccttgtaataaatgtattgcttttgcagtgggataacaggaaatagtttgactgtcactcctgagcacatgcgtgtrctatatgggttaggtgtttgtgtgtctatgtgcccatcccacatatcccatatacaaatgtagatttttttataagccatgtgagagtaaagttctgtta

SEQ ID NO: 11166 - DNA, 201 bp, Homo sapiens
ggatgtggatccacagggactcacattcactgctggtgggagtgcacagtgacacagccacttttgaagatggtttcacggttctttacaaaactaaacayactattactgtacgttgtggactgactgtttttgtgcccctaccaaattcatacgttgaaaccctacccttctacgactgtatttgtagatagagccttt

SEQ ID NO: 11167 - DNA, 201 bp, Homo sapiens
gcggagctttcagtgagccgagattgcgccactgcggtccgcagtccggcctgggcgacagagcaagactccgtctcaaaaaaaaaaaaaaaaaaaaaaatattactgctcattgaccatgtgcctggttacagaagagctgtgatgggaatgtatgaggagattgatactattttcttgcctggcaacacaacacccatt

SEQ ID NO: 11168 - DNA, 201 bp, Homo sapiens
atttatttatttatttattttttaagacagggtctcactctgttgcccaggctggagtgcagtggcacaatcacgtctcactgaagcctcgacttcctttrgctcagatgattctcctatctcagcctccagagtagctggccctacaggcacgcaccaccacatgctgagattagaggtgttagctactgcactgggccc

SEQ ID NO: 11169 - DNA, 201 bp, Homo sapiens
aaaatttcctctgtggcaacacttttctatcacctgtgccaattttttaaaagctttaaaagtttatgttgattgtagcgagtttggagaagaatttgatkggttactgtcaactcaccacttcttttggaaaaacaacttctttggcagtggtaaatcagtgaagggtagcatgagtcttttaaaagttaaatttgacaa

SEQ ID NO: 11170 - DNA, 201 bp, Homo sapiens
cttaacatttacttccttgtaataaatgtattgcttttgcagtgggataacaggaaatagtttgactgtcactcctgagcacatgcgtgtactatatgggktaggtgtttgtgtgtctatgtgcccatcccacatatcccatatacaaatgtagatttttttataagccatgtgagagtaaagttctgttaatttatagtc

SEQ ID NO: 11171 - DNA, 201 bp, Homo sapiens
tgcaggtctctaaccaatccatccagtaagagtcaggctgaccattggtgattcttattcactgtttctccctcaattatagcagtctgtttagtgtttgktattcttgactgtattagaaaggtcttaatatattgttactggttggagcccaatcttctgcatttctaataagcagtcctggtgatcatgctccaagat

SEQ ID NO: 11172 - DNA, 201 bp, Homo sapiens
aatattactgctcattgaccatgtgcctggttacagaagagctgtgatgggaatgtatgaggagattgatactattttcttgcctggcaacacaacacccrttctacagctcatgggtcaaggagtaatttttgactttcacttactattatataagaaatatatttcataaagcaacagctgccatagatagtgattctt

SEQ ID NO: 11173 - DNA, 201 bp, Homo sapiens
agaattgctagagcccaggagtttgagttcacctggtaacacaatgagagcccgagagcctgtcattttttttaaaaaaagttatttttcgttagtcaccrttattccttttctctgctttaaaaagtatggaagatgattttgattacagtacatttcatctggtggaaacatttcaatattctattgtactatgcagta

SEQ ID NO: 11174 - DNA, 201 bp, Homo sapiens
tgtgagtgattgttcctggcctatatttattctctttaagaggctttctggttgaaaagtcagcagcccgtgaggaaaagataatggttgcaggtctctarccaatccatccagtaagagtcaggctgaccattggtgattcttattcactgtttctccctcaattatagcagtctgtttagtgtttggtattcttgactg

SEQ ID NO: 11175 - DNA, 201 bp, Homo sapiens
cagagatttgctgggctgggatgaagggaatggggaacaggtatgagtgataatcacacttgagatatttggtaaaacttttggtgggtcattcatgacasctaccctgtgccacagtaatttttatttactatttttatttaaaaatgttatttctgggagaattgctagagcccaggagtttgagttcacctggtaaca

SEQ ID NO: 11176 - DNA, 201 bp, Homo sapiens
taccagagtagctgggactacaggcacacaccaccacacctggctaatttaaaacattttttttgtagagatgaagcctcgctatgttgcccggctggtcscaaactcctgagtgcaagtgatactcccatcttggcttcccgaagtgctaggattacagatgtgagtgattgttcctggcctatatttattctctttaag

SEQ ID NO: 11177 - DNA, 201 bp, Homo sapiens
actgtaacctccgccttccgggttcaagcaattctcatgcgtcagcctaccaagtagctgggattacatgtgcacgccaccacactcggtaatttttgtayttttagtacagacaggatttcaccatgttggccagactggtctcaaactcctgacctcaggtgatccgcttgtgtcggcctcccaaagtgctgggattac

SEQ ID NO: 11178 - DNA, 201 bp, Homo sapiens
agtggcaggatctcagcacactgtaacctccgccttccgggttcaagcaattctcatgcgtcagcctaccaagtagctgggattacatgtgcacgccaccrcactcggtaatttttgtacttttagtacagacaggatttcaccatgttggccagactggtctcaaactcctgacctcaggtgatccgcttgtgtcggcct

SEQ ID NO: 11179 - DNA, 201 bp, Homo sapiens
gttttggctcagtggcaccttctctttgtccccatttagtggaagtaagcgtaactgttggcaaaatatgttttaagacgaatgtttggcaggcatttagyatttacaaatcaagtttctcataaaataatgtgttacattgaatttgcacagccatgctttcattgttttatggataggagaatctgagatagagagaag

SEQ ID NO: 11180 - DNA, 201 bp, Homo sapiens
gcctactaagttagagtggttggtgaaaggaaaggtagaaaaagattttccaacttctaacagctgacctagatgactttgtaaatgggctgttcattatycacagaatggcttctcctggcgggtaactcagctccacagagggctgcttacaaatcaccagttaggtcgggctgtaatcccagcactttgggaggccga

SEQ ID NO: 11181 - DNA, 201 bp, Homo sapiens
agatggagacacacatggagtgatggggccacaagtcaaggaatgtctgtccgtggccaccaggaaaaggcaaagaacagattctcccctagagcctttgyggggagcgcagctctgatgaaaccttgatttcagtgcagtgaaactgattgtgagctactcgcctccagaactgtggggaaatacgtttctgttatttta

SEQ ID NO: 11182 - DNA, 201 bp, Homo sapiens
aaaatgcttggacagaaaatgcctaactatgatccttttgaggataagcccttatttcattcatgcttgcattcttagtcctggtgtataataaatgtgcsatgtttgggaaaggaataagtgaatggccggcaacacatatgttgaaaataggtgatggcagtggcattgagggttggaaccatctcagaatataaacct

SEQ ID NO: 11183 - DNA, 201 bp, Homo sapiens
tgacgcccattgaaatgtgtgtaattacagctctggaagcctactaagttagagtggttggtgaaaggaaaggtagaaaaagattttccaacttctaacarctgacctagatgactttgtaaatgggctgttcattatccacagaatggcttctcctggcgggtaactcagctccacagagggctgcttacaaatcaccag

SEQ ID NO: 11184 - DNA, 201 bp, Homo sapiens
tcctggtctaatcttccttcatttgtgaaatcagtttattgagatactgtttttgccacctttgcagttattcatcatactaatcaaagtaaaacatggcrtttctaagcaaaattaacaagcattaacatttatgcccaactgttgacgtgtataggctttcctttgaaataggaggcatttcaaaaaatacacatttca

SEQ ID NO: 11185 - DNA, 201 bp, Homo sapiens
agcatagttagtttttttgttgtcttttgcttttttttaaatggttttcatagcagtgacattatgagattactatgttcttgacagttcttatgggaaawgtttgagtattatctggtggattaagcttgaatattggacccagtcctattctttaccaaccaatgaaaagcaactgttgtttagcctctgatgtttaga

SEQ ID NO: 11186 - DNA, 201 bp, Homo sapiens
tcaagtactatttctcctcctgtttcattaaccatatttatcacatggcattttatctagaaatatcttcaccaaatagagtttgaggtttactgtgaacyatgattgcgtgactgcactccagcctgggtgacagaatgtgaccctatctcttaaaaaaaaatacacaaaaaaaacagcgcattaatgttgagacaataa

SEQ ID NO: 11187 - DNA, 201 bp, Homo sapiens
caaaacaaatagggtctaagtccaagacatctaaagcttgtgtggaatccctccgacattcatcccactgggccccagagaagggaggagacaaaagtccrtatccctgttctagtcagagttggttcaattaaaggtgaaactgtctgtcaaactatttatagcatgtttatagcatggtggaaaaaacaaaagaccata

SEQ ID NO: 11188 - DNA, 201 bp, Homo sapiens
aatttacttgacttgctttattgtgatatttgctttgttgtggtgatctggaactgaatccacaatatctctgaggtatgcctgtgcagatttttaaaaarcattggtgttttatttatgtttttaagggactaaataggaatgtttaaaaactcgatttgtaatgccttacttctttaattttatatagtttataaattt

SEQ ID NO: 11189 - DNA, 201 bp, Homo sapiens
tgtgccaccatgcccagctaattttgtatttttagtagagacagggttttatcatgttggtcaggctggtctcaaactcctgacctcaggtgatccacccrctttggcctcccaaagtgctgggattacaggtcatcagtcttttaatgataccttaggataaggtagaagaggacctggtgattcttgagatggatggat

SEQ ID NO: 11190 - DNA, 201 bp, Homo sapiens
ttctatctttaacatattttaaacacctgttgaaaaggctggaaacttattttttgataaattactataggataggtaggatgctttttggagaaatatgrgttgtttatgtggcgaatgtctttaaacaatgtttttctaataacaagagtaggaagacacttgaagataaagtttctaataataagaaaaagtttataa

SEQ ID NO: 11191 - DNA, 201 bp, Homo sapiens
ctgtgttcctaagccactttttcaaagggtataaatacagtagagtagacacagtcaaaccaagagaagtgattacctaggactgatgaataatttgattsctctttaaaccacatgttccacatttatttggaaagtgagattgaacatatgtaacctccccagcaattcagctctaagcctggatttgcatccacgtct

SEQ ID NO: 11192 - DNA, 201 bp, Homo sapiens
agtggaaacatttgttgccacgtgtcttccaaagaggtgataccaatttgcattgtaggagtgtaaccttaccttatttaaaaactttcgctaatctttcagaaaatcgtgaggtggaatatcatttcatgtattactagctgcttttttctggaggtttgccagttagtatgctttaatgttggcctgtagaggatagga

SEQ ID NO: 11193 - DNA, 201 bp, Homo sapiens
aaaatacaaaattagctgggtgtggtggcgcatgactgtaatcccagctactaaggaggctgagacaggagaattgcttgaactcgggaggcggaggtcgyggtgagccgagatagtgctattgcactccatcctggacaacaaaagcgaaactccatctcaaaacaaacaaacaacaaaaaaggtgacaccacctattct

SEQ ID NO: 11194 - DNA, 201 bp, Homo sapiens
ccggcttcgagatgaatgtgcagccctgttctaggtgtgggtatggggtttatcctgccgagaagatcagctgtatagatcaggtcagtagacatttcttrgcttttgtgaataataacaaacacaggaaattgaccttctcacatatggacataggtaaatatggaaatttaattttcagttaaattgttttgaaccaca

SEQ ID NO: 11195 - DNA, 201 bp, Homo sapiens
tggccataggagttagcagcagataggaggaagacagaagagcaaagacatcaggctgtagtctagacagacaggaaatgatagaacagtacaagagtggmcaaggtgtgggcccttggggagggcagagccagctgccagaggaggctggccaaggccataggtgaggtccaggcagagatgtcagtagatagtggtgac

SEQ ID NO: 11196 - DNA, 201 bp, Homo sapiens
caaggttgaatataagaaaggctttgaagagagtaagacccggtttcacctgcccatggatatggtaaacatcaggcatgctaagaaggcccaaactctckccagtgacctggactacaggaagaaactgcatgaatacactgtgctgcctgaagatatgaagactcagtgggccaagaaggcctatgggctccagagcga

SEQ ID NO: 11197 - DNA, 201 bp, Homo sapiens
ctccattttttctcaggagcacatggaaaattatatgtatcccttaattattacagcagcgattttatttatggtttggcttgttccaagcaaaatgtgtrcaatcaattaaatttcttgtttcctgattacaagaattttactacatgtttattatagaaaatttagaaaatacggaaaagtgcaaagaaaaagataaaa

SEQ ID NO: 11198 - DNA, 201 bp, Homo sapiens
gataacggggagcctggactttctaatctgacccaactattttattttagaaaatgtgtgtgccacagtcaaagccctggtgctggagctggacaggcccmtggcttggaggaggccacagagagatggagtcgtgagcctaatgagggcaccatatgggctgtttcagatttatgcaaaaagtgcagtgaaaacacagag

SEQ ID NO: 11199 - DNA, 201 bp, Homo sapiens
tgtcctaatccctgaaaccaggagggtcagagtcagaggaaaggtgatatggtgacagaagcagaggccaaatccatgtagggcaggaactagaaatgtakgggcctctagaagctggaaaaggcagagaaacagattatgctctagaacctccagaaggaaccatctccgatggcccattttaaagtactgacctccaaa

SEQ ID NO: 11200 - DNA, 201 bp, Homo sapiens
atgtcctaatccctgaaaccaggagggtcagagtcagaggaaaggtgatatggtgacagaagcagaggccaaatccatgtagggcaggaactagaaatgtrggggcctctagaagctggaaaaggcagagaaacagattatgctctagaacctccagaaggaaccatctccgatggcccattttaaagtactgacctccaa

SEQ ID NO: 11201 - DNA, 201 bp, Homo sapiens
aagcgtcctgcttattgtggtgctgtcctggtcctgtggttacaacacttatggtattcaaatatttagcaagctggggcctcccaggctccagccaatcrgaatgacgatgcttgtaaacaactgtaatagctggagaggaaccttggtaaatgtcatttaccaagaggctttgggaaaggagagttctgctagaagaga

SEQ ID NO: 11202 - DNA, 201 bp, Homo sapiens
tgtaaacaactgtaatagctggagaggaaccttggtaaatgtcatttaccaagaggctttgggaaaggagagttctgctagaagagacagacccagtttcyaatcaagtcttccctgctgatgctgaatagggaaaaagacacaaaagattgcctgctccaagctgtgaggccaacttatgctgctctgatggtacagttg

SEQ ID NO: 11203 - DNA, 201 bp, Homo sapiens
agttctgctagaagagacagacccagtttctaatcaagtcttccctgctgatgctgaatagggaaaaagacacaaaagattgcctgctccaagctgtgagsccaacttatgctgctctgatggtacagttggatgtaattatccaatgagtcattaaatagccatagcttgaatacaaaagagggttggcatctgggtcgc

SEQ ID NO: 11204 - DNA, 201 bp, Homo sapiens
attgagaatttggcttcagtttagacagaacacattggtgtttcatatttgcagttggagcagctgggggtcaaaaagactgtgtctttcccaaagccatrtggtagtcagcagtagtggtagaggggtagcaaattagagcctagaactcttattacctggcaccacactccttctactatagcatactatcttctccca

SEQ ID NO: 11205 - DNA, 201 bp, Homo sapiens
tttcccaaagccatatggtagtcagcagtagtggtagaggggtagcaaattagagcctagaactcttattacctggcaccacactccttctactatagcayactatcttctcccatcagcactaccatcgtcaccactatcaccatcaccttcaccatcaccatggtcattgccaccacaccataattaccatcaccattg

SEQ ID NO: 11206 - DNA, 201 bp, Homo sapiens
aagaaggcccaaactctcgccagtgacctggactacaggaagaaactgcatgaatacactgtgctgcctgaagatatgaagactcagtgggccaagaaggyctatgggctccagagcgaggtgagcccacacattatcagttctcttcatgcatctcttgcagttggacatgctttcagagtgatttcaaacctgtgcacg

SEQ ID NO: 11207 - DNA, 201 bp, Homo sapiens
aaactctcgccagtgacctggactacaggaagaaactgcatgaatacactgtgctgcctgaagatatgaagactcagtgggccaagaaggcctatgggctycagagcgaggtgagcccacacattatcagttctcttcatgcatctcttgcagttggacatgctttcagagtgatttcaaacctgtgcacgagtctattac

SEQ ID NO: 11208 - DNA, 201 bp, Homo sapiens
gcctatgggctccagagcgaggtgagcccacacattatcagttctcttcatgcatctcttgcagttggacatgctttcagagtgatttcaaacctgtgcaygagtctattacataacttggaagactaggaagaactgcaggaaatgtaccagggggccagaaagggcagatggggaggtagagatatagttgacacaatg

SEQ ID NO: 11209 - DNA, 201 bp, Homo sapiens
atctcttgcagttggacatgctttcagagtgatttcaaacctgtgcacgagtctattacataacttggaagactaggaagaactgcaggaaatgtaccagrgggccagaaagggcagatggggaggtagagatatagttgacacaatggagactggagggctcacagctaatgctaaagtcaagatgtgttggtgatgggg

SEQ ID NO: 11210 - DNA, 201 bp, Homo sapiens
tcaaacctgtgcacgagtctattacataacttggaagactaggaagaactgcaggaaatgtaccagggggccagaaagggcagatggggaggtagagatakagttgacacaatggagactggagggctcacagctaatgctaaagtcaagatgtgttggtgatggggatgagccaaggagaagaaaatgtttaaaatggta

SEQ ID NO: 11211 - DNA, 201 bp, Homo sapiens
tgtgctgggcaccagtaagtgggcctgactccagggtctgccatcttaaaaggaatgtttaaactaccacatggacatcagtgaaatacccaaggtggatraacctctgtgagaataggctctatgagtgaccattgctgaaccccacccatctggggagggaagcattactcactgaagtttttgatgcacccggcaggg

SEQ ID NO: 11212 - DNA, 201 bp, Homo sapiens
tctggacgtgggtattggttctgttgctaacttgctacgtgacattgttaaatcacttgtcccctctgggctacaccttcctcctctgtaaaaatgaggtrccggactggttgaccccttagttcccttctgggctgggcattctataattttcaccagtggacatgggccactggtctggatttgaccctgggctggatt

SEQ ID NO: 11213 - DNA, 201 bp, Homo sapiens
tgttgaaatttgaatcctgactctatcccttagtgctatgtgaccatggacaaattacttaatttctctcttccttggcttctcgtttgtaaagtgaggawtagtcctgccaaatatgattgttatggagattaagcaagttaatatttgttggagtgtggcagtccctggcacactcctggacttagcacattggcatag

SEQ ID NO: 11214 - DNA, 201 bp, Homo sapiens
aaatacaaaattagctgggtgtggtggcgcatgactgtaatcccagctactaaggaggctgagacaggagaattgcttgaactcgggaggcggaggtcgcrgtgagccgagatagtgctattgcactccatcctggacaacaaaagcgaaactccatctcaaaacaaacaaacaacaaaaaaggtgacaccacctattcta

SEQ ID NO: 11215 - DNA, 201 bp, Homo sapiens
ttttcctgtaacataagtggttctcagaaagttcaattatttagaatcttaggtcattttctagcctgaaataaatgaacatttcagttagctgagacccrggatttaccaataggagtttataatgtttaagaatatcttcttttgacaatgtatgtaagtgttgctgggagtctggggcatgtgtttgtatcccttcat

SEQ ID NO: 11216 - DNA, 201 bp, Homo sapiens
tataataaaaagctctggttaaaagtgtgacaccggccaggtgtggtggctcacgcctgtgatcccagcactttgggaggccgaggcaggcagatcacctsaggttgggagttcgagatcagcctgactaacatggagaaaccccgtctctactaaaaatacaaaattagctgggtgtggtggcgcatgactgtaatccca

SEQ ID NO: 11217 - DNA, 201 bp, Homo sapiens
agcctaattcttttaggactttgttttcatctcttggtgtctgagagcagctacatgaaattacaataaatattgaatctagctcttacttaaacagagtrctgaacactctgctaagttctttatattatctcatgtgttattgacaagaaccttctgtaatattattgtgttatagttgaggaaactgaagctcagaga

SEQ ID NO: 11218 - DNA, 201 bp, Homo sapiens
aaggcccttggtcaacaaatatgagaaacactctttttgctaaggttgcggtgtctcagcagtaaggtagagcatgctactcttgttacaaggtgggcccrgtggctgtacctcccaagtggagatctgcctgaccataaaggagcagggagcagttcttctaggaaggcaaatgcaggatcaagatcttcttaactctcc

SEQ ID NO: 11219 - DNA, 201 bp, Homo sapiens
gaaggcaaatgcaggatcaagatcttcttaactctcccatcaactttgtcctgtctctatccatgcgcccaatgagagctttgtggtttttcttttgtagytgcagtacaaggctgacctggcatggatgaagggagttgggtggctgacagaggggagtctcaacttggaacaagccaagaaggctggacagctggtcag

SEQ ID NO: 11220 - DNA, 201 bp, Homo sapiens
gctggtcagcgaggtaacctgcactggggcctctggcctccagtagtcctcagcccctgacacatgcagggtgatctttgcctctaattccctttctctaycctcagatttattttggctgtgattcaaagtgggagtacttcatttcacacctgtagcacattctcagctaactttccacacccttaaacttactgagat

SEQ ID NO: 11221 - DNA, 201 bp, Homo sapiens
ccttctgtgctctgtacggagtagtttcttggctgctcagcaagtacttgtgatttgaccaatgcatagtctgggttaactaggaatttccaacaatggcrgggtaatgtgactcccttcagttatgtggtgaaggagttttcccattcaacacagtggaactagggaggaaaattagaagactgtttggaatgttttctc

SEQ ID NO: 11222 - DNA, 201 bp, Homo sapiens
aggaatttccaacaatggcggggtaatgtgactcccttcagttatgtggtgaaggagttttcccattcaacacagtggaactagggaggaaaattagaagwctgtttggaatgttttctctagaacttttttcccctaaaggcagaaaatttggagtttccagtgttccaatcactgtgttgggttcagttggttgctata

SEQ ID NO: 11223 - DNA, 201 bp, Homo sapiens
gtgatacgttgactatttaaatgggttatatttaatcatttatgccttggatttaatgcattaagatgagtagtttatcttcaactacttgtgaagggaaygctttggttgaaaactttgcgtttccatgtagaataaatataaagaaaactaccagaaccacatgagaggccgctatgaaggagttggtatggacagacg

SEQ ID NO: 11224 - DNA, 201 bp, Homo sapiens
gtttgatagcaccttcagcagctgttgagaggactcagtctagcatggcatttcactgttgtgatttagcatgactcgccagggcatgaggaggagggagygagagagaagccagcaggcagataactataaatatctgtagtgccttaaatgccaaccaattcattcttctttttaacaagtaactagacttgttaaaag

SEQ ID NO: 11225 - DNA, 201 bp, Homo sapiens
aagtaactagacttgttaaaaggattataccatgtaatcaacaggattaggtgtcttgaaaaaagattaacacttacaacatatatatatatatatatatrtagagagagagagagagagagagagagagagagagaaactaaaataaagttacaaacacaaaactatagagcagaatggacaaagccatagagcagatta

SEQ ID NO: 11226 - DNA, 201 bp, Homo sapiens
agtaactagacttgttaaaaggattataccatgtaatcaacaggattaggtgtcttgaaaaaagattaacacttacaacatatatatatatatatatatakagagagagagagagagagagagagagagagagagaaactaaaataaagttacaaacacaaaactatagagcagaatggacaaagccatagagcagattac

SEQ ID NO: 11227 - DNA, 201 bp, Homo sapiens
gtaactagacttgttaaaaggattataccatgtaatcaacaggattaggtgtcttgaaaaaagattaacacttacaacatatatatatatatatatatatagagagagagagagagagagagagagagagagagaaactaaaataaagttacaaacacaaaactatagagcagaatggacaaagccatagagcagattacc

SEQ ID NO: 11228 - DNA, 201 bp, Homo sapiens
ttcagtttcttaataacagaatgtatttggacaggatccaagcagggccacattgatgctgaatactgccctttactgaattcctttattgtggggagccrtagtattttgtggcctctctcttcaagagagtaaatacctgtaaaatgttccatatcacagaagcagctgaatctttttatactcttgattgttaggtac

SEQ ID NO: 11229 - DNA, 201 bp, Homo sapiens
taactagacttgttaaaaggattataccatgtaatcaacaggattaggtgtcttgaaaaaagattaacacttacaacatatatatatatatatatatatagagagagagagagagagagagagagagagagagaaactaaaataaagttacaaacacaaaactatagagcagaatggacaaagccatagagcagattacca

SEQ ID NO: 11230 - DNA, 201 bp, Homo sapiens
actagacttgttaaaaggattataccatgtaatcaacaggattaggtgtcttgaaaaaagattaacacttacaacatatatatatatatatatatatagakagagagagagagagagagagagagagagagaaactaaaataaagttacaaacacaaaactatagagcagaatggacaaagccatagagcagattaccaaa

SEQ ID NO: 11231 - DNA, 201 bp, Homo sapiens
aaaagaatccttttctaagtgtgtatcctacagtattttactagtataacctaattttgagatgttttctttgcaccaggtagaaatactttaatgttaaktgacatgaggttattcttaaattgaaacaaatattaacctgaaggcacctaggatataaagatggaggaagcagaataataattgtgttcacaaattcac

SEQ ID NO: 11232 - DNA, 201 bp, Homo sapiens
gggctggtcatgggcaggcacacaatgccctgtgctcagaagcccctgagctggtttcatgttctgccatcaccaccttgaaatatgtgatatttttgaamaaggggccccacattttcatctgcactaggccctgcacattatgtagctggtcctgcagaagagtccagctcatttgaaagaatgatctggggacattct

SEQ ID NO: 11233 - DNA, 201 bp, Homo sapiens
tagacttgttaaaaggattataccatgtaatcaacaggattaggtgtcttgaaaaaagattaacacttacaacatatatatatatatatatatatagagakagagagagagagagagagagagagagagaaactaaaataaagttacaaacacaaaactatagagcagaatggacaaagccatagagcagattaccaaaga

SEQ ID NO: 11234 - DNA, 201 bp, Homo sapiens
tatatttataaaatgtatacctccccagggcacacggtgaaatacagggttactgaggaagaaaattacatttcccattcagtaatagcaactaaatcaasttcactggaacaggctgtctcagggctgtgtggttctgttcaagctgcaggaacaactagaacattcctcccaaggaaatgcttggaccacagaaagaat

SEQ ID NO: 11235 - DNA, 201 bp, Homo sapiens
gattaaggttgattatggaggggcaggaggcagagcatgcttcttatttttcccacctggggagtctgtactaatctgaaccccctggtggggtatttttwtggccacagacagtgtaaatagcaacagcttgcagaggttgataccatcccaaaggaaaggtgtgaaaagagaaatcttggaggggttttcaggttggct

SEQ ID NO: 11236 - DNA, 201 bp, Homo sapiens
ttgggcaaattctttgtttccaggtgtcccattggtaaaatgataccaatattagtcccgtccttactgggttgtcatgaggtttcagtgagtctctatayatcaagcactcagaggcaagtgcacagtggtagctgttagtcatgaaagcatccatagttccaacttccccttctctgtatcttctggggaaagtgtttt

SEQ ID NO: 11237 - DNA, 201 bp, Homo sapiens
ctgacgtacatgaagtgttgtacagcctaatgcaatctgttaggagttggatgtgagagaagaagcttgagcaaggatgtatgtcaaactctgcttccttyatcgagaaagtcttgcttcaaaaaaagatcaggtgaaccaaaaacaactggcttggtgatgtggttggtttacattctgacataagctctttatcttgtt

SEQ ID NO: 11238 - DNA, 201 bp, Homo sapiens
tgtgtgcacttgtgtgtgtatgtgtgtgttgtgtgtgtgctagtgcaagtgtttccctaagccattcagtgcaacaatttatgctatgggacacctgtttytggatccctaagtggcaacactttactttgctagtggtttaacttttattcaaactagaccgattttaggttctgtactaacacacagaagaaatcatag

SEQ ID NO: 11239 - DNA, 201 bp, Homo sapiens
ttacagatgtgcaccaccatgctcagctaatttttgtattttttagtagagacagggtttcgccatgttggcctggatggtctcgaactcctgaccttagkggatcccaccgccttggcctcctaaagtgctgggattacaggcatgagccactatgcctggcatgtctgtttttttaaagctgcagtttgtgatatgcca

SEQ ID NO: 11240 - DNA, 201 bp, Homo sapiens
gtcattaaatgtggagcaggcgaagaaggcaggagaactcattagcgaggtgagatttcctgacagcctgtaacaggcctggctgcattaggcgtgcggcrtctctgtataaaattaaaataatttccactcaaaaggcaaagaaaaaggcaaagccacatgaaaggcctcaaaacccagactagggctggtaattagagg

SEQ ID NO: 11241 - DNA, 201 bp, Homo sapiens
atttttctttgtcgtggggttatcctgtgccccgcaggatgtttagcaggacgtcctacaaggatgtcagtagtgccctctgtgacaaccaaaaatggatygagacattgccgaaagccccccaggaagcagaattgtccctggtggagaggcacaggacaaggctcccaggaggctggacaccatcagaccactcacacc

SEQ ID NO: 11242 - DNA, 201 bp, Homo sapiens
tatggaaatttaattttcagttaaattgttttgaaccacaagaaaaagttatattttctcacctttatttagttctacacatttctatttcttctgtgttrtctcaaaaaaaaaaagttatccatttatttaaccgtgagtgttgttatagctgtgtgtgtggattttaatttttttaaaatcagcattttatcctcgaag

SEQ ID NO: 11243 - DNA, 201 bp, Homo sapiens
taccgagaaatgcaatggcctcccaggttaggtgattttaataccccaaatttcctatttatgacctcttgtcatcctgttttggtcttctctttatttgrtaagtggcatttgacacataacataattatttcacatagtcacactagtgaccaacttttacatcacagaatttggcaaagctcaggttttgtccttcat

SEQ ID NO: 11244 - DNA, 201 bp, Homo sapiens
agttggtatggacagacgcactctgcatgctatgaaagttggcagcctggcaagcaacgtgagtccttttatgccagggtctgttgggatggagtggggcrgggcatgaagaattcagccaattctttttaaattccccttaaaaaaaatctgtcttctattttaaagactgtgtaaagactgacccaaaagagtttctaa

SEQ ID NO: 11245 - DNA, 201 bp, Homo sapiens
tagtattttgtggcctctctcttcaagagagtaaatacctgtaaaatgttccatatcacagaagcagctgaatctttttatactcttgattgttaggtacytaccaagaagaaaggcttgttttccaacaatatgattggcatgttaggtactgagaaggtggagtgaagctgcaccctgaaagatgcatgatgttggact

SEQ ID NO: 11246 - DNA, 201 bp, Homo sapiens
tggcctggggcagcgtagggcctcccagagtccggccattcttccctccctggcctggccattgtgtcctggggctccgtgcagatcaacagctgctaccrttcaccccagaggtggctgccttgcagggattggcgagaggcgccttctagttagcgtgtgtattagtttgttgcgtttgtaaagccctgtgggatccca

SEQ ID NO: 11247 - DNA, 201 bp, Homo sapiens
ggaatctaaagactcccagtggcaaggcaaaaacctcaacagaataaaaaactcagggaggaagtgatcacaaccaagcaaatagtacacagggagaagtygcccagagaaaggggcctgcacactcgggagacccccgatctgggccatgctttctagttgaccctgagttacagagactcagaagctggggtgcattgg

SEQ ID NO: 11248 - DNA, 201 bp, Homo sapiens
aacagaataaaaaactcagggaggaagtgatcacaaccaagcaaatagtacacagggagaagtcgcccagagaaaggggcctgcacactcgggagaccccygatctgggccatgctttctagttgaccctgagttacagagactcagaagctggggtgcattggacaccaaagtggggtgacattggacttcgatgttgca

SEQ ID NO: 11249 - DNA, 201 bp, Homo sapiens
ccccaatcccccgtagaacagagtgccagccttgacctccatttccaggagacaaaaggacggttcttaagggccccctgacctgctgtagctcgtggaaygagtgagcaaccgacacggtctggggctgtcactttgtcatctgttggtgatgcgcctctcctgctgtctcccttctctgtggctgaataaagaacagcc

SEQ ID NO: 11250 - DNA, 201 bp, Homo sapiens
tgcctcatagtgatggtgcaaggcatggcatcaaagccaggctgaggcccctccggatgtcagtggagctaacaaacacatgagtgccaaggcccaaggarcagcactttcagcatgtaggaagaaactggattctggaagcttgaattctggcacctagaagctgcaaacccgaagcactgaaagtgaatgcaaagacag

SEQ ID NO: 11251 - DNA, 201 bp, Homo sapiens
tgttttttttttcagataaaatacaggcaggacttcaataagatgaaaggcgctgcacattatcactcgcttccagctcaagacaacttggttctcaaacrggctcagagcgtaaacaaactcgtgagtgaggtgcgtatgggggaagagtcacacccatgagcatcacctcttttatctcctatagtcagtgaatgaggt

SEQ ID NO: 11252 - DNA, 201 bp, Homo sapiens
gcagagtggcctatgtgagaatgggcacatttatcttcctgttggagtattaattacaatagtgacaataccagtagccaccactcagtgggccagagctkatgccagacatgaagctcagtccttatctggttgaatcctcgcaacctcctatggggtgtagatcattctccaattttatcagatggggaaactgaggct

SEQ ID NO: 11253 - DNA, 201 bp, Homo sapiens
agtaattcccctcccagagcatggaaacatcaactccagccccgttttgtgttttttttttcagataaaatacaggcaggacttcaataagatgaaaggcrctgcacattatcactcgcttccagctcaagacaacttggttctcaaacaggctcagagcgtaaacaaactcgtgagtgaggtgcgtatgggggaagagtc

SEQ ID NO: 11254 - DNA, 201 bp, Homo sapiens
tgccagaaagaataacaataataaccaccacttctcgagtgtctcctgtgggccaggctctgtgtcaaatgctttccaagcctcctgccattggcacttaygccaaccccagggctgcttcattttacagatgaggaacttgaggctcagagaggttcagtgacttactcaagatcccataacaaataagtggcagacctg

SEQ ID NO: 11255 - DNA, 201 bp, Homo sapiens
aattttaataacaaaaaaggacaaagtagtttatagatttaatgaagagaaaaggccatgtgaatttttttttctttcagaaaattgtattaagtaaatgwtgacattaagcccaggataactttggagtaattcccctcccagagcatggaaacatcaactccagccccgttttgtgttttttttttcagataaaataca

SEQ ID NO: 11256 - DNA, 201 bp, Homo sapiens
ctctgtgattcatcagttaggtgattatcccaggaacgaacggttctgcatttccagggcctagaacacagtagacgtttggctcagggtttacggcatcrggtgttggagtcagaggcgaggatggaggtgaaggtggtgtgatctgcagtacagagaaatgatgagatccgccatgcttggcccaagcactttgtggtc

SEQ ID NO: 11257 - DNA, 201 bp, Homo sapiens
ccaaagtgctgggctacaggcgtgagccactgcactcggcctgggccaccttcttaattccagagagaatgcccggcactgttgaaagagccacaaatgcrcacgcacacctacgatccaaagcagaggtcagaaagccttttctgtgaaggaccagatagtaaatagttttggctttgtaggtcatattgcctctgtcac

SEQ ID NO: 11258 - DNA, 201 bp, Homo sapiens
aactttcaagccatttcccatactcctttatgatgcaaaaccaagatttgacccttttccctctgtgggaaaggttggctggggtgcagggttgcagggtyggctggagactaaagtgaacgatgaggtgctgaaaaaaaacactttgtgatgtagattaaccctgtttggctgattctgctaagagatacccatggatct

SEQ ID NO: 11259 - DNA, 201 bp, Homo sapiens
ttctcagggccccttcttctcttaggacctcagggtggtgacctccaggctcctgttggctcagtgaaatctctggaagtgagaaatcctaaacccaagtmttattttgaaacccagtctgagagttcctgcacatcccttaagcacagttacacaaatctaatcataaccacaatttattattttttgctgcactctaag

SEQ ID NO: 11260 - DNA, 201 bp, Homo sapiens
cagatctgggtgtctgtcgtctgtttggattttacgcctgtgtacagcgtttactgaatgacataaactgtcaggaacctgagagcagctgtaggaacgasggagctgccacgctcatctcgggggcccgtttgtcacttgagcggagccctcacttgccctgcctctggttgtgatagcgattggaaggcaggacgccca

SEQ ID NO: 11261 - DNA, 201 bp, Homo sapiens
gattacaggcatgaaccaccacgcctggccctaagttttgtatttttagtagagacgaggtttcaccatgttggccaggctggtctcgaactcctgacctsgtgatccactggcctcatccactcaaagtgctgagattataggcatcagccaccacgcctggctcatagacccatttctaatcataagaatggatgtttt

SEQ ID NO: 11262 - DNA, 201 bp, Homo sapiens
agaaaagcaaaaaggggccgggtgtggtggctcacacttgtaattccagcactttgggaggccagggtaaatgaattgcttgagttcagaagttcgagacyagcctgggcaacatgatgaaaccctgtctctacaaaaaattagctgggtgtggtggtgcacacctgtagtcccagctacttgggaggctgaggtgggagg

SEQ ID NO: 11263 - DNA, 201 bp, Homo sapiens
actcccatttcacgtgtttctattatgcaaaaaaggaaacaagtgctaaataggcattacgtcaagggagcagccccagccttcagctgcttctcctgacyttgccctccccaggccagagagaaagctctgggtagggccagaggggacccagagatgctgaggttctcgtggctatggttcattcccatgtcttgccca

SEQ ID NO: 11264 - DNA, 201 bp, Homo sapiens
caggcaagctgcatcatgggcaggtgctgattccatcatctcttccgtgcttctcaagtcggctgttgcctgctccctccgtggtctcagaccaggctgcygggagtccggaaaggcacatgcaggaaatgtcacggagacagtcccagcctctctgcatacagctgtgtgacctaaggtagactccttaagctctcggga

SEQ ID NO: 11265 - DNA, 201 bp, Homo sapiens
tggagacttttaattatgtcccacagagtaaagtaattgtgctcagtaacatacttaatgcagaattatcaggaagaaatatgccatttaaaaatatagtwtttgtgacattttatcatgcataattctgaattctaatagactctattatgagataataattttgcctcctgaattaatacattaggaagtcactgtact

SEQ ID NO: 11266 - DNA, 201 bp, Homo sapiens
aggggtgtgttttgtttggcttgcccaccgtttaagacgtttttattgtgaggactgtttggcaaggaaatatcccctgtagaacctcatatccttctcaygccctagtgtgttcttcacggcattttccctcatttgcatttcttatctggactctgaaggcatttgacttggcagcctctggcaacgggaacaattatg

SEQ ID NO: 11267 - DNA, 201 bp, Homo sapiens
agaaaattgtattaagtaaatgatgacattaagcccaggataactttggagtaattcccctcccagagcatggaaacatcaactccagccccgttttgtgttttttttttcagataaaatacaggcaggacttcaataagatgaaaggcgctgcacattatcactcgcttccagctcaagacaacttggttctcaaacagg

SEQ ID NO: 11268 - DNA, 201 bp, Homo sapiens
cctgttctagaagttcacttgtaagtcatttgtttgtttctagaatgcatttccctgtctaaacaatgctaactctggctaaggggaaccccttgcccatytgtaatataacaaataatcgctctaagcacactagctttggcaaaccaggtttatagagtataggtatagagccaccttgcgaggcagattcctgggatt

SEQ ID NO: 11269 - DNA, 201 bp, Homo sapiens
tcctcctctgtaaaaatgaggtgccggactggttgaccccttagttcccttctgggctgggcattctataattttcaccagtggacatgggccactggtckggatttgaccctgggctggatttggcctccaggggtctttcatttcgtctgcagagtggattaattgcaaatttttaaaaatggaaaattttatataaaa

SEQ ID NO: 11270 - DNA, 201 bp, Homo sapiens
tctaaaatggagaatccctcccatgaaattgtagttggcaatcttatgctgacattttaaaggcaggatatgtattacatttttaaatgctaagaagtgaytgcttaaattttaaatgaccatattatgctgtacgcattccttttaagctgcaaattggttaatgagagagtctggattcgaagaagctgtgaacaggag

SEQ ID NO: 11271 - DNA, 201 bp, Homo sapiens
gcgctacaagtcagacctgatcggcatgaagggcataggatggctggcgctgagatccccacagatggagagtgcaaagaaggctggagaactcatcagcraggtaccatcaacctgtccccaccacaagtgacaagggcaagctagcatttccttttgaagagggaatctgtttatggagtggagaacccaaaggacctc

SEQ ID NO: 11272 - DNA, 201 bp, Homo sapiens
attttcctgaattaaagcaaatctataaccatgtgagacaggatgtcacctgcagaatatattagttatgaatgagattctttgaggggggaaaagaaagrctctattaatcagaagctaaattcaggcaaaggtctctagcaggaaggagatgatgatttatttctaattgcaacgtctaggcgacggtccccttgtaat

SEQ ID NO: 11273 - DNA, 201 bp, Homo sapiens
gagtcccagatccacccaggagacatgtcttaggggaagaatatttgagacgggggaacggaggaggattgagatagggaggagaaaacctcacctgtacragagccatcttctttctcgccttctgtatcttgatgccatctcatagctgatagttaatcaccaaattattactaggtgttaagtaaacctcgttttctc

SEQ ID NO: 11274 - DNA, 201 bp, Homo sapiens
atttcttggtaaaaataaagaagtcttagaattctaagctttctgatttcctggggaatcttgctcacccctgggagggtgacaggactttaattcatggyagatgcagggacaagaggggataatggaaggtactggaagtaataggtgttcagcagtcagcctgagtgctcagataagcttatgttttgcctgctaggg

SEQ ID NO: 11275 - DNA, 201 bp, Homo sapiens
ttatcattccagcctcattgattctacttcttcttagtggctctcttacaggttcaaaataggtgagcttggcagagaattacattttgaaccacctttasgttttaagattctccttctgactctaacttatagaagtcagctgagatttggttatttaccctattagttcctacttgcttcaactgaaaagcaagaaat

SEQ ID NO: 11276 - DNA, 201 bp, Homo sapiens
tgcgatctcggctcatggcaacctctgcctcccgggttcaagcaattctcctgcctcagcctcccgagtagctgggattacaggcatgcgccaccacgctmcctaattttgtatttttagtagagatggtgtttctccctgttggtcaggctggtctcaaactcctgacctcaggtgatccgcctgcctcggcctcccaaa

SEQ ID NO: 11277 - DNA, 201 bp, Homo sapiens
aatcattaactaaaaagcacaaaatgattttttttttttttgagacggagtttcactcttgttgctcaagctggagtgtaatggtgcgatctcggctcatrgcaacctctgcctcccgggttcaagcaattctcctgcctcagcctcccgagtagctgggattacaggcatgcgccaccacgctccctaattttgtatttt

SEQ ID NO: 11278 - DNA, 201 bp, Homo sapiens
gccagcgaaggttatctccaatcaatcaataatttaacaaataattcagcgtatatttacgaatgtcaagtgctactttcctttgctttcctttgggatcrgtacaactttagaaattgattgaggttttgctactggtagataagtctctgaatctgtctctctctctcttgctcagagttggggcagtaggattcagtt

SEQ ID NO: 11279 - DNA, 201 bp, Homo sapiens
cctcccagttctactttctgtcttcaggtaactcttgcacaagaatgggggtgaactgaaaaggcaggtcagctgcagccagactgtcacacaggaaggttgtgtgtgtgtgtgtgtgtgtgtgtagacacacccttcctggtagagctgtttcatgatagatggtgatatactagttttagagaagtgtccatttaaatg

SEQ ID NO: 11280 - DNA, 201 bp, Homo sapiens
gcagtggatcttggtcaggtgtgtttggagaaaaataagatgattggatgcatatgatgcatatattcttgtgtgcaaatggctaataattcttaatattygaaagggcaatttgtattttcaaaggggaaaattcctagtccttgatgtcttgaggtgggaaccaggcagtcaatgcatccagctgcactgacgattctg

SEQ ID NO: 11281 - DNA, 201 bp, Homo sapiens
tgagtaagtggcagctttaaaaaccatccaactgctgacttcaaactagaaggtcagcaaaggaaagtggaagttggattctgaaagatcgaggtgcccayaggaattttatggtcgtcggattttgaagacttgaactagactgggggttctccttgcatttcttgcctgttgcctatctttgtcctctctcttccggct

SEQ ID NO: 11282 - DNA, 201 bp, Homo sapiens
ctagaccagaggtcaacacactacaacctcagtgacaaatccagcccactgcctgctttttaaataagttttatttgaacacattcatatcacatttgttyctggattatctgtggctgctttggagctacaagggcagagttgagtataataattgacaaagaatttgtagcctgccaaacctaaaatatttactgtctg

SEQ ID NO: 11283 - DNA, 201 bp, Homo sapiens
catctcatggtaaattttcacattggaaaaatctggtaaatttaaaactaaaaatgtaaaaacaaacacagaaagtcaagtctgttttgtgctgtctatgytcatctgatcccatgtttccttgtcttcctgtcttactccaacttcttgtgatgggttgaaatttacgttattaaaaaaaagtttgccttattttttatt

SEQ ID NO: 11284 - DNA, 201 bp, Homo sapiens
gtcagcaaaggaaagtggaagttggattctgaaagatcgaggtgcccacaggaattttatggtcgtcggattttgaagacttgaactagactgggggttckccttgcatttcttgcctgttgcctatctttgtcctctctcttccggcttcgagatgaatgtgcagccctgttctaggtgtgggtatggggtttatcctgc

SEQ ID NO: 11285 - DNA, 201 bp, Homo sapiens
cttcatatatttagaaatggaggtaatggcatgcagtgatttgtaccagcctcagcatggggctttgcatgtgacgtccgcatagtcagtgcctgccaccrtctcatggtaaattttcacattggaaaaatctggtaaatttaaaactaaaaatgtaaaaacaaacacagaaagtcaagtctgttttgtgctgtctatgtt

SEQ ID NO: 11286 - DNA, 201 bp, Homo sapiens
taaagcaaatctataaccatgtgagacaggatgtcacctgcagaatatattagttatgaatgagattctttgaggggggaaaagaaaggctctattaatcmgaagctaaattcaggcaaaggtctctagcaggaaggagatgatgatttatttctaattgcaacgtctaggcgacggtccccttgtaatgcatgactgcct

SEQ ID NO: 11287 - DNA, 201 bp, Homo sapiens
ccttcatatatttagaaatggaggtaatggcatgcagtgatttgtaccagcctcagcatggggctttgcatgtgacgtccgcatagtcagtgcctgccacyatctcatggtaaattttcacattggaaaaatctggtaaatttaaaactaaaaatgtaaaaacaaacacagaaagtcaagtctgttttgtgctgtctatgt

SEQ ID NO: 11288 - DNA, 201 bp, Homo sapiens
aaatacctgtaaaatgttccatatcacagaagcagctgaatctttttatactcttgattgttaggtacctaccaagaagaaaggcttgttttccaacaatrtgattggcatgttaggtactgagaaggtggagtgaagctgcaccctgaaagatgcatgatgttggactgtgtttcatgagaatctttgtctttatcttat

SEQ ID NO: 11289 - DNA, 201 bp, Homo sapiens
ttctctgcttaagaatgtcaatttgatctttagaaaaaaaattaaatactctgaagactcttcacctttccatctattttcttggggttagccaaggagcycttccattgcctatccatgtgaaaatgcttcttttcaacaaaaatgacaagcagcttcataattaatatgaaatataaagtaaatgtgctacagatggaa

SEQ ID NO: 11290 - DNA, 201 bp, Homo sapiens
tcaagtgatcatttccagttaaatttaggctttcagttatatatgtcgattttatttgatttgcttttttttctgtaagatgcattgcctggaaaatcackaacttaatttttaagttttacatttattgattttttaaaaataactgttattatttaaaaataattttaagaatagtccctcaatcatttggataaagta

SEQ ID NO: 11291 - DNA, 201 bp, Homo sapiens
ttgggagttagagactagcctgggcaacatagtgagaccctgtctttatttcttaaaaagttaaataaataaaagaaggaacatgttgtaatgtcctatagcagacagagtaggatgaccacaattaacaacaatgtatcatatatttcaaaatagctagaatagaaatgataaatactcgagccgataaacaccctaaat

SEQ ID NO: 11292 - DNA, 201 bp, Homo sapiens
tgacctgctcttttccatgtttggcccattctaggctgtgacacagctatgacaatttaatcaggggtggggctttggtttatctttaccttttttatgaraggtagattttccaagatagaaagtagtggacaaacaattgcacagggctcaacttgacccacttaggaaaacagattgaggcactttctttttttaaat

SEQ ID NO: 11293 - DNA, 201 bp, Homo sapiens
tgggagttagagactagcctgggcaacatagtgagaccctgtctttatttcttaaaaagttaaataaataaaagaaggaacatgttgtaatgtcctatagcagacagagtaggatgaccacaattaacaacaatgtatcatatatttcaaaatagctagaatagaaatgataaatactcgagccgataaacaccctaaatg

SEQ ID NO: 11294 - DNA, 201 bp, Homo sapiens
ttaccctcaaggtcaagtataaatcagacttgaacctgaccagaggtgttggctggacccctcctggctcctacaaagtggaaatggctcggcgggctgcrgaactggccaacgcaaggggcctgggtctccagggagcttacgtgagtagcaagctgcaaagccaccctggcttgcaaggccatggggaaagacaaactc

SEQ ID NO: 11295 - DNA, 201 bp, Homo sapiens
cacttgaatgggaagatgcaagagacagcaacatgccggctggactcacagcacattgcggcccctgtgccagggagatgctgcttatgataaatttgttycccttgttctggctttactgatgacagacaacatagtctcatactgtggctgcctttttaatcttctttacttaatggtcaaaccgctccaaaccctgct

SEQ ID NO: 11296 - DNA, 201 bp, Homo sapiens
gactgctgacctccctgaagtcctgctggccaagctgaatgccatgaatatcagtgaggtgaggctgacccaaggggcacgagttttaatgacgggagagyggggctggtcatgggcaggcacacaatgccctgtgctcagaagcccctgagctggtttcatgttctgccatcaccaccttgaaatatgtgatatttttga

SEQ ID NO: 11297 - DNA, 201 bp, Homo sapiens
tctggaaagtagtagaggtcacagtatcaactactgtgaaacacctcaattcaggaacgtgagcaagatctcaaaatttaccagtgatgtgagttgttaamgctaagcttttgtttgggcactgttggtgagcttagtctttaggtctcctaagagggacagtctatgggaatggatctatgtgtcttggagaagcatggc

SEQ ID NO: 11298 - DNA, 201 bp, Homo sapiens
accccaaatttcctatttatgacctcttgtcatcctgttttggtcttctctttatttggtaagtggcatttgacacataacataattatttcacatagtcrcactagtgaccaacttttacatcacagaatttggcaaagctcaggttttgtccttcatatatttagaaatggaggtaatggcatgcagtgatttgtacca

SEQ ID NO: 11299 - DNA, 201 bp, Homo sapiens
tatgctttacttttgcttagttgcacataatagtagaatttaaaattgcaagggactgtgtaaggcacagtgaggaatttattttgcataaatgtagtggyttaagagccaacataccttatgtcccagttattaatagcaaagtggccaattttgggcagttgtttaagctccctgagccactctgcccaactctaaaat

SEQ ID NO: 11300 - DNA, 201 bp, Homo sapiens
ttcagagtaggcctggtctttctggacttttctgggtggggaggggaccataatggccatagtcccacaggttgttagctttggcaatgagcctcctggatttttttttttttttgaggagtctttctttctgaacctatagttaaaatagaaagacacccttgttggtttttcaaacacacctgtccagcattagtattt

SEQ ID NO: 11301 - DNA, 201 bp, Homo sapiens
tctgagttaatatgacctcatttcaccctcagagtcacctggagagccagatgttatttccctatcttacagatgaacagatatgtactagaggggcattygcaaatttggagattctcagagcaggtctgaagatgtatcctcatggacatcaaagacctatactagatagtatgctttacttttgcttagttgcacata

SEQ ID NO: 11302 - DNA, 201 bp, Homo sapiens
ggagctaatcttcaggaaagacaagaagtcccggaggggggacagaattagcacattgaaaatttgccaattaatttgtggctgtgagatggggacactakgaggacaagacctcagtgatctggaaaatcagaaactgtgaaggcgaatctcacctgaccgcaggcttctgtctgtggctctgtgtctccttccttaaat

SEQ ID NO: 11303 - DNA, 201 bp, Homo sapiens
tttgccagaaccaggctgtgagctcatctctgatctccctgccatgtgaagcttttgcttccacacgccgttttcagtggccatctttcccagcagctttrgcagtttcaatggaaaagccagaggagctaatcttcaggaaagacaagaagtcccggaggggggacagaattagcacattgaaaatttgccaattaattt

SEQ ID NO: 11304 - DNA, 201 bp, Homo sapiens
taagtcagttagcagagaccttgcaaaaacacttctttaaagagaaaactttagattggattagtaccaaattggatgtatctcagttatctgagagaaawctctcttgccactacaaattagagaacataatttctaaacaacttttaccacttgcctttacataatccaaatgttgcacagcataataagatcaagaac

SEQ ID NO: 11305 - DNA, 201 bp, Homo sapiens
agtagagatgggatttcactgtgttggccaggctggtctcaaactcctgacctcaagtgatccacctgccttggcctcccaaattgctgggagtgcaggcrtgaggtactgcgcccggccaaaattgccgatttctgggcctcacttcctacctaataaattttgatatcttagtttggacctaagaccttctgatgtttt

SEQ ID NO: 11306 - DNA, 201 bp, Homo sapiens
ttttggccaaaggtcagctagctctaaagaagtgtgaaacgcagctcaaacaaggcgcctaatttcatgggtctgagatgaccaggcagatgacacgcagkttaaacttcctgcagggctttctctgaagtcacagccattagttctgcagaggcaaacctaccggggctacatcaatcccgggccagggcagcccaggct

SEQ ID NO: 11307 - DNA, 201 bp, Homo sapiens
aggctgtctcagggctgtgtggttctgttcaagctgcaggaacaactagaacattcctcccaaggaaatgcttggaccacagaaagaatgtgtgtgtgtgkgggggcacatgagtagggtggtaggggcaacccaatcctaatgctgtggggtccctttcctttggaaacagaaaaactaccggcagagggtcgatgagct

SEQ ID NO: 11308 - DNA, 201 bp, Homo sapiens
aatgaatacaagacccagactcagggaagacatggagtatacaagttagtagccagtgggccaaagtggctattagacctatttctcttgggtcactggattttttttttttttttttttttgagatgaagtcttgctctgtcacccaggctggagagcagtggcatgatcttggctcactgcatcctccacctcccacat

SEQ ID NO: 11309 - DNA, 201 bp, Homo sapiens
ctacatgaaggcacagaagattttgatgcctctatcggtgatgtgggtctacctgaggactaagaggatatgattacagactcccagagggcgtgtgagamcaacttgaaaagggaaaaaatgaaagaggaagatatgaaacacatgggtcaggtactcggtcaggtgcttgacaataaatttaattcaggtgaaggctct

SEQ ID NO: 11310 - DNA, 201 bp, Homo sapiens
tggagtgactgcctgcttactcatgcttttgtttttccaatctagaaagtctacagaaactcctgggagcagacccgggctggcagttatgacttcaggcyggatgccatccccttccagactgcccgggcatctagggagatcgccagtgatgtaagacccccatgttctctcctgcggtcactgatgagtttttctctg

SEQ ID NO: 11311 - DNA, 201 bp, Homo sapiens
ggagcagacccgggctggcagttatgacttcaggctggatgccatccccttccagactgcccgggcatctagggagatcgccagtgatgtaagacccccaygttctctcctgcggtcactgatgagtttttctctggttttcccagttctgttgaaaggcaaaccaccaggacctgtcaagattatctctctctctgcacc

SEQ ID NO: 11312 - DNA, 201 bp, Homo sapiens
gccatccccttccagactgcccgggcatctagggagatcgccagtgatgtaagacccccatgttctctcctgcggtcactgatgagtttttctctggtttycccagttctgttgaaaggcaaaccaccaggacctgtcaagattatctctctctctgcaccaaaactgaacatgtactgtattttaaatgaaagaaaaaaa

SEQ ID NO: 11313 - DNA, 201 bp, Homo sapiens
tagccaactctagggggcactgctgtgatacgtagaaacttggatacatctgataagatttgggatggaaaaaccctgtttggaaactttctctggtggcygatgccaactgcatgtgtcattattaactatcagggtatccgaagcttgggtcagagttctgggtaaatagagtcccagatccacccaggagacatgtct

SEQ ID NO: 11314 - DNA, 201 bp, Homo sapiens
gactatgagcaacccaggggcaaggggagctttccagccatgatcacacctgcttatcaaagggccaagaaagccaaccagctggccagccaagtgagtgyctgggtgctttttcaccattgattatgctaatttttgtcattaatgagcccccgtgatttagggaaaaaacagtaagagagtgctttggggaagtaggta

SEQ ID NO: 11315 - DNA, 201 bp, Homo sapiens
tgggtctgaggagtccaacttcctgttgacttttgcatttaccctgaagccagggagtagttttcctttatagttttaagtcaattttaccaatgacaatracctggcacttttatgtctgagacatacctactccctagatccaagcagaaaaagaacattccattaagacattcacttttactcttttggctcctgtgc

SEQ ID NO: 11316 - DNA, 201 bp, Homo sapiens
gttctcacttataagtgggagctgagcaatgagaacacatggacacagggaggggaacaacacacactggggcccacagaggggagttgaggggagggacrgcatcaggataaatagctaatgcatgccgggcttaatacctaggtgatgggctgatacgtacagcaaaccaccatggcacacatttacctacgtaacaaa

SEQ ID NO: 11317 - DNA, 201 bp, Homo sapiens
ggagtcaaattcaccgagtttgtcctttgccttaaaacaggtgaggtaccatcaacaatatcaaaaagaaatgaggggaatggctggtccagccattggarctgagggcatcttgacaagggaatgtgcagaccaatatggccaggtatgtgataaaatgatctcctgacctgctcttttccatgtttggcccattctagg

SEQ ID NO: 11318 - DNA, 201 bp, Homo sapiens
gtcaattgagtgtattattattattacttctagagaaaaccaagtaggtttcctttcacccagtttgtaattccagctgtctatggaagacctcaatcagsgtgtcctaatatcacctgaactctatcttccccagaccaggttcattgtcttccccttccaaccactgtatttctatcacccaggtttgaaaccaaggct

SEQ ID NO: 11319 - DNA, 201 bp, Homo sapiens
gtcatggcacgttgtagtttactagtgataaattggtcatagccatttattcccattatatgagcatgtgtacaatctatgtgtgaacacacacacacacmcccctacatgctcatcctcatcaccctagtgaactggtgatttgctgtgtggaggaaatttaagttttaagaagatcaatctgcatcatcagattctccc

SEQ ID NO: 11320 - DNA, 201 bp, Homo sapiens
gacacctcgaagtgggggctttcaggttataggtagatttaaagttttctgattggcaattgatttaaagagttattaactaaagacctgaaatcaatagaagaaatgtctggattacaataaggggttgtggagaccaaagttttatcatgcagatgaagcctccaagcagcaggtttcagagagaatagattgtaaata

SEQ ID NO: 11321 - DNA, 201 bp, Homo sapiens
tgaggctgaagtgaaggagcagccttggcctgtttgaggccgagtgagtggggatggaatcacagggtctgagcagggcctaggctctgcggagtaaggaygagggtggtgatgtgataagactgtaaccaccgccgactctcactgactgctcgcctttgcttttaaacttgcgaaagcagtctgacgtgggggcagctg

SEQ ID NO: 11322 - DNA, 201 bp, Homo sapiens
tacatgaaatatgtaatatgtcaatggttgtacatgctatggagacatatagagcagggaagtggggcaggaggtgtgagtgtgcgtgtgtgtgtgtgcgygcacgtacacatgtgccatttaaaatagggcattagggtagttctcattgaaaagttgatatttgagcaagagccttaaggaaaagacagaaggggatag

SEQ ID NO: 11323 - DNA, 201 bp, Homo sapiens
aattctaaaatagctgtacattttatactcccaaaggcagtgtgtgagaatgcctgtttcccaacattctaaccatcacttggtattgtcagataagtgtytggacaatctgcatcttgtttcaatttagatgtccctgattgctagtcaggttgagtataatttcacatatgaataatctgtctttctggatctccaaag

SEQ ID NO: 11324 - DNA, 201 bp, Homo sapiens
agatctcaaaatttaccagtgatgtgagttgttaacgctaagcttttgtttgggcactgttggtgagcttagtctttaggtctcctaagagggacagtctwtgggaatggatctatgtgtcttggagaagcatggccttttaggcataaatgcctgggttttggttaaggttgcctgctgggattggtcctcatagtgttc

SEQ ID NO: 11325 - DNA, 201 bp, Homo sapiens
gggcgggttgggggcttagagctgaagccttttacggccaaccccaccaatcccagtgctagggagtcgccaaggtggacatggagctataggctgtgccrtcctaggaaccaacaaaggttaagaaccactcctgctgagtaccagcaacatggaagacagtggagtgactgcctgcttactcatgcttttgtttttcca

SEQ ID NO: 11326 - DNA, 201 bp, Homo sapiens
atcgcttgaacccgagaggcagaggttgctgtgagctgagatcgcgccactgcactccagcctgggtgacagcacaagacttcatctcagaaaaaaaacartctttattgaccaccttctgtatactagccaccattctaagccctgagagtgcagcagttaacaaaagagtcaaaaaattcctgtgctcaggaaactcct

SEQ ID NO: 11327 - DNA, 201 bp, Homo sapiens
cccccctccagcccacctggctccccatctctttcccttgtgtccaatcaaacccagctcctcatggtcctaattactgagcccatcactgccttcatgcttttattcatggcagcctacattcctggaatttattcaacaaataattattgagtctatgagttgctacacactgttccaagcttttgggatgcgttagta

SEQ ID NO: 11328 - DNA, 201 bp, Homo sapiens
ggcagggttacccggaggagtatgaggagcacaggggaaagggcagcttcccagctatgatcactccagcatatcagaacgccaagaaagctcacgaactygctagtgacgtaagtaccatgtaggtgtgaccacagagccagaggcagagaagtgagactttgaaggctgtgcttactgaaacctacacacagatacatt

SEQ ID NO: 11329 - DNA, 201 bp, Homo sapiens
ctgagacatacctactccctagatccaagcagaaaaagaacattccattaagacattcacttttactcttttggctcctgtgcatgggagtcaaattcacygagtttgtcctttgccttaaaacaggtgaggtaccatcaacaatatcaaaaagaaatgaggggaatggctggtccagccattggagctgagggcatcttg

SEQ ID NO: 11330 - DNA, 201 bp, Homo sapiens
ataacaggatggtccagcaagtgggaagtgtctgtccctgagaaaggctcatcagaggcatccatcaagttgtaactttgaattttgctatgtcatggcaygttgtagtttactagtgataaattggtcatagccatttattcccattatatgagcatgtgtacaatctatgtgtgaacacacacacacacacccctacat

SEQ ID NO: 11331 - DNA, 201 bp, Homo sapiens
agcctgttttcactgtgaagtttgcaagatgatgctgtctgttaataactttgtgagtcaccagaaaaagccgtactgtcacgcgtaagtgtttgatgccsccaccactacctcttgagttttatttgtttttcaacaaggagccaactaaacgttcaaatcatataacccagggttaaatccaagaaatatcttctccca

SEQ ID NO: 11332 - DNA, 201 bp, Homo sapiens
agactatgagcaacccaggggcaaggggagctttccagccatgatcacacctgcttatcaaagggccaagaaagccaaccagctggccagccaagtgagtrtctgggtgctttttcaccattgattatgctaatttttgtcattaatgagcccccgtgatttagggaaaaaacagtaagagagtgctttggggaagtaggt

SEQ ID NO: 11333 - DNA, 201 bp, Homo sapiens
tgatgctccattgtctcccacttgaagatgcatgtataacttggttggactttttgtttctctttcattttactttttttaacacctcttttttggtgaartataagacgtatataggaaagtatactatgtgtggatatactgctttaattatttataaaatgacctcaggcatatattttcattgggaatgagccctag

SEQ ID NO: 11334 - DNA, 201 bp, Homo sapiens
aatgacttataccaatatggtggcttggccaagaagaaagcattcctatctgtccattgaagaacagtcgctaggactaagattggctaagcttagctggwctctatcataagcaacatagagatcaaaatgcatcttgaaaaatattgagcatttcactgagtagtggggctcattttcttagaaagtgaatttttttta

SEQ ID NO: 11335 - DNA, 201 bp, Homo sapiens
ctcttttgaacctgcatcttctacgaaagtgctaagcttagggcaatttccttggggactctggcaaggtggaagtgagggccaggcaggggctggtgtayggggtggggacatgttagggccacctacaaggagtcgctgatgctccattgtctcccacttgaagatgcatgtataacttggttggactttttgtttctc

SEQ ID NO: 11336 - DNA, 201 bp, Homo sapiens
gctaggactaagattggctaagcttagctggtctctatcataagcaacatagagatcaaaatgcatcttgaaaaatattgagcatttcactgagtagtggkgctcattttcttagaaagtgaattttttttatctaggttggtagataaatcagtatgccagagaatgcaaaccctttttccaatttcacttctcagatga

SEQ ID NO: 11337 - DNA, 201 bp, Homo sapiens
gagtgatttgtaggtagcaagatggaaagaaacatgatacaacagttcataagaggttgaagggattgaggaaagggaaatccttttctattttccactakgaagttcatttatgcatgtttgcacacccttagattttcaatgtgaactagggacaactctagttttgtcttgaaaataacctgaggttcagtttttcct

SEQ ID NO: 11338 - DNA, 201 bp, Homo sapiens
agttgcaagtgaagaacattggaagagcaagtgtgtgtattggaagaatacattccatgggtttaagtgatttttattcataattggacagttgtttgaawtatttgtcagtaagtagactctctacaacatatatgatttagaaaaccacaatgaatttgtttctcttctttagaaagacacattgccatagttaggcat

SEQ ID NO: 11339 - DNA, 201 bp, Homo sapiens
tgcttctccttctctcatcatctccttgactgtatcctgccactcagagtctgatctggtgggttttgtaatggactttctgtgcaagtcagagaagtgcmaaccagacagagacaccatgagggatgccaccctgcccacctcgcccttgccacctgctcctgactcagtgctctttcccaacaggtggcctacaaggca

SEQ ID NO: 11340 - DNA, 201 bp, Homo sapiens
tgtttggaaagctcaggacaacttttaaaaatcagcttaaaaaaaatctggcttctatatttggcaaaaagtattttgtcctgtatttggccaatcctatmtaccagtagttataagacacatgtatcatttcatatgtgtacctagacatgtctgtaggtacagatgaaatgtaacttcatagtatcatagctggttctt

SEQ ID NO: 11341 - DNA, 201 bp, Homo sapiens
ctctgcccctcattagcagggaaatgatgtttaaaccaagggcagaatgggtttggactgacaacttttgttatgattattttaagacttttttttcccaygcagaattagagtataaagtataaaaagtgtgaaaagggccaggaaaattttaataacaaaaaaggacaaagtagtttatagatttaatgaagagaaaag

SEQ ID NO: 11342 - DNA, 201 bp, Homo sapiens
ctgtgctgtgattggaccatgtctataaaatacagagaagaatgtatagttcacccaaagtctggaccacatgatttcttgagtttgctttagcactgaayacattattattttacatttttatttttattttatttatttatttttatttttattttatttttatttttattcttggctcactgcaacctctgcctcctg

SEQ ID NO: 11343 - DNA, 201 bp, Homo sapiens
accatcacttggtattgtcagataagtgtttggacaatctgcatcttgtttcaatttagatgtccctgattgctagtcaggttgagtataatttcacatakgaataatctgtctttctggatctccaaaggctggctctatccaacctgtccaacttgcccccctccagcccacctggctccccatctctttcccttgtgt

SEQ ID NO: 11344 - DNA, 201 bp, Homo sapiens
tatgtttttttctcttttctgatggaaacattactgacaacatcttccttgagcagatccatgaccaagaagatggtgaacagtgtaaatcagtttttcaytgggacatgaaatccaaggataaggaaggtgcacctaacaggcagccactggcaaatgaggtgagagaaaagtgacaagtgggtttggaaaaagaaagaa

SEQ ID NO: 11345 - DNA, 201 bp, Homo sapiens
tcagttgtcaagcacataacaggtagtaggtttttgacatttgtctgaataatgttgattaatctcagattacctgtccacagagatttcccctcctcctygcccaatcttgatgcaatggtgtgcaagaaaatgttgttacattcaaaattttcctgtaacataagtggttctcagaaagttcaattatttagaatctta

SEQ ID NO: 11346 - DNA, 201 bp, Homo sapiens
ttttattcaaatggtcaattataagccatttttaaatttattacaggtgattgaaatatttccgaagaactttatgaatctagtttcattggttttattgyggttttcttagttgtcattcaatatcatctcagttctcatgctgacattggttctgaccaacaggaatatacagaagactatgagcaacccaggggcaag

SEQ ID NO: 11347 - DNA, 201 bp, Homo sapiens
tgcttttattgccattgtcagttgtcaagcacataacaggtagtaggtttttgacatttgtctgaataatgttgattaatctcagattacctgtccacagwgatttcccctcctcctcgcccaatcttgatgcaatggtgtgcaagaaaatgttgttacattcaaaattttcctgtaacataagtggttctcagaaagttc

SEQ ID NO: 11348 - DNA, 201 bp, Homo sapiens
ccttctgactctaacttatagaagtcagctgagatttggttatttaccctattagttcctacttgcttcaactgaaaagcaagaaattgcagcttgggctwaaggatggaattcatgatcttttagagtgatagtatcacttttaaattcctatttcatcttttctgcttactttatgagctttgtgctgtgggataacag

SEQ ID NO: 11349 - DNA, 201 bp, Homo sapiens
taaacacataactgttttctaattgctatttatttcatgttagttttatctcccaaggtggtaggtcatgagtatcttaaaagagaaactttgcctttccttttttttttttttttttgcttttattgccattgtcagttgtcaagcacataacaggtagtaggtttttgacatttgtctgaataatgttgattaatctca

SEQ ID NO: 11350 - DNA, 201 bp, Homo sapiens
aaacacataactgttttctaattgctatttatttcatgttagttttatctcccaaggtggtaggtcatgagtatcttaaaagagaaactttgcctttccttttttttttttttttttgcttttattgccattgtcagttgtcaagcacataacaggtagtaggtttttgacatttgtctgaataatgttgattaatctcag

SEQ ID NO: 11351 - DNA, 201 bp, Homo sapiens
aacacataactgttttctaattgctatttatttcatgttagttttatctcccaaggtggtaggtcatgagtatcttaaaagagaaactttgcctttccttttttttttttttttttgcttttattgccattgtcagttgtcaagcacataacaggtagtaggtttttgacatttgtctgaataatgttgattaatctcaga

SEQ ID NO: 11352 - DNA, 201 bp, Homo sapiens
ctcatctgagaaatagatggggaggagaattgggaggagaaacagaggttaaattgattcacatgcagaaagggaaaggaggcttccagaagaaagatctygacatttggagataggagcaggagagagaacaggaggcgcaaggaaaagacccaggtggactagagaggctgggggaaggcgggaggaaagagaaagagg

SEQ ID NO: 11353 - DNA, 201 bp, Homo sapiens
acacataactgttttctaattgctatttatttcatgttagttttatctcccaaggtggtaggtcatgagtatcttaaaagagaaactttgcctttccttttttttttttttttttgcttttattgccattgtcagttgtcaagcacataacaggtagtaggtttttgacatttgtctgaataatgttgattaatctcagat

SEQ ID NO: 11354 - DNA, 201 bp, Homo sapiens
atgctacctgcctggcccctgtaggcgtctgagtttgcaatgaccctgtcattgttggttgtgaccctctggaggctggcaaatgtgtgtaggtgctgtcyccttgcacatatgtgagttggctaacattggtgatgaaatctgtatccagcatgttacagaggctaaacgcttttatatacagtgtctcagttaactgtc

SEQ ID NO: 11355 - DNA, 201 bp, Homo sapiens
aagagctatgggtccctaaagttctctttctgcccatataaaaaccctacagatttattttaaatccaacaggtgaattaccgtgctgactatgagaaaawtaagttgaattacacattgccccaggatgttcctcagctggtgaaggccaaaaccaatgccaaactcttcagtgaggtaagagagcaatgtggggagacg

SEQ ID NO: 11356 - DNA, 201 bp, Homo sapiens
gcagagtgatgtaagtggggggagaggcatcagcggctgcagggcccccacctgacaacgctcactgcatggcaacctaacctcatttgtccttctggacrtgggtattggttctgttgctaacttgctacgtgacattgttaaatcacttgtcccctctgggctacaccttcctcctctgtaaaaatgaggtgccggact

SEQ ID NO: 11357 - DNA, 201 bp, Homo sapiens
ttggatgcatatgatgcatatattcttgtgtgcaaatggctaataattcttaatattcgaaagggcaatttgtattttcaaaggggaaaattcctagtccytgatgtcttgaggtgggaaccaggcagtcaatgcatccagctgcactgacgattctgcctcctcctcttttgaacctgcatcttctacgaaagtgctaag

SEQ ID NO: 11358 - DNA, 201 bp, Homo sapiens
attacagactcccagagggcgtgtgagaacaacttgaaaagggaaaaaatgaaagaggaagatatgaaacacatgggtcaggtactcggtcaggtgcttgmcaataaatttaattcaggtgaaggctcttcccttcgtgcaggcaccaggggtgtatatgagatgcagcatgcctcatagtgatggtgcaaggcatggcat

SEQ ID NO: 11359 - DNA, 201 bp, Homo sapiens
cacccccaatagtgttggatggggcctaaagccactgtcccaagggatggctccaattaaagggggaattaattgacttttgggagccctacctgtgactktgcagaaatgcataagacaaaagtggcatctaatttgactcagctggcaccaaggctgtgttgggagccgctaatagccctttaaatgtctgtgcaccaa

SEQ ID NO: 11360 - DNA, 201 bp, Homo sapiens
cactgggtcaatttgggatcctgggagtgaggacccatctgagatatctatgtgggcagggaatgtctgagtttgctcactctgcagagtaggaaccccasgacagtttgttcaagaaataaatggatgggcaagtggatgaatgaaaggaaccaggtgagcataagggaaggagagcagggttagagatgagtttacttc

SEQ ID NO: 11361 - DNA, 201 bp, Homo sapiens
ccttgcccatttgtaatataacaaataatcgctctaagcacactagctttggcaaaccaggtttatagagtataggtatagagccaccttgcgaggcagaytcctgggatttgaatcatagctctgatacttactgcctggatgacctggagcaagccactttcggtctctgtgcctcagtttccacattgtaaggtaggg

SEQ ID NO: 11362 - DNA, 201 bp, Homo sapiens
aaatgttgcacagcataataagatcaagaacttagtgttgttctgaatgggacattgaagcacaaatccagcttctgcgtcatacatggtttcctcttgcyttagccttaatctggggttgagaagactcttgtgtctcccaaaaatggctgacaactccttgagggctgaggacttattactctgcccaggcccagtgcc

SEQ ID NO: 11363 - DNA, 201 bp, Homo sapiens
ttcccttgtatcctgtcattaaagagacctaaggtgggattttatgcaatggacacaaaacttcaaatttcttccaagtaaaagatcaaatatatccactrtaacctcatgtcaaattattaaatactgtgcagaacaatgtaatggccataaatatgcatatagagctttgaagtattttcttttaaataatttcagaat

SEQ ID NO: 11364 - DNA, 201 bp, Homo sapiens
gggcagcaagaactctgctcccctttgtgtatagccacctggtaaaccaagcccaccagccatggcatagtgtctgtatcaactgaggttacatacatctkgttgttgtaaaaacagctcacccagcagatctggctcctgatcagtgttttagggggagaggaggacagctttcataggaatgagctagtggaggacttg

SEQ ID NO: 11365 - DNA, 201 bp, Homo sapiens
agcacttgttcatgttttcaaatatccatatgtttctgcagttgtgtagcgaggatttgacacataaaacatgaggagatgtactttacctcagaatgctstttgcatttattacagtgtctacagaaagatccataatgtctgtatttttcctctaactgagccacagcaggcatgtctccaccttataatcacacaaca

SEQ ID NO: 11366 - DNA, 201 bp, Homo sapiens
aaatattatataccgattaacaatgctaggcacatgttaagtttttaagtgtctctgtctgcatgtgaacctgcccatttcctccacatacacatgtaaartgcatttgagtaacaaatatgactgtttgttctcccacaatattaggagccaatatacaggataatctagattgaataattgaggtccttgatttcagta

SEQ ID NO: 11367 - DNA, 201 bp, Homo sapiens
aattttagctaggaattgtttgtctatgtttttttctcttttctgatggaaacattactgacaacatcttccttgagcagatccatgaccaagaagatggwgaacagtgtaaatcagtttttcattgggacatgaaatccaaggataaggaaggtgcacctaacaggcagccactggcaaatgaggtgagagaaaagtgac

SEQ ID NO: 11368 - DNA, 201 bp, Homo sapiens
gttaaaagcttagattttggagccagaatgttgaaatttgaatcctgactctatcccttagtgctatgtgaccatggacaaattacttaatttctctcttycttggcttctcgtttgtaaagtgaggattagtcctgccaaatatgattgttatggagattaagcaagttaatatttgttggagtgtggcagtccctggca

SEQ ID NO: 11369 - DNA, 201 bp, Homo sapiens
acagaaagtcaagtctgttttgtgctgtctatgttcatctgatcccatgtttccttgtcttcctgtcttactccaacttcttgtgatgggttgaaatttaygttattaaaaaaaagtttgccttattttttattccgtgatacgttgactatttaaatgggttatatttaatcatttatgccttggatttaatgcattaag

SEQ ID NO: 11370 - DNA, 201 bp, Homo sapiens; identical to SEQ ID NO: 1909

SEQ ID NO: 11371 - DNA, 201 bp, Homo sapiens
ggttctgtactaacacacagaagaaatcatagagttactttttccttcttggaattctggactacatatgttttccaggtttctttttattgccagggggkaggtatctttgtgtcattcctagtggtggcctgctaggggagagcatcgctgataactcaccccgactttgatagtccccatttttggaatgggtgggtt

SEQ ID NO: 11372 - DNA, 201 bp, Homo sapiens
ttggttgtgaccctctggaggctggcaaatgtgtgtaggtgctgtctccttgcacatatgtgagttggctaacattggtgatgaaatctgtatccagcatrttacagaggctaaacgcttttatatacagtgtctcagttaactgtcagactatctctaggaactccatcttgttattcttccttattttctcatagggaa

SEQ ID NO: 11373 - DNA, 201 bp, Homo sapiens
tccctgatggtcctgttgcaaatagtggctttgaaatagctgctgttgctctgtctgcccctctaggtgaattacaagaaaggctttgaacactcaaaggygcagttccatctgccgttggacatggccgccctggtgcatgccaagaaggctcagaccctggccagcaatcaggactacaaacatccactgccccagtac

SEQ ID NO: 11374 - DNA, 201 bp, Homo sapiens
gcaaccaaatcccaagacagaatgaggtttccctccaaatgaattcactgctgaggaactgaaggcatgatttattagaaagttctcaacaaatacatttygtacaatcgttatctaaactggcccattctttgtatggagaggaggaggaatttgccacccatctactgagttgactctgtgtccagaggttttctgatt

SEQ ID NO: 11375 - DNA, 201 bp, Homo sapiens
tttatgaatctagtttcattggttttattgcggttttcttagttgtcattcaatatcatctcagttctcatgctgacattggttctgaccaacaggaatayacagaagactatgagcaacccaggggcaaggggagctttccagccatgatcacacctgcttatcaaagggccaagaaagccaaccagctggccagccaag

SEQ ID NO: 11376 - DNA, 201 bp, Homo sapiens
caatgcgctgcatctgagtgacgtaagtgaactggtggttcatggaacgtgtgcccacttttgtaaaatgatctgtgcccaatgtggatttcgtttttttwaaaaaaaaagttctaggaaggaggacttggaacagaaaggacactgaactgagaaactgtttgtgtgactttcagtcactttcctcagtggtcctcgttt

SEQ ID NO: 11377 - DNA, 201 bp, Homo sapiens
tatttttggccaaaggtcagctagctctaaagaagtgtgaaacgcagctcaaacaaggcgcctaatttcatgggtctgagatgaccaggcagatgacacgyaggttaaacttcctgcagggctttctctgaagtcacagccattagttctgcagaggcaaacctaccggggctacatcaatcccgggccagggcagcccag

SEQ ID NO: 11378 - DNA, 201 bp, Homo sapiens
atgaagaggttggcctgtaatcccactactttaggaggcctaggtgggcagatcacgaggtcaggagatcgagaccatcctggctaacacggtgaaacccygtctctactaaaagcacaaaaaaatcagccaggtgtggtggcacgtgcctgtaatcccagctactcaggaggctgaggcaggagaattgcttgaacctgg

SEQ ID NO: 11379 - DNA, 201 bp, Homo sapiens
ccttgttactctcgacctagtgttatttttcaaacaatgtgctcctttttgcccctcatactcccccaaatatgtatgtactccagttatcttttaatttsagttcctttcatgagcagcaattgtactttggctattctgtatgcttctcatttcacggctacttttatttataaccctgagttttctggcagctgaggt

SEQ ID NO: 11380 - DNA, 201 bp, Homo sapiens
actgatttactttaagtagcagttacatccaaagaataatttggtttagaaaggtgtaatatacagcacctgggaaaacagcacttcttaggtgagcagcktgtgattccttttgaatcagaaagtccagtatttggaggatactgttttcattatgcctgtgccttaaattcactgcagatttcagacaagtcacttaac

SEQ ID NO: 11381 - DNA, 201 bp, Homo sapiens
gtgagtcaccagaaaaagccgtactgtcacgcgtaagtgtttgatgcccccaccactacctcttgagttttatttgtttttcaacaaggagccaactaaaygttcaaatcatataacccagggttaaatccaagaaatatcttctcccaaagtgttcccttgtatcctgtcattaaagagacctaaggtgggattttatgc

SEQ ID NO: 11382 - DNA, 201 bp, Homo sapiens
cctagagacaagccctggttattaggccagtctctgcaagaaaggagcactggccctgccaagaacttcccctgggcttacctccagacaactgcattgcmgttgccctccctgatggtcctgttgcaaatagtggctttgaaatagctgctgttgctctgtctgcccctctaggtgaattacaagaaaggctttgaacac

SEQ ID NO: 11383 - DNA, 201 bp, Homo sapiens
acaatgctaggcacatgttaagtttttaagtgtctctgtctgcatgtgaacctgcccatttcctccacatacacatgtaaagtgcatttgagtaacaaatrtgactgtttgttctcccacaatattaggagccaatatacaggataatctagattgaataattgaggtccttgatttcagtataatctttgtgtcttgacc

SEQ ID NO: 11384 - DNA, 201 bp, Homo sapiens
gagccgataaacaccctaaatgccctgacttgatcattacacattctaatatgtaacaaaatattatatgtactccataaatatgtgcaaatattatataycgattaacaatgctaggcacatgttaagtttttaagtgtctctgtctgcatgtgaacctgcccatttcctccacatacacatgtaaagtgcatttgagta

SEQ ID NO: 11385 - DNA, 201 bp, Homo sapiens
aacatgcaaatagataaaaggaatatattctagccaggcacagtggctcacacctacaattccaacactttgggaggccaaagcgggcagatggtttgagyttgggagttagagactagcctgggcaacatagtgagaccctgtctttatttcttaaaaagttaaataaataaaagaaggaacatgttgtaatgtcctata

SEQ ID NO: 11386 - DNA, 201 bp, Homo sapiens
ctgggggaggtaggcacccatgatctgcctctgctcctctgacttgcagttccggtacaaagaggctttcctgcgggaccgaggcctgcagatcgggtacygcagtgtcgacgatgacccaaggatgaagcatttcctcaacgttggcaggctccagagtgacaatgagtacaagaaggactttgccaagagtcggtccca

SEQ ID NO: 11387 - DNA, 201 bp, Homo sapiens
aagccagagtttaggaaaccaccaggtcacttaaaggtctttccttgtgcacatcttcccgacagacgcgttataaggaatcctggagcaaacttcgagayggtggctataaactgaggttggatgcccttccattccaagcagcaaaggcttctggtgaaatcataagtgatgtgagcattcacccccattcttgtgaca

SEQ ID NO: 11388 - DNA, 201 bp, Homo sapiens
gggtgtttatgtggaggtttggaaagaaaagaatgtcattatatggaacctaaacattttccagaggaaatgaaagcccagttgggaatctgggattgtctgtagtcttgctttccaagtgcaatcccagaccagctacattagcattgcctgggagcatactggcaaggcacaacctcagatctactgactccaaatggt

SEQ ID NO: 11389 - DNA, 201 bp, Homo sapiens
caggagaattgcttgaacctgggaggcagaggttgcagtgaaccgagatcgtgccactgctctccagcctgggcgacagatcgatactctgtctcagaaaraataaataaaataaaataaaaatgaagaggttggatcagatactctcccaggtccctgcagctctaagcctttgcctctctttacaccatagaaagctgg

SEQ ID NO: 11390 - DNA, 201 bp, Homo sapiens
aatccatgtagggcaggaactagaaatgtaggggcctctagaagctggaaaaggcagagaaacagattatgctctagaacctccagaaggaaccatctccratggcccattttaaagtactgacctccaaaatcataagagaccttagcaggctttcacatagggaagacagttttagcccagactgtggaaatcctcaat

SEQ ID NO: 11391 - DNA, 201 bp, Homo sapiens
aatgtatgtaagtgttgctgggagtctggggcatgtgtttgtatcccttcatgtgcttcctttgtagagagcctattggactggatatggggaagggaatkcttggtgcccaggagctctgccagaccccgaaattgtaaggatggttgaggctcgaaagtctcttggtgaggtaagcaccctagaaattgctttaggaat

SEQ ID NO: 11392 - DNA, 201 bp, Homo sapiens
atttggataaagtacatttctaattttgatttatacctatttgttgtagccataaccctaagaacaacactttcaccagtgtctatcacactccattaaayctaaatgtgaggacatttccagaggccatcagtggggtaagttatttaattttcagtgggatggagggtatggagaatgattggttactgggtagaaaca

SEQ ID NO: 11393 - DNA, 201 bp, Homo sapiens
cattaatgagcccccgtgatttagggaaaaaacagtaagagagtgctttggggaagtaggtaccattagtgtcatattacagagaaaactgtgttcttacytttccccgtcaagtattctctgtgctgtgattggaccatgtctataaaatacagagaagaatgtatagttcacccaaagtctggaccacatgatttcttg

SEQ ID NO: 11394 - DNA, 201 bp, Homo sapiens
attagtttgttgcgtttgtaaagccctgtgggatcccatgcagtgaatgcgatggtgctttgtaaatatgagttattatgaccatttgatgcttttgaggkatgtgcaggggataattttagaacagcagctctggtgggctgacctccatctggggaagcaggacctccccctcagcagagcctgcacaaaacatctatc

SEQ ID NO: 11395 - DNA, 201 bp, Homo sapiens
ctcccagttctactttctgtcttcaggtaactcttgcacaagaatgggggtgaactgaaaaggcaggtcagctgcagccagactgtcacacaggaaggttgtgtgtgtgtgtgtgtgtgtgtgtagacacacccttcctggtagagctgtttcatgatagatggtgatatactagttttagagaagtgtccatttaaatga

SEQ ID NO: 11396 - DNA, 201 bp, Homo sapiens
agctaagcaaatctttgagaaaagagcaaatgacatctttttgtgcctgtttttacctaggccaattataggcagagcatcgacaagttgaagtacagctyggtgactgacaccccacagattgttcaagccaaaatcaatgcccagcagctgagtcatgtaagtaactgtccctgcccagctggatgtaggggtcttgaa

SEQ ID NO: 11397 - DNA, 201 bp, Homo sapiens
acagtctatgggaatggatctatgtgtcttggagaagcatggccttttaggcataaatgcctgggttttggttaaggttgcctgctgggattggtcctcayagtgttcaattctgtcacatccccaatcttgaccctgagtcctctgggcgggacctgtcctctccgtccccttgcttcccttgtgtgcagcacagtgccc

SEQ ID NO: 11398 - DNA, 201 bp, Homo sapiens
taacacaggctgagtgtgttggcctggggcagcgtagggcctcccagagtccggccattcttccctccctggcctggccattgtgtcctggggctccgtgcagatcaacagctgctaccgttcaccccagaggtggctgccttgcagggattggcgagaggcgccttctagttagcgtgtgtattagtttgttgcgtttgt

SEQ ID NO: 11399 - DNA, 201 bp, Homo sapiens
ccacattgatgctgaatactgccctttactgaattcctttattgtggggagccgtagtattttgtggcctctctcttcaagagagtaaatacctgtaaaatgttccatatcacagaagcagctgaatctttttatactcttgattgttaggtacctaccaagaagaaaggcttgttttccaacaatatgattggcatgtta

SEQ ID NO: 11400 - DNA, 201 bp, Homo sapiens
catctgatcccatgtttccttgtcttcctgtcttactccaacttcttgtgatgggttgaaatttacgttattaaaaaaaagtttgccttattttttattcygtgatacgttgactatttaaatgggttatatttaatcatttatgccttggatttaatgcattaagatgagtagtttatcttcaactacttgtgaagggaa

SEQ ID NO: 11401 - DNA, 201 bp, Homo sapiens
aggctgcccgggcctctggagatatagccagtgatgtgagttgaatgatatgaccttccatcttgcctaatttctgttaacttcatgtaaaacaatgtctrcggctgattttcctgaattaaagcaaatctataaccatgtgagacaggatgtcacctgcagaatatattagttatgaatgagattctttgaggggggaaa

SEQ ID NO: 11402 - DNA, 201 bp, Homo sapiens
atcccgatttcacccgagctcgcctcaatgcgctgcatctgagtgacgtaagtgaactggtggttcatggaacgtgtgcccacttttgtaaaatgatctgygcccaatgtggatttcgtttttttaaaaaaaaaagttctaggaaggaggacttggaacagaaaggacactgaactgagaaactgtttgtgtgactttcag

SEQ ID NO: 11403 - DNA, 201 bp, Homo sapiens
cattgtgggcaggcatttgataattaccctgcctataacaagatattcagcactgcagcaaatgttttttaaaaagttcaatattctcaagtgcgtgtaargggagttggtgaagcagtcacagggaattcttttgcaaactcacaacttcaagtgtgcctttgagtttctttagttttcatttgacaccttcagttcatt

SEQ ID NO: 11404 - DNA, 201 bp, Homo sapiens
caggatttaccaataggagtttataatgtttaagaatatcttcttttgacaatgtatgtaagtgttgctgggagtctggggcatgtgtttgtatcccttcrtgtgcttcctttgtagagagcctattggactggatatggggaagggaatgcttggtgcccaggagctctgccagaccccgaaattgtaaggatggttgag

SEQ ID NO: 11405 - DNA, 201 bp, Homo sapiens
ttttttttttttttttgagatgaagtcttgctctgtcacccaggctggagagcagtggcatgatcttggctcactgcatcctccacctcccacatttaagygattctcctgcctcagcctcccgagtatctcgggttacaggcgcgagccaccacgcccggctaatttttgtatttttagtagagacaaggtttcactatg

SEQ ID NO: 11406 - DNA, 201 bp, Homo sapiens
gaatttggcaaagctcaggttttgtccttcatatatttagaaatggaggtaatggcatgcagtgatttgtaccagcctcagcatggggctttgcatgtgaygtccgcatagtcagtgcctgccaccatctcatggtaaattttcacattggaaaaatctggtaaatttaaaactaaaaatgtaaaaacaaacacagaaagt

SEQ ID NO: 11407 - DNA, 201 bp, Homo sapiens
aggcgctgcacattatcactcgcttccagctcaagacaacttggttctcaaacaggctcagagcgtaaacaaactcgtgagtgaggtgcgtatgggggaaragtcacacccatgagcatcacctcttttatctcctatagtcagtgaatgaggtgaccctataataaaaagctctggttaaaagtgtgacaccggccaggt

SEQ ID NO: 11408 - DNA, 201 bp, Homo sapiens
tgagaacagaggggttgttatgaacttcgagtatcacagagagaaactgagtcacattttggttaaagtgatttgctcccagtcatagcaggttgaacccagagttcaaagcctgaacagtgtgcagaatgtttctatttaggcaggcgggtaatggcctcaatggcagaatgaaacaaaataatcccagctggtgcttag

SEQ ID NO: 11409 - DNA, 201 bp, Homo sapiens
tgatgaaatgattttcattggcagaatgttagcctgctggcagtccttggaaggcagggtataattaaacttggaaaagtgacatgctcactgcagatctyagcatgccaactggaacttggtctcaacagaacctagcattcatttcacgccccttgccattttctttttctttccttttccttcactctcttttctttc

SEQ ID NO: 11410 - DNA, 201 bp, Homo sapiens
gtgcacccttgactctactgtcttctcatcaggtggagtataagagagggcatgatgaacgcatctccaggttctccacggtggcggatactcctgagctkctacggagcaaggctggggcacagcttcaaagtgatgtaagaaaggagggaggccagtccatcactgatgggcatttgggttgattcctcatctttgctc

SEQ ID NO: 11411 - DNA, 201 bp, Homo sapiens
aagttacttcctaaatcctcccagggctgtcaatattcaaaagtgccaggcaacaggcttctagttgccagaaagaatactggaggatccatctttttaamcaaatcaaacatctgaaagatgtttcaaatgtcaaacccctctcgttctcttattactgaagtctgagttctgagaagctgtgtattccatgtgaatttc

SEQ ID NO: 11412 - DNA, 201 bp, Homo sapiens
caaatggcccaattagaaattgagtaatttaggggaagagctgattaaaataagtcatatgattatcaaattgggtgtaacccggtgatgaaatgattttyattggcagaatgttagcctgctggcagtccttggaaggcagggtataattaaacttggaaaagtgacatgctcactgcagatctcagcatgccaactgga

SEQ ID NO: 11413 - DNA, 201 bp, Homo sapiens
ggaaaggcacatgcaggaaatgtcacggagacagtcccagcctctctgcatacagctgtgtgacctaaggtagactccttaagctctcgggactcagtttytccctcagaaataacaacaacagcactaactaaaatgtatggaatgcttaccctgggctaggcattggcataagtattttgtgtaaactatctcatttaa

SEQ ID NO: 11414 - DNA, 201 bp, Homo sapiens
tgttaggagagttttgccaaatggcccaattagaaattgagtaatttaggggaagagctgattaaaataagtcatatgattatcaaattgggtgtaacccrgtgatgaaatgattttcattggcagaatgttagcctgctggcagtccttggaaggcagggtataattaaacttggaaaagtgacatgctcactgcagatc

SEQ ID NO: 11415 - DNA, 201 bp, Homo sapiens
gccctcaactcccatccaaatttatgatgcctgctttggccccatttgtctgcttccaaggagatggacacggacaaccagcatagctcgcttgaggccaytgaagcaagtacagaggctggccagccagagtggggtgttaggagagttttgccaaatggcccaattagaaattgagtaatttaggggaagagctgatta

SEQ ID NO: 11416 - DNA, 201 bp, Homo sapiens
ttctgattctttgtatttattatttcttctagaatttgtaccggtcagacctgaactttatgcgaggtgttgcatgtgtcattccaggcacgttagagatygaagggaggaagaaagcatcggaactcatcagtgaggtaactacagatgctggtgttgagtgtccaggacatttccacagcagaggataatcagtttgtt

SEQ ID NO: 11417 - DNA, 201 bp, Homo sapiens
tagctgagccaaagtagaatgttagccctcaactcccatccaaatttatgatgcctgctttggccccatttgtctgcttccaaggagatggacacggacarccagcatagctcgcttgaggccactgaagcaagtacagaggctggccagccagagtggggtgttaggagagttttgccaaatggcccaattagaaattga

SEQ ID NO: 11418 - DNA, 201 bp, Homo sapiens
gaaaggcacatgcaggaaatgtcacggagacagtcccagcctctctgcatacagctgtgtgacctaaggtagactccttaagctctcgggactcagttttyccctcagaaataacaacaacagcactaactaaaatgtatggaatgcttaccctgggctaggcattggcataagtattttgtgtaaactatctcatttaat

SEQ ID NO: 11419 - DNA, 201 bp, Homo sapiens
cttaaaatgaggaaagaaaataaggcttagcctatttttggaatataaacaaatcataatgagtaacagtgggaggaggtggtaaactgaggcatgaagcggttaaaatggtttactcactattagctggtggcatccaaatttgtttccgtttttaaagtcatgctataattgacttctttccccctccactaccactat

SEQ ID NO: 11420 - DNA, 201 bp, Homo sapiens
agcctgactaacatggagaaaccccgtctctactaaaaatacaaaattagctgggtgtggtggcgcatgactgtaatcccagctactaaggaggctgagayaggagaattgcttgaactcgggaggcggaggtcgcggtgagccgagatagtgctattgcactccatcctggacaacaaaagcgaaactccatctcaaaac

SEQ ID NO: 11421 - DNA, 201 bp, Homo sapiens
gtcacacccatgagcatcacctcttttatctcctatagtcagtgaatgaggtgaccctataataaaaagctctggttaaaagtgtgacaccggccaggtgyggtggctcacgcctgtgatcccagcactttgggaggccgaggcaggcagatcacctgaggttgggagttcgagatcagcctgactaacatggagaaaccc

SEQ ID NO: 11422 - DNA, 201 bp, Homo sapiens
aaatagccccttgagtaagtggcagctttaaaaaccatccaactgctgacttcaaactagaaggtcagcaaaggaaagtggaagttggattctgaaagatygaggtgcccacaggaattttatggtcgtcggattttgaagacttgaactagactgggggttctccttgcatttcttgcctgttgcctatctttgtcctct

SEQ ID NO: 11423 - DNA, 201 bp, Homo sapiens
ctgttctgagagcttggcttttctgattctttgtatttattatttcttctagaatttgtaccggtcagacctgaactttatgcgaggtgttgcatgtgtcrttccaggcacgttagagattgaagggaggaagaaagcatcggaactcatcagtgaggtaactacagatgctggtgttgagtgtccaggacatttccacag

SEQ ID NO: 11424 - DNA, 201 bp, Homo sapiens
aggaaggagtggggtggaggcttctgataccaagtgggtgtcgcaaatgagccatacccgaagatcacaagccccacaggagcagggcctaatgggtgggygggttgggggcttagagctgaagccttttacggccaaccccaccaatcccagtgctagggagtcgccaaggtggacatggagctataggctgtgccgtcc

SEQ ID NO: 11425 - DNA, 201 bp, Homo sapiens
ccatccacagagattatacagggaacaaggagaaaacataaagcatcattacacaccgactgctgacctccctgaagtcctgctggccaagctgaatgccrtgaatatcagtgaggtgaggctgacccaaggggcacgagttttaatgacgggagagcggggctggtcatgggcaggcacacaatgccctgtgctcagaag

SEQ ID NO: 11426 - DNA, 201 bp, Homo sapiens
cagggtggggtgcgtggacagagatggagaatagacttttcagaaatgtcgctgtgttgtgcgatgttatcctgcctttggcatgtttttgagacttccaygaaaactcctagtatttgttaaggcttctggagtttaatttctgctttttttgattgaagccctatgtgttaaaaggccttaaggcaggaagaaggcctg

SEQ ID NO: 11427 - DNA, 201 bp, Homo sapiens
tattctacccattggttactggtttcaaagaacagatatgcggtaaaatgcaatttacaagacagcctagaatcaaaccaattacatctttctctggtggktcagaagttacttcctaaatcctcccagggctgtcaatattcaaaagtgccaggcaacaggcttctagttgccagaaagaatactggaggatccatcttt

SEQ ID NO: 11428 - DNA, 201 bp, Homo sapiens
aagttctaggaaggaggacttggaacagaaaggacactgaactgagaaactgtttgtgtgactttcagtcactttcctcagtggtcctcgtttttgttttytttatctgcaaaatggtaatgggctgagctaaactgagattctttccagctctaaaattctgacttgggtatggctccaaagatctcagtgatgtgctgg

SEQ ID NO: 11429 - DNA, 201 bp, Homo sapiens
aagatgtggagggaaagtgaccttcctgggcaaagaaagccattgagatgtgtaaggcagccgaaataactaaaaatcaaatgactctaatgtgtgaggaygaggacaaaactgtgcccactgtgataaagaagaggaacgcccagggttccaaatcaaagcgcctacggaatctaaagactcccagtggcaaggcaaaaa

SEQ ID NO: 11430 - DNA, 201 bp, Homo sapiens
gtgtgatttaagatggatttttgtcattgtgggcaggcatttgataattaccctgcctataacaagatattcagcactgcagcaaatgttttttaaaaagytcaatattctcaagtgcgtgtaaggggagttggtgaagcagtcacagggaattcttttgcaaactcacaacttcaagtgtgcctttgagtttctttagtt

SEQ ID NO: 11431 - DNA, 201 bp, Homo sapiens
tacatgcctgtaatcccagcttctcgggaggctgaggcaggagaattgcttgaacccaggaggcggaggttgcagtgagctgagatagtgccactgcactycatcctaggtgacagagcaagactctgtctcaagggaaaaaaaaaaaaaaaagaatggatgtacaataccatactatcctattgatagacaggattattc

SEQ ID NO: 11432 - DNA, 201 bp, Homo sapiens
tttttcatgaaacaatatgcattgttgtgaagtgtgtatttttcactcaacaaatatcttggaaatatttctacatcagcatccttttaagctatcgtgawtgggtgtatcataggtgcaccattaagtatggatatacaaggccaggtgccatggctcacacctgtaatcctagcactttgggaggccaaggtgggtgga

SEQ ID NO: 11433 - DNA, 201 bp, Homo sapiens
tacttttttcatgaaacaatatgcattgttgtgaagtgtgtatttttcactcaacaaatatcttggaaatatttctacatcagcatccttttaagctatcrtgattgggtgtatcataggtgcaccattaagtatggatatacaaggccaggtgccatggctcacacctgtaatcctagcactttgggaggccaaggtggg

SEQ ID NO: 11434 - DNA, 201 bp, Homo sapiens
tggcacgtgcctgtaatcccagctactcaggaggctgaggcaggagaattgcttgaacctgggaggcagaggttgcagtgaaccgagatcgtgccactgcwctccagcctgggcgacagatcgatactctgtctcagaaagaataaataaaataaaataaaaatgaagaggttggatcagatactctcccaggtccctgca

SEQ ID NO: 11435 - DNA, 201 bp, Homo sapiens
aagtccagtatttggaggatactgttttcattatgcctgtgccttaaattcactgcagatttcagacaagtcacttaaccttcctgatcctctttccctcrtataaaaatgaagaggttggcctgtaatcccactactttaggaggcctaggtgggcagatcacgaggtcaggagatcgagaccatcctggctaacacggt

SEQ ID NO: 11436 - DNA, 201 bp, Homo sapiens
tggttgaatcctcgcaacctcctatggggtgtagatcattctccaattttatcagatggggaaactgaggctcatggagaaactcagtaacaggcccatgrccacacagataggtctatttgaatccaaagcctgtgcctctaacccactcttgagcctcctgctgagaatgccctgggatggccccatatgtgaggctgg

SEQ ID NO: 11437 - DNA, 201 bp, Homo sapiens
ccgcaggatgtttagcaggacgtcctacaaggatgtcagtagtgccctctgtgacaaccaaaaatggatcgagacattgccgaaagccccccaggaagcaraattgtccctggtggagaggcacaggacaaggctcccaggaggctggacaccatcagaccactcacacccgtgctctttatgtttgcttgcagggagact

SEQ ID NO: 11438 - DNA, 201 bp, Homo sapiens
gaggccgagtgagtggggatggaatcacagggtctgagcagggcctaggctctgcggagtaaggacgagggtggtgatgtgataagactgtaaccaccgcygactctcactgactgctcgcctttgcttttaaacttgcgaaagcagtctgacgtgggggcagctgttactcctgttttagggatgaggtcatgtgggaag

SEQ ID NO: 11439 - DNA, 201 bp, Homo sapiens
tgtaatatgtcaatggttgtacatgctatggagacatatagagcagggaagtggggcaggaggtgtgagtgtgcgtgtgtgtgtgtgcgtgcacgtacacrtgtgccatttaaaatagggcattagggtagttctcattgaaaagttgatatttgagcaagagccttaaggaaaagacagaaggggatagggaactccagg

SEQ ID NO: 11440 - DNA, 201 bp, Homo sapiens
ggaacagaaaggacactgaactgagaaactgtttgtgtgactttcagtcactttcctcagtggtcctcgtttttgttttttttatctgcaaaatggtaatgggctgagctaaactgagattctttccagctctaaaattctgacttgggtatggctccaaagatctcagtgatgtgctgggtaaccatgaggggagtggtc

SEQ ID NO: 11441 - DNA, 201 bp, Homo sapiens
tgaccaacaggaatatacagaagactatgagcaacccaggggcaaggggagctttccagccatgatcacacctgcttatcaaagggccaagaaagccaacsagctggccagccaagtgagtgtctgggtgctttttcaccattgattatgctaatttttgtcattaatgagcccccgtgatttagggaaaaaacagtaaga

SEQ ID NO: 11442 - DNA, 201 bp, Homo sapiens
tggttaacactttcaatttctgagagaaaaagagaaatgaataattatgattcttattccaaattccccagggttccaaagcttttgtgatttattgagarttggttggttggtaagctggtttgttccttcattcatttttttgatcattgtattcattgaaaactactgtggcctggcactggtcagggtagtgggata

SEQ ID NO: 11443 - DNA, 201 bp, Homo sapiens
atgcttcttttcaacaaaaatgacaagcagcttcataattaatatgaaatataaagtaaatgtgctacagatggaagttaactaattttggactaattaakaggaattcagattcattaaagacaaaagtgtgaacataatttaattttccttgaaggtgatgaaactgaattcgtttctgggtatttaaaaaatatttct

SEQ ID NO: 11444 - DNA, 201 bp, Homo sapiens
attgtcgactacaactacccagccactctcacgccttcctatcaaacagctatgaaactggtgcccttgaaagatgtaagttcttttccaacagctctttytgctttgtcacttgtcgcttccttcctgaggagtgatttgtaggtagcaagatggaaagaaacatgatacaacagttcataagaggttgaagggattgag

SEQ ID NO: 11445 - DNA, 201 bp, Homo sapiens
tatccatatgtttctgcagttgtgtagcgaggatttgacacataaaacatgaggagatgtactttacctcagaatgctgtttgcatttattacagtgtctrcagaaagatccataatgtctgtatttttcctctaactgagccacagcaggcatgtctccaccttataatcacacaacaggtcacacactattttcctctt

SEQ ID NO: 11446 - DNA, 201 bp, Homo sapiens
tattgggcttgggagagggagctaagcaaatctttgagaaaagagcaaatgacatctttttgtgcctgtttttacctaggccaattataggcagagcatcracaagttgaagtacagctcggtgactgacaccccacagattgttcaagccaaaatcaatgcccagcagctgagtcatgtaagtaactgtccctgcccagc

SEQ ID NO: 11447 - DNA, 201 bp, Homo sapiens
tatagcataatgaatccccatgtacctgtcacccatcttcaacagccatcaactcatggccaccctgcttcatctatatgcctgtccaattctcctcttcyatattattttgaagccaatttcaagtattgtataatgtaatctgtaaatatttcagtatgaatctctaaaaggtaaaaaagaaaaaacatgtttatataa

SEQ ID NO: 11448 - DNA, 201 bp, Homo sapiens
gagttagagactagcctgggcaacatagtgagaccctgtctttatttcttaaaaagttaaataaataaaagaaggaacatgttgtaatgtcctatagcagacagagtaggatgaccacaattaacaacaatgtatcatatatttcaaaatagctagaatagaaatgataaatactcgagccgataaacaccctaaatgccc

SEQ ID NO: 11449 - DNA, 201 bp, Homo sapiens
ttatataattttaacatatcacatcaaaaatctaacaataattcttagtttcaccaatcatccaaagttcaagtttaatttctggtcaagactgcttctcrgatgatgccgtattcatccaacaggagtcacatatctggttggctgtcttttgtgtgtgtgatttaagatggatttttgtcattgtgggcaggcatttga

SEQ ID NO: 11450 - DNA, 201 bp, Homo sapiens
caaagataacaggatggtccagcaagtgggaagtgtctgtccctgagaaaggctcatcagaggcatccatcaagttgtaactttgaattttgctatgtcakggcacgttgtagtttactagtgataaattggtcatagccatttattcccattatatgagcatgtgtacaatctatgtgtgaacacacacacacacacccc

SEQ ID NO: 11451 - DNA, 201 bp, Homo sapiens
gtgatccgcctgcctcggcctcccaaagtgctgggattacaggcgtgagccaccacacccagcctaatgatgttttttaatctccaaatccaacaaaacaytccacggcccattgtcaggagcacttcgttatttctaggtcctgttctagaagttcacttgtaagtcatttgtttgtttctagaatgcatttccctgtct

SEQ ID NO: 11452 - DNA, 201 bp, Homo sapiens
gcatgtgattcacatgttttttcatttcaggtgagatacacagaggactatgaacaacaaagagggaaaggcagtttccctgcgatgatcacacccgcctrtcagatagccaaaagagccaatgagctggcaagtgatgtaagtgtccttgacaatgtggtcatgttagggagaaagaggaatgtgaacctgggtctgagg

SEQ ID NO: 11453 - DNA, 201 bp, Homo sapiens
gcttgggagttagagactagcctgggcaacatagtgagaccctgtctttatttcttaaaaagttaaataaataaaagaaggaacatgttgtaatgtcctatagcagacagagtaggatgaccacaattaacaacaatgtatcatatatttcaaaatagctagaatagaaatgataaatactcgagccgataaacaccctaa

SEQ ID NO: 11454 - DNA, 201 bp, Homo sapiens
cgctggatatgacagtctgcattttgaaccctactttgttcagaagaaagaagccaggtctaaatgagagattggctttgctttctcattcctgccttgamggccctttttcttggggagggtagaagaggggaaaaggaaagggagggtgagcctgttaaatgctccctgtgcttcttagcgtgtcctgtgggaaccggg

SEQ ID NO: 11455 - DNA, 201 bp, Homo sapiens
taatgtgaagatttgtggttaatgagtagaaatcatttaggaaaaggccaataaacagtagttattgccagggcaatgtcaataccccacacttatgttaygcttcaccagtttaagatctctttacatatattctatccaatttattctcacagcaatcctgagaaagagaatatgatacactctttgcaaataggagat

SEQ ID NO: 11456 - DNA, 201 bp, Homo sapiens
ggaggctgtgaggtgggtgcacccttgactctactgtcttctcatcaggtggagtataagagagggcatgatgaacgcatctccaggttctccacggtggyggatactcctgagctgctacggagcaaggctggggcacagcttcaaagtgatgtaagaaaggagggaggccagtccatcactgatgggcatttgggttga

SEQ ID NO: 11457 - DNA, 201 bp, Homo sapiens
taggtgagcagcgtgtgattccttttgaatcagaaagtccagtatttggaggatactgttttcattatgcctgtgccttaaattcactgcagatttcagamaagtcacttaaccttcctgatcctctttccctcatataaaaatgaagaggttggcctgtaatcccactactttaggaggcctaggtgggcagatcacgag

SEQ ID NO: 11458 - DNA, 201 bp, Homo sapiens
atgttgaaatttgaatcctgactctatcccttagtgctatgtgaccatggacaaattacttaatttctctcttccttggcttctcgtttgtaaagtgagghttagtcctgccaaatatgattgttatggagattaagcaagttaatatttgttggagtgtggcagtccctggcacactcctggacttagcacattggcata

SEQ ID NO: 11459 - DNA, 201 bp, Homo sapiens
tggctgcatggaatggggtctaggtttcatgcaaaacctccttccatccacagagattatacagggaacaaggagaaaacataaagcatcattacacacckactgctgacctccctgaagtcctgctggccaagctgaatgccatgaatatcagtgaggtgaggctgacccaaggggcacgagttttaatgacgggagagc

SEQ ID NO: 11460 - DNA, 201 bp, Homo sapiens
gatttcctcactgtggtctcccctatgaggagcatgttacaagaagggatgtagtatgggaattaaatgggtttgcttgaatgtggatagcctgctttccrcattttcagttgtagcagtttggtgccagtgatgcatggccggtttaagcagtcgtgctttgcctctcaagttagtcatctttggtttcatggaaagagt

SEQ ID NO: 11461 - DNA, 201 bp, Homo sapiens
ttgaggtcacagatcctccctctcaactgggatgcagggaaatgcccgcgattaaaggagataaaatccacatccatcaaaagaagtgcctctgcaatgarcagaactgttgtgtcccctctccttagtgtttcataatgagctgatgacatggagacagactctccacaaatatgcagagaaaggttcctaacgaggatt

SEQ ID NO: 11462 - DNA, 201 bp, Homo sapiens
cttgatagtttgttctttttccctagaatatatagaaaacttggacatattgaagacattattaagtctgctcaagttagatgaggtggatcctctgtaakgcagagcaacatgatttcattcctaatggataaacatacatcaacaagcacagaaactcccacttgagcaaagcaaagcttttgtgaagttaaggaaatg

SEQ ID NO: 11463 - DNA, 201 bp, Homo sapiens
tactactagtagtaataatagcaacagtagcagtgcatagggagagaattctgactcacacagaaatgtcagcaatttgtggcaaagtttgttggaagctrtagttctgcatatgttttcttcgttcagcagtcttttgacacagtgtaaaggactgcttgagtaagctatttatgtttgttagacagacagaaaagacag

SEQ ID NO: 11464 - DNA, 201 bp, Homo sapiens
cttttaccaagagaggaggcaaggatgccaggatagggactcccacaaatcagctttcctgagccatgtgggttaaggggtgtcctgccatttggttgtaygttgagtgggagatggacgtgagatgggacttgacattttggaagagtcactgagaagacaggagagggacagctcaggagctggcatgcactgtgctga

SEQ ID NO: 11465 - DNA, 201 bp, Homo sapiens
ttgtgtcacttggagctggttgtggttcctgaacttacacaattaaaattctttttttttttggatacagagtctttctctgtctcctaggttgaagtgcrgtggcgtgatctcagcttactgcaagctccgcctcccaggttcatgccattctcctgcctcagcctccagagtagctgggactacaggcgcctgccacca

SEQ ID NO: 11466 - DNA, 201 bp, Homo sapiens
atgctgttcacacctgtgcgtacaaatgtttagtacctctccagagtctaagggagctagtcaagcgttcaggcaggatccggaggtgttctggattgtgrctttttggattctagattcttttgtgttttgtaactcccattccatatttgtgtcacttggagctggttgtggttcctgaacttacacaattaaaattct

SEQ ID NO: 11467 - DNA, 201 bp, Homo sapiens
gttggcaccagaggaatttctcacacaaaactccatcttacgtggctagagaagaggaaaagagtgaaaagtctaggaaaggaatatgtttgtccctgggrtgaaatatcttgaagcaacgaacatttgttccagcctgctcgtgggggtcagtctgcagtgagggacagcggaaagtatggaccgcgtagaggcactgag

SEQ ID NO: 11468 - DNA, 201 bp, Homo sapiens
ccctcagagcacaaaagggaacagcccatgaaaggaagggagaatacagagcggaagatgggatgggagatgaggctggagagaaaaactggcatcttacraaaaagggccttgcaaactagattgaaagagtttggggctgggcgcagtggctcatacctgtaatcccagcacattaggaggctgacgtgagtggattgc

SEQ ID NO: 11469 - DNA, 201 bp, Homo sapiens
tctctaaattaaagtctagttaagctacttaacctagggtgagaggttaagtaactcacccaaggtcacatagaaagcagatggtagaattgggagttgtraagttggggtctaaaaacaccagacagtttagaccccatgcagttggggtctgaaaagctcagctcttaaccactatattctactgcgtttaggacgcta

SEQ ID NO: 11470 - DNA, 201 bp, Homo sapiens
ctcgctccgtccggacccgcgctcggcacaagcccagcccgggcaagcggccgccacctgcccggcgccgcctccgcccgcccccaccgcggcgcaacttrgatggagttggggtcctgagcgccggccccccacagccgccagcgcagagctcgtgccgccaccttcgttctgggacccctctctccgctgctcttcgct

SEQ ID NO: 11471 - DNA, 201 bp, Homo sapiens
tcttcctttcaaatctgcttaccacagttcctagttctcctcagagacagaggcaatgagccagaagagaaaacctccatcttcattttgttacctttccwttgataataataataaaccctttcaaatactgtattcaagcagttgactttctttttttttttttttttttttgtgagttggagtcttactctgtcaccc

SEQ ID NO: 11472 - DNA, 201 bp, Homo sapiens
ttcaccttaacagcaggttgagagggccatgctaaagccttggtgtcatgttcaaacccttcgtataaccccattccagtcagaatcatagtagattagcrtgagtcatcccactcccctctagggcctccttttacagtgctcatatgcagccctcatcctcctgccctctttcctttaaagctgtgagttccttgtgaa

SEQ ID NO: 11473 - DNA, 201 bp, Homo sapiens
gccaggttcccttgttataagtaaaataaaatctttgacccaaatcctttttatgcctgtatgaaaatcatgattttgtttttttttaaattatcacttascattgtattattattgttgctgctactgtcactaccactgctgctgcaattgcttactgtttctaccatgacgaatattttttgagcaatgtcagtgctc

SEQ ID NO: 11474 - DNA, 201 bp, Homo sapiens
cgcacctggcctcatttctacattcttttaatctgtaaaaagtggtgctttttgaacttctcctttgactggtcacaacatttgccaggttcccttgttayaagtaaaataaaatctttgacccaaatcctttttatgcctgtatgaaaatcatgattttgtttttttttaaattatcacttagcattgtattattattgt

SEQ ID NO: 11475 - DNA, 201 bp, Homo sapiens
ttgcctgcatttgtacattcatttctacattctattttttttttttttttttttttttagatggagtctcgctctgtcgcccaggctggagtacagtggcrcagtcttggcttactgcagcctccccagttcaagcagttctctgcctcagcctttccagtagctaggattacaggccaccatgcctggctaatttttgta

SEQ ID NO: 11476 - DNA, 201 bp, Homo sapiens
aataaataaaataaattcagctggttaggcaaattacccaacccacagcaattgggaaactctagcaaccaaaagggaaacaggcaggagctatgggaagrtttctgcagacagttaggaggcctaagccgatatttattttccctcctcggctattaattccatctttgccacatcttcatggtaaatgttacctttgtt

SEQ ID NO: 11477 - DNA, 201 bp, Homo sapiens
agctgcactccgccacgtagctgtgcatctttttatgactttgtgcgtttgtccaaagtatgggatggaggtctggatgccctgacagttaatgatctatyccaagtctcagtttaggcaccaggcttgctctcctcaacaatcctctacaatcctcacacacccagagctgtgatttttttccccatcagtagatgccca

SEQ ID NO: 11478 - DNA, 201 bp, Homo sapiens
ccagtcccctaggcaggagcagccgaatactaactcatttcctctgatgttgggttgtttttcagggtgatgttcagcggacactcatccaagtggacttyggcgatggtatcgcggtgtcttacgtcaatctcagctccatggaagatgggatcaaacacgtctatcagaacgtgggcattttccgtgtgaccgtgcagg

SEQ ID NO: 11479 - DNA, 201 bp, Homo sapiens
aggtgcttactgatggtcctcagggctaggcactatgtctaattttaaaaagtgggaatgattcacattataatgagctggtttacgacttgagctttttyccatttaggtacaggaaggtggtttccaataattgcactgatggcgtaagggaacagtacactgccaaaccgcagaagtgcccagggaaagccccgcggg

SEQ ID NO: 11480 - DNA, 201 bp, Homo sapiens
ggaatacgtgccctatgccctcctcaccagtaccagcttgtctgcttagcagtggatattgcctttgcaaagacatggaggtatgagagaggccgcatctrtgagggggagctgctagtaaatttacctggactactgcaacaagttctagccacagcagaaatagtgatggcctgccctaggaatggcagtaagaactag

SEQ ID NO: 11481 - DNA, 201 bp, Homo sapiens
gggtttttataggctcaaaatgggggaggtgcaggccgtaggtagaaagagaaaaacatattgggtctcggaggagcttcccatccatgattttagacccrtggtagcccaactgcccagtcatgctggtattcaaggagctcctctacgctaagggatttgtacctattcatttgaaaaattattgtgatagtagtagaa

SEQ ID NO: 11482 - DNA, 201 bp, Homo sapiens
tacctgtcagactagaagtacctggagattggggttgtatcaaaagatagaacatgtcacaaagctaaaaagataagttgctctcctcccaaatttatctytacccttataactgacaaatggatattttattttccatagctgtatttatagacatttaaacaaactgatatataatacattttgcatatgcatttgtat

SEQ ID NO: 11483 - DNA, 201 bp, Homo sapiens
ccagcctgggaaacaacagcgaaactccatctcaaaaacacaaaacagagaaaactcaacattaagaaatttatatttaaagccattttttaaaaatgacmaagagcctgaacagacatctcatgaaagaataggccagacacaatggctcacgcctgtaattccagcactttgggaggctgaggtgggcagatcacctga

SEQ ID NO: 11484 - DNA, 201 bp, Homo sapiens
ctcagttaaacatgtatcttatgagactgaaaatctcatcatctatggtgaagaaaagaaagaaacctaacaagctgacattatactatgacacctagagracagcttacacttttttttgagatggagtctcgccctgtcaccaggctggagtgcagtggcacaatcttggctcactgcagcctctgcctcccaggttca

SEQ ID NO: 11485 - DNA, 201 bp, Homo sapiens
agaagaattagctgggtgtggaggtgtgcgtctgtagtcccagctacttgggaggctgaggtgggaggatggcttgagccctggaggtgtaagttgcagcragccaacatcgtgccactgcagtccagcctgtgcgatagagccagaccctgactcaaaaacaaaaacaacaaaacaaaataagagattggactttattgt

SEQ ID NO: 11486 - DNA, 201 bp, Homo sapiens
gcctgagggagaaaatagcttcctgctcttcatttaaggagctgaactgagaaccagcgcccatgttgcaaagtctcagcagggcaagaacgtttgaaaamtgacgaggacatattgcattatgagaaggataaaattgcatttgtgataatggactgacctaagagcactgtgccaataagaaaaagaattgtaggttaa

SEQ ID NO: 11487 - DNA, 201 bp, Homo sapiens
agcatctcttatgtttcaggtatgatagctggtatggagggtgataaaaataatcaagaagttattcattgaggccgggcgcagtggctcatgcctgtaaygccagcactttggaaggccgaggcaggtggatcacaacatcaagagatcgagaccatcctggccaacatggtgaaaccccgtctctactaaaaatacaaa

SEQ ID NO: 11488 - DNA, 201 bp, Homo sapiens
gtgtgtaataggtttcactatagatgttcagttccctaaaactccctgatactggaattcttaaatgttagagtcaaagctagagatcagctggtccagtygtctccaattacagatgaggaattgatttactcatttttttacctcattcaacctttggaaaactaaaggtaacaaaagctcagttaaacatgtatctta

SEQ ID NO: 11489 - DNA, 201 bp, Homo sapiens
gcccagctaattttgtgtttttagtagagatggcgtttctccatgttggtcagactggtctcgaactctcgacctcaggtgatctgcccgcctcaacctcscaaagtgttgagattacaggcggagccaccacacctggcctcatgctcccaatggtgcatacttgagtagttttcagttttgggacagatatttttgcta

SEQ ID NO: 11490 - DNA, 201 bp, Homo sapiens
gaagcgtagattcagatcaaatcagatgcattggaggcaacagctcccttgtggcagggagggtaggggtgcactttgataaagcatgctgctccagtggrtaggatgggctgatggctgtctagtcagggctagcactgccaaaggcctgagggagaaaatagcttcctgctcttcatttaaggagctgaactgagaacc

SEQ ID NO: 11491 - DNA, 201 bp, Homo sapiens
ttatctccaggcaggccagagctttactttctttatagaccaattcttttagtcagccagattcttttgctaacctgtatgataggttgtgtttatgcacygtctcactgacctgtgagtttattggagcagaagtgagactggaagtctctttgcagaagaatcagcacagcctctaggtctgcagaacgaggctctcta

SEQ ID NO: 11492 - DNA, 201 bp, Homo sapiens
tccgatttctcatcccaccccaacccttacattgtggtccagttacactaagctactgtggaatgatggaatataagtctttttttttgagatggagtctyggtctgatgcccaggctggagtgcagtggcgcgatctcggctcactgcaacctccgcctcccaggttcaagccattctcctgcctcagcctcccaagtag

SEQ ID NO: 11493 - DNA, 201 bp, Homo sapiens
tggcccacaagccaaagatggttactacctttttaagtgactggaaaatctaaagaatggtatttcatgacatgtgaaaattatttgatataaaatcttaytggaacatggccacactcattcattgacatattgtctatggctgctttcctgctacaacaacaaagttgaatagttgtgacagagaccgtatagctcaca

SEQ ID NO: 11494 - DNA, 201 bp, Homo sapiens
ccgtcattctgccttgcttttctctgttctccgtggactgagttgttctcttgattagtcccaatgtgagcacctggttgtttcagttgaatatgtatttwctcactactttcatttttctccatgacagccaagcacactacctgtttctagtgagccaactttagatttttttctatactaagtttctaataattgaat

SEQ ID NO: 11495 - DNA, 201 bp, Homo sapiens
ctcaaatcagtattagatacaagtatattgggatgaatcggatggttaccacgtatgattaaagcgcgatttttttttacagcagtaagaaaatgcaatasaatattccactccagtgttatccaaacttagttatgccttgccaactggagacagtgtatgtacgctaaatacatggaaatgtcccagaaagcaaagtta

SEQ ID NO: 11496 - DNA, 201 bp, Homo sapiens
tttagattttgatgtgtgacccttgatataacacctgacagaagtcattggacataattaatattactggtaacacactgtgtttcacatcaggtgatttkgtggttgattattcagcttcacaacactctagtactgataatactaacccttagccccaagccagctagttaaatctctgctgattcttccaaaatagag

SEQ ID NO: 11497 - DNA, 201 bp, Homo sapiens
aggttaccctggctttgtgttgctccctggtggaccgtcattctgccttgcttttctctgttctccgtggactgagttgttctcttgattagtcccaatgygagcacctggttgtttcagttgaatatgtatttactcactactttcatttttctccatgacagccaagcacactacctgtttctagtgagccaactttag

SEQ ID NO: 11498 - DNA, 201 bp, Homo sapiens
ccattctcctgcctcagcctcccaagtagctgggactataggcacgtgccaccacgtccagataatttttttgtatttttagtagagacagggtctcaccrtgttagccaggatggtctcgatctcctgacctcgtgatccatccgccttggcctcccaaagttctgggattacaggcttgagccaccgcgcctggccgat

SEQ ID NO: 11499 - DNA, 201 bp, Homo sapiens
accagaataaaagattacaaaatagtacaaacataaacccattaagtcagagtttttgtctatgttgttctctcatatatcccaagtccctagaaatatayctggaggccaggcgtggtggctcacgcctgtaatcccaacactttgggaggctgaggcgggcagatcacttgaggtcaggagtttgaagccagcctggcc

SEQ ID NO: 11500 - DNA, 201 bp, Homo sapiens
gttgtgctgttctggagatccacttcagcccctggttaccttggtctttccaaagcccgaaggctgaaaaagctaagtctgccacacagccaatatggcamcccctaccccaccccccaaccctaggagctccagctcagtgaggtgcaattgttgctaccagtggctggctggagttccgcatcagcaggtcttatcctg

SEQ ID NO: 11501 - DNA, 201 bp, Homo sapiens
ttgacattccatgagagagcatctagcaaagtatctgtacatgctatgggcttactatatagtaatcttcccactaaagcaaagttaagaaaattatttgkcttcagttggtttaatagtttttaactggactgacttaatgatttggtatctaggaactatgagtactcctttcctataatcacaaaccattgagccaaa

SEQ ID NO: 11502 - DNA, 201 bp, Homo sapiens
aataaagaaaatgggcattttgctttaagaaagctgagcggggccaggcatggtggctcatgcctgtaatcccagcactttttgaggccaaggcgtgcagrttatgagatcaggagatcgagaccatcctggccaacatggtgaaaccccatctttagtaaaaatataaaaattagctgggcgtgttggtgcatgcctgta

SEQ ID NO: 11503 - DNA, 201 bp, Homo sapiens
ggttagctgttattacagtttcattgatattaatagtgctccagtatggcctattaaaagatgtttgtaatatgacattcatgatgttgtttctgtttctscatttaggttctctcggtccagttctattttcttaaattgaagattggggcactgtcctaatcttcttagcatccctgtcagcaactctagctgtttcca

SEQ ID NO: 11504 - DNA, 201 bp, Homo sapiens
gactggctgagtcttccggcctccatctttctcccatgctgggtgcatcctgccctcgaacatcagactcaaagttcttcagcttttggactgttggactyataccagtgatttgccaggggcactcgggccttcagccacagactgaaggctgcactgtcggcttctcgacttctgacgttttgggactgggactagctt

SEQ ID NO: 11505 - DNA, 201 bp, Homo sapiens
taagaatcatgttatcagacaaccaactaatcatgttgtgccctggaaccaatagattgacgcctctagtcatctttccctaaccagagtaacaggagctrttgagacacaaaatcatgggccatcaatccttctgctgcagggcctttggtggtttggggccgggtggtggatgggtcggtggggcagattaaaagcgaa

SEQ ID NO: 11506 - DNA, 201 bp, Homo sapiens
tcagattgatttggtacaatattgagttcaggttctgaatatccttgttaattttctccctcaatgatctaatactgtcagtggggtgttgaagtctcccrctattattatgtgggagtctgtgtttctttgtagatctctaagaacttgctttataaatctgggtactcctgtgttgggtgtgtatatatttgggatagt

SEQ ID NO: 11507 - DNA, 201 bp, Homo sapiens
gccttgagtaagtcacttaaattctttgagcctgagtctccccatctaaaatatggtgatagtatatctttcggaggttttttcctcaggaggcgacatcktggatacaaagtgctttattcctagtaaatgctcaataaatgctacttactcatgggaagaaagatttctctactgggaattaagaattgtgggttataa

SEQ ID NO: 11508 - DNA, 201 bp, Homo sapiens
cttcatttctttgtagaaatatttctgtagcattgatccaagatggaaaaataatcctgacagagtcaaggtccctgtttggccaagcattctttgcctgmccctgtccttcccttgtcaaaaattagctaattttcaagttttgcaaatttgtaaacttaattttctgttgtttctttctccaacaattctttgctgcag

SEQ ID NO: 11509 - DNA, 201 bp, Homo sapiens
tgtgccatgttggtgtgctgcacccattaactcgtcatttagcattaggtatatctcctaatgctgtctctccccccccacccaccccacgacagtcctcygtctgattttaggacccgtatacattacatggctaagtgcttgcttgcttttccttctcagctgcttctccctacgtttttcctacatgttttctacagc

SEQ ID NO: 11510 - DNA, 201 bp, Homo sapiens
gaaagattttagctttctctagcaagtccacgtaattccttctctcagtacttaatgctatatgaatgctaatgtggtgtgatttggaaggcaatgggttwgaaatcaaacagatttgagtttgaatcttagttgtcctgctaaatcagcacgttgccttgagtaagtcacttaaattctttgagcctgagtctccccatc

SEQ ID NO: 11511 - DNA, 201 bp, Homo sapiens
cagtggagagtatataaggtgttctttagtgtatcctctgctttagggaccaagtggatgcaagtttcagggcaggaactctccagcatcttctaacagcrctaagcgagggtgttttgagaactggggctttccagcccgtgaatgagcggttgttctctggcatggtcagtcccaggaagatcagatatatcccagtga

SEQ ID NO: 11512 - DNA, 201 bp, Homo sapiens
agtgataatccagttagaaggggaattctaattttttttttttttttttttgagacagagtctcgctctgtcacccaggctggagtgtagtggtgcgatcrcagctcactgcaacctctgcctcctaggttcaagtgattctcctcctcagcctcctgagtagctgggattgcaggtgcatgccaccatgcccggctaatt

SEQ ID NO: 11513 - DNA, 201 bp, Homo sapiens
aacctgacctggcactgtttctggcacccttctaccctccaaggaatgggtgatttgagaacagcagcttggtgagtgggcactggcatcctctctctaartatggactggctgggcgcagtggctcacgcctgtaatcccagcactttgggaggctgagtcaggtggatcacgaggtcaagagatcgagaccattctcct

SEQ ID NO: 11514 - DNA, 201 bp, Homo sapiens
aattagtcagtatttaagaatagatagcttcctgcaccatactgcaaagatcacttttgcagattttcaggaggcagtaaagaatagttaacattcagatrtgctccaatcagatgataataggggtaatttgagtttacaggctaccagttcttaaatttaattctcaagtttcaaagtactttctagaaatgttagaaa

SEQ ID NO: 11515 - DNA, 201 bp, Homo sapiens
tggacaataaccaaggccttatctgttccataaccctgtcagtgtcaccctacctatgatctagtgatgatggcattgaagaagagctgggagaagaaccrcaggtgaaactggacattagactgaagtactaatgattgagagggatttctaggaatagaaagtatgcatttgagccatactaagacattttaatataga

SEQ ID NO: 11516 - DNA, 201 bp, Homo sapiens
ttctggaggtataacatatgtgaccttagcaattttagaaactacatacagggaggcctgtgctaggagtcaggacacgttggtcttggccccagttccaycacaaatttcctgtgtatttaatgatagtaattttagttctctggcttatttccttcatttcaaaatgagaatgccagactggacaataaccaaggcctt

SEQ ID NO: 11517 - DNA, 201 bp, Homo sapiens
ctaatagtcatttgccatatgtcatatactggtgtgactacttcaggtatgtgatatattagaaactggtaattttatttattttaaattattattattaktagtagtagtagtagtatttgagacagaatctcaccctgtcacccaggctggagtgcagtggcatgatcacagcttactacagcctcaaacacccagata

SEQ ID NO: 11518 - DNA, 201 bp, Homo sapiens
ggaatgacacataccttactgaaaatgtaatttagaaaacagagaataaggtggaaaaatatgtataatacttcatattataatatataatataacatagwataatataatataatataatataatataatataatatataatgtgtcatatatgaaacctcggtaggacttttgaacagctcacagtgcccgtactcaag

SEQ ID NO: 11519 - DNA, 201 bp, Homo sapiens
cattagaacactaggttccctggacttttgaagaagtttcacctagaagccttatctgactaaccatattattaaaaaaagaaaaagttctgactcctaaraaccatcatatctttccaaattctgaagaaaaaaaccaaaacaaagcaagatgaaacagaatgcacctgattcaagcatgcgatgttataaagccctcct

SEQ ID NO: 11520 - DNA, 201 bp, Homo sapiens
gctggggtgcagtggcacgatctcggctcactgcaagctccgcttcccgggttcacgccattcttctgcctcagcctcccaagtagctgggactgcaggckctcagcaccacacccggctaatttttgtactttttttagtagagacggttggtatttttttagtagggatgatttaatatgtctcatcaccgtgttagcc

SEQ ID NO: 11521 - DNA, 201 bp, Homo sapiens
taatatggatgtttcttttcatgtttctccattttttaggtctgtgatggggtcaaataaagaaccagaccttgtgcatcttgaggccagaactgtggatsgtcgtaagtaaatcaactttgccgcaatactcatagtaatattagttctatgactctgtcatgaactgagtctgtgtaataatctcatggtgtatgcaga

SEQ ID NO: 11522 - DNA, 201 bp, Homo sapiens
gccatattcgaaatattagtttaggatttttaatgaccatactccatttattttcatctttcttgctgggatctcagcaaccaagtgctctgattaatacgtgtgtgtgtgtgtgtgtgtgtgtgcacgtgcgcatgcctgtgccctcacaattgtgtgtggtcatttgtttgttataggaaccttgctgactactccaaa

SEQ ID NO: 11523 - DNA, 201 bp, Homo sapiens
ccatattcgaaatattagtttaggatttttaatgaccatactccatttattttcatctttcttgctgggatctcagcaaccaagtgctctgattaatacgtgtgtgtgtgtgtgtgtgtgtgtgcacgtgcgcatgcctgtgccctcacaattgtgtgtggtcatttgtttgttataggaaccttgctgactactccaaaa

SEQ ID NO: 11524 - DNA, 201 bp, Homo sapiens
tgcatgaataccctccacataggctgagctgtcccttcagaaacaaaccagtttctgagaaaagaacagcttgagaactgtgaacagtagtttttaatctratggtttctctaagaacggtaatgggaagcatgaaattctgagacttgggtgaattgcagaagagttggcatctcctctgccctctacagtgggaccctt

SEQ ID NO: 11525 - DNA, 201 bp, Homo sapiens
ggttttttctatcctgtcactctcatccaagtacctacctccaaaaaactgtggtgacaactctgagccatgtagtattgtattatgtattattatattgwttttctttctatttatttttcactccagtaactggatggataaactcatactacaaccaacatagacatttgtcattctctctctctctctctctctctc

SEQ ID NO: 11526 - DNA, 201 bp, Homo sapiens
tctactgcgtttaggacgctatgacatatcatcttcaagtagcctcaagtttttcctgtatttagtgattgttaattggatacctggtgtatacctgacakacaccaggtgctggggatttattcatgatgaaaaccagtcatagcctcgatcctccataagctaagagcatggggcatccactcacgttctgtagtcttt

SEQ ID NO: 11527 - DNA, 201 bp, Homo sapiens
cagggtggacctggtctacccagaatgtgaactgaagagcgaaagaaaggaaaaaaatgcaggtaagcaaagagaaatcaaggaaaaacatggacaatgarcactgcggggatcttgatggtttttatgtcctaatttcagccctcaaggcttttgatccatgccatgcctctttataaatgtaataacttcccctttttt

SEQ ID NO: 11528 - DNA, 201 bp, Homo sapiens
attgtttttctttctatttatttttcactccagtaactggatggataaactcatactacaaccaacatagacatttgtcattctctctctctctctctctytctctctctctcgtgtgtgtgtgtgtgtgtgtgtgtgtgtgtgtgtgatatatattccttagaaattttggaggaagaatggctatggtttgagaccctt

SEQ ID NO: 11529 - DNA, 201 bp, Homo sapiens
gggcagcagctgtttctgtaactaacagaaaacagaaactctaggagttccagggtggacctggtctacccagaatgtgaactgaagagcgaaagaaaggraaaaaatgcaggtaagcaaagagaaatcaaggaaaaacatggacaatgaacactgcggggatcttgatggtttttatgtcctaatttcagccctcaaggc

SEQ ID NO: 11530 - DNA, 201 bp, Homo sapiens
tctatttatttttcactccagtaactggatggataaactcatactacaaccaacatagacatttgtcattctctctctctctctctctctctctctctctcgtgtgtgtgtgtgtgtgtgtgtgtgtgtgtgtgtgatatatattccttagaaattttggaggaagaatggctatggtttgagacccttgatctagtacca

SEQ ID NO: 11531 - DNA, 201 bp, Homo sapiens
gtagtttctgatggttatttttatttctgtggggtcggtggtagcacctccctcatcatttctcattttgtatatttggatcttctctcctttcatctttrttagtcgagctagtggcatgtctgtcttactaatgttttcaaaaaacaaactcctggactcattgatcttttgaatagtttttcatgtcgtgattttctt

SEQ ID NO: 11532 - DNA, 201 bp, Homo sapiens
ctcgtgggggtcagtctgcagtgagggacagcggaaagtatggaccgcgtagaggcactgaggcttcacttacccaggggcctggcacatacatttttttyctcaaaatatgttatttggcttcagtgagaaatctcctaaaattttaagatgtactctacacatgaagtgcacttatgaacaattaaattgccttgaaaa

SEQ ID NO: 11533 - DNA, 201 bp, Homo sapiens
cacatatccatagggcaacaaggggaggttctcagcaggcttatttatagcaagtgactcagctcttctaactcattgctggttgatatcagatttcccaytccaggaaactagaggtagaattgaggggcagcagctgtttctgtaactaacagaaaacagaaactctaggagttccagggtggacctggtctacccaga

SEQ ID NO: 11534 - DNA, 201 bp, Homo sapiens
tgtttattgctgattcaatatcagagcttgttattgttctgttcagggaatcaatttctttctggttcattcttaggagggtgtatgtgtccacaaatttrtccatctcttctaggatttctagtttgtatacatagaggtgttcatagtagtttctgatggttatttttatttctgtggggtcggtggtagcacctccct

SEQ ID NO: 11535 - DNA, 201 bp, Homo sapiens
tgactttccctttacttgccagacctatgtactggctcaaagaagattaagaagacccatatatgtaggcgttttattttattttattttaatttcatgcrgagctcctaaccccttcttctccacaagggagaactgcagtggagagtatataaggtgttctttagtgtatcctctgctttagggaccaagtggatgcaa

SEQ ID NO: 11536 - DNA, 201 bp, Homo sapiens
caaaagttgtgtaagcgatagatgtggcaagaaggagtcacagtgaaagaagtacaaatgtcatgtgctgacagcaagtcctagactggcgagggggatayttgaagcatgtcactgtggaaatcccagaaataactggatgcagaggtcctggtatggcataggtggaggttatcaagtcttagataatttgggtcatag

SEQ ID NO: 11537 - DNA, 201 bp, Homo sapiens
gacttttcctctgctgacttgtccgatttctcatcccaccccaacccttacattgtggtccagttacactaagctactgtggaatgatggaatataagtctttttttttgagatggagtctcggtctgatgcccaggctggagtgcagtggcgcgatctcggctcactgcaacctccgcctcccaggttcaagccattctc

SEQ ID NO: 11538 - DNA, 201 bp, Homo sapiens
tatcttattgaactgttatgtggtaatttgctaatttaattggagtaagagcttagcatagagaaattggtgtttacttttagatgaatatgtttctgttygagttctctatcatcacctgtttgctatagagatcagacactttgctcagcctatgctatgcccctgccaagaatcatactatttattgtgtttttatag

SEQ ID NO: 11539 - DNA, 201 bp, Homo sapiens
ctcttacttgtatatctggtagaatttggctgtgaatccatctgttcctgggcttttattggttggtagactgtttattgctgattcaatatcagagcttsttattgttctgttcagggaatcaatttctttctggttcattcttaggagggtgtatgtgtccacaaatttgtccatctcttctaggatttctagtttgta

SEQ ID NO: 11540 - DNA, 201 bp, Homo sapiens
atggctaatttttttgtatttttgatagagatggggtttctccatcttggtcaggctgatcttgaacttccaacctcaggtgatctgcaggcctcagccayccaaaacggtgggattacaggcatgcgccaccacacctggctaatttttttgtatatttggtagagacgtggtttctccatgttggtgaggctgatcttg

SEQ ID NO: 11541 - DNA, 201 bp, Homo sapiens
ttgtggtccagttacactaagctactgtggaatgatggaatataagtctttttttttgagatggagtctcggtctgatgcccaggctggagtgcagtggcrcgatctcggctcactgcaacctccgcctcccaggttcaagccattctcctgcctcagcctcccaagtagctgggactataggcacgtgccaccacgtcca

SEQ ID NO: 11542 - DNA, 201 bp, Homo sapiens
ccacatgcagctgccttgcttaacgctgtatttctttatgtggaggctcaccagctctaggctccctcaccccacatggctggaaagttctcctggaagcrgaaacccacttacttgtactagagatggcagaattctgaaaataagagaatgggggtgaggatttaagaaaagcagcaaaaacttcgataagcctcaagg

SEQ ID NO: 11543 - DNA, 201 bp, Homo sapiens
attctgttgatagttttgttctttcttttcttttttgctgtgaagaagctcttaagtttgattagattcaatttgtcaatgtttgctttggttgcaatagsttttggtgtctttgtcatgcaatctttgcctgttcctatgtctaggatggtattgcctaggttgtcttccaagatttctatagtttcgagttgttcattt

SEQ ID NO: 11544 - DNA, 201 bp, Homo sapiens
attgatcagcctatctctgttctctccaagctgtctattggaagcctctttccaaatgtgtttgtgatgctgattaacagttttcccaccccactaccaaygaactaggggattagctggcttataattgtatctcacttctcccagagcatcaggagtgattaatgtgccacatgcagctgccttgcttaacgctgtatt

SEQ ID NO: 11545 - DNA, 201 bp, Homo sapiens
atgaacattcacatgcatgtgtctttatggtagaatgatttgtattcctccagtaatgggattcccagtaatgggattgctgggtggaatggtagttctgkttttagctccttgaggatgagggaaatgctagttctgtttttagctctttgaggaatcgccatactgctttccacaacggttgaactagtttacactccc

SEQ ID NO: 11546 - DNA, 201 bp, Homo sapiens
gtttctccatcttggtcaggctgatcttgaacttccaacctcaggtgatctgcaggcctcagccacccaaaacggtgggattacaggcatgcgccaccacrcctggctaatttttttgtatatttggtagagacgtggtttctccatgttggtgaggctgatcttgaacttccgacctcaggtgatctgccggctggcctc

SEQ ID NO: 11547 - DNA, 201 bp, Homo sapiens
attttcctgttgaattgatcagcctatctctgttctctccaagctgtctattggaagcctctttccaaatgtgtttgtgatgctgattaacagttttcccrccccactaccaacgaactaggggattagctggcttataattgtatctcacttctcccagagcatcaggagtgattaatgtgccacatgcagctgccttgc

SEQ ID NO: 11548 - DNA, 201 bp, Homo sapiens
atgaccatactccatttattttcatctttcttgctgggatctcagcaaccaagtgctctgattaatacgtgtgtgtgtgtgtgtgtgtgtgtgcacgtgcrcatgcctgtgccctcacaattgtgtgtggtcatttgtttgttataggaaccttgctgactactccaaaattcagccaggaacagcagcttaagttgacga

SEQ ID NO: 11549 - DNA, 201 bp, Homo sapiens
acttatgtcatgggggtttgttgtacagattatttcatcacccagatattaagccaagtaggcaattgttgtttcttctgttcctctccctcatcccccastccaccttcaattacaccccagaatctattattcccttgttggtgttcatgagtgctcatcatttagctcccacttatgaatgagaacatggggtatttg

SEQ ID NO: 11550 - DNA, 201 bp, Homo sapiens
ggtagagacgtggtttctccatgttggtgaggctgatcttgaacttccgacctcaggtgatctgccggctggcctcagcatcccaaaatgctgggattacmggcatgagccaccgcgcctggcccagggcaacattcctttactaacttcccttccatggtggtcctgcagctcaccagcagcacaggcatgcatacccac

SEQ ID NO: 11551 - DNA, 201 bp, Homo sapiens
ttttattgctgtatcaaaatgaaaggatctaataactcaacatttcttatgaccaaagtgttaaaacattttcacattttccccttcaagcaggctggatyaaatgaaactatacatacagatgggcttttaatttctctctactcctagcaaatacaacgttatgggatactagaaatatgtaggctcaagaatcacact

SEQ ID NO: 11552 - DNA, 201 bp, Homo sapiens
ccttggaatgatctggtccagtgaggggaaggtgtgtgtgtacctagatcaacagcagataggctctgtcctccaggtgttccgttttttttttttttttycagagacggagtcttgctctgtcacccaggctggagtgcagtggcgtgatctcggctcactgcaagctctgcctcctgggttcacccgccattctcttgc

SEQ ID NO: 11553 - DNA, 201 bp, Homo sapiens
gaatatcaaagaaatgatgtacccttctcatcacctcatatcaaggagtacaagatatcaatatgtcttattactgatgatgttaactttgatcacttggkgaagggggcgtctcccaggtttctccattgcaaagttactttttttcttgtcccgtactctatttgttggaagctcccagatttctccattgaaaagtta

SEQ ID NO: 11554 - DNA, 201 bp, Homo sapiens
catagagaatactggcactggttcaagactcctcatttctatctcacgaatgcaattgtccctcagtatccatgagagattggttccaggaccccgtgaayaccaaaatctgcagatgctcaagtccttatgtaaatggtgtactatttgcataaaacctatacacattacattaaattatctgtagattacttagaatac

SEQ ID NO: 11555 - DNA, 201 bp, Homo sapiens
catattcatggagataaagtgacacagaaggagccattgctttcatacctatgagagcctgtgcatttcttatggatgatttaatatgtctcatcatcagyatgctttaattgcatgtaactgcaattttaaaaagatttgttctatttttcctataaaattatatatataattttaattttataattcagtgaatatata

SEQ ID NO: 11556 - DNA, 201 bp, Homo sapiens
tatgctatataaagtagtatgctccattttaactatctattttccataactgattcctttttcttcatggtatgtaccatccctttaaaaattacttataygtttgtttattgttcatactctatttccactagaatttaagctccatgaggacatcaattttgtattttattttctttatttgtttcattgacagtggcc

SEQ ID NO: 11557 - DNA, 201 bp, Homo sapiens
ggcatgttctcggctcactgcaacctctgcctctctctggttcaagcaattctcctgcctcaatctcttgagtagctgggattgcaggtgcctgccaccasgcccggctaatttttttgtatttttagtagagacagggtttcaccatgttggccaggctagtcttgaactcctgacctcaggtgatctgcccaccttggc

SEQ ID NO: 11558 - DNA, 201 bp, Homo sapiens
gagctggtaagaggatcagctctctgctctgtcacgtcctacccctgctctgtgaccttcaacaggtcgtttaaatgtagtttctccaactgtaaagtggraacaataataagagtacctggctcatgggactatttgatgatactgagataacgcatgcaaaatatgaacacagagcctgacacatagcaaacatggcat

SEQ ID NO: 11559 - DNA, 201 bp, Homo sapiens
cctcagcctcccgagtagctgggactacaggcacctgccaccatgcccggctattttttttttgtatttttagtagagatggggtttcacagtgttagccrggatggtcttgatctcctgacctcatgatccggccacctcggcctcccaaagcgctgggattacaggtgtgagccactgcacctggcctattaatttatt

SEQ ID NO: 11560 - DNA, 201 bp, Homo sapiens
aagcaattctcctgcctcagcctcccaagtagtggggattacaggcacctgccaccatgtccggctaatttttgtgtttttagtagagatgggatttcacygtgttggccaggctggtcacaaactcctgacctcaggtgatccacctgcctcagccccccaaagtgctgggattacaggcatgagccaccgtgcccagcc

SEQ ID NO: 11561 - DNA, 201 bp, Homo sapiens
aatttttctattaactgccacagggatcccacataaaatgtatagtggaaagaagatagaaaaaggatgagtaatgcacaatttctaagggttttagaaahgttctggggaaaaattcattctcttctgatctaaaagtataatccccttctaagtctctcctctaaggctaagccacccttgaacatgaagcagttctta

SEQ ID NO: 11562 - DNA, 201 bp, Homo sapiens
cacatccctagcaaggcaaccctgtcatttcttactctgttgaggttctatgttagtgctcagtggtagttgtgtgtttagcgtatgtcacctggaaccckcctctgaaattcataactttgtccttggctcaaaattaaagtgctgaaagaaacttatccctttcattctttcctaagctctaatgtaagctttgttcac

SEQ ID NO: 11563 - DNA, 201 bp, Homo sapiens
atttttctattaactgccacagggatcccacataaaatgtatagtggaaagaagatagaaaaaggatgagtaatgcacaatttctaagggttttagaaatsttctggggaaaaattcattctcttctgatctaaaagtataatccccttctaagtctctcctctaaggctaagccacccttgaacatgaagcagttcttaa

SEQ ID NO: 11564 - DNA, 201 bp, Homo sapiens
caagtggcattttcagatttttgacctttcttatatttcttaatgtttttctacttctgggacttcagaagttcagcagatcagaggggatttctcaactyggtatgagatgcagcacaatggaaagcaatttcttagatttcccttatgggaataaggtgcgtgaattatatgaggtcagaccctagagagggcttttct

SEQ ID NO: 11565 - DNA, 201 bp, Homo sapiens
aagataaggagatgagttcagtattaaatagctggttaggaagcaagctactattaaaactcagttatttttgactttagtctttttattcaaggcacacrattatttaaaaagcacatattcttaatggctgcataatggcttgtatggatttactttatttttatcttaaaaacattaaccccctgcttatcatttagg

SEQ ID NO: 11566 - DNA, 201 bp, Homo sapiens
agggtatcatctcatttaattctcacagcagcccattcaggcagttacttttttttaatccccacttttcagatgagacagttgaggctcaggaagataargagatgagttcagtattaaatagctggttaggaagcaagctactattaaaactcagttatttttgactttagtctttttattcaaggcacacgattattt

SEQ ID NO: 11567 - DNA, 201 bp, Homo sapiens
cctccccaccatttgtgtttatgagatcttctttactacccaatctaattaagacttaaccagggtgcttccagatgtgacaaataagagattttcctgtkgaattgatcagcctatctctgttctctccaagctgtctattggaagcctctttccaaatgtgtttgtgatgctgattaacagttttcccaccccactacc

SEQ ID NO: 11568 - DNA, 201 bp, Homo sapiens
ctatttatttttcactccagtaactggatggataaactcatactacaaccaacatagacatttgtcattctctctctctctctctctctctctctctctcgtgtgtgtgtgtgtgtgtgtgtgtgtgtgtgtgtgatatatattccttagaaattttggaggaagaatggctatggtttgagacccttgatctagtaccat

SEQ ID NO: 11569 - DNA, 201 bp, Homo sapiens
tatgatatataatatagcatataaaagtactatttttaaaataatttttgaagtaaatatggtttagaaagtatgtgtttctttaatgtaaatatatcttktgagtgaggaaaagaattgtcagtttgcatagatcagaacatctgaagtttgttgaaaacagaatgaaaacatataaacctgagatacttatgaaagtta

SEQ ID NO: 11570 - DNA, 201 bp, Homo sapiens
ggatgaatagatcaaatacagaggacttccagggtagtgaaactattctatatgatactaaaatggtggacacattgttattatacattagtccagacttgtagaatatataagtctaggatgaaccctaacgtaaactgcggatttgggcgataataataggtcagtgttggttcatcagttgcaacaagtgtaccactc

SEQ ID NO: 11571 - DNA, 201 bp, Homo sapiens
aggattgtcctgagccaaccaggacatacatggtcactccactcatattctgttgctcccaatctatagaaaaaagtgtgactttatttatacatttttatttttttgctagaagcaagaactaaaaacctatccaatgcttttgagtagtttcatgacatttactatgtagtaccgttaggcatctcctgaaccaaatag

SEQ ID NO: 11572 - DNA, 201 bp, Homo sapiens
ccagctacatgggaggctgaggcaggaggattgcttgctcccaggaggtcaagactgcagtgagccaagatcatgccactgtactccagcctgagcaacakaatgatactgtcccaaggaaaaaaaaatataatacactatacaattttcaattattttcaaattatacaacaggaagttattatgaaagctcctggtagt

SEQ ID NO: 11573 - DNA, 201 bp, Homo sapiens
tcctgaatcagttagttttcatctagaatctctcttacctaatggcaagatctagctctttatcagcaaacctccttgaaaagccaatgtaacatgagcatttttttttgttttatgcaattacatatctttgaataatcagcctgccacaaacaagattggggttggcatctcatttacttccaaagccatcaaagatct

SEQ ID NO: 11574 - DNA, 201 bp, Homo sapiens
gcatgatagaacttatagctgactggaaaatgtcatacttaaagacatttcagttatttttattataaagactattgagtcaactctccccaaacagaaamacacacacacacacacacacacacacacataattagcccatggaagatttgtttctggaaatgttatgcttgacatacttaaatttcaggttactatttt

SEQ ID NO: 11575 - DNA, 201 bp, Homo sapiens
ccatgctcagtaggtgcagccttaccgtctggccacagttaacctaaagtggcagaagaagcctttacttctgagcagcctttttttgtttgtttgtttgttttttttttttttttgagacggagtctcaatctgtcgctcaggctggagtgcagtggcaggatctcagctcactgtaagctccacctcttgggttcacgc

SEQ ID NO: 11576 - DNA, 201 bp, Homo sapiens
acatggtgaaaccccgtctctaataaaaatataaactattagccaggtgtggtggcaggctacttgggaggctgaggcagagaattgcttgagcccgagaratggaggttgcagtgagccgagatcgcgccattgcactccagcctgggcaatgagagtgaaacttggtctccaaaaaagaaaaaaaatagctaagtgtgg

SEQ ID NO: 11577 - DNA, 201 bp, Homo sapiens
caggatctcagctcactgtaagctccacctcttgggttcacgctattctcctgtctcagcctcctgagtagctgggactacagatgcccgccacaacaccyggctaattttttgtattttttagtagagacggggtttctccatgttagccaggatggtcttgatctcctgacctcgtgatccacccacctcagcctccca

SEQ ID NO: 11578 - DNA, 201 bp, Homo sapiens
tgaatagattactttcctctttgtaggaaattgtggctttgctctaattcatgtccttaataagatttgggcataggatttttttcctcttttatttaaamataattttagaattgcagaacaattacaaagataatacagagagttcccatatcctattcacccagctttacctaatgttaacatcttacattaccatgg

SEQ ID NO: 11579 - DNA, 201 bp, Homo sapiens
ataggtttattgtaagcagggcatatatttttcatatttggctttataatattttagctgaatcaccttttaccgtgtttctccttggatgggaggtaacyttttttttaatattcctcatgatttctgccctatacttagccattggtaactttttaaatttttattttactgtaaaattcagcactgataaatcactgg

SEQ ID NO: 11580 - DNA, 201 bp, Homo sapiens
ctggtctgatgcatggtctgggggcaaagaatccctctctctgtaaccatctgggtgtgagtctgcatttctacctctcaatttctattcctgagtatattctctctctctctctctctctctgtcatttgtattctccttccactctatacctatagctactttgcaaggaaaagatggtgacttgtgacaaaaggaaat

SEQ ID NO: 11581 - DNA, 201 bp, Homo sapiens
taaagggttttacatgagtgctgaagtttaaggcagctaaatcccagaagacaaatactaccaataattgaattacaaagccattatcatgtgctgaacasagcaattttatgactctattgtgacaggatgaaacctgttagaatatttatgcacttgggatagcttctgcttcaccatcccagggaacaaaccagctct

SEQ ID NO: 11582 - DNA, 201 bp, Homo sapiens
tagtgataggcagattgtgtaaggcttctccatccaccatagggaatgtggcttttattctgagggagatttcaaacagggagtgacatgaaagactcagtttttttttttttttgagactgagtctcactctgtcgccaggctggatgccaggctgcagtgatgtgatctcagccccctgcaacctccttgtcccgggtt

SEQ ID NO: 11583 - DNA, 201 bp, Homo sapiens
agaggttgggcagcttgcccaaggtcactcagcaggtcattggcaaaacctgcattggcgacttcagagcccattactgtgacaagccctggcactgactstttttggaagggtgacccctgatcgcttttcttgtaaggtaggcgtataaacactaaatgttctgaagtgagagaattacaaaggcctcgaggtgaagga

SEQ ID NO: 11584 - DNA, 201 bp, Homo sapiens
agcacttatgcttcctatctatctgtcatgttgtatctttaagtacattttcaaattgaaggttaaatagggttgtcatagtagataactaccgagatgcrgaatgctaaattcaagacagaagagtagagaagacccaaaaactgaaggttgacttatttgactgagcacaaaagaaaggcagagtagatagaggaaaat

SEQ ID NO: 11585 - DNA, 201 bp, Homo sapiens
acacctcatggagatagagcttttctttcccatgtgtttactctcttctaggtcactggctatcttttctttcatttcactcaccaattgtgtgtgtacgtgtgtgtgtgtgtgtgtgtgtgtactttagaatagatacctggctgtattggacaatcaattctagatccagtgttgcttctgacagcgtctctttctata

SEQ ID NO: 11586 - DNA, 201 bp, Homo sapiens
tgagtaagcaaagacatacagagtgataaaatggactctggagactcaggaggaggagagtggaagggggatgtgggataaaaaactacgtattgggtacratgtacactacccaggtgatgggtgcactaaaatctcagaattcaccgctatataattcatccatgcaaccaaaaatcacttttaccccaaaagctattt

SEQ ID NO: 11587 - DNA, 201 bp, Homo sapiens
gcgccgccgcctgctccacggcgcccagtcccatcgaccacccaagggctgaggagtgcgggtgcacggcgcgggactggcaggcagctccacatgcagcsccggtgcgggatccactgggtgaagccagctgggctcctgagtctggtggggacttgcagaacctttatgtctagctaagggattgtaaatacaccaatt

SEQ ID NO: 11588 - DNA, 201 bp, Homo sapiens
aatgaatggctagaaatcagatttgccagcatgagagggcaccacttccaccgccataatttggagagatgagaattaaggtcccacgctagtcattcgtrtaagtcctgaggtaactgattaatattgtgctggctaatgagctaattggataattcgataataggactgtagcttggaataggacttaaaaagttatct

SEQ ID NO: 11589 - DNA, 201 bp, Homo sapiens
gggaggctgaggcaggagaatggcgtgaacccgggaggcggagcttgccgtgagccgagatcacgccactgtgctgcagcctgggtgacagagcgagactmcgtctcaaaataaataaataaataaataaaataaattcagctggttaggcaaattacccaacccacagcaattgggaaactctagcaaccaaaagggaaa

SEQ ID NO: 11590 - DNA, 201 bp, Homo sapiens
tcctcccgactccctgtgtcccttgcactgagttattaagcagatgattctttttaataacatttgttattaaatgattatataatgattctgtttaataygatttgcgctcttcaatcaaatagaggagtcagataaagaatattgaaatggaattaagagaggagaaagtgagagaacattgtaagtctgatatatcta

SEQ ID NO: 11591 - DNA, 201 bp, Homo sapiens
gaggctgaggcaggagaatggcgtgaacccgggaggcggagcttgccgtgagccgagatcacgccactgtgctgcagcctgggtgacagagcgagactccrtctcaaaataaataaataaataaataaaataaattcagctggttaggcaaattacccaacccacagcaattgggaaactctagcaaccaaaagggaaaca

SEQ ID NO: 11592 - DNA, 201 bp, Homo sapiens
tggccctctccatcttcagcaatggcaggggctgtccttctcacactttaaatctctctttttcttctgcctttaggagcacatgagattatatcaggtcrgcctggataatccaggataatctcctgattttaaggacaactgatcagtaaccacacttacatctacaaagtcccttttgtcatgtcatctaacctattc

SEQ ID NO: 11593 - DNA, 201 bp, Homo sapiens
tgctcagtaggtgcagccttaccgtctggccacagttaacctaaagtggcagaagaagcctttacttctgagcagcctttttttgtttgtttgtttgtttkttttttttttttgagacggagtctcaatctgtcgctcaggctggagtgcagtggcaggatctcagctcactgtaagctccacctcttgggttcacgctat

SEQ ID NO: 11594 - DNA, 201 bp, Homo sapiens
tggatgtgaatgttggtcttgagtcccagtgggtgggcggtggctccctgcagcttgtgctcactgtctgcatttctcttcattggggtcattgttctggygtaaagtggtgactgggggtaacagtggtgtctgtccaaagcttcttttttgggaagtgatgatataactttggaaggaggaggcatttaccacctactc

SEQ ID NO: 11595 - DNA, 201 bp, Homo sapiens
gctccttcacaccacccacagctctcctcacttggccctctccatcttcagcaatggcaggggctgtccttctcacactttaaatctctctttttcttctrcctttaggagcacatgagattatatcaggtcggcctggataatccaggataatctcctgattttaaggacaactgatcagtaaccacacttacatctaca

SEQ ID NO: 11596 - DNA, 201 bp, Homo sapiens
gaataaattaggattgtcctgagccaaccaggacatacatggtcactccactcatattctgttgctcccaatctatagaaaaaagtgtgactttatttatrcatttttatttttttgctagaagcaagaactaaaaacctatccaatgcttttgagtagtttcatgacatttactatgtagtaccgttaggcatctcctga

SEQ ID NO: 11597 - DNA, 201 bp, Homo sapiens
aagtgctttttttttttttttttttttttatttgagacgtagtctcactctgtcacccaggctggagtacagtggcgcgatctcggctcactgcaagctcygcctcccgggttcacgctattctgctgcctcagcctcccgagtagctgggactaccgcccgaccaatttatttgtacttttagtagagacagggttttac

SEQ ID NO: 11598 - DNA, 201 bp, Homo sapiens
ccatatattacctcacacaattctgtagatcagaagtccagatgagctcagcttgctcactgcttagggtttcacaaggctgatgttaaggtatcagctgkctggactcccatctgggggctctggggaggcattctcttctgtgctgattcaggttattggcacatccaggtcctaaggctgtaggtctgagttcactgt

SEQ ID NO: 11599 - DNA, 201 bp, Homo sapiens
aaccaggacatacatggtcactccactcatattctgttgctcccaatctatagaaaaaagtgtgactttatttatacatttttatttttttgctagaagcragaactaaaaacctatccaatgcttttgagtagtttcatgacatttactatgtagtaccgttaggcatctcctgaaccaaatagcgcagggaatttccat

SEQ ID NO: 11600 - DNA, 201 bp, Homo sapiens
gtagatctctaagaacttgctttataaatctgggtactcctgtgttgggtgtgtatatatttgggatagttaggtcttcttgttgaattgaaccctttacyatgatgtaatgcccttctttgtcttttttgatctttgttggtttaaaatctattttgtctgaaattaggatagcaatatctgcttttttctgtttcctat

SEQ ID NO: 11601 - DNA, 201 bp, Homo sapiens
ggtgattttttttttttaagctcatcagctatcattaatgttagtgtattttatgtgtggcccaagacaattcttcttcgtccaatgtggcctagggaagycaaaagattggatacctctggtagaccatattcccaatagtatgctcagattcacagcataatggtggaaccaggggaattgcagttcattctccaggta

SEQ ID NO: 11602 - DNA, 201 bp, Homo sapiens
gtatatatttgggatagttaggtcttcttgttgaattgaaccctttaccatgatgtaatgcccttctttgtcttttttgatctttgttggtttaaaatctrttttgtctgaaattaggatagcaatatctgcttttttctgtttcctatttgattttcctccatttctttattttgagcctataggtgtcattacatgtga

SEQ ID NO: 11603 - DNA, 201 bp, Homo sapiens
caggaatccttacatgttcctggacaggggtcccagtaaacatcctcttcccaggcagaccatattccagaggaagagagagaaaaagagtacaactcacrggacagaaaatgggaaatcagtagtattagatgttttccatttaagagtcactgggatctgaagggggaaaaaccccatatggtttaaaatcagaagacc

SEQ ID NO: 11604 - DNA, 201 bp, Homo sapiens
tatgagacttttttggtgattttttttttttaagctcatcagctatcattaatgttagtgtattttatgtgtggcccaagacaattcttcttcgtccaatrtggcctagggaagccaaaagattggatacctctggtagaccatattcccaatagtatgctcagattcacagcataatggtggaaccaggggaattgcagt

SEQ ID NO: 11605 - DNA, 201 bp, Homo sapiens
ggatgctggaatgcattctctgtaagcacttttttttttttttttgaaatggagtcatgctctgttgcccaagctggagtacagtggtacgatctcagctyactgcaacctctgcctcttgggttcaagtgattctcttgcctcagtgtcctgagtagctgagatgacaggtgtctaccaccacacccagataatttttgt

SEQ ID NO: 11606 - DNA, 201 bp, Homo sapiens
atattccagaggaagagagagaaaaagagtacaactcacaggacagaaaatgggaaatcagtagtattagatgttttccatttaagagtcactgggatctraagggggaaaaaccccatatggtttaaaatcagaagacctgggtgaaagtacctcacactaatattgtgtgaggtttggcaaatattttacctttcttca

SEQ ID NO: 11607 - DNA, 201 bp, Homo sapiens
gcccgaacctttacagaaaaaagtttgccaaatgttgacctagaccaagcttgcccaactcacagtccagaatggctttgaatgcatcccaacacaaatcwataaactttcttaaaacattatgagacttttttggtgattttttttttttaagctcatcagctatcattaatgttagtgtattttatgtgtggcccaaga

SEQ ID NO: 11608 - DNA, 201 bp, Homo sapiens
ggagtgccagacagtgggcgcaggccagtgagtgcgcgcaccgtgcgcgagccgaagcagggcgaggcattgcctcacctgggaagtgcaaggggtcaggragttccctttccgagtcaaagaaaggggtgacggacgcacctggaaaatcgggtcactcccacccgaatattgcgcttttcagaccggcttaaaacacgg

SEQ ID NO: 11609 - DNA, 201 bp, Homo sapiens
atagaagtatttaagtggtctgtactgtagaagacattcaaatgcacaatatgcaggccaggcatggtggttcatgccaataattccatcactatgggagrccaaggttggtgggtcacttgagaccaggatttcaaggccagcatgggcaatgtggcaaactccatctctacagaaaaatacaaaaattagctgggtgtg

SEQ ID NO: 11610 - DNA, 201 bp, Homo sapiens
aaggtcaacttacctgtgcaagatcagaaacatcatcgttttcttttccctggtgagtcagagaagcttaagtcaaagaaatgagtagagctggcaatagmtatacaaccaagaccattggttaatagatttgaaggccgggcgtggtggctcacgcctgtaatcctaccactctgggaggctgaggcgggtggatcacga

SEQ ID NO: 11611 - DNA, 201 bp, Homo sapiens
aaggaacaactggtaccagccgctgcaaaatcatgccaaaatgtaaagaccatcgagactaggaagaaactgcatcaactaacgagcaaaatcaccagctracatcataatgacaggatcaaattcacacataacaatattaactttaaatgtaaatggactaaatgctccaattaaaagacacagactggcaagttggat

SEQ ID NO: 11612 - DNA, 201 bp, Homo sapiens
caggatttcaaggccagcatgggcaatgtggcaaactccatctctacagaaaaatacaaaaattagctgggtgtggtggtgcacacctgtggtcccagctrcatgggaggctgaggcaggaggattgcttgctcccaggaggtcaagactgcagtgagccaagatcatgccactgtactccagcctgagcaacagaatgat

SEQ ID NO: 11613 - DNA, 201 bp, Homo sapiens
gataccaaagccgggcagagacacaaccaaaaaagataattttagaccaatatccttgatgaacattgatgcaaaaatcctcaataaaatactggcaaacygaatccagcagcacatcaaaaagcttatccaccatgatcaagtgggcttcatccctgggatgcaaggctggttcaatatacgcaaatcaataaatgtaat

SEQ ID NO: 11614 - DNA, 201 bp, Homo sapiens
gtgagccaagatcatgccactgtactccagcctgagcaacagaatgatactgtcccaaggaaaaaaaaatataatacactatacaattttcaattattttsaaattatacaacaggaagttattatgaaagctcctggtagttaatttttcagtaaaattaagtataaaactttttcagccttgcctattctgttcatctg

SEQ ID NO: 11615 - DNA, 201 bp, Homo sapiens
ttagcatgattgatgatagtgttttgaagtcaatcacagacttgggagagatgggaacttcacagccatcttcccactggctggatgtgtgtattggttgrtttggtttggtttggtttggggaggacctacaagcacagaagggactcaacttgtattttcttttctctgtgagtggcaggtggctcttatttttcactt

SEQ ID NO: 11616 - DNA, 201 bp, Homo sapiens
tcccccatatctgctaatttgcctggttctcagaggtggtttactgctttacttcatgtggcattaagtacttttttttttttttatttttttgagatggrgtcttgctctgtcacccaggctggagtgcagtggcacgatctcggctcactgcaagctctgcctcccagggtcacgccattctcctgcctgagactcccg

SEQ ID NO: 11617 - DNA, 201 bp, Homo sapiens
tgactctgggctcttttctgatacttggagcatggccaactgtattgactgactagccttcagctccctctctacccctccccaccatttgtgtttatgakatcttctttactacccaatctaattaagacttaaccagggtgcttccagatgtgacaaataagagattttcctgttgaattgatcagcctatctctgttc

SEQ ID NO: 11618 - DNA, 201 bp, Homo sapiens
tgcctgacacatagaaaatcatcaataagtgttatctgttattagttggatttggagtaaaacagtatttcataaaatcaagaacatactgggaataagartgcctacgtagaaaccttgtctctttgcactaattgctgtgtgaccctagttacttaatatcatctgtgaagtggggagaatgatagtacttatgtgata

SEQ ID NO: 11619 - DNA, 201 bp, Homo sapiens
aacacaatctctgtattacctccaaagtgatcattctgaatgagctatactctttctcttcccctgcttaaaaatcttgattctgtatgtatgcccctgartaaataggttctgttgctttagtcaaaatcgctttacctggcaagtaagtctctttcaacttggctgtagactgctttgcctaactttagccaaactgag

SEQ ID NO: 11620 - DNA, 201 bp, Homo sapiens
ttttagtatttgctaatattgtgatagaatagtaaaatctaatttttttttttttgagacagagtctcgctctgtcacccaaactagagtgcagtggcgcratctctgcttacttcaagctctacctcctggggtcatgccattctcctgcctcagcctcccgagtagctgggactacaggtgcccgccaccatgcctggc

SEQ ID NO: 11621 - DNA, 201 bp, Homo sapiens
ggattgtaaaatattaagatgtcaggccaaggagaagtgaatagaaaaggtatatcttttttttaatgtaggacacacattaaggataagctgaaagataraggatcctaaaaggcaacagcaaattgatcatggacaataaattctaaaaacctttgtcatttctggaccaatgcacataaacagttttgggggccaggt

SEQ ID NO: 11622 - DNA, 201 bp, Homo sapiens
aggtttggaaattcctttctttttcagatgctatccccacaaattggccccatagtctcctggaatttaacctgtaaaataggctgattgttaaatggtcrtgtgtcacttttgttcacatgagtcatctgtagagtagatgtttagagattctgatatgaaaaatgtccttgcagaaatcaactgtaatgggaaatggtt

SEQ ID NO: 11623 - DNA, 201 bp, Homo sapiens
agcataatgtcgccaagttccatctatgttctaacatgtttcagaattttcttcctttgtaaggctaaatattatatgtatgtaggcatatatatatatayacacacacacatatatatatgtttgtgtacacatatatgtatatgtatgataacattttgtccattcatcagtgagtagttgagttgctattgttggcta

SEQ ID NO: 11624 - DNA, 201 bp, Homo sapiens
cttctgttttataggggacaattattttgtctcaccaaagacaaccccaagacggacttaaagtaaaagagatgaagccacaaaagaataaaaataaaatytaaaattgaaaccctcagtctagtgttctttccatgtctggtagtattttgtttttgtttgtttgtttgttttgagacgaagtcacgctctgttgcccag

SEQ ID NO: 11625 - DNA, 201 bp, Homo sapiens
gaggcctttctattctccctacacacacacacacacacacacacacacacacacacacgcacacgtgcgcgcgcgcacacacacacacacatgcacacatrccccactaacttcctacatgctgacggattttcccaatttgctgttcattaagttacatcaactgtggaaataaaatatgtcacatgatcaaatgttatt

SEQ ID NO: 11626 - DNA, 201 bp, Homo sapiens
ttttcatgttctattttttttacgccagaaaattcagtaatctctcttctctctcccctcttttctcttcccatacatatacatacacaaacacatctgcrgtctttatacataccgtggcttaaacagagatttgtcttctgagactgagaaatagtatagttcttgtccatttaaaaccttttcctggccaggcgtggc

SEQ ID NO: 11627 - DNA, 201 bp, Homo sapiens
agggataattatccatttttgaaggctatgaagtattgaataaaaatgtttagtttgtcatttgagctgaactccactctttctcctatttttttccactygcatttttttcctgtgaatcttctacaaaagaaaaaagaaattacctttcctcatgcactgaaatgatctgcagtaaccttctaataatttttgcatgca

SEQ ID NO: 11628 - DNA, 201 bp, Homo sapiens
ctccatgtcaaaaaaaaaaaaaaagaaaaggctgcatggttgtcatgggttgcaggaagggagggatgaatagatcaaatacagaggacttccagggtagygaaactattctatatgatactaaaatggtggacacattgttattatacattagtccagacttgtagaatatataagtctaggatgaaccctaacgtaaac

SEQ ID NO: 11629 - DNA, 201 bp, Homo sapiens
tctgcggtctttatacataccgtggcttaaacagagatttgtcttctgagactgagaaatagtatagttcttgtccatttaaaaccttttcctggccaggygtggcggctcatgccggtaatcccagcactttgggaggctgaggcgggcggatcacgaggtcagcagatggagaccatcctggctacggtgaaaccacat

SEQ ID NO: 11630 - DNA, 201 bp, Homo sapiens
tattgcatgtaatatatgccaggcattgtgctaggtgcagataatacatgaattatgagaagtacatagcccctgccctcagagagcttataggctaatarggaaaaaagaataaaaaataaatatagttaaatgtatgtgttgttataaaatctgagctaaactaaatgttttagatcaaaacaaatgtttctcattcct

SEQ ID NO: 11631 - DNA, 201 bp, Homo sapiens
cagcctggggacagagcgagactccatgtcaaaaaaaaaaaaaaagaaaaggctgcatggttgtcatgggttgcaggaagggagggatgaatagatcaaayacagaggacttccagggtagtgaaactattctatatgatactaaaatggtggacacattgttattatacattagtccagacttgtagaatatataagtct

SEQ ID NO: 11632 - DNA, 201 bp, Homo sapiens
ggtaatcccagcactttgggaggctgaggcgggcggatcacgaggtcagcagatggagaccatcctggctacggtgaaaccacatctctactaaaaatacaaaaaaaaaaaaaaaaattagccgggtatggtggtgggcacctatagtcccagatacttgggaggctgaggcaggagagtggcgtgaacccaggaggcaga

SEQ ID NO: 11633 - DNA, 201 bp, Homo sapiens
gaggcaggagaatagcttgaacctgggaggcggaggtggcagtgacttgagatcatgccattgcactccagtctgggcaaaaaaagcaaaactctatctcaaaaaaaaaaaaaaagggctttccaaatgcctcttttttttctgtgattttattgagtgagttttagacactataaaaaatacagttaaaatttttcattt

SEQ ID NO: 11634 - DNA, 201 bp, Homo sapiens
gttggtatttcttttgtttttgttttgagacaatgtctcactctgtagcctcagctggagtgcagtggtgtgatcatagctcactgcagccttcaattccygggctgaagcaatcctcccaccccagcctccaatgtaagtagggatgacaggcacatgacaccgcccactgtcccctctgccagctaatttaaaaacatt

SEQ ID NO: 11635 - DNA, 201 bp, Homo sapiens
tacagttatctatttcatccctcgttcttccagcttctcctactcccttcatttctttgtagaaatatttctgtagcattgatccaagatggaaaaataakcctgacagagtcaaggtccctgtttggccaagcattctttgcctgcccctgtccttcccttgtcaaaaattagctaattttcaagttttgcaaatttgta

SEQ ID NO: 11636 - DNA, 201 bp, Homo sapiens
tgaggcaggagagtggcgtgaacccaggaggcagagcttgcagtgagccgagatctcaccactgcactccagcctgggcaacagagcaagactcggtctcaaaaaaaaaaaaaaaaacaaacaaaaaacaacaaaaataacccaccttttcccctactgtggacattcacatcagctctagttaatattctgtatagtttt

SEQ ID NO: 11637 - DNA, 201 bp, Homo sapiens
tgctctgaactctgcttcataggattatttattcaattcctattgagatgtggtctcaagcttttacttttagcatgatttcccagttaaaaaaaaaaaawtgtatgtatataaatgtaaaaccacaaatggtgccagtaactgacattccactttggttcatagaggtacaaacagggccaatgttagggctctctacat

SEQ ID NO: 11638 - DNA, 201 bp, Homo sapiens
gtgaacccaggaggcagagcttgcagtgagccgagatctcaccactgcactccagcctgggcaacagagcaagactcggtctcaaaaaaaaaaaaaaaaamaaacaaaaaacaacaaaaataacccaccttttcccctactgtggacattcacatcagctctagttaatattctgtatagttttaggtgaatacagttgag

SEQ ID NO: 11639 - DNA, 201 bp, Homo sapiens
aactgtcagtgcaggagtatgttttaagctaattatttgtcttactgctaataattaccacttattgaaaggctattttctaagcactttatatatgcttytttattaggaggttatatttatttatttatttttgagatggagtcttgctccatcgtgtaggctggagtagagtggcgtgatctccgctcactgcaacct

SEQ ID NO: 11640 - DNA, 201 bp, Homo sapiens
gccccatttcttagaattgtggaagtaattggtctgaagaattccttgggttcacaaactactaatggccacattttagccttgtaaagataagaaaaaargtatgacccatgacagtcttatcttctaagtggttgtgtcttagtcatcaagggttttaacttaaaaacatgtttagtaaaatgggattggaataataat

SEQ ID NO: 11641 - DNA, 201 bp, Homo sapiens
gatccaaaaaggagagaaaccagaacatccagttctatttgatctgaggctgactagaggaaattgaaaactaattttttctttcccctttcttcaagttccccccccccaattttctccttaaaaactttattatatttctaaaaaaaatcatacatacagttgaaaattagaaaatacagagaagcaagaagaaaaaat

SEQ ID NO: 11642 - DNA, 201 bp, Homo sapiens
gtaatatagagtagttaagagcacagggttggaggtcagatatgcgtttagtttctgggcaattattcaaacattcccagtcttgttatctcggtggttcttttttttttcttttttaatttattttgttctgtttaggaataaatatataatatttattctagatctctagagttaacgcaaataatgcaagtgttctcg

SEQ ID NO: 11643 - DNA, 201 bp, Homo sapiens
agttgttaaacaatatattaatattaattagtgataatacattaatactgtctcatgtgactgatgtgtgctttcactggtactctgttggtgtttatgawtctgttggtaagacttgttgtaattgatatttctactctgtttcagaagccatcaactctcatttatgaagaccattatattttcaaggtcacagtctct

SEQ ID NO: 11644 - DNA, 201 bp, Homo sapiens
atgatctgcttgacacctttccccatgagaacatccccagggtataactgtcaacgtccccaaaccctgtgctttcctaagcttcctggaagcattcaagyctgtgaatattactgctgttatggaaaaattggcttttgtttttccccatgagatatttttcctgtcttactagcatgtatgaccagcatttgcagtgca

SEQ ID NO: 11645 - DNA, 201 bp, Homo sapiens
tagtctctataccaaagtaataacatttttcattttctgataactctctaatccatctaaaattactgaatgtcaggcatgattttgccatcttgatttcyattttttaacccaaaatactgtaaagatgtgaattattgctaagttcaaatagtgatattgtttcaaaataatattcattaacatattttaaatgtcatt

SEQ ID NO: 11646 - DNA, 201 bp, Homo sapiens
acaagtctatgaggccaatatgatcttttcccagatacacgcaaggattaggagatggttacccagataagtgtctgcaaactgcacagcaacctgttggaaaaaaaaaaaaaagttaagttgaactaagtagccactctttttcctaaggtttggatttgaatccagggaaactattaatatgtcagtaaggagtaagga

SEQ ID NO: 11647 - DNA, 201 bp, Homo sapiens
cacgatctcggctcactgcaagctctgcctcccagggtcacgccattctcctgcctgagactcccgagtagctgggactacaggcgcccaccaacacgccyggctaatttttttgtatttttagtagagacatggtttcacagtcttagccaggatggtcttgatctcctgacctcgggatccgcccgcctcggcctccca

SEQ ID NO: 11648 - DNA, 201 bp, Homo sapiens
ataataatcaaatctctggcattctaatgtacttcgtaattcaattttatttcatttagtagaacgtctactctcaagtctgtgagtagattactgagggtttttttttttaatctacttttgtttttaacatccaaaagcataaaataaagtagggtctctactctctggcttgtggatcataagcctgcttgatggtag

SEQ ID NO: 11649 - DNA, 201 bp, Homo sapiens
cagcatttacaggaaaaatgatctttctgtgtgaagttatgagctgagacaagaactagtactccattttgcatgcgttaaagttctactgaaaagctcascaggagttgaagcaataattggcttgagtttgcatttgttcatgccataataacctcctcaccatacacagcacccagctacgaaacccttgtctcctta

SEQ ID NO: 11650 - DNA, 201 bp, Homo sapiens
gcgcccaccaccacgcctggctaatttttttgtatttttagtagagacgcggtttcaccacgttagccaggatggtctcgatctcctgacctcgtgatccrcccgccttggcctcccaaagtgctgggattacaggtgtgagcgactgcgcccggccaagaccaccttgtatatttacaacatagtatattttcagaatga

SEQ ID NO: 11651 - DNA, 201 bp, Homo sapiens
cctggcaaacagagattctgattgctttaggttgggagtgagaatcagaaattcacactttaacaagatcttcccatgtaagaaataaaaggatcatctcrtaaaaaaaagcggtacaggtggactgtcaggggtgggcactattgtgttttgcttcgttttgttttgtttcatgttcagttattctgacttatgggattt

SEQ ID NO: 11652 - DNA, 201 bp, Homo sapiens
cggtttcaccacgttagccaggatggtctcgatctcctgacctcgtgatccacccgccttggcctcccaaagtgctgggattacaggtgtgagcgactgcrcccggccaagaccaccttgtatatttacaacatagtatattttcagaatgattacagaactgtgagtatgaatgtgtaatcatcttatccttataaaaat

SEQ ID NO: 11653 - DNA, 201 bp, Homo sapiens
acatgatctcagctcactgcaacctctgcctcccaggttcaagtgattctcctgcctcagcctcccaggtagttgggactacaggcgcgtgccacgacacytggctaatttttgtatttgtagtagagacgggcttttgccatgttggccaggctggtcttgaacccctgaccgcaggtgatccgcccgcctctgccttcc

SEQ ID NO: 11654 - DNA, 201 bp, Homo sapiens
gcctttcatctggctctgaaaacaagactggtgttgaagaaggaaagtcttgaagccacttctgccagagtgggcagcctcagtgaaggcgtagcagggcrtgtgtgagaaggtgacagggccagcccaccaggaccgaaagttacctttggagagagtaaattgaaagaatctcagtaagctgaataagagaggcttggt

SEQ ID NO: 11655 - DNA, 201 bp, Homo sapiens
cgtctggccacagttaacctaaagtggcagaagaagcctttacttctgagcagcctttttttgtttgtttgtttgttttttttttttttttgagacggagkctcaatctgtcgctcaggctggagtgcagtggcaggatctcagctcactgtaagctccacctcttgggttcacgctattctcctgtctcagcctcctgag

SEQ ID NO: 11656 - DNA, 201 bp, Homo sapiens
aactgtcgtctatactagctgggcacggtggctcacgcctgtaatcccagcactttgggaggccaaggagggcagatcacaaggtcaggagatcgagaccrtcctggctaacacagtgaaaccacatctctagtaaaaatacaaaaaaattagccgggcgtggtggcgggcgcctgtagtcccagctactcgggaggctga

SEQ ID NO: 11657 - DNA, 201 bp, Homo sapiens
agcttccattttataagataaacttcctgtttacttgcaaactcatgttttaatatcagaactgatgatgtattcaacctcatgctgctggcctgaagagmtggagggataattatccatttttgaaggctatgaagtattgaataaaaatgtttagtttgtcatttgagctgaactccactctttctcctatttttttcc

SEQ ID NO: 11658 - DNA, 201 bp, Homo sapiens
tactcgggaggctgaggcaggagaatggcgtgaacctgggaggcggagctttgcagtgagccgagatcccaccactgcactccagcctgggagacagagcragactccgtctcaaaaaaaaaaaaaaaaaaaaatggctatactaatagttcctgcccaataaattcgtgggtttacatgagttaatatatgcaaatccct

SEQ ID NO: 11659 - DNA, 201 bp, Homo sapiens
cattattattgtatgtgtatctttgttcagtagataataatttgatatgttcagtggaggaaaactgtgctattgaaaaacaactgtcaaattactagggmtgtttttgccttctgtgagcgacggttatattaacttatatcattggtaatgatctgtctggatactacacatttcttcagtgactgatgggatgagacc

SEQ ID NO: 11660 - DNA, 201 bp, Homo sapiens
aataaaaagcttccattttataagataaacttcctgtttacttgcaaactcatgttttaatatcagaactgatgatgtattcaacctcatgctgctggccygaagagctggagggataattatccatttttgaaggctatgaagtattgaataaaaatgtttagtttgtcatttgagctgaactccactctttctcctatt

SEQ ID NO: 11661 - DNA, 201 bp, Homo sapiens
gaattgtctgttcatatcctttgcccactttttgatggggttgtttgttttcttcttgtaagtttgtttgagttctttgtagattctggatattagccctytgtcagatgagtagattgcaaaaattttcttccattctgtaggttgcctgttcactctgatggtagtttcttttgctgtgcagaagctcgttagtttaat

SEQ ID NO: 11662 - DNA, 201 bp, Homo sapiens
ctttgtagattctggatattagccctttgtcagatgagtagattgcaaaaattttcttccattctgtaggttgcctgttcactctgatggtagtttctttkgctgtgcagaagctcgttagtttaattagatcccatttgtcagttttggcttttgttgccattgcttttggtgttttagacatgaagtgcttgcccatgc

SEQ ID NO: 11663 - DNA, 201 bp, Homo sapiens
aataggaaatcctttccccatttcttgtttttgtcaggtttgtcaaagatcagatggttgtggatgtgtggcattatttctgagggctctgttctgttccrttgatctatatctctgttttggtaccagtaccatgctgttttggttactgtagctttgtagtatagtttgaagtcaggtagtgtgatgcctccagctttg

SEQ ID NO: 11664 - DNA, 201 bp, Homo sapiens
tcattcataggtgggaattgaacaatgagaacacttggacacaggaaggggaacatcacacaccagggcctgtcgtgggtggggggagggaggaaggatarcattaggaggtatacctaatgtaaatgacaagttaataggtgcagcacaccaacatgacacatgtatacatatgtaacaaacctgcacgttgtgcacatg

SEQ ID NO: 11665 - DNA, 201 bp, Homo sapiens
aatgaatcccactgaagatgcatccagcttgggccttgcaggggacacattcccccgagcagagcttcagccatagctctcttcagctgtggctgaatccragaaagttctgtcatccacaccagcccagagaggggacagaagtcattcattccagcccagagaagggacaaaaatgctcattagaataaaagaggatcc

SEQ ID NO: 11666 - DNA, 201 bp, Homo sapiens
gctactgcttcaaagggtgcaagtcatacgccttggtggcttccatgtagtgttaagcctgcagattcacagagtgtatgagtaaaggaggcttggcctcygtctagattttggaggatgtgtgagaaagcctaggtgcccaggtagaagcctgctgcaggggtgtaaccctcacagagaacctctactagggcagcacag

SEQ ID NO: 11667 - DNA, 201 bp, Homo sapiens
actcctagctactcaggaggctgaggagggaggatctcttgagtccaggagttccaagttatagtgagctataagattgcatcactgctctgcagcctgcrttgcagagcaagaccctgtctctagaaaaatatttttaaaaatacatttccattatttctcatcagaaagaattattattttctcaaagagggagaagtg

SEQ ID NO: 11668 - DNA, 201 bp, Homo sapiens
tctcaaccctctaattccaactaatgttaagcagtcttaccttagccagtggtagtgagagataatatatttttcatccaccagccttcttatcagctgakatatgaatgctgtccttcctctgttacacatctgaaaaaataacaattttaaagccaccaacgttttagaacttggaagtaagtggctagattcctttgc

SEQ ID NO: 11669 - DNA, 201 bp, Homo sapiens
ccccaaacagaaacacacacacacacacacacacacacacacataattagcccatggaagatttgtttctggaaatgttatgcttgacatacttaaatttsaggttactattttttattcaagcatattcaaccccggtgcattggttcagtcctataatcccagcagtttgagtgaccgagatggcaggatcacttgagg

SEQ ID NO: 11670 - DNA, 201 bp, Homo sapiens
aggattatcttgatctcctgacctcgtgatctgcccgactcggcctcccaaagtgctgggattacggtgctcgccaccacacccagctatatatatatatwttttttgtatttttagtagagacggggtttcatcgtgttagccagatggtctcgatcttctgacctcgtgatccacctgcctcggcctcccaaagtgctg

SEQ ID NO: 11671 - DNA, 201 bp, Homo sapiens
gtgctgggattacaggcatgagccaccacgcccagcctggtttaaattttcaattccttttttttttttttctttttgagacagtctctctctctctgtcrcccagactggagtgcagtggtgcaatcttggctcactgcagcctctgcctcctgggttcaagtgattctcctgcctcagcctcttgagtagctgggattg

SEQ ID NO: 11672 - DNA, 201 bp, Homo sapiens
tacagtatttcctcacttacatgggagtcacattctgtaaacattagtatatgtaaaaaatgcaaaaaacctagaaatttttatatgtaaaattacatatwaattttacacaaaattacacaaaaacccagagggacatataaaaattttgtgtgatgacatcaacttcctgtcttagtccattcaggctgctataaaata

SEQ ID NO: 11673 - DNA, 201 bp, Homo sapiens
tgtgttgaattgtttcttcagtctccttattttgtcagataccatccaggccatgcctcactgtcttgtttggagattcacaaaacacttggaaagaattaaaaaaaaaaaagagagagagagaatttttctgtgtgtccccatgagaggcagcaggaggagagtcagttgagtgaattgctcacctgtcagtagttctta

SEQ ID NO: 11674 - DNA, 201 bp, Homo sapiens
tataaattttacacaaaattacacaaaaacccagagggacatataaaaattttgtgtgatgacatcaacttcctgtcttagtccattcaggctgctataaaatatatatatatatatatatatatatatatactaggtagtttataaaaaacaaatttttttctcagttttggaggctgggaagtttaagatcaaggcact

SEQ ID NO: 11675 - DNA, 201 bp, Homo sapiens
caccctaatcactgccgtttgtgcctaccagtccttggctcttctgaacacaaaggcagaaggtcctgcactttaccagcttacagccaaacaaagcaggwcaaccctataacccaaactccccagaaaccacacatttttcattactatgcatgtaccatgagatttctcatctctaaaggtttgtttcccttttggggg

SEQ ID NO: 11676 - DNA, 201 bp, Homo sapiens
ggagaaatgagaatgacataaacttaaatcttcatagcaagaagtgaggacttaatgggtgattctttggcactgctgtttaccacactatttagttaacrtgcatttcattgttccccatcaggtaatattcacataggtgaccagtgactcataaaatagtcaagctttgaacaatacctctttggaatatattaactg

SEQ ID NO: 11677 - DNA, 201 bp, Homo sapiens
ataaattttacacaaaattacacaaaaacccagagggacatataaaaattttgtgtgatgacatcaacttcctgtcttagtccattcaggctgctataaaatatatatatatatatatatatatatatatactaggtagtttataaaaaacaaatttttttctcagttttggaggctgggaagtttaagatcaaggcactg

SEQ ID NO: 11678 - DNA, 201 bp, Homo sapiens
tggaggcaggataatcacttgaacccaggaggcggaggttgcagtgagctgagatcgcaccactgctctccagcctggcgacagagccagactccgtctcaaaaaaaaaaaagtcttgcttacttcccattgctttgatgataaagagctaaattctcatcttgacctatagctccagcataacttgtgtctgcccattcc

SEQ ID NO: 11679 - DNA, 201 bp, Homo sapiens
gaaatctaaccattatgtgtaagcatcagctattaaactgaatccgctaatacctgagattcaggaatacaactaacaaatatatctgttttgactgaatstcccccttaggctaatttttaaagttaagggttaaggtttttggctgattagaccttttctcacaggatcatgttttagtgggccagattccttgaaaca

SEQ ID NO: 11680 - DNA, 201 bp, Homo sapiens
taaattttacacaaaattacacaaaaacccagagggacatataaaaattttgtgtgatgacatcaacttcctgtcttagtccattcaggctgctataaaatatatatatatatatatatatatatatatactaggtagtttataaaaaacaaatttttttctcagttttggaggctgggaagtttaagatcaaggcactgg

SEQ ID NO: 11681 - DNA, 201 bp, Homo sapiens
gaggttgcggtgagatgagattgtgccactgcactctggcatggacaatagagcgagattccatctcaaaaaataaataaataaaataaaataaaatacarcaaaacaaaacagaatgccagatgatcctttcctggaaactttatgaaatccaaatatgtagccaccatcatgatagagggactgcttatgaaataccaa

SEQ ID NO: 11682 - DNA, 201 bp, Homo sapiens
aattttacacaaaattacacaaaaacccagagggacatataaaaattttgtgtgatgacatcaacttcctgtcttagtccattcaggctgctataaaatatatatatatatatatatatatatatatactaggtagtttataaaaaacaaatttttttctcagttttggaggctgggaagtttaagatcaaggcactggca

SEQ ID NO: 11683 - DNA, 201 bp, Homo sapiens
tcacatcttaaaccttagcatgtatgctacccacctagggaccttgttaagatctgcattgtaattcagtaggggcctgagagtctgcatttcttttttctttttttttttttttgagacagagtctcgctctgtcacgcaggctggagtgcagtggcactatctcggctcactgcaagctccgcctcccaggttcaggcc

SEQ ID NO: 11684 - DNA, 201 bp, Homo sapiens
gaactaattgttgctaatctatgagcagggattaaaagacagagtataatattgaatattaaatgtgcattatctcatttagtcctcaccactaccacctccccgccccctgcccagggttgggggtgggcagtgtctactttcctctttatccccattttaccagtttaaaacaaagagaatttaagcagtttgcctgag

SEQ ID NO: 11685 - DNA, 201 bp, Homo sapiens
tgacaagtttataacctcccacaaggagtcccccagaagacagtggtaccccagctgagaaacagtggcaaggtgagggaattttgtagtatctggacttaaaaaaaaaaaaaaaagccctgtctgctcttggtccgctcataaaaatttactaccttgccagaaacagagacctgaagtcatgtatggtatgacctggcc

SEQ ID NO: 11686 - DNA, 201 bp, Homo sapiens
cacatcttaaaccttagcatgtatgctacccacctagggaccttgttaagatctgcattgtaattcagtaggggcctgagagtctgcatttcttttttctttttttttttttttgagacagagtctcgctctgtcacgcaggctggagtgcagtggcactatctcggctcactgcaagctccgcctcccaggttcaggcca

SEQ ID NO: 11687 - DNA, 201 bp, Homo sapiens
atgtaatgggaagtcacattcttgatgagaagcacagcacctgattcactatgctttcctccaaagagaaccatgcgtaatgttacatgtgaagtttttctgtgttttttttttttgtttttttttttttttgaagcttcactggaccaaatgctctaagttgccttagaaaaacactggcacagaatataagtctccaca

SEQ ID NO: 11688 - DNA, 201 bp, Homo sapiens
tccttgaagcccaacatgcaaattacataggccccactattattaacatgccctgctaaatatcctctaggaatataaatatcaaggaaattatcttttctttttttttttttttgagaccgagttttgctcttgttgcccaggctggagtgcagtggtgcaatcttggctcacaacaacctctgcctcccgggttcaaac

SEQ ID NO: 11689 - DNA, 201 bp, Homo sapiens
tacccacctagggaccttgttaagatctgcattgtaattcagtaggggcctgagagtctgcatttcttttttctttttttttttttttgagacagagtctygctctgtcacgcaggctggagtgcagtggcactatctcggctcactgcaagctccgcctcccaggttcaggccattctcctgcctcagcctcctgagtag

SEQ ID NO: 11690 - DNA, 201 bp, Homo sapiens
actcattccattctcagaaattaaagtgcttccaaatgtaagttaggcaatagagctgaggccccaaaggacactgggatgaactgctctggactgaaacmctccatcttcttccatcagagctgctttcacttggtgactttgctcttcaaatacgatgtctcttattttaataaaaacatttttctgctctggagctga

SEQ ID NO: 11691 - DNA, 201 bp, Homo sapiens
tgtaatgggaagtcacattcttgatgagaagcacagcacctgattcactatgctttcctccaaagagaaccatgcgtaatgttacatgtgaagtttttctgtgttttttttttttgtttttttttttttttgaagcttcactggaccaaatgctctaagttgccttagaaaaacactggcacagaatataagtctccacat

SEQ ID NO: 11692 - DNA, 201 bp, Homo sapiens
atggaacatggtagactctccataaataattgttgaataaataaatgaactatcacactacattgctacaccaagttttttttaactttaattttaggttgggggatacatgtgaagctttgttgcataggtaaacttatgtcatgggggtttgttgtacagattatttcatcacccagatattaagccaagtaggcaatt

SEQ ID NO: 11693 - DNA, 201 bp, Homo sapiens
ttctccattttttaggtctgtgatggggtcaaataaagaaccagaccttgtgcatcttgaggccagaactgtggatggtcgtaagtaaatcaactttgcckcaatactcatagtaatattagttctatgactctgtcatgaactgagtctgtgtaataatctcatggtgtatgcagagtaatagtggatgtgtggtttctg

SEQ ID NO: 11694 - DNA, 201 bp, Homo sapiens
cacacagaatcacacaatgtgcagcctcacaggcgtcagttgtttcctgcagcacaggagggctataaacaagaaaagagaagggaaacccagttcacacwattccccatttctctcaaccacctttccaggaagattcatatggaatgatgcagcgccacctactgtcccttttgtgcattgcaggcacctgtctgatgg

SEQ ID NO: 11695 - DNA, 201 bp, Homo sapiens
agagagaagttacaggaccattccattttatatatacatatatatatgtatatatatgtatatctgatatatatttatattttatatatttatatatatatttttatatatatatatacacatatacccctgatagtcaagcaccttaattaccaactagataaattggggcatgatttattcatatttttaaagacgcat

SEQ ID NO: 11696 - DNA, 201 bp, Homo sapiens
ataatttccatgtaatttcatggttttgagcaatttttttagtcttctacatttattgcactgtggcctgagagtgtgtttggtatgaatttggttctttyccatttgccagggattgttttatgtccagttatgtggtcgattttagagttatgcaccatatgacgatgagaagaatgtatattctgttgtttttgggtg

SEQ ID NO: 11697 - DNA, 201 bp, Homo sapiens
attgatataacagacgttttcttggacattagaaagaatttcattaattgaagagtaattatcactctgtattactttgaacttggcctcatcgcaaacayggtatacagatttttcagtgaggttattattctagtatgaaaatgaacaaaaatgtaactagaaactggaatcggtactattttgttgtgtcattcattt

SEQ ID NO: 11698 - DNA, 201 bp, Homo sapiens
ccttttccccttatctgcaccacagaggcctttctattctccctacacacacacacacacacacacacacacacacacacacgcacacgtgcgcgcgcgcrcacacacacacacatgcacacatgccccactaacttcctacatgctgacggattttcccaatttgctgttcattaagttacatcaactgtggaaataaaa

SEQ ID NO: 11699 - DNA, 201 bp, Homo sapiens
gagagaagttacaggaccattccattttatatatacatatatatatgtatatatatgtatatctgatatatatttatattttatatatttatatatatatttttatatatatatatacacatatacccctgatagtcaagcaccttaattaccaactagataaattggggcatgatttattcatatttttaaagacgcatt

SEQ ID NO: 11700 - DNA, 201 bp, Homo sapiens
atagggctgctgtgtggtatgttgggggtccgctccagttcctagtcaacttgggttttccagtacctggagggatcaacagcgaaggctgcaaaaccacaaacatggctgcctgcccctccctctgggagctctgtcccaggaaggtatggacccattgccagctcaaatgcacctgtaggaggtagctggagatccggg

SEQ ID NO: 11701 - DNA, 201 bp, Homo sapiens
ctaagtataaccttgtttgaaactcatgagcaactgcttttcttagtggaaactgtcagattgatggcttcctcagttcctcatcttccttcattggctaygcgagtttattccacacagcacttataactctaccatggaggtctccagcatttctgctgtcagccttggggtttatttttgtatatctacttcttttag

SEQ ID NO: 11702 - DNA, 201 bp, Homo sapiens
agtggagtactggtataaattgaaactgcataacaggcagaggttagaacagtttggagggatcagaagactggaagatgtgggaaagtttggaacttccyagagattggtgaatggttttgaccaaaatgctgattagtgatataaacagtgaagtccaggctgaggtggtttcagatagagatgaggaatttgttggga

SEQ ID NO: 11703 - DNA, 201 bp, Homo sapiens
caccatgcccggctaatttttgtatgtttagtagagaccaggttttaccatgtttgtcaggctggtcttgaactcctgacctcaggtgatctgcccacctmagcctcccaaagtgctgggattacaggcatgagtcaccacacctggtcatctccaatttatttttaccttttaaacaaaacctaaaaatcacaggtcatg

SEQ ID NO: 11704 - DNA, 201 bp, Homo sapiens
tagttgccaattgataagcacttaattgctctttccctcagctcatctgggaaggataagtactcagccctcattgagaataggtagcttttccaccctcrttggtcagcagatgacttactttctctgattacattttgcttaatttgattttaattttgagatcagaggtttgcaaatagacttttattctgtttatag

SEQ ID NO: 11705 - DNA, 201 bp, Homo sapiens
ctacccgggaggctgaggcaggagaatgacatgaacccaggaggcagagcttgcagtgagccaagattgcgccactgcactccagcctgggcgacggagckggactccgtctccgaaaaaaaaaagtggagagttgtggagaagtgtgcttggacaaagggcatgtgatctaatgaaaatcaactagggggaacttagcaa

SEQ ID NO: 11706 - DNA, 201 bp, Homo sapiens
tatgatttcagtagcaacttcataaacttaggcgttgccaattaatttatctctgtttcatctataagcacaaaacagctgtgtttttcaagagataagarttctgattgctggattctaagtgaggattgagggaagaaggatgatttttctaagtcattataaggaaagcagtggtaatgatgcaacccatcatttgtt

SEQ ID NO: 11707 - DNA, 201 bp, Homo sapiens
ccctcagctcatctgggaaggataagtactcagccctcattgagaataggtagcttttccaccctcattggtcagcagatgacttactttctctgattacrttttgcttaatttgattttaattttgagatcagaggtttgcaaatagacttttattctgtttatagagagaaatatttctgtttgaataaagtgggtagc

SEQ ID NO: 11708 - DNA, 201 bp, Homo sapiens
ttcaccatgttggtcaggctggtctcaaactcctgacttcaggtgatccacccgccttggcctcccaaagtgctaggaatacaggcatgagccactgcacycggcctctacttttcatttctatgaatttgactactttagatacctcatgtaagtagaatcatacagtgtttgtgtttgtgtaactggcttatttcactt

SEQ ID NO: 11709 - DNA, 201 bp, Homo sapiens
ctggcctttttaaaaatttttaatagagatggggtctggctttgttgcccaggctggtctcaaactcctggagtcaagcgatcctcccatctcagcctccyaaaatactgggattacaggtgtgagccactgcgctgagcaattcctttaaacttatatttgttctaccctctaatctgaagttctttgtccttaacagaa

SEQ ID NO: 11710 - DNA, 201 bp, Homo sapiens
tagtgtgcggtttgggaaggatggtcccaagggagatgtcccttgagcttcttttctgaggtttgaggagtaggtaatagccttgcagagaaggaagagayggacatctcatggaggaaaaaaatatgtgtgtgtgtatgtacatacacacatacatatacgtatataatatatagagaggaagagtgcaaaaggatggaa

SEQ ID NO: 11711 - DNA, 201 bp, Homo sapiens
tttcttttgtttttgttttgagacaatgtctcactctgtagcctcagctggagtgcagtggtgtgatcatagctcactgcagccttcaattcctgggctgragcaatcctcccaccccagcctccaatgtaagtagggatgacaggcacatgacaccgcccactgtcccctctgccagctaatttaaaaacattttttttg

SEQ ID NO: 11712 - DNA, 201 bp, Homo sapiens
gaggcagcaaaagtgagatggacccagtctgtgcagggtcgtggataccgcactaggctctggagagataagtactttttttttttttttttttttttttytttgagacggagtctcactccgtcacccaggctggagtgcagtggtgcgatctcggctcactgcaagctctacctcccaggttcatgcctctggagcagc

SEQ ID NO: 11713 - DNA, 201 bp, Homo sapiens
ctattctgaccaaagaagtcaagaccaggcagtgagttcctttacttaggagctggggacagaatataaataaatgggcctttgggtttgtgggaaaaggwgataataaagataaaggcaacaatgaatggcttggaatggaaaaagaaccatcagaattgatcattacaattaggagctatttctttgggaaaaaataag

SEQ ID NO: 11714 - DNA, 201 bp, Homo sapiens
gccgtcatgtctttcaagatcctgccgtgatgagtggaattgtacagggctagcagggggatcctggcatgatgagagagccttcctgggagcccagtacwgattggatcatgccatcttctcaaaagggcagcctggcagcagagcatctcagccaagagaaaagtaagctcctccaaccctggcatcttctgtccctgt

SEQ ID NO: 11715 - DNA, 201 bp, Homo sapiens
gtgcgatctcggctcactgcaagctctacctcccaggttcatgcctctggagcagctggggctacaggcaccccaccaccacgcccggctaattttttgtwtttttagtagagatggggtttcaccgtgttagccaggatggtctcaatctcctgaccttgtgatccgcccacctcagcctcccaaagtgctgggattaca

SEQ ID NO: 11716 - DNA, 201 bp, Homo sapiens
acccacctagggaccttgttaagatctgcattgtaattcagtaggggcctgagagtctgcatttcttttttctttttttttttttttgagacagagtctcsctctgtcacgcaggctggagtgcagtggcactatctcggctcactgcaagctccgcctcccaggttcaggccattctcctgcctcagcctcctgagtagc

SEQ ID NO: 11717 - DNA, 201 bp, Homo sapiens
gctatccccatcagcatccagatttcaccgggatggatgtagcttttcttaggagccaaacccatccaacttgactcaaataattaaagtgtttggattcsaggctgtccaggaaaacagctgaacttgtgctggggaaagagaggttggatcttataggaaggcatgtatttgatattgaagtagtctgttttcttttga

SEQ ID NO: 11718 - DNA, 201 bp, Homo sapiens
ttgattggaccaaatatttgaccttaaccttagaggaagataatttgtaatggaatgtttcgtgttctgattttaattttgtagactcatcttgggttaaktggttggataagcatgcctcatataatggaacttctttctaagcctggctttttggtactaactgtgttaaaagcaagttcatgtttgaagctgtttgct

SEQ ID NO: 11719 - DNA, 201 bp, Homo sapiens
tcataggtgaaaaggcctgctgtatgggatatatacaatataacagctgggagagaaaaatcttttcctggctgcttggggcagtatgtgtgtttggggartagaatactaagtgttgccttgattgatggcatctggcaccaggaaatgaacatgcttatagtggagaaaatgacaatgtggatgtatccaaaaaacaaa

SEQ ID NO: 11720 - DNA, 201 bp, Homo sapiens
atcagtgctttgtgtctagctaaaggtttgtaaacgcaccaatcagcactctgtaaaaacgcacccatcagcggtctgtgtctagctaaaggtttgtaaaygcaccaatcagcactctgtaaaaacgcacccatcagcggtctgtgtctagctaaaggtttgtaaatccaccaatcagcactctgtaaaaacacaccagtc

SEQ ID NO: 11721 - DNA, 201 bp, Homo sapiens
aggctcgataatgacaagtccttaaaatgcaatgactattattaaacatgcatttgttcattcttcacttattgatgtaacaaatacatatcatgtgttgmattatgctagtcattaggggaaaatgatgaccaagatagaaatcgtttcataaggtccagaaagctcccttatgtttgatccaggccatactgaaaacac

SEQ ID NO: 11722 - DNA, 201 bp, Homo sapiens
tgagccgggggagggtagtgagccagggagtgcttcaactagagcttgaatattttgtgcatggacagtggggagaatggggcgttctaggcagaagaacrgtgtgtgcaaagaggcccagggtcataaacctaccatgcattcaggttgctccagatcatttactatccaggagcgcagaacctagaactaggaataata

SEQ ID NO: 11723 - DNA, 201 bp, Homo sapiens
ttgaatctgaatctaaaagattttggggatattaaaattctactcttttctttaacagatatggagactgagtcccagagagtttagtgacttgtctgaarttacatgcagctggggaatgataagctaagatcattagaccttgaaagtgaaccttaaatgccacctcttccataaaatttaatcaatttccctgaggag

SEQ ID NO: 11724 - DNA, 201 bp, Homo sapiens
catcagcggtctgtgtctagctaaaggtttgtaaatccaccaatcagcactctgtaaaaacacaccagtcagcactctgtgtctagccaaaggtttgtaartgcaccaatcagcactctgtaaaaacggaccaatcagcactctgtaaaatggaccaatcagcaggacgtgggcagggccaaataagggaataaaagctgg

SEQ ID NO: 11725 - DNA, 201 bp, Homo sapiens
gagaagggccatacgttttccttcccatacattaaatcctctcatatcagaaccagctccacagtgtctaaatcaataataagattaaataatgaaggctygataatgacaagtccttaaaatgcaatgactattattaaacatgcatttgttcattcttcacttattgatgtaacaaatacatatcatgtgttgcattat

SEQ ID NO: 11726 - DNA, 201 bp, Homo sapiens
aagaagtggccgggtgtggtggctcactcctgtaatcacagcactttgggaggctgaggcagacgaatcacgaggtcaggagttcgagaccagcctgaccracatggtgaaaccctgtctctactaaaaatacaaaaattagccaggcgtggtggcatgcgcctgtggtcccagctactcgggaggctggggcaggagagt

SEQ ID NO: 11727 - DNA, 201 bp, Homo sapiens
cttgccactgctggaaaccagtcttcacttgggaacacttgtttgttctttatatcctgatccggatcccaacaccttgacattttgcatgacttccctayatccagaggtcgtctcaaatccagcttcaggacagtgagccatgcagcttggcttgcatgagaagggccatacgttttccttcccatacattaaatcctc

SEQ ID NO: 11728 - DNA, 201 bp, Homo sapiens
gagtttattgtgactatgggcaactgcccgggcaggagtgttggaaggagaaaggtatgggggtagaacgaattagataggcaaaaaatgttatctgcatyattttggtgctatttcactgaagacggaagattgatagcaagcatttggaggcaatattacagcaatttttgtgactcctcagtagggtaagcataatgc

SEQ ID NO: 11729 - DNA, 201 bp, Homo sapiens
gaaggagtctagagcccagaaaggggtgttagagcccttcacatgcatttgatatttgaaggttaaggtgtggatggtgttgcctagtagaaaagtctgtrgagagtgaaaaagtctcaacacaggactctgggaaacacatttacagggcaagcagaagaggaggtaataaaccaggtgaatagacccaaggtattgctc

SEQ ID NO: 11730 - DNA, 201 bp, Homo sapiens
aaagaaattgaaattgactttctgtttctggagtgggctcctggatgaatatgagtgttaatcaccaaactgtagagaatacaggagagggaaataacagrgtccttgagaacatttgattgctggaggcaaagaagtctagacccccccagaaggagtctagagcccagaaaggggtgttagagcccttcacatgcattt

SEQ ID NO: 11731 - DNA, 201 bp, Homo sapiens
cacttactagctgtgttaaccttgaacaagtgatgacatcttttttgacttcatcttcttcctctgtaaagtgggagaagattgcctactcctctctccakactagactaagaatctgtgaagaataacatgagatcatttggatagcttgaaatgctaaagcataaaagaattaaccattattatctcagataataatag

SEQ ID NO: 11732 - DNA, 201 bp, Homo sapiens
gagtgcagtggcactatctcggctcactgcaagctccgcctcccaggttcaggccattctcctgcctcagcctcctgagtagctgggactacaggcacccrctaccacgcccggctaattttttgtatttttagtagagacggggtttcaccgtgttagccaggatggtctcgatctcctcacctcgtgatccgcccgtct

SEQ ID NO: 11733 - DNA, 201 bp, Homo sapiens
attcaccaacaaggtaatctgtgggtgatataattatgggtgattttaattttctttgtcattattttatgtatttctgtattttcccaatgaatgtaccrtgcctttttttttctttattctaataaagctaacatatttctgttacatattttactactaggaaacctggttctatagagatttattcctaaaggaaac

SEQ ID NO: 11734 - DNA, 201 bp, Homo sapiens
tatttattggatgtggcatttattattggcccctgagttcaaagaagacaaattgacaggtcctcatccatgaagcagatcttttattgtttaaatattctgtgtgtgtgtgtgtgtgtgtgtgtgtgcatcgtaggagcccagtacattaaaatactaaaaaggaaacctacattctattgatttacctaacataggtgc

SEQ ID NO: 11735 - DNA, 201 bp, Homo sapiens
gaagaactcaacaaaactgatttgggaggcattcgtttgagagaactggtaggcagaagtagtatctgcatattaaggaagataattaaatctgttttaarcagctgtaagaataaagagatgcaattctctgcataatttaagacttttaaattaaatctgaggctagggacgaaaattaaaactttgatctgtatctca

SEQ ID NO: 11736 - DNA, 201 bp, Homo sapiens
tttttaaaattatctttctgtaagtaataaaaatgtaccaaagtcatcgtcattgcaagtaacctaggaaaactttggacatgtattaagtcctgcctgtmtaacttaaactcactatctattcctttacatcaatgcctgtttcccctgtgccagatctctgcttctcttctaaattctggcttaacatgagagattact

SEQ ID NO: 11737 - DNA, 201 bp, Homo sapiens
atttattggatgtggcatttattattggcccctgagttcaaagaagacaaattgacaggtcctcatccatgaagcagatcttttattgtttaaatattctgtgtgtgtgtgtgtgtgtgtgtgtgtgcatcgtaggagcccagtacattaaaatactaaaaaggaaacctacattctattgatttacctaacataggtgca

SEQ ID NO: 11738 - DNA, 201 bp, Homo sapiens
tcaagatggatgtcctctggaccactaatgagaacctaatgagcctatagactttcaacacaataactcagcttcccagagaaatccaatgcaagaacctraaggcacaggataaatggcaaaggccccaatcagtctgaagaactcaacaaaactgatttgggaggcattcgtttgagagaactggtaggcagaagtagt

SEQ ID NO: 11739 - DNA, 201 bp, Homo sapiens
attgaaaattgaaaatgctgcctaattgaggtgaattggaggatatattattttttgagagaattagagaaatatagtttgaaaaataggcatctaaaaagcaggaacgtatgtagaaaattaaagtaggtgactttggcaggggtaataaataagtcatagggccaaaatggtttaggaagagtttatgtaggccatggt

SEQ ID NO: 11740 - DNA, 201 bp, Homo sapiens
gggctgctgtgtggtatgttgggggtccgctccagttcctagtcaacttgggttttccagtacctggagggatcaacagcgaaggctgcaaaaccacaaacatggctgcctgcccctccctctgggagctctgtcccaggaaggtatggacccattgccagctcaaatgcacctgtaggaggtagctggagatccgggttg

SEQ ID NO: 11741 - DNA, 201 bp, Homo sapiens
tttattggatgtggcatttattattggcccctgagttcaaagaagacaaattgacaggtcctcatccatgaagcagatcttttattgtttaaatattctgtgtgtgtgtgtgtgtgtgtgtgtgtgcatcgtaggagcccagtacattaaaatactaaaaaggaaacctacattctattgatttacctaacataggtgcat

SEQ ID NO: 11742 - DNA, 201 bp, Homo sapiens
tcaaaatccatatgagtgcatttcttatttgaatttgatccttctgaatttactttgaaaatagtgcctgagtcttgccccatttctgatatcaattcttwataaaaacagggatcttctgatgtcaaaagatcatgcttctgatgcctgtaaagagcaagtcctctaggtaccaaagaaacctagaggtccctgctaggt

SEQ ID NO: 11743 - DNA, 201 bp, Homo sapiens
gtgaccgtgcaggtggacaacagtctgggttctgacagcgccgtcctgtacttacatgtaacttgtatgttattactgttgttggtttatgacctatcttraatattgtgtccttttcaaattgaattcacaattttatatctagaagaagtacactagttatcttttagcagaaggggaatggggaagaaatgattaaga

SEQ ID NO: 11744 - DNA, 201 bp, Homo sapiens
aactggatcagggacccgcttaaaaagcagtctggccatgtttttgtatagcagctgtcatcacatttttgtatagcagctgtgctgtgccaggggtctgmttcagcccctggtcacctatgtctctccaaagcccaaagggcaggacagctaagtcaccaaaacagcaaagttggtggcccacccctccctctgggagct

SEQ ID NO: 11745 - DNA, 201 bp, Homo sapiens
ttattggatgtggcatttattattggcccctgagttcaaagaagacaaattgacaggtcctcatccatgaagcagatcttttattgtttaaatattctgtgtgtgtgtgtgtgtgtgtgtgtgtgcatcgtaggagcccagtacattaaaatactaaaaaggaaacctacattctattgatttacctaacataggtgcatt

SEQ ID NO: 11746 - DNA, 201 bp, Homo sapiens
cttcccagagacatgagacacctgatcctgatacccagagaactgtcatcttttgaagcagcagatgtttatactatagcagagttcagaaagtttttccrtttctaagaacacaatatagcaagatctgaaacaagaactttcacttctgattagctccaacctttgtgcaaatgatagagaacacacttcagggacaga

SEQ ID NO: 11747 - DNA, 201 bp, Homo sapiens
agacgtgtgctttagaaaaccatctttgaataggcaaggggagaagactgacaatactccgtaattatgcatggatttggacattttagagtcatcttccrgagctcagttttgaaagtgaagaaacacctatacagcatgattcaaaccagacatcctgggaacactctgtcctagctgctttggtgaggaaattttggc

SEQ ID NO: 11748 - DNA, 201 bp, Homo sapiens
cctcttgcccaaatgtaactacagttttcagctgggtatgattctgaagtgtagcaggacacagatttttacatttgtagccctctttgtttgtttctgttttgtttgtttgtttggggggaaatcaacttctaaagaaatattatcagattttttcttacagtattagctaattctaaaatggatagactttacaaaatt

SEQ ID NO: 11749 - DNA, 201 bp, Homo sapiens
tgttggctaaacaggtgttaataaactcacaaggcttgggagataaaaattggactttgaggatattccaaagctaggactgatgaggtcatgtcccaggsagaaggaaagcacagggaagcagcacacatacagggcctttttcctccctgaggtatttcataatacccaagtaacacaggaaacatagaaagcactcaa

SEQ ID NO: 11750 - DNA, 201 bp, Homo sapiens
atttatgcatcattatggccttaaaaataaagaacaattaatccaagaaccaactggaagaggagtagagaagtccataaagttgagtctaagatgccggrcattttcaaaccatgcctgacttttagaaagctgattgaaggtgttttgcactgagacccaagcatgcagtgagaggtggcatctctgtgcttggagact

SEQ ID NO: 11751 - DNA, 201 bp, Homo sapiens
gggttatagagtaagcatggcttaatgttaactctcaaacacttttgcaaagtagttaatgcaatttacagttccatcagccatgtaggagagttccagtrgctccacatttcaccaagtcaatattttcatgtctttctattctttgctagtctaattagtatgtacagaatatcactgtgattttcgtttgtgttttcc

SEQ ID NO: 11752 - DNA, 201 bp, Homo sapiens
ctcttgcccaaatgtaactacagttttcagctgggtatgattctgaagtgtagcaggacacagatttttacatttgtagccctctttgtttgtttctgttttgtttgtttgtttggggggaaatcaacttctaaagaaatattatcagattttttcttacagtattagctaattctaaaatggatagactttacaaaattt

SEQ ID NO: 11753 - DNA, 201 bp, Homo sapiens
tatgaatatagattacttttataccaacaaaaatagcaatgataacaataaaaaggtatatatatatataaactcttatctttttattgttatatatatatgtgtgtgtgtgtgtgtgtgtgtgtgtgtgtgtgtgtatttatatatttgctatatttctccagaaattgtttaggcttatacagatgagtatgtatatgt

SEQ ID NO: 11754 - DNA, 201 bp, Homo sapiens
tctctcaaatttttattatttatgacattcttaaacctgctcggccaattgtcttttcctattaatttataattgattgctaatagtctatttttaaacatttgttttatttcaataggtttgtggtataagtggtttttgattacacaggtgaaatgtatagtgataaagtcagagattttagtgtccccatcatccaag

SEQ ID NO: 11755 - DNA, 201 bp, Homo sapiens
tcttgcccaaatgtaactacagttttcagctgggtatgattctgaagtgtagcaggacacagatttttacatttgtagccctctttgtttgtttctgttttgtttgtttgtttggggggaaatcaacttctaaagaaatattatcagattttttcttacagtattagctaattctaaaatggatagactttacaaaatttt

SEQ ID NO: 11756 - DNA, 201 bp, Homo sapiens
atgaatatagattacttttataccaacaaaaatagcaatgataacaataaaaaggtatatatatatataaactcttatctttttattgttatatatatatgtgtgtgtgtgtgtgtgtgtgtgtgtgtgtgtgtgtatttatatatttgctatatttctccagaaattgtttaggcttatacagatgagtatgtatatgta

SEQ ID NO: 11757 - DNA, 201 bp, Homo sapiens
taatttctcacaagtcggttaatccttctaagcttcagtttcctcaactgtaaaatgatgatattagtctgacttgcagaatttgtataaggaatagagayggtacacatggagcactcaccttgtatatggcaggtgttcagtaaatgttgggtattattattattactattgatccaatgaactgatgtttgtgtattt

SEQ ID NO: 11758 - DNA, 201 bp, Homo sapiens
ctctcaaatttttattatttatgacattcttaaacctgctcggccaattgtcttttcctattaatttataattgattgctaatagtctatttttaaacatttgttttatttcaataggtttgtggtataagtggtttttgattacacaggtgaaatgtatagtgataaagtcagagattttagtgtccccatcatccaagt

SEQ ID NO: 11759 - DNA, 201 bp, Homo sapiens
cttgcccaaatgtaactacagttttcagctgggtatgattctgaagtgtagcaggacacagatttttacatttgtagccctctttgtttgtttctgttttgtttgtttgtttggggggaaatcaacttctaaagaaatattatcagattttttcttacagtattagctaattctaaaatggatagactttacaaaattttt

SEQ ID NO: 11760 - DNA, 201 bp, Homo sapiens
tataccaacaaaaatagcaatgataacaataaaaaggtatatatatatataaactcttatctttttattgttatatatatatgtgtgtgtgtgtgtgtgtrtgtgtgtgtgtgtgtgtatttatatatttgctatatttctccagaaattgtttaggcttatacagatgagtatgtatatgtatagacacgtatacttaca

SEQ ID NO: 11761 - DNA, 201 bp, Homo sapiens
tctcaaatttttattatttatgacattcttaaacctgctcggccaattgtcttttcctattaatttataattgattgctaatagtctatttttaaacatttgttttatttcaataggtttgtggtataagtggtttttgattacacaggtgaaatgtatagtgataaagtcagagattttagtgtccccatcatccaagtc

SEQ ID NO: 11762 - DNA, 201 bp, Homo sapiens
aaaaaggcatatccttattgttttaatctgtatttatttaattaggagtgaggttgagaatttttatttgtttttcgtcactacctttatttcttcttgahtaaaaaatcaaatcttttgaatagaaaagatgaaacctttggcattgatacacacatttaaaaatatcagattgctacccccactttggccaaagttcca

SEQ ID NO: 11763 - DNA, 201 bp, Homo sapiens
ctcaaatttttattatttatgacattcttaaacctgctcggccaattgtcttttcctattaatttataattgattgctaatagtctatttttaaacatttgttttatttcaataggtttgtggtataagtggtttttgattacacaggtgaaatgtatagtgataaagtcagagattttagtgtccccatcatccaagtca

SEQ ID NO: 11764 - DNA, 201 bp, Homo sapiens
aattgataataagcagaagaaaagaaataataaaaaattagagcataaatcaacaagactgaaaatagataatcaacaaaaccaaaacctgtttttttggaaaaaaaaaaaaatcaagaaaatggataagcctctagccaggctaagaaaaaagagagggagcacaaaatactaatgtcagaaatgaaagaggagagagca

SEQ ID NO: 11765 - DNA, 201 bp, Homo sapiens
aaattgctctgactcttccaaaagtgtgattgttgtttcaaaggaagggaaaagcttgtgtgtatgttgagttagttgtacaaggtctcgttttttatttwtttttatttttgaaatatatgagaagggtaatagcagaaatatggttatacacatagagtaacaacggggctgttgaacgtggtaatcttagtgaatctg

SEQ ID NO: 11766 - DNA, 201 bp, Homo sapiens
tcaaatttttattatttatgacattcttaaacctgctcggccaattgtcttttcctattaatttataattgattgctaatagtctatttttaaacatttgttttatttcaataggtttgtggtataagtggtttttgattacacaggtgaaatgtatagtgataaagtcagagattttagtgtccccatcatccaagtcat

SEQ ID NO: 11767 - DNA, 201 bp, Homo sapiens
ttgttccatgagctagttctatgacactggacaagtaacttcacctctctgtgcaggttccttaacctcttcatgtctcaatcttcacctgtaaaatgaggatgatgatatctttctcatagctatggtgaaaataaaagttaatatataaaaagtgctagcataataaaagctaaatgaatactagctattattatttat

SEQ ID NO: 11768 - DNA, 201 bp, Homo sapiens
tacaataaacttgtagtaatcaggacagtttgttattgtgtgaaggaacagatacatagatcaatggaacagagtagagagcccagacatagaacaatataaatatagtcagctgatctttcacaaaagaccaaagcccatgcaatgaggaaaagtcttttcaacaaatggtgctgaaacaactggacacccacaggcaaa

SEQ ID NO: 11769 - DNA, 201 bp, Homo sapiens
cactaataccatgtagaagaagaaactcggaaaagggtgcaattgatctcaatctgagaggcttttgaaggactcattggaagagaagagatttgagctgwatcttggcaaatgggaagatgtaaagaatgcattgacattgcaaactaatacagcaatcattgcagacaacaaaggaggctgtggcagttggggctcact

SEQ ID NO: 11770 - DNA, 201 bp, Homo sapiens
tgttccatgagctagttctatgacactggacaagtaacttcacctctctgtgcaggttccttaacctcttcatgtctcaatcttcacctgtaaaatgaggatgatgatatctttctcatagctatggtgaaaataaaagttaatatataaaaagtgctagcataataaaagctaaatgaatactagctattattatttatt

SEQ ID NO: 11771 - DNA, 201 bp, Homo sapiens
acatattgtagttcctttgatgtctactgcagtctgctctctttacttgacctttactttgtaaaactaagtagtagtttgcagctgctggctttctgcayggggaccccaaaggtaatagattccaagcctcacaacatcagaggtacctcttcaaggagtaagttaatcctttcaaatctccctggttagtttcgtagg

SEQ ID NO: 11772 - DNA, 201 bp, Homo sapiens
tgcacggggaccccaaaggtaatagattccaagcctcacaacatcagaggtacctcttcaaggagtaagttaatcctttcaaatctccctggttagtttcktaggatccttatcagactctctgctacttgtttgataatatcctttaatctaacccattgatttgttatctctaaacaccattttagtttaatttgcagc

SEQ ID NO: 11773 - DNA, 201 bp, Homo sapiens
cgacatggtgaaaccctgtctctactaaaaatacaaaaattagccaggcgtggtggcatgcgcctgtggtcccagctactcgggaggctggggcaggagarttgtttgaactcgggaggttgcagtgacctgagatcgctgccactgtactccagcctgggtgacagagtgagactctgtcctcaaaaaaaagaaaaagaa

SEQ ID NO: 11774 - DNA, 201 bp, Homo sapiens
gttccatgagctagttctatgacactggacaagtaacttcacctctctgtgcaggttccttaacctcttcatgtctcaatcttcacctgtaaaatgaggatgatgatatctttctcatagctatggtgaaaataaaagttaatatataaaaagtgctagcataataaaagctaaatgaatactagctattattatttatta

SEQ ID NO: 11775 - DNA, 201 bp, Homo sapiens
agggcttaaaaggttatgacaattgggttctgaggttgatacaaatggttttgaaattcactttctcatatttatagtttgcacataatcttagggcatcrgtgaatggtcattctgaaaatactgaataaccaggagctagtttgcaaaagtaaatataaatgaataccattttcttagtgcgcttatatcctatgtaat

SEQ ID NO: 11776 - DNA, 201 bp, Homo sapiens
gttggtctcgaactcctgacctcaagtgatccacccaccttggcctcccgaagtgctgggattacaggcgtgagccaccatgcccggcctgacatctttcytttgtaatggcaactaccccttaccaaataatccttaggtcaggtggcaaataactcaaaatcttccagcagtggcaagcaactggcttaagattgaaag

SEQ ID NO: 11777 - DNA, 201 bp, Homo sapiens
cgattgcctgttatctccattggaagctgcttatgaactcggtcttacaaaaggaaggggaccgccaacttattcagagatctgaggcctctcaaaatgacccacaggccccacggttagctcagttgttcaatcagctcctattaactttcctgagttgggctgatggtccaagttttgtgctttgtggataaggcaaac

SEQ ID NO: 11778 - DNA, 201 bp, Homo sapiens
atcagcagacgtcaggagttcgaaaccagcctggccaacatggtgaaaccccgtctctactaaaaatacaaaaattagctgggcatggtggggcatgcctrtaatcccagctacgtgggaggctgaggcaggagaatcacttgaacctgggaggcggagattgcagtgtgccaatatcatgccactgtactccagcctggg

SEQ ID NO: 11779 - DNA, 201 bp, Homo sapiens
tgctgtggacctgaaactgctctaaaaatcaaggttattaatttaaaaaaagtagagggcatagaaccgagtcaccaccctagtgtcccttctttccacayggctgattttatcttctaacagcaggggctattgtagccaaaagtccttgccaaaccatatgagcttctcaatttttatttcatggaagtccactgggta

SEQ ID NO: 11780 - DNA, 201 bp, Homo sapiens
aggtcaggagatcgagaccatcctggctaacacggtgaaaccccgtctctactaaaacaaaacaaaacaaacaaacaaacaaaaaaattagctgggtgtgkcggtgtgcgcctgtagtcccagctgctggggaggctgaggtaggggaatggcatgaacccgggaggtggagcttgcagtgagccgagatcgcgccactac

SEQ ID NO: 11781 - DNA, 201 bp, Homo sapiens
ggtgggcagatccctggaagccaggagtttgagaccagcctggccaatatggtgaaatgccatctctactaaaaatacaaaaattagccattcgtggtggyacatgcctgtaatcccagctacttggatggctgaggcgagagaatcgcttgaacccaggaggtggaagctgcagtgagccataataaagccgcagtgagc

SEQ ID NO: 11782 - DNA, 201 bp, Homo sapiens
ctgcttcccggattcaagcaattctcctgcctcagcctcctgagtagctgggactacaggtgcatgccaccatgcccagctaatttttgcatttatagtaragatggggtttcaccatgttggccaggatggtttcgatctcttgacctcatgatccacccaactcggcctccaaaagtgtcgggattacaggcatgagcc

SEQ ID NO: 11783 - DNA, 201 bp, Homo sapiens
ttaccaaatagaggctcttgggtgtcttgggaatgcctttctctctcctagaaaggaaaggcatcagggaggagccaagatggccgaataggaacagctcyggtctacagctcccagcgtgagcaacgcagaagacgggtgatttctgcatttccatctgaggtaccgggttcatctcactagggagtgccagacagtggg

SEQ ID NO: 11784 - DNA, 201 bp, Homo sapiens
gcttgagatacatacacatttgtaaaggagaccttaccaaatagaggctcttgggtgtcttgggaatgcctttctctctcctagaaaggaaaggcatcagrgaggagccaagatggccgaataggaacagctctggtctacagctcccagcgtgagcaacgcagaagacgggtgatttctgcatttccatctgaggtaccg

SEQ ID NO: 11785 - DNA, 201 bp, Homo sapiens
ccttccagggacttaccctgccaatgacagagtatagcagggatactaaggctgaaccattcctggaacgcaggggactcctctgccagcgactttggctycaagactcctgaacaggcttactgaaccttcctcagactgcagagtagtcacccactctttcttcctctctttgactgtcctatatgcatgcacggtggt

SEQ ID NO: 11786 - DNA, 201 bp, Homo sapiens
aggggataaataggatatcgggtaagaaatctattctaaaaatggtggcttagtaaggtggcaacaaatttgaatcttcttagctcttgctgttaagcccrttggtctctagtgacattagctgtctcattttaatttcttctctacttcatgagtacatgttgtagatagataataggttccagttttattaggtgggat

SEQ ID NO: 11787 - DNA, 201 bp, Homo sapiens
ctgaaataatttaatacgtacatatactaaactaacctaagagatgctaatactttcatcccctctcagcctgcagggttttcttttccaagggcaacacratggtcatgcatatagcactgaggccaatgtaaacataattgagtgtaatttctttggcagttaagagtttgtattgtgtagcacctcagggatatcatt

SEQ ID NO: 11788 - DNA, 201 bp, Homo sapiens
acattttaattttctatgaatctgataaattatataggttaattctgtagaataattttccctgttaaagctaaaacaagaaataagcaaaagagcatcartctgcaaaaactgaagtctctttaatgtgaggtttgatcatttagccagtataacctctcatgaaagactgagtagaaatatccagtttagccagtgttt

SEQ ID NO: 11789 - DNA, 201 bp, Homo sapiens
gaaagcctaaggtaatgattgatcagaacagtgacaaacaaaagaatattctctagctgatgatgctagtggtgatggtgaaccagtgtttctatagctgyccaccaagagagaatcacaggtgtgcttggatgttgagtgattaaaaatcataacctgacttcagtttgcacagtgccttgcctctgaaacctgtagaca

SEQ ID NO: 11790 - DNA, 201 bp, Homo sapiens
ttattcattgaggccgggcgcagtggctcatgcctgtaatgccagcactttggaaggccgaggcaggtggatcacaacatcaagagatcgagaccatcctggccaacatggtgaaaccccgtctctactaaaaatacaaaaagtagctgggcactgtgttacttgtctatagtcccagctacttgggaggctgaggcagga

SEQ ID NO: 11791 - DNA, 201 bp, Homo sapiens
ggctgaggcaggagaattgcttgaacctgggagacggaggttgcagtgagccaagatggtgccactgcattccagcctggcgacagagcgagactccatcaaaaaaaaaaaaaagaaagaaagaaactgttcattgaatatatccacatgtcttagaggcagtgtctctctgttctgaaattaatcttatagcgtgtagac

SEQ ID NO: 11792 - DNA, 201 bp, Homo sapiens
atgtctatggttactttcactgtcagcttattaccctgtgtatatggcagtgttctcaggtttacctgcttctccatgatggggaaatcctggcatcggtyattattgtgcccaataaaatgctattttgatgagatgccaaaatatttatcatctttactatgtagaagtgaatggttgcacaatttttgttttagttgc

SEQ ID NO: 11793 - DNA, 201 bp, Homo sapiens
gcccagctaatgttttgtatttttactagagatggggtttcaccatagtagccaggatggtcttgatctcctgacctcgtgatccacctgcctcagcctcmcaaagtgctgggattacaggcatgagccaccgcgcctggcccatctgagatcttataaattctgactaacatcaaataaaacatcagtgacgattaagta

SEQ ID NO: 11794 - DNA, 201 bp, Homo sapiens
ctgccctctgagtagaatcctgtatggtttggataaggagcagggagaagtggcagagaatcttcccagagatcccttcccaaggtctactgaggcgtttytagtgcctgcactaggagtgctagataagaaaatttttattaccttgagaggcgtggtatttcttcttctttttttattgttaatgatctccacatgaat

SEQ ID NO: 11795 - DNA, 201 bp, Homo sapiens
cagaagacgggtgatttctgcatttccatctgaggtaccgggttcatctcactagggagtgccagacagtgggcgcaggccagtgagtgcgcgcaccgtgygcgagccgaagcagggcgaggcattgcctcacctgggaagtgcaaggggtcagggagttccctttccgagtcaaagaaaggggtgacggacgcacctgga

SEQ ID NO: 11796 - DNA, 201 bp, Homo sapiens
gattgaagatcacaatgatgatattaaaagtgtcttcattttctcgacactttgttttcaagctatttaatcctgtgaagttaccttttaccgtcattgtrtccatgatgaggaaggccaaatagatatttaatatttgcattttctgttttatagatgtggaacctggaatcacaaaaggaactcactgacttttcaaaa

SEQ ID NO: 11797 - DNA, 201 bp, Homo sapiens
attttaaagagatattggcttatgggtctggaaagtcagaaggaactttattagactccactgtatccataggcttcttaaaggcataagagcttgatctstccccatcattccactctcctttcctctgttttagcttcacttgggcaaaatatctctttgcagtggcctctagaagcttctatcttcccaattcactcc

SEQ ID NO: 11798 - DNA, 201 bp, Homo sapiens
ggaaaatcgggtcactcccacccgaatattgcgcttttcagaccggcttaaaacacggcgcaccacgagactatatcccacacctggctcggagggtcctmcacccacggagtctcgctgattgctagcacagcagtctgagatcaaactgcaaggcggcagcgaggctgggggaggggcgcccgccattgcccaggcttg

SEQ ID NO: 11799 - DNA, 201 bp, Homo sapiens
tgagaagtcattgattcagggaatgcttgtgtttttttttttgtttttatttttgtttgttatgactaattgattagtgtggaacttggctgtggactgaygtagaattgttttcagtaattttgccacctagtgaaaggtttttctcggctctttcctaacagcgactatggttatgagcgacacagcaatggccagtgc

SEQ ID NO: 11800 - DNA, 201 bp, Homo sapiens
tctatgtgaaagcttgatcagcaaagctcttctaatcaaaagccataaaattatttttataaaagccattacacattattgtatgtgaattctgattgatstgttaagtaaaataaataaaacctccttcttttgtttttgaatacagacatatcttgcccattcacgtcttagtagtgcaacaagcactacttaaactta

SEQ ID NO: 11801 - DNA, 201 bp, Homo sapiens
gcgcaccacgagactatatcccacacctggctcggagggtcctccacccacggagtctcgctgattgctagcacagcagtctgagatcaaactgcaaggcrgcagcgaggctgggggaggggcgcccgccattgcccaggcttgcttaggtaaacaaagcagccgggaagctcgaactgggtggagcccaccacagctcaa

SEQ ID NO: 11802 - DNA, 201 bp, Homo sapiens
gctgtttgaggaggagagtgctctttggttgaggcaacagagaaggaaagaacatttaggtttttcttggccagtgggttccctgattgtgaaggcacccyggcctcatgtttatccttcctgttgtcctctcgagaaaaatatcccatccacaaagcccaaagaaattgtggccatgaatatgttctctttcttgccaca

SEQ ID NO: 11803 - DNA, 201 bp, Homo sapiens
tatgaaaaaagttctatttttgagaagtcattgattcagggaatgcttgtgtttttttttttgtttttatttttgtttgttatgactaattgattagtgtrgaacttggctgtggactgatgtagaattgttttcagtaattttgccacctagtgaaaggtttttctcggctctttcctaacagcgactatggttatgagc

SEQ ID NO: 11804 - DNA, 201 bp, Homo sapiens
ggcacaatctcggctcactgcaagctccgcctcccaggttcacgccgttctcctgcctcagcctcctgagtagctgggactacaggcgcccgccaccacayccggctaattttttgtatttttagtagagatggggtttcaccgtgttagccaggatggtctcgatctcctgacctcgtgatctgcccgcctcggcctccc

SEQ ID NO: 11805 - DNA, 201 bp, Homo sapiens
ttattcacaatagccaagatacggaaacaacctaagtgtctgagaaatcaatggataaagaaaatgtattatatatacagtagaatatgattcaaccttaraaaaaggaaatcttgtctgggtgcagtggctcacgcctgtaatcccagcactttggggggccaaggtgggcagatcacgaggtcaggagatggagaccat

SEQ ID NO: 11806 - DNA, 201 bp, Homo sapiens
caacgggtagcattaaggccacctgtctggagacattaggtgcacactttgaatgaaagacccacagagagttgggaatgaagtaatttatcacacattcrtgaaggcataaaatgaggatttaaggcagtttcgaaggcagctcctccatcttgctgctattgtgattgatcccattgctctggacaaaattgggcatcc

SEQ ID NO: 11807 - DNA, 201 bp, Homo sapiens
tgtctcacccagcctggaatacagtggcacaatcatagctcactgcagcttcaaactcttgggctcaagtgatctctcaccccagcctcccaaagtgctgsgattataggtgcgagcaaccaagcctctcttggcttttcattttctattataaataatgccgtgatgggattcccttatgcggagatctttgaccatatc

SEQ ID NO: 11808 - DNA, 201 bp, Homo sapiens
agttcattctctcacatcctgccattactttatctactaagtttatttaatattctaaattctttgctgtcatttcaacaatgtttacaccacattcaccaggaatatattccatttcaggaaaccacattctttgcttatccataagaagcaactcctcattggttcaagtgtgatcatgagattacagcaattcactca

SEQ ID NO: 11809 - DNA, 201 bp, Homo sapiens
ctctcccctaccactactactttttttttttttttttttttttttttttgagacggagtcttactctgtcgcccaggctggagtgcagtggcatgatctcsgctcattgcaggctctgcctcctgggttcatgccattctcctgccttagcctcctgagtagctaggactacaggtgcctgccaccacgcccgggtaattt

SEQ ID NO: 11810 - DNA, 201 bp, Homo sapiens
caagaagacctagagttccagtttcaccttggttgcatgtgataactaccgtgacaaaagggaagaggaggtttcacaaaaagcatgattttgaagctgatttttttttttttaaggatgagtagaagtttgccagtaggaaagagcatcccgggcagaatgaacagcacaggcaaaagaaggcatttagtatacagaatg

SEQ ID NO: 11811 - DNA, 201 bp, Homo sapiens
caggaggcggagcttgcagtgagccgagattgcgccactgcactccagcctgggtgacagagcgagactccgtctcaaaataataataataataataatamcaaaagaaagaaattgccttccatgatgcagtgccaacccaaggtcactgtgtcccccactggggagcagcctgattggcaaaggcatcgacagatcagc

SEQ ID NO: 11812 - DNA, 201 bp, Homo sapiens
catagagtaagagaatgaatttaaactccgacaatttggttctacaacactagttttaaccttcaggtcagtagtgtttatttattttcttgaaaaaaatacacacacacacacacacacacacacatatagtgttatatatttttgagatatataatatatatttattatatatattatttcaataccttttggagtaca

SEQ ID NO: 11813 - DNA, 201 bp, Homo sapiens
ctgtcagccttttcaagaagtacaatttgcaggccccctgcttccaaaatgttaagaggagagaaggaaagaggagtgggcaggcaaccttgaaaagagcygacagcaggatgttttccgccaacacaggcgcctcctaaggagcctgtgtggaggatccccaggaaactaccccttgaccggggaagccaccgtgggaag

SEQ ID NO: 11814 - DNA, 201 bp, Homo sapiens
cagggcagaaacagctcagtggcatatacttctgtctgaaatagttttaatcaactgctaaaatcaaaattgccatttaaattgatagcattttcaagaamaaaatggtttcagagtccttttccaaactgtctgttggcttaaatatgggtcaattgctatatttgtgtctatgccatccttatttgatacttctatggt

SEQ ID NO: 11815 - DNA, 201 bp, Homo sapiens
gaggcaggagaatcgatcgaacccagaaggcggaagttgcggtgagcagagatcacccaactgcactccagcctgggtgacagagtgagactccgtctcawaaaagaaaaaaaaaaaaaaaaaaagcgaaaacaaagtggactgggctaggaaagaattcttcgatatttcttagagaataccagggaattccctcaaaca

SEQ ID NO: 11816 - DNA, 201 bp, Homo sapiens
gcctcaggcctggcattaggaatttatatgaagtccttaaggtaccatctctttcttgctaaaaaaggatggaggaacagcagtgagaagcagagagtcakaaggtggatgagtgctttgtacccaggccatccccagggcagtattaggatgaggcaaataaaatagaactggcaggattttctgtcagccttttcaaga

SEQ ID NO: 11817 - DNA, 201 bp, Homo sapiens
catctctacaactttttttttttaattagccaggtgtgatggtgtacacctatagtctcagctactagggaagctgaggtgggaggagcactggagcccaraaattcgaggctgcagtgagctgtgattgtgccactgcactccagtaccttgggcaacagagcaagactccatctcctaaaagaaaagaaaaagaattag

SEQ ID NO: 11818 - DNA, 201 bp, Homo sapiens
aattcctgacctcaagtgattcacccgtcttggtttcctaaagtgctggtattacaggcgtgagccactgtgcccagccctatattctttaaatttttttwaaaaaaaaaaaaaggaaaaaaaaaaaaagctgaggtataatgaaagcaacatggggcctaggcgaaaatacctgaattcaatttctagctgtccatttat

SEQ ID NO: 11819 - DNA, 201 bp, Homo sapiens
agtggaagaattttccttcagggaaaaaaacaaatttgataaagggactggtgagaaacattgtatgtcaagaagatctacatcttcttgaaaatttctgwtcttagatttagaaacatgctgaagtttctataatttaaagcttccatttagcacagacttaatgtctgctgtgtccttggcaccctaggtttaccttga

SEQ ID NO: 11820 - DNA, 201 bp, Homo sapiens
ctgtgattgtgccactgcactccagtaccttgggcaacagagcaagactccatctcctaaaagaaaagaaaaagaattagttggattttagagtggactaraaaaagggggtctgcaatatagatcattaggaactacctataggttttccatcttggaaaaaatgttagtaaatgtatggtatttttttactctgtcatg

SEQ ID NO: 11821 - DNA, 201 bp, Homo sapiens
gactcatgaaagaaaacacaatttgttgataaatcaggagaacctgcttttctactgggccaaacataaagtaaaagtttggaaatgtcatatctgactamaaactctttaattctttggtcaaatcaagggacaccctcatctcttaatctttttaaattaaccacattctttatgcaatgtgcgtacattaaggagcag

SEQ ID NO: 11822 - DNA, 201 bp, Homo sapiens
gttgtagcaaatttccttcattatactggataacttcagaatatgtagcaaataccttgatgcctataaataccaaagatcacacgaacacccattatttyaatggctcagaatgttatggatttgatcatctcccgaaacagaaaggatcattatagccagagcttcttacccctcttttagccagcaaccccacatcac

SEQ ID NO: 11823 - DNA, 201 bp, Homo sapiens
gagaggatgaggattagaaagtagaaagactgctgggaaaactacattgtgagtggaccttaaagtgtcaaaagtgccctgctgaatggaaacaaggaacrgatcatgcttgaagatggctagtagagaaaaggagtgagagttaagttcccatacatcaagtttactgctgttagtggacctggcagaatcaaggtacta

SEQ ID NO: 11824 - DNA, 201 bp, Homo sapiens
gtgccactgcactccagcctgggcgacagtgcgagactctgtctcaaaaaaaaaaaaaaaaaagaaaaagaaaaggaaacaatgctagtgagcataggacrttgtaggaagtgaggaatatttccagtgtttaatgtgctctctgcccgctaaatctgtttgttgttctgtttgaacagccagaaggatgcaatactttgt

SEQ ID NO: 11825 - DNA, 201 bp, Homo sapiens
gtgatagtggaacagcttattaccaggttttctgcaggtaataattataaattctgaggaagaagaaaaaaatctttgagggcactggagagggatcagcmacagacagaaactgaatgggttttaatccatgaaagaggagaacctcagtaggcgggaactatgtttatacagtttctcccctgagggcactgcccggtc

SEQ ID NO: 11826 - DNA, 201 bp, Homo sapiens
tccaagatatgtaaagctggtttaatattcaaaaatcaattaatgtaattatcacatcaacaggctaaataaaatcacataatataccaatagatgagggraaataacaaaacttaataccaattcatggtaaaaactctcagcaacctaaggatagcgggaaatttctttttcttttctttctttttttttttttttttt

SEQ ID NO: 11827 - DNA, 201 bp, Homo sapiens
gggatcagcaacagacagaaactgaatgggttttaatccatgaaagaggagaacctcagtaggcgggaactatgtttatacagtttctcccctgagggcastgcccggtccgtaaggcattgggtggctatgcgccaagaagagagctgctgcacacaggtgtccatgggtagaacgtggggcttccagagtagctagaga

SEQ ID NO: 11828 - DNA, 201 bp, Homo sapiens
ataatccaactatattaataatcactttaaatgtcagtggcctaaatataccaattaagacagagattgatggagtggatgagaaaaacaagccctaactrtatgttgtctacaagaaacccacttcaaagacaaagatacattcaaattaaaagtaaatggatggagaatgatataccatgctaacactaattagaaggt

SEQ ID NO: 11829 - DNA, 201 bp, Homo sapiens
tgatctgttatttttgtggtgttatctgttgtaataaggcatttagtgtctttttcattatttaatcccaagtcttaagcacagggactgtcacttggttrcagaaacttcttaaattagattttaaaaaaaatgaaatgaatggttgaatgatgaacatctgctcatcccacaaagaatgaaattttcctctcaaaaaag

SEQ ID NO: 11830 - DNA, 201 bp, Homo sapiens
taaaatgctcaattaaaatcacaaaagacagaaaacatgtgaaagataataggaacaaagaataaaggaaacaaaaagaaaatggtaaaaatgtgataggyaataatccaactatattaataatcactttaaatgtcagtggcctaaatataccaattaagacagagattgatggagtggatgagaaaaacaagccctaac

SEQ ID NO: 11831 - DNA, 201 bp, Homo sapiens
tgtcattaggaatgaaagtggtatatattgacataaaatacatctttttctccagtcatcttagaaaacaatataaaaagacagacaaaacctagtgttgygataggcacttccagttaaattagtatactcttctgaaaaacacttggtagtgtgtatcaaaagtggttgcaaaattcatattctttttttgtttttgtc

SEQ ID NO: 11832 - DNA, 201 bp, Homo sapiens
attagtggtaaatatgtattgcaaactctacagcaagtactaaaaagagtgaaaaagaagaggaaaacaaataggctaagaaaggagagaaaataaattcstataaaatgctcaattaaaatcacaaaagacagaaaacatgtgaaagataataggaacaaagaataaaggaaacaaaaagaaaatggtaaaaatgtgata

SEQ ID NO: 11833 - DNA, 201 bp, Homo sapiens
ttgtacaatcaatactatatcaccaataaaaatgataacacagaagaatattgaaaaccatagaaaatcttcgaagtgcggctttaaagtgggaaaagcakgttaaaaagcaggaagtgtcacacgacaccctcttgctgtataaatttctctttctcccactttgtgtctctttctgacacccataaacatttatgtata

SEQ ID NO: 11834 - DNA, 201 bp, Homo sapiens
aagtagtgtgttgttattagaagtgaacttcattagtggtaaatatgtattgcaaactctacagcaagtactaaaaagagtgaaaaagaagaggaaaacarataggctaagaaaggagagaaaataaattcgtataaaatgctcaattaaaatcacaaaagacagaaaacatgtgaaagataataggaacaaagaataaag

SEQ ID NO: 11835 - DNA, 201 bp, Homo sapiens
aggacctagaacaaacctctgatgttacagtaacaaattgaaggaattaagtccagtaccaattgttgagcatcaggacctagaacaaatctctgatgttrcagtaacaaattgaaggaattaagtccagtatcaattgtttatgaattgagaagcaccatgatgtggttaggctttgtgtccctacccaaatctaatctt

SEQ ID NO: 11836 - DNA, 201 bp, Homo sapiens
tgctagagatgaaaaccatgtaatagaaatgaagaatgcctttgatgagctcattggtagactggacatggctgagaaaagaatctctgaaattgatgatrcctcaacagaaacttccaaaacttaaaaaaagaccatcgaagtgcaaatacagagcaagaactgtggggcaactacaaaagtgtaatatatgtatagtgg

SEQ ID NO: 11837 - DNA, 201 bp, Homo sapiens
acaaacctctgatgttacagtaacaaattgaaggaattaagtccagtaccaattgttgagcatcaggacctagaacaaatctctgatgttacagtaacaarttgaaggaattaagtccagtatcaattgtttatgaattgagaagcaccatgatgtggttaggctttgtgtccctacccaaatctaatcttgaattgttat

SEQ ID NO: 11838 - DNA, 201 bp, Homo sapiens
gaggccgaggtgggtggatcacctgaggtcaggagttcgaaatcagcctggtcaatatggtgaaaccttgtgtctactaaaaatacaaaaattagctggaygcggtgaggcatgcctgtaatcccagctactcaggaggctgaggctggagaatagcttgaaccagggaggctgaggttgtagtgagctgagattgcacca

SEQ ID NO: 11839 - DNA, 201 bp, Homo sapiens
tttccaaactgaagggaacactaagtatcctattttcaatttctggtttatgttgtaaatgatatcagtgctttctctgtgagcatagaagagcaaggacyactttgctcttaagaaacccatatttcatgatatcagatccttaattaaatgaggggattataatgcctagatataggttcttttattagagagttgctt

SEQ ID NO: 11840 - DNA, 201 bp, Homo sapiens
tcagaatgcaccataatgtctcggcagcacatttgaattatatgtttaggctgacaggcaaacgtatttcggggcagattccttagaaagcaggagacaawttccttcagctccacgtcatcgtttgatgtagattgcctattatattcttgaggtattatgaaaaatggatttgaagatattttcttgacagtgggtaga

SEQ ID NO: 11841 - DNA, 201 bp, Homo sapiens
agctaattctgcaagttacgctgaaaggttcagggaatccaggaaagagagggaagctcattcagctcagaatgcaccataatgtctcggcagcacatttraattatatgtttaggctgacaggcaaacgtatttcggggcagattccttagaaagcaggagacaatttccttcagctccacgtcatcgtttgatgtagat

SEQ ID NO: 11842 - DNA, 201 bp, Homo sapiens
gctggagtgcagtggtgcaatctcggctcattgccagctccgcctcctgggttcacaccattctcctacctcagctgggactacaggtgcctgccaccacrcccagctaatttttttgtatttttagtagagacggggtttccccttgtcagccaggatggtctcaatctcctgacctcgtgatccgcctgcctcggcttc

SEQ ID NO: 11843 - DNA, 201 bp, Homo sapiens
aagagaatattacgtatatgaagactgcaaagaaatctgaaaccatttcaacccttagaagcaaactgtctactttaaaaaggattggattttgagaaatyctttgccgttttcaaagcccattcacctgctataaatcttcatctgaacttacgaatagtagcagggtgctaggctgggcagatactataatcatacaat

SEQ ID NO: 11844 - DNA, 201 bp, Homo sapiens
cacactgtaggagtgattcttggtttgacccactgctggcttgccacaggcaagagttagaacacagctgcaccctagccttgtggtttgtctgaagcccrtcacaggcaagagttagaacacagctgctccctagccttgtagtttgtctgaagcccatcacaggcaagagttagaacacagctgcaccctagccttgta

SEQ ID NO: 11845 - DNA, 201 bp, Homo sapiens
  misc_feature (1)...(201): n = A,T,C or G, or insertion/deletion polymorphism (see Tables 1-2)
ttttagagaggacacaagcatttagagcattccagtgaccatcaggactgaagaattatcttctcttgctttcaagagcctatcttgtactcattcattcngtaaggtcaaccaggatttatggttgtaagaaggacacactgaggacttggtcacttagagatgggttggttgaaatctaagtaagtcttacaaggtcat

SEQ ID NO: 11846 - DNA, 201 bp, Homo sapiens
  misc_feature (1)...(201): n = A,T,C or G, or insertion/deletion polymorphism (see Tables 1-2)
ttctctgaggcctcttttaaaagatcactaattcctttcatgggtggtccacccttaggatctaatcacctcccaaggtctccaccttctaaaatcatcanattggcgattagatattcaacatttgaattttagagaggacacaagcatttagagcattccagtgaccatcaggactgaagaattatcttctcttgcttt

SEQ ID NO: 11847 - DNA, 201 bp, Homo sapiens
  misc_feature (1)...(201): n = A,T,C or G, or insertion/deletion polymorphism (see Tables 1-2)
cacagacagaatgcttgcagtcaaaatctttctcaggcagtgcacctgccaatatagtccattgttgcttttgcagaaagttcttttcactaatggcaccnttctctttctaggtaatataggttctgaattgtcagacactgacatcagcatgtttgtctcttcagatgcagggaacacctggagacaggtaagaaaata

SEQ ID NO: 11848 - DNA, 201 bp, Homo sapiens
atagagtaagagaatgaatttaaactccgacaatttggttctacaacactagttttaaccttcaggtcagtagtgtttatttattttcttgaaaaaaatacacacacacacacacacacacacacatatagtgttatatatttttgagatatataatatatatttattatatatattatttcaataccttttggagtacaa

SEQ ID NO: 11849 - DNA, 201 bp, Homo sapiens
ctggcttcatatcccatttctcctcttcagtcttttctgatgacatactgtgctgctcagcttttctgcttctttttctttgttattgctgttactcaggmttgaaatattctttaacgtcttgaacatctacctactgttcatagcctatccatctttgcttcaggcactgttttctttttggagtcattcatgattcaa

SEQ ID NO: 11850 - DNA, 201 bp, Homo sapiens
cgtgtatcatgacacttttgtttgtgattatgcttcagtccacaatgaatttagtctttccattcccagccttattaatacacccttagtacttacaatcytaaagcttcctggtaaagctttttcatcatattaaaatcagataagaatagcatctgcttgtgctatagtgttcatcttcagatgtatccgaccacaaga

SEQ ID NO: 11851 - DNA, 201 bp, Homo sapiens
cttatcttttgaccttaatgacatttggatccagtctacatcagctccccacaagtattggtaagattgcacctacccagcctggttccaggctctctttrtagccccagcttccacttcactctattatgtatcccagccaaactgggtctcttgctattgaccaaagaaatgtgagaacatcaccctgagttttgctgc

SEQ ID NO: 11852 - DNA, 201 bp, Homo sapiens
tgactaagagatgccaacctactttttcaaaatcctcccagcttgacttgaccttctctcctggcttcatatcccatttctcctcttcagtcttttctgaygacatactgtgctgctcagcttttctgcttctttttctttgttattgctgttactcaggcttgaaatattctttaacgtcttgaacatctacctactgtt

SEQ ID NO: 11853 - DNA, 201 bp, Homo sapiens
ccacaagtcccagaaggtatttttctctgctttaacctcatttggtaacatgttcttgttctctctctctttttcctccttcttttttaatttcttcaacmgtactatctccctctaccacagggcctttgcacatctgttccctctgttcccctggcctgcactctctcacttgtgcctcactcattcatctcctccatt

SEQ ID NO: 11854 - DNA, 201 bp, Homo sapiens
ttgttcagtctgcacacaaatgtcaggatgaatgcagtgcatttagcagaatagagtagcttggaaagagtgataagattagtcccttctgagcatggatyttagcttcaagaagccttggagatcatcatctacaacaccgttattttacagataagaaaactgagattcagaggaaagaaatagtttgtgcccattgca

SEQ ID NO: 11855 - DNA, 201 bp, Homo sapiens
gagatactgggtcagttgtctggcgggtatttggataatttcacatactttttctatacaactgagaccaaggtctcaaatggagaatgactaagagatgscaacctactttttcaaaatcctcccagcttgacttgaccttctctcctggcttcatatcccatttctcctcttcagtcttttctgatgacatactgtgct

SEQ ID NO: 11856 - DNA, 201 bp, Homo sapiens
tttttgacttcatcttcttcctctgtaaagtgggagaagattgcctactcctctctccagactagactaagaatctgtgaagaataacatgagatcatttkgatagcttgaaatgctaaagcataaaagaattaaccattattatctcagataataatagggctgcgtacagtgtcctatcagatatcaggcaaagtgtct

SEQ ID NO: 11857 - DNA, 201 bp, Homo sapiens
ggaaaaatggactgccaatgtgatgaacagccaatgacagaattttagtaacatgcataaaagtgaattttattaaaaaagaactaattttagttctctgycttctttctctctctaccagtcctgcaatgtttttaaagtttcatatctattctacatgtatatctataaacatatctataaacaaaaaatcttctcttt

SEQ ID NO: 11858 - DNA, 201 bp, Homo sapiens
ctggtgattccagaaactcaagttgataagattagaaagtaatcttcctgagatatgaaaagaaatgtgggctcaaacacaaacttatattttttgacaaytcagtacaagaactattttaaacaaaattcatataagatttattatccttttttcttgaaaactgttgatatttcaatcagataatttgaatgaggtttc

SEQ ID NO: 11859 - DNA, 201 bp, Homo sapiens
tgaggcaggagaatggcgtgaacctgggagacggacgttacagtgagctgagatcgcgccactgcactccagcctgggtgacagagcgagactcagtctcaaaaaaaaaaaaaaaaaaaaagttgaaatctcaatttcactctcaaattctctgagttgatgtgtattctgcctaaaaagaaaacttctatatactctgtg

SEQ ID NO: 11860 - DNA, 201 bp, Homo sapiens
gtggccaaaggtctccacatcataaatgctgcaggcaggccagagcagccagtgtacacacacacacacacacacacacacacacacacacacacacacasagaatcacacaatgtgcagcctcacaggcgtcagttgtttcctgcagcacaggagggctataaacaagaaaagagaagggaaacccagttcacacaattc

SEQ ID NO: 11861 - DNA, 201 bp, Homo sapiens
tgacctcaagtgatccacccaccttggcctcccgaagtgctgggattacaggcgtgagccaccatgcccggcctgacatctttcctttgtaatggcaactrccccttaccaaataatccttaggtcaggtggcaaataactcaaaatcttccagcagtggcaagcaactggcttaagattgaaagttgggtgctctcctgg

SEQ ID NO: 11862 - DNA, 201 bp, Homo sapiens
gaggcaggagaatggcgtgaacctgggagacggacgttacagtgagctgagatcgcgccactgcactccagcctgggtgacagagcgagactcagtctcaaaaaaaaaaaaaaaaaaaaagttgaaatctcaatttcactctcaaattctctgagttgatgtgtattctgcctaaaaagaaaacttctatatactctgtgt

SEQ ID NO: 11863 - DNA, 201 bp, Homo sapiens
tctggttcaccaccagggatacaacctcttggaaagactgcattgccttgtgaaatcccaaatgatgcctgttcttaaggacttcataagttacctgtaatttttttttaacttttacacacacctaactcaggtgttagaactggtagaaagattggtaagtgcaaaatgtcaagatgcaattgtgctcaatgtattctt

SEQ ID NO: 11864 - DNA, 201 bp, Homo sapiens
agtacctgtgagaaaaatatcaagcaatttacaatctgtgtacatagagtaccagtgaggaaagagagagatggggtataaaaaagttacacactcacagmcacacacacacacacacacacacacacacacacacacggttgtatatatattcttaagaatcaacttcatattaggtaacagtcttgtctaaaataaatt

SEQ ID NO: 11865 - DNA, 201 bp, Homo sapiens
taaataagggtttgattattgacttcttgtctctttatatctgagcatgcttaattcctcttgtcatttggttgagtagtttgtgtatcatgtatgtgactttttttttttttttttgagatgaagtctcactctattgcccaggctggagtgcagtggcacaatctcggctcactgcaacctccgcctcccgggttcaaa

SEQ ID NO: 11866 - DNA, 201 bp, Homo sapiens
taaagtggattttaggatgtgtaaggctaactcatttcacttagattgttagtaatatttgaataccagttacaaaataaaatagctaatgttgaatctcttttttttaagttcaactttaaaattcttgactaataagggaaatctgccattgtctaaatactttaaaaacctcttccacaaatctgtatcataaaaaaa

SEQ ID NO: 11867 - DNA, 201 bp, Homo sapiens
catgaatagacttcacgtgttgtcttgaacatagctgacactctgtagacattcatttcctttcctatttccattcttttcttcaaggcatttagagtgcytttaagcgtaattctgggttttctatgtagcataagacataaggatatattttataagagaaaaaatacacttcgtaatttcaaatcaacttcaacttgg

SEQ ID NO: 11868 - DNA, 201 bp, Homo sapiens
ctccaatgtatcagaactgccccaagctttctcctggtgctgtcatgaaaacaaagtcaatgtggatgaatctttaataaaaccactatttctcccctggrgaaattaagagtgcaccaccagcctcaggggctaaattgtttccattcaaacatttcttttgctgacctgacctttcccttgaccagatcttcttttgat

SEQ ID NO: 11869 - DNA, 201 bp, Homo sapiens
aaagtggattttaggatgtgtaaggctaactcatttcacttagattgttagtaatatttgaataccagttacaaaataaaatagctaatgttgaatctcttttttttaagttcaactttaaaattcttgactaataagggaaatctgccattgtctaaatactttaaaaacctcttccacaaatctgtatcataaaaaaaa

SEQ ID NO: 11870 - DNA, 201 bp, Homo sapiens
gacttcacgtgttgtcttgaacatagctgacactctgtagacattcatttcctttcctatttccattcttttcttcaaggcatttagagtgcctttaagcrtaattctgggttttctatgtagcataagacataaggatatattttataagagaaaaaatacacttcgtaatttcaaatcaacttcaacttggtttataac

SEQ ID NO: 11871 - DNA, 201 bp, Homo sapiens
gaggcaggagaatggcgtgaacctgggaggcggagctttgcagtgagccgagatcccaccactgcactccagcctgggagacagagcgagactccgtctcaaaaaaaaaaaaaaaaaaaaatggctatactaatagttcctgcccaataaattcgtgggtttacatgagttaatatatgcaaatcccttaaaatgagccta

SEQ ID NO: 11872 - DNA, 201 bp, Homo sapiens
aagtggattttaggatgtgtaaggctaactcatttcacttagattgttagtaatatttgaataccagttacaaaataaaatagctaatgttgaatctcttttttttaagttcaactttaaaattcttgactaataagggaaatctgccattgtctaaatactttaaaaacctcttccacaaatctgtatcataaaaaaaat

SEQ ID NO: 11873 - DNA, 201 bp, Homo sapiens
acttggtttataacgtatttcatgtaatgtttccactcaaaagtcattggaggatatgcatggcaatcacagaactatgactacatgatttgctcaccctrttttatttattttttatttatttatgtattcattttgagatggagtttcgctcttgttgccctggctggagtgcagtgatgtgatcttggctcactgcaa

SEQ ID NO: 11874 - DNA, 201 bp, Homo sapiens
tgagttaatatatgcaaatcccttaaaatgagcctaacacatagtaagggctattaaatgtttgctattactgtgatgttttataaattagtaaaaaaaatagaccaattatggttaatatataaagcacatttagaaatttttcttaattccccaaaccatactatttagaaactttatccttccttctcttgcctttat

SEQ ID NO: 11875 - DNA, 201 bp, Homo sapiens
agtggattttaggatgtgtaaggctaactcatttcacttagattgttagtaatatttgaataccagttacaaaataaaatagctaatgttgaatctcttttttttaagttcaactttaaaattcttgactaataagggaaatctgccattgtctaaatactttaaaaacctcttccacaaatctgtatcataaaaaaaatt

SEQ ID NO: 11876 - DNA, 201 bp, Homo sapiens
ttggtttataacgtatttcatgtaatgtttccactcaaaagtcattggaggatatgcatggcaatcacagaactatgactacatgatttgctcaccctatwttatttattttttatttatttatgtattcattttgagatggagtttcgctcttgttgccctggctggagtgcagtgatgtgatcttggctcactgcaact

SEQ ID NO: 11877 - DNA, 201 bp, Homo sapiens
gcagatcacaaggtcaggagatcgagaccatcctggctaacacggtgaaaccccgtctctactaaaacaaaacaaaacaaacaaacaaacaaaaaaattasctgggtgtgtcggtgtgcgcctgtagtcccagctgctggggaggctgaggtaggggaatggcatgaacccgggaggtggagcttgcagtgagccgagatc

SEQ ID NO: 11878 - DNA, 201 bp, Homo sapiens
atgtttccactcaaaagtcattggaggatatgcatggcaatcacagaactatgactacatgatttgctcaccctattttatttattttttatttatttatrtattcattttgagatggagtttcgctcttgttgccctggctggagtgcagtgatgtgatcttggctcactgcaacttccacctcccaggttcaagcgatt

SEQ ID NO: 11879 - DNA, 201 bp, Homo sapiens
agtacaaaaaggagaaataatgtttttctacagctcctttatttcgggaacgcaattactgaaatatgcagtttagagtttctaatttcttaattgtcttmgagcttgaaatacgcacttgggatcacccatgtctatgtgtgtataatatgtgcagaatgctactgtgttgtctttttccagaaatgtagatgaagatag

SEQ ID NO: 11880 - DNA, 201 bp, Homo sapiens
aaaaatggatttccctcacttaaatcaatgttaaaatagactgatagcttctctttcctgctctctcttccttctcacctgtgtttctttatcatttcttrtggaataaagagatttcttatcattaaatgaacatcatttcttgtaaagtttcccatgagcaaagaagatgaatgtctgtttctcttagcatcatggctc

SEQ ID NO: 11881 - DNA, 201 bp, Homo sapiens
aatggagagcccatatccttcaagcagcaggtagctgccacactcttccagctaattttgttatgtgggaagataagcgcagtacctccagatcttccagttttttttttgttttttgtttgtttgtttgtttttgtttttttagagaagcaaaaactccagtctgatatttttcaatgctgagaactgagccactttatt

SEQ ID NO: 11882 - DNA, 201 bp, Homo sapiens
gatttttaaggtggctcaaatattctcaaggtatttaattagttctcatagtgactgcaataataaaaacattctttgaatgtgtacatcattatttcccyctgaaataccatgtttaggtttttttttttttttttgacggagtctccctctgtcgcccaggctggagagcagtggcgcgatcttggctcactgcaagct

SEQ ID NO: 11883 - DNA, 201 bp, Homo sapiens
gacatattgtctatagctgcttttgtgatacaactgcagcattgagaagtaatgacaaacatcttgtggtccacaaaccaaaaatacttactatttagtctttttttttttttttgagatggagtctcattctgtcgcccaggctggagtgcagtggcactatctcagctcactgctacctccgcctcctgggttcaaggg

SEQ ID NO: 11884 - DNA, 201 bp, Homo sapiens
tgttagccaggatggtctcgatttcctgacctcatgatccgcctgcctcggcctcccaaagtgctgggattacaggcgtgagccactgcacccggccccakgtttagttttttaaaccagatgacccaatgctaagcattagtgaatattccatattctccactgtcacctcatatgatattaataatagcaatttctcca

SEQ ID NO: 11885 - DNA, 201 bp, Homo sapiens
catcttgctactcttttgggattacattggtgcagctatttggtttttttctagaaaaaatatttaatttagcatctcccttattttcctggtttaatgtaaaaaaaaaagtcaaaatcatttaaggcagaataatttaccaagaggaagaagaatatgcagtggtcagctatgtattatatatggatatatattttgaga

SEQ ID NO: 11886 - DNA, 201 bp, Homo sapiens
agtggggaagggaatcaccttgcctgagacaatagatgttctataaaattgagcttcttcatattatcatggaaatgacttttcggcagtagtgcaaaaargttgttttacattattgttaattgtgattggagacacaaaacaatatgatcatttgatggcttatttgttattcaaaaaatgacaggttttatgtattca

SEQ ID NO: 11887 - DNA, 201 bp, Homo sapiens
agaaagacaagccaacctttccccagtcagtgcggcaaatgctgtaacaattcattcaattatgttaagtgactattaaaggaatcctaagccctcccttgggccatttcagttctaagagattgtaattgtttgagactaaccatgatttcttcttttgccttcaggtgattctcattttgacaaagctctatgactata

SEQ ID NO: 11888 - DNA, 201 bp, Homo sapiens
ttgggcagagtgtctggcatgcaatccttttgtgccatttacagtgacaggacaccactttcaaagatgacactaactgttcagaggctttaatatgattkcctccaaatgcttgagaaagctccatgtgtttgcctggcactctgctcttttaagatatgattctattcccctctctctctctttcttggaagtgcagca

SEQ ID NO: 11889 - DNA, 201 bp, Homo sapiens
tgggcatctcttagccaagtcgacacataaaattgaccaccatcatagttgccaagaggtaaatgctatcttgtctggggatgtggctatccaggcaccastagaatgactgaaaggaaaatgtgtggagccttttacccattgaaattcttaaataagtagcctgcgttcataggaaaccctgccctgagacttaccgag

SEQ ID NO: 11890 - DNA, 201 bp, Homo sapiens
tcttaaataagtagcctgcgttcataggaaaccctgccctgagacttaccgagtaaagacataggagctggacttggcctctgaagggcctatgtgaggaygtgcctttggaaagccctgaaatcttcagaaaaaggaacattatagatacaattatagagattctgtttcaaatggacagggggctacttggtgtctaca

SEQ ID NO: 11891 - DNA, 201 bp, Homo sapiens
agagaggagaagtggagaggttctctcttctccctgtcttctgtcactgtggcccctccggccccacgcgggatctccagcctccttcctctcacactgawtttaacatcaacacaagcacgcccctccaggaagtccttagcactgcttctctgaccacaactcttctaggctttcaccttcctggccctctcactaaga

SEQ ID NO: 11892 - DNA, 201 bp, Homo sapiens
ccctctaatctgaagttctttgtccttaacagaaatggataaagagaggagaagtggagaggttctctcttctccctgtcttctgtcactgtggcccctcyggccccacgcgggatctccagcctccttcctctcacactgaatttaacatcaacacaagcacgcccctccaggaagtccttagcactgcttctctgacca

SEQ ID NO: 11893 - DNA, 201 bp, Homo sapiens
tttaaattttcaattccttttttttttttttctttttgagacagtctctctctctctgtcgcccagactggagtgcagtggtgcaatcttggctcactgcrgcctctgcctcctgggttcaagtgattctcctgcctcagcctcttgagtagctgggattgcaggtatgtgccaccacgccaggataatttttgtattttt

SEQ ID NO: 11894 - DNA, 201 bp, Homo sapiens
ctacaaatgtgagagtggagaaaaaagtacaccaaaagatcatttctaatgttgctgttactgagtgaactggtgtcttttttcctcagattaatgtatcycagccctctgaaagccatagcaacagaggcatgctgaggtagccaatggaaaaatgacatcttttctttgttcttgttttttgttttgtttgtttgtttg

SEQ ID NO: 11895 - DNA, 201 bp, Homo sapiens
tttcatcgtgttagccagatggtctcgatcttctgacctcgtgatccacctgcctcggcctcccaaagtgctgggattacaggcatgagccaccacgcccrgcctggtttaaattttcaattccttttttttttttttctttttgagacagtctctctctctctgtcgcccagactggagtgcagtggtgcaatcttggct

SEQ ID NO: 11896 - DNA, 201 bp, Homo sapiens
tgggtgtacatttctacattttcttaatgtggaaaggtcaggaaaatagagaactgcctttggaacaggctgtgctttgactctattgacttggagataastattgtgactattagcatatgtaggtactcagcacatatttgctaatgagagaaaagaaggcagaagacaagagaaatgaagagaggggcctatgatgtg

SEQ ID NO: 11897 - DNA, 201 bp, Homo sapiens
agaatcaggcaaagaaaggtaactagtaactagaggtccacttatgggtttcggggtttgcagactccctgaaattaagtgaaaaactctgtatggttgtstctgtgcactttttcttggtctttcatttgcatcagatccccaaactttgtacctgacccagaaaagattacagactaacagtctagttgctcctagaat

SEQ ID NO: 11898 - DNA, 201 bp, Homo sapiens
ttttagtagagacggggtttcaccacattagccaggattatcttgatctcctgacctcgtgatctgcccgactcggcctcccaaagtgctgggattacggygctcgccaccacacccagctatatatatatatattttttgtatttttagtagagacggggtttcatcgtgttagccagatggtctcgatcttctgacctc

SEQ ID NO: 11899 - DNA, 201 bp, Homo sapiens
tccattggagaatctgtttttcacctttcttccattgtctgtgactctatatattttgctgatttgggctggagctgaattccccatacccagccagttgwtccaggggcctccttcctctttgccgttgactctttattgaagatgtaataaatttgagttccaactcaaagaaagaaattatacaaatgagtatgtatt

SEQ ID NO: 11900 - DNA, 201 bp, Homo sapiens
gtggattttaggatgtgtaaggctaactcatttcacttagattgttagtaatatttgaataccagttacaaaataaaatagctaatgttgaatctcttttttttaagttcaactttaaaattcttgactaataagggaaatctgccattgtctaaatactttaaaaacctcttccacaaatctgtatcataaaaaaaatta

SEQ ID NO: 11901 - DNA, 201 bp, Homo sapiens
cttttcctcactgccctccagttttcctgagctgttacagttgcaagcagggtaaaatatgcatgaatgtgtttgataaactccaaaacacaagaaaaatrtaatgcacaattatttgcttttgtaatagtttgacaaattactaattactacttcttacctaacatatagaagggaggagacaatcatattttcagagcc

SEQ ID NO: 11902 - DNA, 201 bp, Homo sapiens
aatacaaaaattagctgggtgtggtgatgcacacctgtaatcccagctattcaggaggctgaggcatgagaatcgtttgagcctggcgggtggaggttgcrgtgacccaagattgcaccactgccctccagcctgggcaacagagcaagactgtctccaaaaacaaaccaacaaaaaaacatggtgtgaaaaagacattta

SEQ ID NO: 11903 - DNA, 201 bp, Homo sapiens
tatggatacagagaggttatctagaaacataaacatgctccctcatcctcagtggaacctcagaccttacactcacacaaagagagacatatactacatgsatagacaggtacacccatgtacacccacacacattccacatttggggcactaatgcttggtattagtccccttgatagccaaagtcctacagtgagaggg

SEQ ID NO: 11904 - DNA, 201 bp, Homo sapiens
tattctcaaggtatttaattagttctcatagtgactgcaataataaaaacattctttgaatgtgtacatcattatttccctctgaaataccatgtttaggtttttttttttttttttgacggagtctccctctgtcgcccaggctggagagcagtggcgcgatcttggctcactgcaagctccgcctcctgggttcatgcc

SEQ ID NO: 11905 - DNA, 201 bp, Homo sapiens
ggatgaaaagagatcctggtttttggaaaaggtttatgagctgaatctttaaggatgaataggtagaggcacatcaggaggctttctcagggagttggggktggcctttgtgaacaaagagagtcagataagagaagggaaggaagtgttctgagaccatcacgttggcaacaggaaatgcaccgatgtactttgtgttag

SEQ ID NO: 11906 - DNA, 201 bp, Homo sapiens
aggcaggagaatcgcttgaacccaggaggtggaggttgcggtgagctgagattgtgccactgcactccagcctggcaagagagcaagactccatctcaaawaataataataataataataataataataataataataatataataggagtgttgttatccccgtaacttttcagaaattcctcaacattataaaggacac

SEQ ID NO: 11907 - DNA, 201 bp, Homo sapiens
agattctccaatgggatgaccttaggcaagtgattagccacatctgaatttcagttttctcttctgtaaaataaggataatatgaattctaaagcatgcaragattcacaagttcatgtttgcaaagcctttcatgtacaggttgagtataccttatctgaaatgcttgggaccagtagggtttcagattttagacatttt

SEQ ID NO: 11908 - DNA, 201 bp, Homo sapiens
attctcaaggtatttaattagttctcatagtgactgcaataataaaaacattctttgaatgtgtacatcattatttccctctgaaataccatgtttaggtttttttttttttttttgacggagtctccctctgtcgcccaggctggagagcagtggcgcgatcttggctcactgcaagctccgcctcctgggttcatgcca

SEQ ID NO: 11909 - DNA, 201 bp, Homo sapiens
ctagaagatcatatgatacgtagtagatgctcagaaaatatttattgaatggctagagtaaatgtactaacgactgaataaaatacaatttctttgagtaraacattctgatacgatatttctctcaggccactctaggatgagagagaagttcgaagagacagtacagccacaggcctaagggtgtagactctgtagtta

SEQ ID NO: 11910 - DNA, 201 bp, Homo sapiens
agtgctgggattacaggcgtgagccactgcacccggccccatgtttagttttttaaaccagatgacccaatgctaagcattagtgaatattccatattctscactgtcacctcatatgatattaataatagcaatttctccagtaaaatgagtctgttttttttttaaatgacagttaagcatgggatgcacttattagga

SEQ ID NO: 11911 - DNA, 201 bp, Homo sapiens
ttttgagatggagtcttgccctgtcacccaggctggagtgcagtggcgtgatctcggctcactgcaagctctgcctcctgggttcacgccattctcctgcytcagcctccggagtagctggaaccgcaggcacctgccaccacgcccggctaattttttgtatttttagtagagatggggtttcaccgtgttggccaggat

SEQ ID NO: 11912 - DNA, 201 bp, Homo sapiens
caacaaacgaataaaaatgggactgaaatcttcatataattttaatatcacaaaatatgtgagaatcatatgcctatttttgtcattttaaaatattgtayggtcccacctcattaaataaaatttccccatgattacaacagtaaaataatcttattgtggaaaatacatagggtacagaaaagtacaaaaaaggaaaat

SEQ ID NO: 11913 - DNA, 201 bp, Homo sapiens; identical to SEQ ID NO: 1917

SEQ ID NO: 11914 - DNA, 201 bp, Homo sapiens
aggcagagggcagaggttgcagtgagctgagattgtgtcactgcattacagcctgggcaacagagcgatactcttgtctcaaaaaaaaaaaaaaaaaaaatatgggccataatgtcaaacttaaaagaaaaaaccagaataaaatcctcaatccacaataggatatagagatgtggataaagaagtagaaagaaacacaaa

SEQ ID NO: 11915 - DNA, 201 bp, Homo sapiens
ttcacagtgcactttcttttatttggagaggcaaggtaataaatgtgtgattgcttggggctaaaaagaaaaaagtcttttctgccttcaagtccagagargcattcaccctgtctactcattcctaaagcttctaagtgcatttttggggatcgtttggttctcagtcgcatttccgtagggtatgaagcacagcctctg

SEQ ID NO: 11916 - DNA, 201 bp, Homo sapiens
acctatgagaagctgaatgataaagttggtttgaaaaccattttgagctatctctatgtgtgtcctaccaacaagcgtaaggtaagaaatgtatattcagyatgctactcattcatgatgtgacttctgtcttggttggctaaccactctagctacctaaaaatccattacagttaatctgggattagaaatgtaaagatg

SEQ ID NO: 11917 - DNA, 201 bp, Homo sapiens
attttcaacatccagaaaaaaagccaaagatacgagtcgctttatttttataatattaagtttccatctgttgggaaatatgtgcgttactctgccactcrcacccaatattacctgatacaggatgtcttatgcagtctgatcacgtggagcataaatgggtatcaaaaatactttaaagtgattgataaaaatcagctt

SEQ ID NO: 11918 - DNA, 201 bp, Homo sapiens
cagggtgagttctgaagaatttctgaacctctctgccgatggcattgagagctttgttttctaattttgaaccaaaagaaaatttgccttgggcgttccayggcagtgggaccccacccatcttttacacacaaacctacatattcccatttcaaaactgaggtgaagtttgacttacaggggagagaaaatagcgggggg

SEQ ID NO: 11919 - DNA, 201 bp, Homo sapiens
cacatatgagttgaccaatagtttaagagaggccacaaaggcagtgctgtcactgaatattatatacaagggactggatgaattacattaaattggtagcycaaagttcaggagatagagatctagtgatctgtctactctagaagtcttacaaaatgacttcagctggactttaatggatatgtcggatttctattgtaa

SEQ ID NO: 11920 - DNA, 201 bp, Homo sapiens
gttttagaaactacaatataatctcagccacaacattatggatgcagatgccaaataggagttgtggaactctgaactgtaaagtgaagtaaattgttgcmataacattttccatttagggatgaaattagtactggtgaaattcttccacagccagtaagtttatctgtctctttagttttcggtcaccgtattatctac

SEQ ID NO: 11921 - DNA, 201 bp, Homo sapiens
caggaatgtcatatacatgaaattgtaaaaatcacatttacaaaattgcaaatttttctatttggctgaaactaaaatttgttatagctagttataatttacacacacacacacacacacacacacacacacactttggaacctaatccttattatttttcactgttttggctgtttgatttttaggaaaactaatttttg

SEQ ID NO: 11922 - DNA, 201 bp, Homo sapiens
caaattgtggtgaacaatcccttagaaaatgcattattgaggtggcaattcctatgaacagggtcctcctcttttctctttttctttatttgctggcttcyttgtttttttaaggcatactctccgtcttttgaacacatagccacatttattttccccttatctccctgacattgctttttctctccttcagtgcatgtg

SEQ ID NO: 11923 - DNA, 201 bp, Homo sapiens
gcatctctcagtctgtcttaaacacctcactaaacatgatgtgttgggaaacatttgaaatgagagaaaacaaagagcagatgtgactgtaaggaaatttaaaaaaaaaaaacaggagagaagtataagaatctgtgtatacctcagctttgctgtctatgccggggtaagggctcttggagcctctgttaggatttgcaa

SEQ ID NO: 11924 - DNA, 201 bp, Homo sapiens
aggtcagaccctagagagggcttttctggaaatgcaggcaacatagcaaagaaataagcattgttcagattgaatttgtaatagttggaggataggtgtcrgcttgcttacctggttttgccttttggggcactagacccttagcattaataccgacagagtttatagtttcctattgtttttattgagtccttatagttt

SEQ ID NO: 11925 - DNA, 201 bp, Homo sapiens
caggcaacatagcaaagaaataagcattgttcagattgaatttgtaatagttggaggataggtgtcggcttgcttacctggttttgccttttggggcactrgacccttagcattaataccgacagagtttatagtttcctattgtttttattgagtccttatagtttctataggggtagcaatgcagtggatgtcatggtt

SEQ ID NO: 11926 - DNA, 201 bp, Homo sapiens
tgggtgcatatccaaaggaaataaaatcactatcttgagatagctggtgcttctgtgttcattgcaacattattcacaatagccaagatacggaaacaacytaagtgtctgagaaatcaatggataaagaaaatgtattatatatacagtagaatatgattcaaccttagaaaaaggaaatcttgtctgggtgcagtggct

SEQ ID NO: 11927 - DNA, 201 bp, Homo sapiens
aggaagagaatggactatccacaattaccacagagcaatgaggctgttgtaggctacccagcgctggcccagagagtgaccatctcatttccaagaccttyccagtttctaaaatatccctcacaattcaaaagcaccctaatcactgccgtttgtgcctaccagtccttggctcttctgaacacaaaggcagaaggtcct

SEQ ID NO: 11928 - DNA, 201 bp, Homo sapiens
aatgagctggtttacgacttgagcttttttccatttaggtacaggaaggtggtttccaataattgcactgatggcgtaagggaacagtacactgccaaacmgcagaagtgcccagggaaagccccgcgggggctgcggatagtcacggctgatggaaagctgacagcggaacaaggacacaacgtcactctcatggtgcaa

SEQ ID NO: 11929 - DNA, 201 bp, Homo sapiens
  misc_feature (1)...(201): n = A,T,C or G, or insertion/deletion polymorphism (see Tables 1-2)
tatcccatccacaaagcccaaagaaattgtggccatgaatatgttctctttcttgccacagtcgttgtttcatctttttaatttttttttgaaattttggnacttaggatttgtaatttaagtctgagactgagagggtggtaggtagtattcatcttttagtcagcattaaaggcagaaataagcaaaaactcttgcaca

SEQ ID NO: 11930 - DNA, 201 bp, Homo sapiens
ggcacctaaaccattggacctgaagcaagtctgcagaaaacccctgcacagacagaatgcttgcagtcaaaatctttctcaggcagtgcacctgccaatakagtccattgttgcttttgcagaaagttcttttcactaatggcaccgttctctttctaggtaatataggttctgaattgtcagacactgacatcagcatgt

SEQ ID NO: 11931 - DNA, 201 bp, Homo sapiens
ggctgaggcaggagaatcacttgcacccatgaggtggaggttgcagtgagccgagatggtgccagcctgggcgacagagcaagactcctcctcaaaaaagraaaaataataataataaaagaatgtactattatttcaggctactgtctctagaggaggagagtgctgtttgaggaggagagtgctctttggttgaggcaa

SEQ ID NO: 11932 - DNA, 201 bp, Homo sapiens
tagggaaagaaatgcctgcaggagcaggtaacccttgctgcagggtgacagggagaaagctggggagaggataggcctaagcaattcagtggaaggcagamagacaagccaacctttccccagtcagtgcggcaaatgctgtaacaattcattcaattatgttaagtgactattaaaggaatcctaagccctcccttgggc

SEQ ID NO: 11933 - DNA, 201 bp, Homo sapiens
ttcagggtgatgttcagcggacactcatccaagtggactttggcgatggtatcgcggtgtcttacgtcaatctcagctccatggaagatgggatcaaacaygtctatcagaacgtgggcattttccgtgtgaccgtgcaggtggacaacagtctgggttctgacagcgccgtcctgtacttacatgtaacttgtatgttat

SEQ ID NO: 11934 - DNA, 201 bp, Homo sapiens
tcagagaaatgaacatgttaactcaataaatacaacagagccaggttttgttttgtttttttcctcttgagcattgaaataaattgttgtttctttgattractaataaatgaagtagttgacttgcaggatttgcaccttaaaaaaagaattatcctcaatgtaatgacatgctgctgttgttcaagggggatgtggaaa

SEQ ID NO: 11935 - DNA, 201 bp, Homo sapiens
ttatcacagagatattagagaattaatatttccaggcttcagttgctaccactggatgtgttatgagtaaatttgggagggaataagaaacttcaaatttygacctaggtcgtgatacatcatgaattctgcactacaatttcacattgagaaaaagactttccacttgaagggagaattaccgttcgtcaagaagtttta

SEQ ID NO: 11936 - DNA, 201 bp, Homo sapiens
cagcacgcctcctctcccgggagagccagtggtaacagattgttctggtttctccaggatgaattctctttcttggctaccacccttccctcaccctaacrtagtgaaaggtgggatgtaagcctcagcccattagaggtaataacacacactgagttgcactattaacttgaaagaactatagctatgttcgtggttgtt

SEQ ID NO: 11937 - DNA, 201 bp, Homo sapiens
agttctggataaacgcacattataaaaatggtaaagggttaatatttatcaaaggaagagcctcaaacctcaggttaaataaaaaaacatgaccccccccmaaaaaaatacacaggaactttgcttctacctcctcctgtctgtctatcagttgccttatttaaactgctcggttcaggaaaactgtcctttgtcaagggt

SEQ ID NO: 11938 - DNA, 201 bp, Homo sapiens
ccaatcagccccctccccaatacccaccttaaaagtggagaagcaggaatgggaagggaagctgtggggtggctggagatagtgggaggcagaggccaggrggagagtaatcagcttttattgtcatgcaccaactgtgattagaataaagacacttcagagcagatgtattcagccaggtttttcacccccaagagagtg

SEQ ID NO: 11939 - DNA, 201 bp, Homo sapiens
catctcaaaaaaaaaaaaaaaaaaaaaattggaaatggtaagggaaatatcaaacgtccaccctgactctaaatctctgtctgtatatccccctcaacccyatgtttttgtttttgtttttgtttttcagattcacattatctaacttgccgaatgcagaactgtacagaggccaacaggaatcagccttttccaggctac

SEQ ID NO: 11940 - DNA, 201 bp, Homo sapiens
ccagatctgatcactatgcttatgtatcacagcatcactatgtaccccatgaatatgtataattgttatgtgtgaatttaaaaaattttaaaagattgatrtgttaaccgtatttaactttagggagaagtggtatgtaaaaaaaaggaaaccttattttaaatgttacttaaggaaactttcttcaatgacaaatagttt

SEQ ID NO: 11941 - DNA, 201 bp, Homo sapiens
agtattaggatctggtggacacaacagtgaataacagcaacaacaacaaaaacaaaaaaggcatttgtctttatagagattacattctaatgggagcacgrctcagtaagaaagaaataacaaggtaattttatattgtgataaattccatagaaagaattaataggatggtgtgtgataaagaataactatggaagatcc

SEQ ID NO: 11942 - DNA, 201 bp, Homo sapiens
catgcctggccggccttccccttgtcatgtgggacacagttgctattgctagtttctcaattatctttctagaaatgttctgtgaattgccaaatgtgcgtgtgtgtgtgtgtgtgtgtgtgtgttagtgtgtgtgtgtgtttgtgtgtatgtagtcttactttgcttgggttgccgtaacagaataccatagactgggtg

SEQ ID NO: 11943 - DNA, 201 bp, Homo sapiens
acttgttccctttgagtttagaaattaaaaacaactaagccggatattccatactgaagtctgggtttgaagggatgtggccaacttgtctatccttcatratgcaaaatttgcttttatagcataagcagcctttgaatgaacactatctttaggtttggtgtatccgaacacagtgccttttttagtccggagaccttg

SEQ ID NO: 11944 - DNA, 201 bp, Homo sapiens
tgatattttcatttggaaaaatagaattctgcataagtctctgatatcttaaaatcaaacccacctactcattaagcatcaaaaacaagtaaaataactcmttttttatactcaaaaggatatatttcaataagtggcatgttccaacaaatattcatttattgcctactgtgtgccaggaacagtattaggatctggtgg

SEQ ID NO: 11945 - DNA, 201 bp, Homo sapiens
acaaactcaccattaatagcttgttgtgaagtcatttctgtttttattgtgctaggatataatgagataaaattcaaatgtgcttggcttaggcttacaamtcaaaatgaaataccagttcagcactcagatccaaacatatttcatctgagaatgtcatatggttgcatggtgggggcagggatgaggaagatatcttca

SEQ ID NO: 11946 - DNA, 201 bp, Homo sapiens
atgcctggccggccttccccttgtcatgtgggacacagttgctattgctagtttctcaattatctttctagaaatgttctgtgaattgccaaatgtgcgtgtgtgtgtgtgtgtgtgtgtgtgttagtgtgtgtgtgtgtttgtgtgtatgtagtcttactttgcttgggttgccgtaacagaataccatagactgggtgg

SEQ ID NO: 11947 - DNA, 201 bp, Homo sapiens
cacacatgactagttgtatgggagaatgatcaaattccagaaacaagagttgtagtcatcctaatagccaagccactgacaaatgtcaactgagtagaaartaaccactgaatatcgttttaaaaagattcactgatttatttcatctaatcagaccatggagcctgtttaggtagcagactgaacttcatcagccactac

SEQ ID NO: 11948 - DNA, 201 bp, Homo sapiens
tttagtgaatccttatatctagcttatctatctctacatactattccccacctctatttcctgtaaataatcatcttctgatattttcatttggaaaaatrgaattctgcataagtctctgatatcttaaaatcaaacccacctactcattaagcatcaaaaacaagtaaaataactcattttttatactcaaaaggatat

SEQ ID NO: 11949 - DNA, 201 bp, Homo sapiens
tgcctggccggccttccccttgtcatgtgggacacagttgctattgctagtttctcaattatctttctagaaatgttctgtgaattgccaaatgtgcgtgtgtgtgtgtgtgtgtgtgtgtgttagtgtgtgtgtgtgtttgtgtgtatgtagtcttactttgcttgggttgccgtaacagaataccatagactgggtggc

SEQ ID NO: 11950 - DNA, 201 bp, Homo sapiens
caggtaatgcacttaggatagtgtctgaaacatagctttaatatttatttttactgttattattattagcaactaaagctgtataggaaatttaaagcagrtatgagttatatcctgtcaaaatgatacaggattgtttcatggagtaggtggtttcgaggaagaaccttaaagtatggatagcattaaatgcaagaggtc

SEQ ID NO: 11951 - DNA, 201 bp, Homo sapiens
agtggagagtagtcagtgagcaaactgcataaatgcttatagagagagagactacgtaacatatttaagcacttggatttttttttccagtcagaacattrgtttcaatcttggctttgttactcactatggaatcctgggaaagacatttaacttctgtatgtctcagagatggtaatagcatctctgccagtgggattg

SEQ ID NO: 11952 - DNA, 201 bp, Homo sapiens
tttatgatcttagctcctacaggagtctcaactcaaatacctattgacttacacaggtaattgtagatgaatggagtgactagggagtctatgaatacagraactttattttaagaaaaggaaacaatgagggcccggtgtggtggctcacgcctgtaatcccagcactttgggaggccgaggtgggcggatcatgaggtc

SEQ ID NO: 11953 - DNA, 201 bp, Homo sapiens
tagttttgtttttctttgtgttgtcttatgatcaggtttgctttccccattttgtgacagcagtggacactagcagctttaggcttacttattttatttatttttttttttgagacattgtcttgctctgtcacccaggctggagtgcagtggtgcaatctcagctcattgccacctctgcctcccgggttcaagagattc

SEQ ID NO: 11954 - DNA, 201 bp, Homo sapiens
tctgtcaccaatcaggggcttctgcaggtgactgtctgtttccaaactaagccatcaggccctgcttaacaaataaagggattaaaggcgttattttggcmactcactgaaggaaataaaactcaacaaatagaaaaggaaaaaaaaattaagaatttaattagcagaatgatggtcagaaagcatctaattagacttaaa

SEQ ID NO: 11955 - DNA, 201 bp, Homo sapiens
agcatttgaaaggctgggcttgctctggatcccaggtgctcaacgactgggcagtgatggtcatcctctgttcctgttgttcaggagagaagtttatctgkggggcagttcagttctgtcaccaatcaggggcttctgcaggtgactgtctgtttccaaactaagccatcaggccctgcttaacaaataaagggattaaag

SEQ ID NO: 11956 - DNA, 201 bp, Homo sapiens
aatacaaataaaacaagaattgtgtatgcatcaagtcctcattaggtgtcagtcttaaaaattctagttggaaattgtatttgtaatttgaaggtcaagasctcctaatcaaactctcattgtgtttagccattgtttttgttcattatctcacataacaagaagcacagaggttggggcagcttgaggctcagtaccatc

SEQ ID NO: 11957 - DNA, 201 bp, Homo sapiens
gtctaaccacgttgcaaccacatactgccgtttctacacatcactattttttagcttcattctctttatctgcaaagtcagttggtatactctgcagtgtygtgaagactaaacgtgctatagctatgtgaacatgcttcagactgcctggctcacagatgaacaacaaatgttaaattccatctttgttttctccctaaa

SEQ ID NO: 11958 - DNA, 201 bp, Homo sapiens
actctgtcctcaaaaaaaagaaaaagaaagaagctgcctcaggtagaaatatccttagcactttacaggtggttagcttgagacacagtgagcagtattgktgattacagagagaggacttaaataccaactacagctatcattatgtgagtacagtctaatctggcgctagactcaacacatttcaagactaaggtcatc

SEQ ID NO: 11959 - DNA, 201 bp, Homo sapiens
gactctgtcctcaaaaaaaagaaaaagaaagaagctgcctcaggtagaaatatccttagcactttacaggtggttagcttgagacacagtgagcagtattsgtgattacagagagaggacttaaataccaactacagctatcattatgtgagtacagtctaatctggcgctagactcaacacatttcaagactaaggtcat

SEQ ID NO: 11960 - DNA, 201 bp, Homo sapiens
ctcttcaaatattaactgaataaactttggtatttcctttaagctccatgttcctttccatgaagatgccagcactgacacctaagatgtgttctgctagmaaagatagtaagaagcaagcaactttaccaaaatagtgttcacagcatatataatgtcctttagaatatatgtaacaacttgtaatcttttgaaaaaata

SEQ ID NO: 11961 - DNA, 201 bp, Homo sapiens
aatgtatctgaatggcatgagctcatgcgagttatgcagatttatagcatgaaaagaaagtaaggtaccaagctagagactgtaaatttgtttaaggaaawtgccagtgtatcagcctattccaggactcaaagcaaagtagacacagtgactttacaaatgccaaacagagcacatcagaaattagtgtcttagttgtgg

SEQ ID NO: 11962 - DNA, 201 bp, Homo sapiens
tagcacttccattcatcctaggatgcgctcaccatgctgcattgtaattggacagtgaactttctgtatttatattattagattggtgcaaaggtaattgyggtttttggcaattactgcagttactttttgcaccaacctaatagtgtgcttttgttttctctctcatgttcccagtttttagtttcatgcttggctaaa

SEQ ID NO: 11963 - DNA, 201 bp, Homo sapiens
tgaaccatgtcatcagagatctgaaactaactagcttgcttgaaggctgtgtgacttagaattggcacacatgtagaagagtctgtctattttgttagaayacaggtttacgtaaatatcaaccagtttctagtttcacctctgatatttattatgtccattttaccgatgaggaaagtgaggacaagaaaagttgaataa

SEQ ID NO: 11964 - DNA, 201 bp, Homo sapiens
agtcacaggaaaagtttctagcacagagtaaaacatctgtgcagaggtatgaggattaaatatttcaccggcaagcccatagcacttccattcatcctagratgcgctcaccatgctgcattgtaattggacagtgaactttctgtatttatattattagattggtgcaaaggtaattgcggtttttggcaattactgcag

SEQ ID NO: 11965 - DNA, 201 bp, Homo sapiens
caggccctactgtaaatacttcatgtgtaactcatttaatcctcaaaatcagccatgaacaaggcaagtactgcaactgtcctgtcttctatttaaaggartgtaggcatagagaacacaagcaatgagcttaaggtctcacggtgttgaagctgggattaaatcacagacagcctgactccggagcctggacctaatagc

SEQ ID NO: 11966 - DNA, 201 bp, Homo sapiens
gctctgtgtgatacaaagtgaaataaattcagagtcacaggaaaagtttctagcacagagtaaaacatctgtgcagaggtatgaggattaaatatttcacyggcaagcccatagcacttccattcatcctaggatgcgctcaccatgctgcattgtaattggacagtgaactttctgtatttatattattagattggtgca

SEQ ID NO: 11967 - DNA, 201 bp, Homo sapiens
gatgcagagcttggttcccagcaatttgcactgactttgagatcagtaattgcacttggccacttttttaagtcccaagggaccacattggcaagtgtacrctaataaaccctatgagaggtacaactgagagtcagcttatttgcagttttcttgctattcattatgaaacaaaatttagtattaaattgtttgcctttt

SEQ ID NO: 11968 - DNA, 201 bp, Homo sapiens
aagaaaaacaggacacacaaattcagcccatttattttcccacactgcatgagggcttgggttcaaacaataaatcaccaaacagaattccctgaaagcaycttttgaggcatattgatcactgttaatagattatgtttaaccacaaaaacagctataaatgctaaatcaagcagattttctccctaaagctttgttctg

SEQ ID NO: 11969 - DNA, 201 bp, Homo sapiens
cactgcattccagcctggcgacagagcgagactccatcaaaaaaaaaaaaaagaaagaaagaaactgttcattgaatatatccacatgtcttagaggcagkgtctctctgttctgaaattaatcttatagcgtgtagacacatctaagtaaatgtgcacaccttctcccctcactcccccttccaaaaataaaaataaaac

SEQ ID NO: 11970 - DNA, 201 bp, Homo sapiens
cagggttatagcagtggtggtggtggtattaataccttctagttttcaaggctccctagtcacccaatcccaagaagcagttgatgcagagcttggttccyagcaatttgcactgactttgagatcagtaattgcacttggccacttttttaagtcccaagggaccacattggcaagtgtacgctaataaaccctatgaga

SEQ ID NO: 11971 - DNA, 201 bp, Homo sapiens
cacacctcacgaagtgcacgtctgacagatacctgctgttggaaataaatgtacagcccatctgagcatgcctttggcatttctgaaattatagttatacmttttgattgaatggcatttcccctgcttggacggttagggcattaaatgggttgcctgctagaaggagcctgcagagactgaactatgcatcacaggaaa

SEQ ID NO: 11972 - DNA, 201 bp, Homo sapiens
ggtgcttgccaccacgcccagctatttttttcgtattttaagtagagacgggtttcaccatgttggccaggctggtctcgaactcctgacctcaagtgatycaactgccccggcctcccaaagtgttgggattacaggcgtgagccactgcgtcggccccttattctactttcatgagtgagcagaggagtgggatagccg

SEQ ID NO: 11973 - DNA, 201 bp, Homo sapiens
gttcaagcgattctcccaccttagcctcccaagtagctgggattacaggtgcttgccaccacgcccagctatttttttcgtattttaagtagagacgggtktcaccatgttggccaggctggtctcgaactcctgacctcaagtgatccaactgccccggcctcccaaagtgttgggattacaggcgtgagccactgcgtc

SEQ ID NO: 11974 - DNA, 201 bp, Homo sapiens
actcatagatagtaactgaaaacctactgtgtgctagacaagggccaggaacacagagccatcatcctgattgaggttatattccagtttgaaggacatawcaatgaaaacaaaataatttaaatagcgctgagtgtgaaaaagagacaaagggtccagtgatgaagggtgcatgggatggtggaagggaggctacctgag

SEQ ID NO: 11975 - DNA, 201 bp, Homo sapiens
cagagacagcaaagtgcctagaacagttggtggcatgtaatgttatcataaagtctaaattttcatcaaatggaggtgcattattattttatgtatcagcaaaaaaaaatgctgccaattaaactacaggtatatctaagatatattgtgggtttcgttccagactagcacgaataagtgaatgttgcaatattcttgcat

SEQ ID NO: 11976 - DNA, 201 bp, Homo sapiens
gacaatgacctctctttttggagagcttactttaggaatctgcaaagcttggattcatgccttttacaaaggcatgctaaaattctgttgtccagaacatrctccagaatacagagaagtaaacacaacaaaacattatttgttcaaagttacatgaagagtcagaaggggataaagagtcattctaaactagcaaaaata

SEQ ID NO: 11977 - DNA, 201 bp, Homo sapiens
aagtgaaataagaagagatgtcctatacgttttcttttttgaatcatcttccaaggactgtaactcatatgttgtcattcctgataaaccttactcatctyctatgtactctgtggaattggccaagaggtactgaatgactcctcattattgttacaaataataattaatgggttgggtctcctgacaaggcaattaaca

SEQ ID NO: 11978 - DNA, 201 bp, Homo sapiens
agcataaacttctttgcgaactagcatgtgggaaaatgtttctccaccaataagaacattacatcagagatttttgcccattcctattatccttttcccawccatttttatgataaagcataaaatccaatctacggaagaatcatgctggaaggacaaggtaaaggaagccagagccattgtgaaaaatctggggtatga

SEQ ID NO: 11979 - DNA, 201 bp, Homo sapiens
aaagtagtaattcctccttctccaggaagatatcgcagcacattgcaaagtctctgacacctttccctttccagtgtcattaaatgagtaagtgttacacrttttctcttaggagagtagctttaccctcccctccctccccttctactcaacctggtgactcatctctccgattgcaaagagcaagacacgccactccgc

SEQ ID NO: 11980 - DNA, 201 bp, Homo sapiens
tatgggagagacttgtgtgtctgcctggtggaagagcattccagacaaatggaagagtacatgcaaaggatatggatatgaggatgcttagcatggctgargcataacagaaggccaggtggctggaatagagagaggggcgggcaaacgtgtcatctgtctttattccattatctgagacaaggactgtgccatactgtt

SEQ ID NO: 11981 - DNA, 201 bp, Homo sapiens
ctccggcttaaaaaaaaagtagcatcgtacttaaaaaaaaagtagcatcggcatttactcacatattttcttcctttgtcctctaaattctcaagtgacartgatgctaggatcatgcattatattcctattatttatctggtgtgagcacactagatacttttcagctgccttacttataacaatccttggaggtagaca

SEQ ID NO: 11982 - DNA, 201 bp, Homo sapiens
tattctaattagttataaaaccaaactgctcagtttacaaaactcccaaagaatatgttgaagtttttttccatgcaaatgtatcttattgaaatgtcaamtcattgaggctgatttatagagatgtagatcatcccacttttggatagatgtgccttgaatatctactgtctaacaaacaataaacacttatcaataaag

SEQ ID NO: 11983 - DNA, 201 bp, Homo sapiens
tgcttctgatttttttggtacgacgaaaggcaagtggtggtcaggataatgtctgagagaacttgtgcatttgactttcatgtgtggttataactgatttytaaggatcctaggggccaaggttgagctcaaataattcactggtatagggagaaaaatgtgcctcagcagaaaaatatgcattttgtctgtagcataccc

SEQ ID NO: 11984 - DNA, 201 bp, Homo sapiens
attgtttaggcttatacagatgagtatgtatatgtatagacacgtatacttacacgcatgttcttgttgaaaaattgttgtggcaaatttagtgtttgtgmatacaaatataagttaaaaatcttttcatatcagcacatataaatttagcaacttcatggttaattgatacatagaactccattataaagtcaactatat

SEQ ID NO: 11985 - DNA, 201 bp, Homo sapiens
gaacatgaagacttgtcatgatgggactgaaaaaagcatcacatttgggaaattgacaggggaaggtttgtctactcaaagccacacaatcaattaaaagraagaaaatctagtttgcattgtttcttctaatttgctccagggcacaagtttgcttgtaaataaaaatacgcaagtgtatagactttatctctctcaaca

SEQ ID NO: 11986 - DNA, 201 bp, Homo sapiens
tgtaaaaggaagctgcaaaaggaaaatgcaaaaatgactttatacaacctcaacttcatcctccctcttcttgtctctcctctttccttgtctgtcttttyctctttactgtctttctccctattcttttccctttcccccttctagtgatttttgtaatgtaccggggagttaaaatccagctctgctccaggagtaata

SEQ ID NO: 11987 - DNA, 201 bp, Homo sapiens
ttacatctcaagggacagagaaggaatttacaattgtaagttttccagaatactctaagaaaagcaagtccaggagcttacagtcaggaagaaacagaaayttgtttgaaatttagtgagattgatgggaacatgaagacttgtcatgatgggactgaaaaaagcatcacatttgggaaattgacaggggaaggtttgtct

SEQ ID NO: 11988 - DNA, 201 bp, Homo sapiens
gggtaagaactggaaatctcattttctacttcctatccaccagctttccaacctagtttccgtattgaacagtaagtatgtcaaaatctggataaggtaarcgctgctgaaatgctttggggaggtaatagagatctcagttctcaaagtcttcaatatctcagctacagagtgtgtttactatgaatatagattactttt

SEQ ID NO: 11989 - DNA, 201 bp, Homo sapiens
tcaacctcccaaagtgttgagattacaggcggagccaccacacctggcctcatgctcccaatggtgcatacttgagtagttttcagttttgggacagatawttttgctatgaatattcttgtaactgacactattgcagaacttttgatacattctagtacatatggaggggatgtaggctagtctggcaggacagtaaaa

SEQ ID NO: 11990 - DNA, 201 bp, Homo sapiens
agatgtcctcttggttatgcatgttggtgatgtcattagaatcatgaagaaaaccttaaatcttggccttatctggtccagcccatcattttatagatagraaattatggcccagacatagggaattactggcttaaagtcattctgctgtttggtgacaaatatgatcataacgatggtggtggtgatagtaattgacat

SEQ ID NO: 11991 - DNA, 201 bp, Homo sapiens
catgaaattcagaaaggatttaaggggtggagagatcatttaggagatagaggattcattcttttatttaaaaaaaaattaattgaccacctattatgtgstagtcaccataccatttgcagaaatgaaaatataagagaaattattttggctgtgattattgtgataataatggaaatttttccactcaataactcattt

SEQ ID NO: 11992 - DNA, 201 bp, Homo sapiens
cattagccttaaaaggtgaccttcttgcagaattctaaaaaaaaaaagtaagaatatttactcactttttgacccagtagcttcctggataagggattctytccagaaggaggcagattttttcagacgctaagacgtccaactgagagactgctgtaattctcaaccctctaattccaactaatgttaagcagtcttacc

SEQ ID NO: 11993 - DNA, 201 bp, Homo sapiens
tctgacacttggaacacagtaatatgcatagcattatttattggcttcctgcaagtgtcttgtgttaaccttgaaaaataatactttttagaattgagttsacttcttcagacctgtgaataaacagcataaaaaaacaagatggcgaagtggaaatggaaagacttgcttcatttcttcctgttgaagctaaatatataa

SEQ ID NO: 11994 - DNA, 201 bp, Homo sapiens
acatggtgaaaccccatctctactaaaaatataaaatttagccaggcatggtggaacatgcctgtaatcccagctactcaggaggctgaggcaggagaatygcttgaacccaggaggcagaggctgcactgaaccaagatcgcgccattgcactcttgcctgggcaacaagagagaaactccatctcgaaagaaaaaaaaa

SEQ ID NO: 11995 - DNA, 201 bp, Homo sapiens
ctttaactataaaacaatgggcttgcgcaagatatgctacgtggtttcctccaactgcagctctggagacaaccatgctaagttgccagcttctccccctrttccctggccccagttaatttcaggtcttgaagccttggctttgggtctgtaggcctgtttcatttttctattttactatccatatgtagaaagatcttg

SEQ ID NO: 11996 - DNA, 201 bp, Homo sapiens
gtatctcatcattatgttctctctctctctctctctggcccctctccaccttctgcatttcatctctgccttcctctatgtttacgtttttctccagctgwacttgtctttgtagtgactcttagcagccctagcttagcagagaaattaaactctatttcctgaaagttctaacaacagtcctgaaattgagtcttactg

SEQ ID NO: 11997 - DNA, 201 bp, Homo sapiens
tggcaaatgcataggaagctgcattttgcctggaaacagtgactcaaagagaagattgagggttgaaggaaaggtcctagtggttctttatgaagagggcmttcatatctttgtgaggttggtacatctaattaaggtttccagtttttataggcctctgtagataaaatcattctatattttaggtgagcatcttctgag

SEQ ID NO: 11998 - DNA, 201 bp, Homo sapiens
ccaggctctctttatagccccagcttccacttcactctattatgtatcccagccaaactgggtctcttgctattgaccaaagaaatgtgagaacatcaccytgagttttgctgctctgtttatttgcacagactgacccattcccctagaacactttttctgcatgtcttcattctaagacatattaattgtattacaaag

SEQ ID NO: 11999 - DNA, 201 bp, Homo sapiens
gactaggaattgagcaaaaccagtgcatcccattctttccctcccccaggctattttgccctgctgtggcatccctctttgtcagtgcctaccacccaacyggcagctccaaagacattcagaggatggcgccagagatgcctaacagttggctcaaagctctcaatgaaactaaccctggcaatttcatcctttggaatt

SEQ ID NO: 12000 - DNA, 201 bp, Homo sapiens
taaggaagtaaaatatgggagggatctgtttcctgttggtgattgctcctacgttacctttagctacctgattaaaagaaaaaaagaaaaaaaatatttgratagggtggtagaccctacatatacaaaaaacagtggagggaattcccccttcactcatggaaaacttggcactttggtagggtatcggtgggccgagac

SEQ ID NO: 12001 - DNA, 201 bp, Homo sapiens
ctgttatataaggatgcaataaaactgtggagctacttccctgtgaaaaccaggatgcttgccccagtggtatgattaaacaaaaaatttatgtgtacatracaaaatgatgaaattgtgtaaagttcagtaatagtgaaataaggcactgacttaaaaatagagctaaaatgatagtcattttgcaaataatttgggctc

SEQ ID NO: 12002 - DNA, 201 bp, Homo sapiens
tttgcaggggtaccgctaggcctaggatagagcactccaggtgagggggtaaaagaaaatgagaaaagggggaaactgtatatagaagagggtgaggggaraaaagacagggagaaaggaagaggtctcagatgtagaggagaggaagagaatggactatccacaattaccacagagcaatgaggctgttgtaggctaccc

SEQ ID NO: 12003 - DNA, 201 bp, Homo sapiens
ctcaggtgcagattttatgtcttagctacaaatgacctctggctctgtggagaaacagagtcaggagggtatagcaaatttacaaaaagttttttgctctycacgagggctctccatgtgctacaatttgctgtgtctaatgttgattcggttatctgtatgtccctagctctgtctgcaacactgttggttggcttgcct

SEQ ID NO: 12004 - DNA, 201 bp, Homo sapiens
caaaatataaagggcatttagggattaaatacttttcagaggcaaaaatccactaactgctttctggatgctttcttgtaccccaaattagtccactgttyctaccattttttcatttcgtcaagtatgtttgtctagaccagattacttttgtctgttgacttcacatgttagtgtgtgagtgtgtgtggtgtgtgcgtg

SEQ ID NO: 12005 - DNA, 201 bp, Homo sapiens
  misc_feature (1)...(201): n = A,T,C or G, or insertion/deletion polymorphism (see Tables 1-2)
tgacctgcttcttttgactctaagctagtaaagtgcaggtatcttctgttcggaagagctaaggataggtaggcaggcacagtggcacagtggcaataatngtgtgatttaggcatgaagacatttcctgtcttcagtaatacaaaatagtcttaataatttttcataaatatatattttcacatatatttgtaaatataa

SEQ ID NO: 12006 - DNA, 201 bp, Homo sapiens
atgctttcttgtaccccaaattagtccactgttcctaccattttttcatttcgtcaagtatgtttgtctagaccagattacttttgtctgttgacttcacwtgttagtgtgtgagtgtgtgtggtgtgtgcgtgcatatgtatttctatcaccctttcaactctcctctggagcaccttgatccagcttagccattattga

SEQ ID NO: 12007 - DNA, 201 bp, Homo sapiens
atgggaatcgctgatcaagtcacccagctgaagcagcatgcctgcctaataagttttgaaagtttaatacactgtcactggggttgttgcaagagtacacrcccaacatgcgtaggacctgtatgcaagtcccagctaataacatgcaacatccttgctagaatgcagcctgcctttcatcaaatgtagttttcattatca

SEQ ID NO: 12008 - DNA, 201 bp, Homo sapiens
tttttttttttttttttttttttttgagacggagtctcactccgtcacccaggctggagtgcagtggtgcgatctcggctcactgcaagctctacctcccrggttcatgcctctggagcagctggggctacaggcaccccaccaccacgcccggctaattttttgtatttttagtagagatggggtttcaccgtgttagcc

SEQ ID NO: 12009 - DNA, 201 bp, Homo sapiens
atgccttcatattggaaaaacacaaaaataattctttataacaaactctgataaggaccttacaggatttataacaaacacttgctgatcggaggaaaagsctttccctgtcgtaaatgagacatatttaacagaggaagtgacttttcacttgtgtcttaaactatgattcaggggttaggtgaagctggagaagagcat

SEQ ID NO: 12010 - DNA, 201 bp, Homo sapiens
gggggaagaggatgccttcatattggaaaaacacaaaaataattctttataacaaactctgataaggaccttacaggatttataacaaacacttgctgatmggaggaaaagcctttccctgtcgtaaatgagacatatttaacagaggaagtgacttttcacttgtgtcttaaactatgattcaggggttaggtgaagctg

SEQ ID NO: 12011 - DNA, 201 bp, Homo sapiens
ccactgaaattaccttaaagagtgatgatgggaccttctggaagtgaggttcccagtaataacctgtctgccatatgtattccactgctaatagacttcaragatgagactactcatgactgggtttattgcaatagcggcttggggtagaagggaggtatagccatctcttcctctctttgattttcttatgcagataaa

SEQ ID NO: 12012 - DNA, 201 bp, Homo sapiens
atatctgcttcctaggggaagaacaaagtaggatttaatgtttcaagcataggctctgaattgcaggccatgtatcaatcagagaaaacttactgacagcrataacagggctttaaggagacttcttttctccagatgaagagtgattaagccagctagccactcagcttctttgagttggaaaaatgagtttaagtaagt

SEQ ID NO: 12013 - DNA, 201 bp, Homo sapiens
atggctagataacgctgaacctcaaaaatcttaaaggtttgtcatcctaaaattgtacattttaattttctatgaatctgataaattatataggttaattytgtagaataattttccctgttaaagctaaaacaagaaataagcaaaagagcatcagtctgcaaaaactgaagtctctttaatgtgaggtttgatcattta

SEQ ID NO: 12014 - DNA, 201 bp, Homo sapiens
  misc_feature (1)...(201): n = A,T,C or G, or insertion/deletion polymorphism (see Tables 1-2)
cctaatcactgccgtttgtgcctaccagtccttggctcttctgaacacaaaggcagaaggtcctgcactttaccagcttacagccaaacaaagcaggacanccctataacccaaactccccagaaaccacacatttttcattactatgcatgtaccatgagatttctcatctctaaaggtttgtttcccttttgggggagt

SEQ ID NO: 12015 - DNA, 201 bp, Homo sapiens
atcatgtttttgactttgaaccagaaattattttctgattttagtgtgttcacatattttgtagtcaagatactgagacatttgacacaggaaaaatcccycacttgccagtttggctcttccccatggagtgtgttgtgaattcttatctgggtttgttattcaaaatttagttttggtctatttcagatgtccctagat

SEQ ID NO: 12016 - DNA, 201 bp, Homo sapiens
tatcgttatttcaacttgagttttccttccttttcctcttcatgcccaattcttagcttatctccagctgcaaattcagaagagaagacaagtgctaaatyggtgcctcactttggagcctgaaacaggactacttttttttttctttcctgcttttagtccgtaaggagatgatagacattttataatgacacagaggtg

SEQ ID NO: 12017 - DNA, 201 bp, Homo sapiens
tggctaactgtatttctactttctgatataattaagaatacttattcatatgaaaggctcattttgacaaaatctcagctacttttaaaatgtattatctstgggttgagagtatctttcctttgaaatgacatttttttttcctttggagatctgatgactgatattttttatatcattaggttgagttttgatgaaggg

SEQ ID NO: 12018 - DNA, 201 bp, Homo sapiens
ttttgtatttgtgtgttgtgtgtgtgtctgttgggggaagaggatgccttcatattggaaaaacacaaaaataattctttataacaaactctgataaggaycttacaggatttataacaaacacttgctgatcggaggaaaagcctttccctgtcgtaaatgagacatatttaacagaggaagtgacttttcacttgtgtc

SEQ ID NO: 12019 - DNA, 201 bp, Homo sapiens
tttacctccttcctcttgtcctccctgcctttcctcctaacttctttccttttctttagtctttccttcattccttccttctttcatttcacatttgactstctgttatataccaggaactatatctatgaatataaagtgtgtaaagagaagaccttccagtagctttattgggtatctctgtgtgtgtatcttttgtat

SEQ ID NO: 12020 - DNA, 201 bp, Homo sapiens
gtggaatgaaaagattcgaggtagggaagaaaaacaatggactccatcctctttctcttccacttttcccacagcagactataaccagtctgttaatcccycaaaatggaaagtgcataaggcacagtaggaagaagggaagaagggtaagtgttccaggttcaggaaataaccttggaaataaaacaaagagtcccctaa

SEQ ID NO: 12021 - DNA, 201 bp, Homo sapiens
aggccataaagtaaaagcagcaataattctttatcatctgtaactgctagagatactcttggaccacaggtctaggggtgaggcatcatcaaataaaaatyattggaaacactgtggtttgactttcatatgtaaagctttgttttgtagttgtaattgttttactatagatgagaaaacatttaggcagaataaggaggt

SEQ ID NO: 12022 - DNA, 201 bp, Homo sapiens
gtatctggtcaatgacaggaccgttaaaatcagcacttatacagacattcagcattgattggcctcagcaattaagaactcactaggccataaagtaaaarcagcaataattctttatcatctgtaactgctagagatactcttggaccacaggtctaggggtgaggcatcatcaaataaaaatcattggaaacactgtgg

SEQ ID NO: 12023 - DNA, 201 bp, Homo sapiens
agaaggatgagaggagatcccaggcagacaccaggatgtacacagaaagactccctttcccttccataaaattcacttcaagaagggagttcattttcctrgttcaacataaaggcagtgtaaaggtacacaagatacatctacctattgcctttttttaaataattaaaatatcctagacaaaatttttatcatatattt

SEQ ID NO: 12024 - DNA, 201 bp, Homo sapiens
ggggtgccccgcacctcacacatgctcacgttttgctaaagaagcaagttttgaacaggacctggaaggaaggaagctgtgctgtagtttaggagaggggyggccttagatgacaggtactcagggatctctgcctgtttttaagttactgtaatttttttttccttgaactcagaacaaacctaaggtcagggagttcca

SEQ ID NO: 12025 - DNA, 201 bp, Homo sapiens
caaaagttacatatacagataaattaatacatgctgatatggctggtttgtgtacttctcttttctcaaaagccattcagttaatgctttttgctaatctmtctgtggcatgcaggtgcctggcacagaggtacagaaaggtttgagtctgtctgtcaataaaggagattgacaaatgagtcaccaattataacatggcct

SEQ ID NO: 12026 - DNA, 201 bp, Homo sapiens
ctgtttttaagttactgtaatttttttttccttgaactcagaacaaacctaaggtcagggagttccagtttgcttgctgtgaaattaaaaagttaagaatrtgttcactgatgcttgtgccttcagtaaatcaaacgctgtgctagtagagtggaacttggactcagcattcctcagcagcttacagccccggaatttaag

SEQ ID NO: 12027 - DNA, 201 bp, Homo sapiens
aacttaacaaaagttacatatacagataaattaatacatgctgatatggctggtttgtgtacttctcttttctcaaaagccattcagttaatgctttttgmtaatctatctgtggcatgcaggtgcctggcacagaggtacagaaaggtttgagtctgtctgtcaataaaggagattgacaaatgagtcaccaattataac

SEQ ID NO: 12028 - DNA, 201 bp, Homo sapiens
ctagctctgtgccaggagtcttctaggtacttaaagatgtacattataggaaaaatatagaaaaaattatgttaacttattttaaagactaaaaaagtgayggcacagagatgttaactaacttaacaaaagttacatatacagataaattaatacatgctgatatggctggtttgtgtacttctcttttctcaaaagcca

SEQ ID NO: 12029 - DNA, 201 bp, Homo sapiens
ctcccgggttcaagcgattttcctgcctcagcctcctgagtagctgggattacagctgcctgccaccatgcccggctaatttttgtatttttagtagagayggggttttgccatgttggccagtctggtctcaaactcctgacctcaggtgatcctcggattataggtatgagccaccacgcctggtcaagagttttttaa

SEQ ID NO: 12030 - DNA, 201 bp, Homo sapiens
ctgcaacctccacctcccgggttcaagcgattttcctgcctcagcctcctgagtagctgggattacagctgcctgccaccatgcccggctaatttttgtayttttagtagagatggggttttgccatgttggccagtctggtctcaaactcctgacctcaggtgatcctcggattataggtatgagccaccacgcctggtc

SEQ ID NO: 12031 - DNA, 201 bp, Homo sapiens
aacccttgctgcagggtgacagggagaaagctggggagaggataggcctaagcaattcagtggaaggcagaaagacaagccaacctttccccagtcagtgyggcaaatgctgtaacaattcattcaattatgttaagtgactattaaaggaatcctaagccctcccttgggccatttcagttctaagagattgtaattgtt

SEQ ID NO: 12032 - DNA, 201 bp, Homo sapiens
tatctgggtttgttattcaaaatttagttttggtctatttcagatgtccctagattacatgttatacttaatttctgtttccattgaagttcccatatttsaggggaggtgagctctggaaagctttagttttttacatgagaaaaaagaattatatctttatttttatttttttatttttattttattttattttgtttt

SEQ ID NO: 12033 - DNA, 201 bp, Homo sapiens
atgtgatgaagccatttatcttaaatgctacaactgcattttaatcaaggtatttgaattatctttgcacgctcttttaaataacatttacatgtttagtygtcccagagaaaatttagaatgtatatttgtgttttatataaaaatgaccttgtgacttggcttgaacactgctttgcataattgtactgcataaattac

SEQ ID NO: 12034 - DNA, 201 bp, Homo sapiens
cctaatagtgtgcttttgttttctctctcatgttcccagtttttagtttcatgcttggctaaattttatgatcccagaattttccctgtagtagtcatggyctcctgaatgcctgaaggccaacaataaaatacaatatttagtcaattacactggtcccaaatcaagaaatttcacagaagaaagcaatgctaaatcaca

SEQ ID NO: 12035 - DNA, 201 bp, Homo sapiens
ttgcgtattttggtgcctgtcccagcaactacatgaaacagaagaatttatttgctttatatgttgagtacaaacttaactttgaatgtcattccagataytttatccatagtcctaaactcaataacattgtgtcctgtgttatgcttattttgctactaaaaactatattctattttaaggagaaacagaaaagtagtg

SEQ ID NO: 12036 - DNA, 201 bp, Homo sapiens
atttttttgctgtgttggtcaggctggtcgcaaactcctgacctcaagtgatccacccgcctcggcatcccaaagtttggggattacaagtgtgaatcacygagcccggcctggattttaagcaaaatttaagagagaaaaaaacatgtgatccacttagcacagttcctgacctcgaggaaaggttgctctggttatttt

SEQ ID NO: 12037 - DNA, 201 bp, Homo sapiens
ccagtgggttttcaaacttatttagcagggaaccaattttataaatgaaatcttttgtgaaatctcccctactccatcctttagaaggtattaaaacagcrtttcatttaacaaatgtataagttcatgtgcttacaaactccatggcttcaaatattgaagttatattgatgaacaaacatttgaaaacaggtgttgtgg

SEQ ID NO: 12038 - DNA, 201 bp, Homo sapiens
gaggctaaaccacaacttggaaaatggaaggaaagcgtgaaattgcaactaagcaaaaatgtccctgtttcagtcttagacaaggtcttggaggaactcaygaaaaaaaatctgctgcaataacagttgattctacctgttgtctgggcacatttgaacatgttatcttcgaggaactgcttctgatgttaaaaattacta

SEQ ID NO: 12039 - DNA, 201 bp, Homo sapiens
ctatgagctgtgagcatccctgtgtgaattttttttcctcaagcctgttcaactccagcactttggcttttaattgttatactacactgcagttctgcaarcctctgctgacatatctcaaatgtctagccataaagatgggaagagggtgtgagggatgagactggattgatacccaaggctattccttgaggctaaacc

SEQ ID NO: 12040 - DNA, 201 bp, Homo sapiens
aaataaaaggaagagacgtgattttgtagaaaggaggtgacagactaaaggaacattttcctttctttaagtgagaacaaacctggccatgtttacgtttyccagggagaaatcagtgaaaagagactgaaaatatagaaaaattagtggagaatagaactgatagagaactgatagagaattgagtggtagagaaggtat

SEQ ID NO: 12041 - DNA, 201 bp, Homo sapiens
ccagagccaggaatggtagcacacatctgtagtcccagctagtcagaaggctgaggcagggggatcatttgagcccaggagttcaagactgtagtgcactrtgaacacaactgtgaatagcaactttactccagcctgggcaatatagtgagatcccatgtcaaaacaaaaacattatgtctccagcacatgccatggcat

SEQ ID NO: 12042 - DNA, 201 bp, Homo sapiens
tgacaggtgtgactccttaaacaaaagttggagcaggcaaagttaaacaggaaagattgaacccagctgaaagaaaaggcaggaagatttgtaaacgctgrggttagctagtgggaaaatactggagaactttaggaagcacgtgggtttccagtgtgattagaccatctgtgtgagttaatcactgcttagggaagtcag

SEQ ID NO: 12043 - DNA, 201 bp, Homo sapiens
tggagcacgtgcacctgtctcttccctttgtcaccacaaagaacaaagaggtcaatgcgacggcagtgctgtggcccagccaagtgggcaccctcacttaygtgtggtggtacggaaacaacacggaggtgggttcaccttccacatgcgatctagggacagaagctcaattcacgctgcctgaagcaaaggagggaatga

SEQ ID NO: 12044 - DNA, 201 bp, Homo sapiens
ttaggtacaggaaggtggtttccaataattgcactgatggcgtaagggaacagtacactgccaaaccgcagaagtgcccagggaaagccccgcgggggctrcggatagtcacggctgatggaaagctgacagcggaacaaggacacaacgtcactctcatggtgcaattagaagaggtaggactgattcctatctcccccc

SEQ ID NO: 12045 - DNA, 201 bp, Homo sapiens
ctcggctcactgcaagctctgcctcccgggttcacgccattctcctgcctcagcctcccgagtagctgggactacaggcacctgccaccatgcccggctattttttttttgtatttttagtagagatggggtttcacagtgttagccaggatggtcttgatctcctgacctcatgatccggccacctcggcctcccaaagc

SEQ ID NO: 12046 - DNA, 201 bp, Homo sapiens
gcctggagtgcactggcttgatctcggctcactgcaacctccacctcccgggttcaagcgattttcctgcctcagcctcctgagtagctgggattacagcygcctgccaccatgcccggctaatttttgtatttttagtagagatggggttttgccatgttggccagtctggtctcaaactcctgacctcaggtgatcctc

SEQ ID NO: 12047 - DNA, 201 bp, Homo sapiens
  misc_feature (1)...(201): n = A,T,C or G, or insertion/deletion polymorphism (see Tables 1-2)
ttcctttaccttaatctcatgctctttttgatcagttgaagtgcatttctctgtatctcattggcactgtgatttttgtttggggatcaggagcactgatntgagcatggtccctggtatctctctagaccccccacatacttttatcctttttttgggggggtgggtaggggagtgcagtggcatgatttcggctcactg

SEQ ID NO: 12048 - DNA, 201 bp, Homo sapiens
  misc_feature (1)...(201): n = A,T,C or G, or insertion/deletion polymorphism (see Tables 1-2)
caataaaatagttagagatttatctcattaattttttgttctggtatggaaccatctccaagatatattattgagtacatttaacaagttgctaaaaatangcagggtatgataccactaaagtttaaaaagataaaaagaaaccttattaaaaatattttaagcttttcctttaccttaatctcatgctctttttgatca

SEQ ID NO: 12049 - DNA, 201 bp, Homo sapiens
aaagtgactacaattatgaatttttaatgtgtatctccagttttttcttccccgtttatgtatattttttctttgcgtccatcaatagacaacgactgaawaaatcggatattttcatttaataggttgcaataaaatagttagagatttatctcattaattttttgttctggtatggaaccatctccaagatatattatt

SEQ ID NO: 12050 - DNA, 201 bp, Homo sapiens
catccaagaagagttttattgagtgacggaacagctctcagtggagaggagacccaaagtgggtagtccctaccagaaggcgggtagtcccaacgtgtggmtgagggcagggtttttataggctcaaaatgggggaggtgcaggccgtaggtagaaagagaaaaacatattgggtctcggaggagcttcccatccatgatt

SEQ ID NO: 12051 - DNA, 201 bp, Homo sapiens
agataaggatccctttgactattacccacaacccccaaactctaccaaaagtgactacaattatgaatttttaatgtgtatctccagttttttcttccccrtttatgtatattttttctttgcgtccatcaatagacaacgactgaataaatcggatattttcatttaataggttgcaataaaatagttagagatttatct

SEQ ID NO: 12052 - DNA, 201 bp, Homo sapiens
tctccgaattcatccacctcattaagtgatacatgactatatatatatacatatagtcagccttccctatctgtgggttttagatctgttaattcaacccwtcttggatcaaaactgttgggggaaaaaaatttaaaaacaacacaacactatcaccaatacaagtaaaaaaatacagtatagcaattatttacataatat

SEQ ID NO: 12053 - DNA, 201 bp, Homo sapiens
tgtgatttgctcatatttactacccacttagactttattttccagatggagaatattttctttttattaatagtacagctgtattaattattagacaatcrcatatatacatcttccttataaaagttcttaaattactgataaagataaggatccctttgactattacccacaacccccaaactctaccaaaagtgacta

SEQ ID NO: 12054 - DNA, 201 bp, Homo sapiens
gggccaattcctatttttatccaaaagaagtgtctatgggactattggggaggtttcagtactttatgctcagaaaacctgcctatgccaaaaattggggrctatgacctcaggcaagtcttagacatctgcaaggtacccatggccccaagtacaagacttagcatatagctagtgctcagtaactgtgtttttaaacag

SEQ ID NO: 12055 - DNA, 201 bp, Homo sapiens
ggtgtctgacttataagtattcaagatttgagaaaatcccaggtctcctccctacggaaatgtcactcatccttttttctctccctttgtgatttgctcayatttactacccacttagactttattttccagatggagaatattttctttttattaatagtacagctgtattaattattagacaatcgcatatatacatct

SEQ ID NO: 12056 - DNA, 201 bp, Homo sapiens
cacaactcttctaggctttcaccttcctggccctctcactaagatggtgtctgacttataagtattcaagatttgagaaaatcccaggtctcctccctacrgaaatgtcactcatccttttttctctccctttgtgatttgctcatatttactacccacttagactttattttccagatggagaatattttctttttatta

SEQ ID NO: 12057 - DNA, 201 bp, Homo sapiens
tctctcttctccctgtcttctgtcactgtggcccctccggccccacgcgggatctccagcctccttcctctcacactgaatttaacatcaacacaagcacrcccctccaggaagtccttagcactgcttctctgaccacaactcttctaggctttcaccttcctggccctctcactaagatggtgtctgacttataagtat

SEQ ID NO: 12058 - DNA, 201 bp, Homo sapiens
taactctcattatgtaaagaaatagtctaaaactgagcttggttgatgaccttctcagagtcacacgccatgctggagatggaactaggacctagaagatmgctccaacaggaagacggaacacctgccacacctgctgattggccctgtgtgttgggtgcagagatgacttccacattctccttgtagccctacttattt

SEQ ID NO: 12059 - DNA, 201 bp, Homo sapiens
cactccaacccacagtggatctgccatgctgatgctgctctcagtggtgtttgtggggctggcagtgttcgtcatctacaagtttaaaaggtgcgtgtccstctatccacgttcccccacccctgacctcttccttctccctgacaggttcagaagcatgtgttacagtgatgtgcatagcagtgatggtttctattaata

SEQ ID NO: 12060 - DNA, 201 bp, Homo sapiens
ggtaacagcagtgaaacttcatctcaaaaaaaaaaaaaaaattaaattaaatagaagagacctagattgaatttggacaccaatcctagcctggttttccrtctaatatgccagcactcctgtctgtgccatgtgcccataatcatcagtgtaacaccatcaaactggaattcagtgcccagagatgtgagcctccagctc

SEQ ID NO: 12061 - DNA, 201 bp, Homo sapiens
ctgagtttacagtctagtaagggcataaaacagtgtggggtttgctgtaataggagctgttgtttgtcagtgtctggagaagggaggtacagagcactggktcccaacacagacttcacagtcagaccaggcttcaaaagcatcagcagtcacttcctagatggccttgagccactgtctaatcttcctacagccaccatc

SEQ ID NO: 12062 - DNA, 201 bp, Homo sapiens
aagaagagcacagtgttttgtacctggatcaaggtggagtcctggttgctatgaaacacacatctctcccaattcgacatctttggtaagggcacatgctrcctgtgaaatctgcacctgatggtcctgaactgctaagatcagtctaggagtcaggctatcaaaccgtgtctgtttctgtagtaaatctgttaccaaaat

SEQ ID NO: 12063 - DNA, 201 bp, Homo sapiens
gttggatggaatgtttgctgtaagtctggtaagttcatttgttttatagtgttgttcaagcctactgcttctttattaattttctctctggatgatctatycattgttgaaaaatgggttattgaagtcccctattattatttgattgctgtctatttctcccttcatttctgaaatttttgccttatatgtttaggtgcg

SEQ ID NO: 12064 - DNA, 201 bp, Homo sapiens
ttagaaacaaaatcttcaacaacctggttctgtatccttgtagcatgaggaggtcagacacgctggcaggaggagtcctggagggaatttatggtgtcatygcacagtggatgttttatttaattctgtcttccaaccactggccaaaggtagcctacaagctgaggtggttctggatgctaataaatatccctaaagagc

SEQ ID NO: 12065 - DNA, 201 bp, Homo sapiens
agagttccagtggctccacatttcaccaagtcaatattttcatgtctttctattctttgctagtctaattagtatgtacagaatatcactgtgattttcgyttgtgttttcctaaagaataatgaaattaaacatttcaaaaatgattattagctgtttagctctcctgtgaatttcttgtgttcgccctcttttttctct

SEQ ID NO: 12066 - DNA, 201 bp, Homo sapiens
ggaaattgagatgcaccacccagatctctgttcagggagacacttattgtcttttctgggagggctatgggcagagtcttcaccagctgggttccaagtcrtgtcacttcttagggtggctcatgtctgatgacaggctggtgcagttatgtaaagtcctggccatctcagcccaatttaagacaactctgaagggccatt

SEQ ID NO: 12067 - DNA, 201 bp, Homo sapiens
ttttaaaaaatacaggccatatataatggctacaggctagatctacaatctacaaatacagtttacccactagtctgcatcatatatttatgtgatgcttrggagtttacaaaacagttcacaagtgtaatctcatttaatatttacagctgagatatgagctgggatcctcttcacagatgcaaaaaaacaaggctcaga

SEQ ID NO: 12068 - DNA, 201 bp, Homo sapiens
ttatgtaaagtcctggccatctcagcccaatttaagacaactctgaagggccattctgtctcccctcggggtctcttgaagttgtcatgggcctacatggyagctcaagttttcccttgtccatgtttgtttccttccctttgctcccataggtgttgttcccaagagcacttcttagtaaacatcctgcatgctaaactc

SEQ ID NO: 12069 - DNA, 201 bp, Homo sapiens
gcactcctgtctgtgccatgtgcccataatcatcagtgtaacaccatcaaactggaattcagtgcccagagatgtgagcctccagctctgccactgtttgrgttgggccatttcattctgatatggcacagggacctacttgtagggtcatagacttgggtctagagacctgggctggtgatggcaatcagccaatgtacc

SEQ ID NO: 12070 - DNA, 201 bp, Homo sapiens
gataaacggtaaagaggatagggagtcttgttcctacacgtctagaggagagtcagagctgaaatgctgcttgattgagaacatgggcatatatgacaatragaaatttaggttagtagttaggtggaatttccccgcactggaattgttaacaggaagattgtcagatttcctaaagcttttcaaaaatagagtatggtg

SEQ ID NO: 12071 - DNA, 201 bp, Homo sapiens
agtgagttcctgcttttgttgtttcctcaaatgtcatggtactatattttggagtagtgaatcctgaaccccatcattgccttttctgtcaaagctaactrtactcctgacttcaactccgtagattgttgttgcctgtttttgttccatttgtaaatagaattatacacactattattttgtgtctgttttttgttttgt

SEQ ID NO: 12072 - DNA, 201 bp, Homo sapiens
cctatacttagccattggtaactttttaaatttttattttactgtaaaattcagcactgataaatcactggcccttacatatagagtggatttaaaatttrtacactgtgactgaggtgggtagaaatataactttatttctgcataactgaatactgcttgctcgccagcacccatttctgcttaaggaaggaatactta

SEQ ID NO: 12073 - DNA, 201 bp, Homo sapiens
gtttgaaggttatgctggcctcataaaattagtttggagatgtcctctcctctttaattttttgaaagactttgagaaggatgggcattaattatttaaamgtttggtataattgaccctggaatttttttgttgggaggtttttgattactgattcaatcttctcacttgttatttgtctattcaaattacctagttatt

SEQ ID NO: 12074 - DNA, 201 bp, Homo sapiens
gccacacagccaatatggcaccccctaccccaccccccaaccctaggagctccagctcagtgaggtgcaattgttgctaccagtggctggctggagttccrcatcagcaggtcttatcctgatgtgttgtgggagtagggcctgaagatgaatgctactcattcccctggattcagccttttcctgagggtgtatatgagg

SEQ ID NO: 12075 - DNA, 201 bp, Homo sapiens
acacaccaccacacccagctaatttctgtagttttagtagatacggggtttcaccatgttggccaggatggtctcaatctcttgacctcattatccgcctrccttagcctcccacagtgctgggattacaggcgtgagccactgcacctggccttgcctgttttttgtttgttgataaggcagtgggagatgtcactggaa

SEQ ID NO: 12076 - DNA, 201 bp, Homo sapiens
tttgtcgcccatgctagagtacagcagtgtgatcttggctcactgcaacctccacctcccaggttcaagggattttcctgactcagcctcccgaaacaggyacacaccaccacacccagctaatttctgtagttttagtagatacggggtttcaccatgttggccaggatggtctcaatctcttgacctcattatccgcct

SEQ ID NO: 12077 - DNA, 201 bp, Homo sapiens
tatcactttgtcgcccatgctagagtacagcagtgtgatcttggctcactgcaacctccacctcccaggttcaagggattttcctgactcagcctcccgawacaggtacacaccaccacacccagctaatttctgtagttttagtagatacggggtttcaccatgttggccaggatggtctcaatctcttgacctcattat

SEQ ID NO: 12078 - DNA, 201 bp, Homo sapiens
gagaacagagaactctgttttgctcttgcctcttttttttctttttcttttcttttcttttcttttcttttcttttttttgaaatggagtatcactttgtygcccatgctagagtacagcagtgtgatcttggctcactgcaacctccacctcccaggttcaagggattttcctgactcagcctcccgaaacaggtacaca

SEQ ID NO: 12079 - DNA, 201 bp, Homo sapiens
tattttaggaagatcccggggattaatgtttatgcccagatgcagaatgagaaagaacaagagatgatcagtccagtcagtcactctgaaagcaggcccartgtccctcagactgaactaaggaggcctggccagcttatagatgagaaggtggaatcccagctcataggtaaatgattcccagtagccaccagctgttcg

SEQ ID NO: 12080 - DNA, 201 bp, Homo sapiens
tatgggtcatcctttctttgagctagggccccagtacctgctatttgtctgtaaatggaatgctcttcactccttctgtccattgatcctattgctgcatrtacttgaagatttgattcatttactccaaagggttcctggaccttgcttttcctccaggtttccatctgcaggtgaaaggtcattcctcctgtgtcttca

SEQ ID NO: 12081 - DNA, 201 bp, Homo sapiens
gtttgtgaataatggccttgagtcagaggctgtgtagggatgagggcagcctgtgctctctggagaactccctaggttcaggctggagggaactcacctgygtgtttgttagccctctgcaagccctgtgagtgagtcccaacgcctcccttctcctccacgccacgtccaggggaagagcagtgggtggcttgggtcaga

SEQ ID NO: 12082 - DNA, 201 bp, Homo sapiens
accttggctgcaaactagcatcaccaggggaacctaaaaacaaaaacaaactgatccccataattctcaattaaatcagcatttctgtttgcagagcctgrgtatccatctattttaaaagtacccccagctaattccaaagggtagacggggttgagatctactaagctactaagctactgtcaccttagtatacactga

SEQ ID NO: 12083 - DNA, 201 bp, Homo sapiens
tcctaaatttttaacctactgccttatgtgtaggtgatacagttctgaataatgtgctacgtgacctcgagaaattccatgacattgctgtcaaagaagargagcataaccagtgccaagtgggaaaagcccagagattcaaggcaggaatctgttatttccacagagctctaggcattcctgttcagcccccttgatttt

SEQ ID NO: 12084 - DNA, 201 bp, Homo sapiens
gcaatcaaacaatgaaaattaagtgctatttgagtatagtgtcctgtattgggcacaaagaaagtcagaagatcctcagaacacaatttcataccttctargaacacaaagtctctttattctttcagcatgaccagatcctccatatttttcaggtcataatccaaataccaacttctttttaagaagccattcgtatct

SEQ ID NO: 12085 - DNA, 201 bp, Homo sapiens
ctatttcactttaagtatgaatattaaaattggaaaaatatatatgcatatgtgagtttacataatgacagtgatattatttcatgcttctcttttcctayttaattatgcaaactatcctttgaaacctgaaatgattgtataagcactgcataatagctacacaaaaataatgtggaattttaattcatgaatatacaa

SEQ ID NO: 12086 - DNA, 201 bp, Homo sapiens
gaaaactatgccagttttgtaaataaaggttttctggaatccagctgcatacattcttttatgtgttgtctgtgttcaccttcatacagtaagtgcagagwtaagtagttgtgacaaagtctacataacctgcaaaactgaaacattcactatctggctgtttatataaaaagtttgctgacctctggtctagaagagtgg

SEQ ID NO: 12087 - DNA, 201 bp, Homo sapiens
attgcctggcacaaaggtattcaggtgaaatttggcaaattaattgaatgtataaatacgtacatacatagatccatgctaactggtataaatccagatayaaagaagatcatattgttgtccttaagtaatttgcagcctgttggggagacagataaatacatgagagattatgtcagtatgtcaagtgccatagtagaa

SEQ ID NO: 12088 - DNA, 201 bp, Homo sapiens
catttaaatagactcttaaatgtcttctctaccacttatgtctctagaccaggagttggcaaactacagcctgagagacaaatctggctcattgcctgttytgtaaataaagttttcttggaacatagccatgccgatttgttgacatattgtctatagctgcttttgtgatacaactgcagcattgagaagtaatgacaa

SEQ ID NO: 12089 - DNA, 201 bp, Homo sapiens
ggttctcatttggatagttatagttaggtgtcaacaaacgaataaaaatgggactgaaatcttcatataattttaatatcacaaaatatgtgagaatcatrtgcctatttttgtcattttaaaatattgtatggtcccacctcattaaataaaatttccccatgattacaacagtaaaataatcttattgtggaaaataca

SEQ ID NO: 12090 - DNA, 201 bp, Homo sapiens
gtctcagcctcctgagtagctgggactacaggcatacgccaccatgcccggctaatttttctgtctttagtagagacgtggtttcaccatgttggtcaggstggtctcgaactcctgacctcaaatgacctgaacctctctttataagtcacccagccttaggttttcttttttatttcttttctttttgtttctcttttt

SEQ ID NO: 12091 - DNA, 201 bp, Homo sapiens
tgccatgggatctgcacacaccagcccttacccttctgccatgaatgaaagcagcctgattctcttaccagaagaaggtgctggtgccatgcttcttgcayacccttcagaaccaggggccaaataaacctctcttcttcttttttttttttttttttttgagatggaatcttgctctgtcacccaggctagagtgccatg

SEQ ID NO: 12092 - DNA, 201 bp, Homo sapiens
taaatgcacattttgattcaccaggtgaggcccaaggttctatatgtttaataagcttccaggtgatgtccttgctgctggtccatgagccatgctgagasatgcagggtttgtctattttctctctgttcctccagcttttcctcatatctaccccatatatgccttctgagcaagtatcatatttgtgcttggcaaaaa

SEQ ID NO: 12093 - DNA, 201 bp, Homo sapiens
ggacctggtggtgcacgcctgtaatcccagctactcaggaggctgaggcacaagaatcgcttgaacctgggaggcggaggctgcaatgagccaagatcgcrccactacactccagccttggcaacagagtgagtcctagtttcaaaataaataaataaataaaaatcaataaagtgacctcaaaacaaagcacatagaaag

SEQ ID NO: 12094 - DNA, 201 bp, Homo sapiens
atcaagatataggaccaagaggggggaaaaacagaaaagaacaacagttggatgatatatagtgtttatttaagatatcctgtaaaacaacaatgattatwatgttcatgaatgtgagaaaaggtggaaaattgaaccccagagtggtaatcaataagaaataccaaatagaaattgtaaaaataaagatataataactga

SEQ ID NO: 12095 - DNA, 201 bp, Homo sapiens
agaaaaatgcattgcaaactttttcatactttcataagtttttccacttcttctcctgcccatgtttcagataaatacaatatcatgtatgacagcctcaractgtattctagaagaaatttacatattgtgatgatttagtttcatcttcatgttgaataaaatttaatttagagtacagattttggatttaggttgctt

SEQ ID NO: 12096 - DNA, 201 bp, Homo sapiens
gtaggacacagagatgatttatgtcactgaaaagtctgtgccaacaattttcttagtccttaagtcaggaagaggatattggcaaggtaggattagcatckaaaaagttgggttcaagtaccagccctttcatgaattagcgtgtcttaaacaactcactgcatctctggaattcttggtttcattttataaatgttaaat

SEQ ID NO: 12097 - DNA, 201 bp, Homo sapiens
taaattttgtttactgccagaaataaaaaccattttaattggtcccttgatgatgaaaaaatgacaaatttagacaggaatgactttgcaatgtcttgttrtttgcagctattttcatgactagttttctgaattcaaacatcggtaacaggtatgaaatgaaaagaggaaacaaggcgacctctggacatgccaaacatt

SEQ ID NO: 12098 - DNA, 201 bp, Homo sapiens
ttttacagatgaggggaaaacagattattggatgtgttataaatgattgaaaatcagatggataaaacattctgaagacagcatgtaaacttcagatcctyattgtcatttccatccttctgtctacattttaatattccagtgtgcatgtgtacatatctgatatgggatactgtgtgtgtgtgtgtgtgatgaggtctg

SEQ ID NO: 12099 - DNA, 201 bp, Homo sapiens
catcccagcaacgcatcttcacttgggcagcaggagttctttcctgtagctgcagctgcatccagtttgcagtttttccaacactccaggaacaaattgcmtggtgttccaccagagatgccagaggagccatgctgcatcccatcttcagagttttacctcattgggtctctcctctatatttctgagttttcatattgc

SEQ ID NO: 12100 - DNA, 201 bp, Homo sapiens
gaaattacagattatattaactaaatcgttacactctagagcatagggagtgctcagtgcaggtggcggggttattagccgttccaaggcatctattatgyagatgaaaactttttcaattgctgatttcagaatttaacaaaatctagagacttttcattgagataatttgcgtgccagttattattagctccaaaccta

SEQ ID NO: 12101 - DNA, 201 bp, Homo sapiens
tcatctagatgacctgtgcaacttcgcctcatactccctcaatagcgaggaccacacatagaccaggactgaagtcttttcacctgcttataaatgtataygcttacctttctttagcaccatctcatggcttttaggatcaaatacaaaacctgagcattacacaaaaggtgctttttgattgggcccctggtgtctttt

SEQ ID NO: 12102 - DNA, 201 bp, Homo sapiens
gttgtgctgctatgtcactggtatactatttcagagtgtgatttgtttttattcatattcttgtctttagtgatctttaggttttatttcaaaatagctcytaaatgtgaaaacctacttaagatactggaagtatagatgtaggaggctgcaatgggctttgtcttgttttcatcaacaaagctcatctagatgacctgt

SEQ ID NO: 12103 - DNA, 201 bp, Homo sapiens
tgccaggcgaatgataaactagtgacatttctgagtttctctgtagaaaatgtctacaaaggctgcatttggctgattgtatttcagaaggctgatgttgygctgctatgtcactggtatactatttcagagtgtgatttgtttttattcatattcttgtctttagtgatctttaggttttatttcaaaatagctcctaaa

SEQ ID NO: 12104 - DNA, 201 bp, Homo sapiens
accagtagaatgactgaaaggaaaatgtgtggagccttttacccattgaaattcttaaataagtagcctgcgttcataggaaaccctgccctgagacttaycgagtaaagacataggagctggacttggcctctgaagggcctatgtgaggacgtgcctttggaaagccctgaaatcttcagaaaaaggaacattatagat

SEQ ID NO: 12105 - DNA, 201 bp, Homo sapiens
agggaaataaaaggaagagacgtgattttgtagaaaggaggtgacagactaaaggaacattttcctttctttaagtgagaacaaacctggccatgtttacrttttccagggagaaatcagtgaaaagagactgaaaatatagaaaaattagtggagaatagaactgatagagaactgatagagaattgagtggtagagaag

SEQ ID NO: 12106 - DNA, 201 bp, Homo sapiens
aagccctttgctcaataaacatcttcatctcctcactgctctcctgagctttatgtatttcttcattccaggtcagacttgcgtgcctcactttgctcccygacacctacacatacacacacactcacatgcacacacacacacacactttgctgcagacatcatagaaataaacacttgggcttctggcttggggagtaa

SEQ ID NO: 12107 - DNA, 201 bp, Homo sapiens
aagacaatctgctctaagtcttgtctttgagtctgtgaccttagataaatttatttgtattctgtaagatacaggcaaaaactgccccctacctatctttyggagctgctgcaagatttattaaactagggggaaaaatgcaaaacaaaaactgtttagaggtgtgatgagacagagggtacacaaatccaagatagtttt

SEQ ID NO: 12108 - DNA, 201 bp, Homo sapiens
gaggtcttgaccaaatagagaaagaagaaagggaagccggaggtgggaggaggacaaacagtgaaacagtaggaccttcgatccattcatatttaagagcytgaagaacacttaaaaaataatacccagaggagtgtgaatttttgtattataaaacttggaacatgtcttgtccccggggaactctgtgaatgggaactg

SEQ ID NO: 12109 - DNA, 201 bp, Homo sapiens
tacttttaagaaattcactcagctctctaggagaaggcactgctatttttctgcatttatatggaacaactagatctacttgtcaattccccccacatccytgagttatttgtgagtgacaacccacctccacacctttggggaacactaagcagccttctccatcctggttatgggagattttctccaggcaactgtcta

SEQ ID NO: 12110 - DNA, 201 bp, Homo sapiens
taaaatatcactcacccattagacctcttcttttagctcatctcttgaaagatcttggaaagaaagagaaaagtagaatacatctttggcaaatttttaamctctgtttaggaaatggtgccaagcactgccagcattaaaaaataataataaatggtgcttataattctagtagggcttattagggtcagggcattgaac

SEQ ID NO: 12111 - DNA, 201 bp, Homo sapiens
atatactcaatgtgtacaacgtgattatttgatatgtgtatactttgtgtaatgattataacaaattaattaataaatccattaccacccttgccatagayttgatccctggaatttgttcatcttaaaattgatattttgtacccttacatcaacatttcccactttcttgcatcccctagtccctggtaacttcctgtt

SEQ ID NO: 12112 - DNA, 201 bp, Homo sapiens
atatcactcacccattagacctcttcttttagctcatctcttgaaagatcttggaaagaaagagaaaagtagaatacatctttggcaaatttttaacctcygtttaggaaatggtgccaagcactgccagcattaaaaaataataataaatggtgcttataattctagtagggcttattagggtcagggcattgaacatgc

SEQ ID NO: 12113 - DNA, 201 bp, Homo sapiens
tgtgtgtgtgtgtgtgtgtgtgtgtgtgtgtgtgtaaaatttataatagcatcaaaatacaacaaacatttatactcaaatctaaaaacttattttcaatrgcactacccagaaaacaacacaaatttggaaataaattttgaaaaatacctgaatgaatggagggatgcatcctgatcatggattggaagactcagtatt

SEQ ID NO: 12114 - DNA, 201 bp, Homo sapiens
agcattaaaaaataataataaatggtgcttataattctagtagggcttattagggtcagggcattgaacatgcaggcaggtctgagataacgtaggaaatraggtgatgagtgttaaagttttgatcactcaaatcatgttaactaatgaggtgagatttctgccccctgaagtctcttattccataaagacctcttctga

SEQ ID NO: 12115 - DNA, 201 bp, Homo sapiens
aggagtcaggacacgttggtcttggccccagttccaccacaaatttcctgtgtatttaatgatagtaattttagttctctggcttatttccttcatttcaraatgagaatgccagactggacaataaccaaggccttatctgttccataaccctgtcagtgtcaccctacctatgatctagtgatgatggcattgaagaag

SEQ ID NO: 12116 - DNA, 201 bp, Homo sapiens
aaattgacaagatcacaaaatttacacaaaatttcaagacctgaagaatagcaaagatacttttgaaggtgactcacaaatttggatgactgacattaccrtatatatatatatatatatatatatatacacatacaaacacacatatatatacatatatatgtatgtatatcataaacaagctgaacaaggagagtcaag

SEQ ID NO: 12117 - DNA, 201 bp, Homo sapiens
agaagactgcatgggaagaggcttttgttataaactacctggtggaatgcaattacttgcaatggattctggccagggcaattgctgttaatattactacsttttgcagaaagtttccagggagtcttccttaaatgactgagtagtcagggcctttgttttacatctcagtgaaaaacctgcaaaaccacagccagaaat

SEQ ID NO: 12118 - DNA, 201 bp, Homo sapiens
gacagttcactttaggaaacaggacacaggtctccactacggacctggctcaactttgagcaaaggccaccagaggtatgtgtggcactgaagcgagtatscatggctcaacaggcattatatcgtaggatgaggaagatgagagcaatagtactggagaactttagaaaaacctttttcttatttcaggtgaagtttccg

SEQ ID NO: 12119 - DNA, 201 bp, Homo sapiens
ttggaacttgattggtatttattgtgatgtcagttttctttctaattttgccattatctgtcagtttcctagattatttttcttaaatttggtattgcccytctcccaattaggaatctatcacttctgacctcaaaaacgagtcagaatttacactattctcttccttctacattacatgggacgttttccctttagggt

SEQ ID NO: 12120 - DNA, 201 bp, Homo sapiens
aaataaagctgctgtgctgtgatatgtattaaattggacaatgcagggaaatatgaaggggaggtgggtcaaaatacagcctaaagatgacacacctcagycctcaacaaattaccacaaaatcaagaatgggcaattgatataattttctatcatggtggtatagaaattgaaatatttattgattccaaataattatag

SEQ ID NO: 12121 - DNA, 201 bp, Homo sapiens
caccaagtgctgcactgttaatagaggtctggcctctgagttcccattttggcagctccccagaagtcaggggttgatgttctgatgctgatatgacatarggatttgtggactctgcttagaataaccactttgtttgtttatttgagtagttttatggaatctacagaaccgcaaaactgttactcaaatggttgctgc

SEQ ID NO: 12122 - DNA, 201 bp, Homo sapiens
ggttaggtatccgcccccaacctcccaaaataatccacctgtgtcataaaatgcatcatctgctcacttccaagctttgagaagtggattaattttgcatmtgtatattcacattttttgtagtcttggctgggttttactataatatacaatggattaggacttctgtttgaattgtgaaactattaaatgattccatgt

SEQ ID NO: 12123 - DNA, 201 bp, Homo sapiens
agacatcacccagacagtgtcctggtgctttcctagcccagtgaactctagtaaccctgcagcgttagggcacaaggggcctttgtatcagtgtcattgartatcgctgagtgccctactaggaaagtggcctttttagaaggagatctggtgtcccgagctggctgtggatagtaatatagagtagttaagagcacaggg

SEQ ID NO: 12124 - DNA, 201 bp, Homo sapiens
accaaaagaagctgtcttccggagcagctgtgacgggaagggttttggtgtgactgagaaggggtatatagctctttatcaacttcccttttctttcatgrgcgcttctgtcctaactggatcacggactcatagacggaatctgtttttctttgtgttctcttctggcgtcagacaaaatcctgggctcctaataaatgt

SEQ ID NO: 12125 - DNA, 201 bp, Homo sapiens
atttcagcaatccctttgctggtcctcccacttgtgggctctcacgcttgctgactgccgttgtcagatgcaccttcctgaagtgctgtttttatcccatraaagactcccgtggttcctactgcctgtggaattaagttccagctccccagcctgacatcaagggtcctccagaagttaacctttgcctgaccatctgaa

SEQ ID NO: 12126 - DNA, 201 bp, Homo sapiens
acaaagtgttaaaattggctctgtaaccagaatccagccctttcaacctcttgcattagccctcaccctgccaccatacatactctatttggccttgctcytattacacagaagaagagattttgagagtctcagaggaaatagctgaaaaatctggaattcagactttgattcaaaatctgcaccctgttatatttgcac

SEQ ID NO: 12127 - DNA, 201 bp, Homo sapiens
aaatttcaagacctgaagaatagcaaagatacttttgaaggtgactcacaaatttggatgactgacattaccatatatatatatatatatatatatatatycacatacaaacacacatatatatacatatatatgtatgtatatcataaacaagctgaacaaggagagtcaagaaacatatatacatgcatatattatata

SEQ ID NO: 12128 - DNA, 201 bp, Homo sapiens
aagaggaaacaaggcgacctctggacatgccaaacattgctttgttaatcttgtgtttcccctttgtgcctctcttgcagttgactatctgtagggaaacygctggctcttattatcatcattttgagcagtggtgtgactgtattatgtaaaggtgctctgcatcctggggctgggagagaggagtctttgttttattag

SEQ ID NO: 12129 - DNA, 201 bp, Homo sapiens
tatatatatatatatacacatacaaacacacatatatatacatatatatgtatgtatatcataaacaagctgaacaaggagagtcaagaaacatatatacrtgcatatattatatatatatagacacacacccacccactttatgacaaatgagacactgcagtacagtggagaaattataatcttttcaatacatgggtg

SEQ ID NO: 12130 - DNA, 201 bp, Homo sapiens
acattgctttgttaatcttgtgtttcccctttgtgcctctcttgcagttgactatctgtagggaaaccgctggctcttattatcatcattttgagcagtgrtgtgactgtattatgtaaaggtgctctgcatcctggggctgggagagaggagtctttgttttattagcctgacagttcacagcaacttgaattgaaattg

SEQ ID NO: 12131 - DNA, 201 bp, Homo sapiens
gtcaaataaatacttagccaaagacacacaatctggaacatgcatattttgaagaaaactagtgctgtgagtttgctgcttttccctaaaattggagtgcmaagaaaacaatcaaaaacaaatttctggccgggtgcggtgcctcacacctgtaatcccagcactttgggaggccgaggtgggcggatcacaaggtcagga

SEQ ID NO: 12132 - DNA, 201 bp, Homo sapiens
  misc_feature (1)...(201): n = A,T,C or G, or insertion/deletion polymorphism (see Tables 1-2)
gtgcaaactctcaactatagactgtcacatttttcctgaaggatcagcatctgggcttgtatttggttgtggaagagtgacagcattaagactgaagaacntagaagggcagggtaaatagggttagactttgcataccagtgaaaacagaagactggaagaagaaaatgatctggggaaaagtcaatgtaaagagaatca

SEQ ID NO: 12133 - DNA, 201 bp, Homo sapiens
gtggggctgaggcatgaggatcatttcaggccaggagttagagtccagcctaggcaacatagcaagaccctatatctaaaaaaaattaggcctggtgcagkggctcatgcctgtaatcccagcactttgggagggcaaggcaggcagataaggaggtcaggagatcgaaactatcctgactaacacagtgaaacaccgtct

SEQ ID NO: 12134 - DNA, 201 bp, Homo sapiens
cgggaggctgaggcaggagaatggcgtgaacccgggaggcggagcttgccgtgagccgagatcacgccactgtgctgcagcctgggtgacagagcgagacwccgtctcaaaataaataaataaataaataaaataaattcagctggttaggcaaattacccaacccacagcaattgggaaactctagcaaccaaaagggaa

SEQ ID NO: 12135 - DNA, 201 bp, Homo sapiens
taccatgtctgacaggtaacagggctccaataaatgtttttgaaatgaacagaaagcgagggcatttcagtggttctgccttgcctctagtaatcatcatrcccatattagacaggataccagagaggaaagtttagcacagggattaggattccatatgtgatgtgacttagacttcaaattactggcttagtaatttaa

SEQ ID NO: 12136 - DNA, 201 bp, Homo sapiens
agagaaaagtagaatacatctttggcaaatttttaacctctgtttaggaaatggtgccaagcactgccagcattaaaaaataataataaatggtgcttatwattctagtagggcttattagggtcagggcattgaacatgcaggcaggtctgagataacgtaggaaatgaggtgatgagtgttaaagttttgatcactcaa

SEQ ID NO: 12137 - DNA, 201 bp, Homo sapiens
accagcaccacgtttgcgctgacgggagactcagcacacaaccaagccatggtccactggtctggccacaacagcagcgtgagtagaatgggactgagggyaaaggggtggaaagatggaaagggttaaagtcggctgtgtgatctgatggagaattggggggaaatagggtttctggacatgggagatgctgcaaactgg

SEQ ID NO: 12138 - DNA, 201 bp, Homo sapiens
ggaaaagaggaaatatgtataacaggagcactggatgctatttagacagagctcagcaaggccacttacaggcagagtgatagatggtgagtggcagaaaratttctaagccagggtgaaggtatgagaagtttgcttgtcattgatttgcagtcacctaatagaaataactaattagtgaaagttggtcgacttagcact

SEQ ID NO: 12139 - DNA, 201 bp, Homo sapiens
taaagctaagcctctgcatgttccaggttatcagccagtaattttttaaaagcctattaggagtgaaaaaattattcagaagaagaaaagatccagttccstgcaacatcatccgtaaggttcgatgaacaatcaaaaattactagtcatacagagaaagtggaaaatgttacccattgtcaaggaaaaaagtagccaaga

SEQ ID NO: 12140 - DNA, 201 bp, Homo sapiens
tgagtaaagcaaaagagatatccacacagcagcccattacctctgcttgattccagcccatttatgacaaagaatagacaaatgagccaacaaataatgamcaacatataaaataaatactttttccattaggaccaaagaaatggtacgaaaaagtatatgcccggaggtggtgaagaactttttattaactccacgcca

SEQ ID NO: 12141 - DNA, 201 bp, Homo sapiens
tgtataattctggaaaggcagtcaaaagatttctaggagctgtcccacattagccttaaaaggtgaccttcttgcagaattctaaaaaaaaaaagtaagadtatttactcactttttgacccagtagcttcctggataagggattctttccagaaggaggcagattttttcagacgctaagacgtccaactgagagactgc

SEQ ID NO: 12142 - DNA, 201 bp, Homo sapiens
ttaaatatttactttttaactttattatgaaagtatttaaagttaaacatgtattcatctacacagtagagttgtgttatattccgtttttgacagcaatrtttgcattttcattattttctaattagtctgtaattgcagttattatttcctctttcaatagtttttgtagggcatttttgatttctaacattgttttta

SEQ ID NO: 12143 - DNA, 201 bp, Homo sapiens
atgcaaattttaaccactcacatgatgctactgtgtacataattaagcatcattatatactacatgaatcattgagaaacctcctgagagccattctactrtgtaaagcatgcattatactgacaagcagccaaatgacatatacttctgtcctcattaatgctctttttggattataggtcaaccgattatggaacaacc

SEQ ID NO: 12144 - DNA, 201 bp, Homo sapiens
ttcaagatttgagaaaatcccaggtctcctccctacggaaatgtcactcatccttttttctctccctttgtgatttgctcatatttactacccacttagaytttattttccagatggagaatattttctttttattaatagtacagctgtattaattattagacaatcgcatatatacatcttccttataaaagttcttaa

SEQ ID NO: 12145 - DNA, 201 bp, Homo sapiens
caaaagattagctcactggaaaggagaccaaaggtccatggatcctgttcttctgaggactgctgcctaaaaagctgtatccacccaaaaagacaaccttygttcacagtgcagttcctcccctcaccttctcatagtttctctgcaggagccttcaagctcctatttattcctgtagttcaaaattctatttaagattca

SEQ ID NO: 12146 - DNA, 201 bp, Homo sapiens
tctcagctcactgcaagctccgcctcccaggttcacaccattctcctgcctcagcctcccgagtagagtagctgggactacaggcgcccgccagcaagccyggctaatttttttgtatttttagtagagacaaggtttcactgtgttagccaggatggtctcgatctcctgacctcatgatctgctcacctcggcctccca

SEQ ID NO: 12147 - DNA, 201 bp, Homo sapiens
gtatagccaccactaataagatgagtgagtagtgaccgagtgaatatccatgctcctgacatttctaagatagccttcctggtcagatcaagcacatccakgcagaatgctttaagctgttcccaacttccaaaggtaaatccaaagcagttttcatgttgaagtagtcaaatatcattataatccttgaaaatttctagc

SEQ ID NO: 12148 - DNA, 201 bp, Homo sapiens
taaagaatattgaaatggaattaagagaggagaaagtgagagaacattgtaagtctgatatatctagatgaaattatgctctgaagtccattttccctatktcaggaatttggttcctgttgcatcagtggagcctgataaggaccagggaagcagaggcattctgtaggtcttgtatgtaaggagctgagtgaagagaac

SEQ ID NO: 12149 - DNA, 201 bp, Homo sapiens
caatcagggcagaaaaccccagaaggattatacagtgatccttaatgcaatcacttagaaagtggtggtccgaaaattttgtgggcttaggtgctctgggrtacctattgaaatgcaaattccctggcaaacagagattctgattgctttaggttgggagtgagaatcagaaattcacactttaacaagatcttcccatgt

SEQ ID NO: 12150 - DNA, 201 bp, Homo sapiens
acaatactaatgtcccacttcatccacatgggtggtcactacccctgaatcagggtttcaccacaccatgcaatcctcgcctgagtgagtaacttcctcargcttctggctttgcactttgccatttattattccatgaccctctgctcagccgctcagtcctcaagctggtctaccattaatgtgcagtggtaagtctct

SEQ ID NO: 12151 - DNA, 201 bp, Homo sapiens
atgttgcttatttatctttctttaggatccaccattccttcccttactcttctcctattaatgcctagtttagttctcagtctacatagagaatgttttayttttcttgccaaacccatattgttaaatccccagggcttagtgaggaattcagagagggaacttcatggctgccacttgggttcatgtgactgacaggaa

SEQ ID NO: 12152 - DNA, 201 bp, Homo sapiens
gttctgaagaaagaaaaagttggctgggtgtggtggctcatgcctgtaatcccagcactttgggaggctgaggcaggcagatcacttgaggtcaggagttsgagaccagcctggccaacatggtgaaaacccatctctactaaaaatacaaaaaatagccaggtgtggtgcctcacacctgtaatcccaggtactcaggag

SEQ ID NO: 12153 - DNA, 201 bp, Homo sapiens
gggatccatgattttatcagtctttatccttgatgattacatgttaatttctaattgctcaggtgcttttgtatcccagtgaaactcaagcttcagtaaargtttaggccctgccctgacttctttcctagtaatagatgttcacatacttataccattgaattgattttactcaaaatccagtaagacagtgttttattt

SEQ ID NO: 12154 - DNA, 201 bp, Homo sapiens
gtacgttatgagtaccctctctttaaaagagaaaactcaacggttatgataatatagcatacatcttgattttttggagcaagactgcctcttacaatctmgtttaggaggtagggaagaaaaatgctgtcctattgaagatacatttattacaggatattgaatgtactattggccaggtgcagtggctcatgcttgtaa

SEQ ID NO: 12155 - DNA, 201 bp, Homo sapiens
acataaatgagagttcagtcttcaaataactcaaaatctaataggagaggcataaagaaataaagctgctgtgctgtgatatgtattaaattggacaatgyagggaaatatgaaggggaggtgggtcaaaatacagcctaaagatgacacacctcagtcctcaacaaattaccacaaaatcaagaatgggcaattgatata

SEQ ID NO: 12156 - DNA, 201 bp, Homo sapiens
ataaggatcaccaatctgttgttgtttgtccagtagcctaggaagtcattataccttgagccacctccttcccccatcgtcaacctttctttcctccaagrcaagtgctctcagctgactttgacagccttctttttttaaaaagtaaacaaatatatcccttctcaaattgatgtatttttcagccatgtcaatttttcc

SEQ ID NO: 12157 - DNA, 201 bp, Homo sapiens
cattcctctaaagggttgtagttagcgaagcttacaaagttctttggtttcacacatcagtgaattcattctttagcacccatctgggaatgagcaccacrgagtagtttgagtgttttctgtgaacgagttgtaagagtgctggactcggagttaagaacagcctgattcaaactagtcttgtgactctaggcaaatttg

SEQ ID NO: 12158 - DNA, 201 bp, Homo sapiens
  misc_feature (1)...(201): n = A,T,C or G, or insertion/deletion polymorphism (see Tables 1-2)
ttgaagcagaatgcctcacacagtagagggatggaaatggatatttaacagagggtgaggatagttctgggacttttgctcagttgatgaacaaaagggantggggaagggcgtgaaggcaaagggtgtagaaaactcacagcactgcctagtgtgatgtgccaaagagatgggagaacatgggcatatttcttgtgccct

SEQ ID NO: 12159 - DNA, 201 bp, Homo sapiens
tcaaattatatggaactaaaaaggatcattcgcaggtgttgcattaaggcactgaagatacattaacaagacacttcctagccccgccggagttgacacaktctaccctagtaccacccagcaactcattttcctagcgaagtttgctaatcttggctgcgtgtatcatgacacttttgtttgtgattatgcttcagtcca

SEQ ID NO: 12160 - DNA, 201 bp, Homo sapiens
ctatatgagtgttaaatattaatgcatttttcctactctgccaattcccaggcatcctgcgagtgtataattctggaaaggcagtcaaaagatttctaggmgctgtcccacattagccttaaaaggtgaccttcttgcagaattctaaaaaaaaaaagtaagaatatttactcactttttgacccagtagcttcctggata

SEQ ID NO: 12161 - DNA, 201 bp, Homo sapiens
tcagtgttacaattgtgttaaaaagtcacattttgagacctgattttttatttattgtagagcattgcaaccatttatagtgctatatgagtgttaaataytaatgcatttttcctactctgccaattcccaggcatcctgcgagtgtataattctggaaaggcagtcaaaagatttctaggagctgtcccacattagcct

SEQ ID NO: 12162 - DNA, 201 bp, Homo sapiens
tctgaaaatatttcagtgttacaattgtgttaaaaagtcacattttgagacctgattttttatttattgtagagcattgcaaccatttatagtgctatatragtgttaaatattaatgcatttttcctactctgccaattcccaggcatcctgcgagtgtataattctggaaaggcagtcaaaagatttctaggagctgtc

SEQ ID NO: 12163 - DNA, 201 bp, Homo sapiens
  misc_feature (1)...(201): n = A,T,C or G, or insertion/deletion polymorphism (see Tables 1-2)
ggccttgcctgttttttgtttgttgataaggcagtgggagatgtcactggaaacaacagctttgccattaaagataatacaagatttttaaaaactactgntattatttatttgagactatacgcacatggaaagctacactgaatccagcgtaattattttgcctcccgttgacactagccgtaagccaagtagataggc

SEQ ID NO: 12164 - DNA, 201 bp, Homo sapiens
ctgggattacgggtgtgagccaccgtgcctgggaggcacttgcagtattctaacaccatttacattagaggaaaaaagcccctcctagggacgtttgatcyttgtctcatcagtacaagattctattttatagaatattctctaccactttgcttagtatactatagttttaagtgatgggacttctggctttttcccctg

SEQ ID NO: 12165 - DNA, 201 bp, Homo sapiens
tttcctgcctcagcctcctgagtagctgagattacaggtacccaccaccacgaccagctaattttttttttttttttgtatttttagtagaggcagggttkcactatgttggtcaagctggtctcaaactcctgaccttgtgatctgcctgcctcagcctctcaaagtgctgggattacgggtgtgagccaccgtgcctgg

SEQ ID NO: 12166 - DNA, 201 bp, Homo sapiens
ttatacaacctcaacttcatcctccctcttcttgtctctcctctttccttgtctgtctttttctctttactgtctttctccctattcttttccctttcccmcttctagtgatttttgtaatgtaccggggagttaaaatccagctctgctccaggagtaataattttttaatcaaaaacagataattattagtgatattca

SEQ ID NO: 12167 - DNA, 201 bp, Homo sapiens
gagataaaaaagatccaaaagagtaatttacttttacgctcagaatcagattctaaatgtagaaattaatgagacgtttacatagttgtaaaaggaagctrcaaaaggaaaatgcaaaaatgactttatacaacctcaacttcatcctccctcttcttgtctctcctctttccttgtctgtctttttctctttactgtctt

SEQ ID NO: 12168 - DNA, 201 bp, Homo sapiens
tcgcgccactgtgctccagcctggtgacacagcaagactctgtctcaaaaaaaaaaaaaaaaaaaaaaagaaagaaagaaaggaagaaagaaattagctcrgcctggtgtagtggtgcatgcctgtaatgccagcactctgagaagctaagatggaggattgcttgaggtcaagagttccagaccaacctgggcatcatag

SEQ ID NO: 12169 - DNA, 201 bp, Homo sapiens
tcaactgtgaacactggggcatgatactgtacctgatttgagctaatacttgttacagaatgaataaaatactatctagtttttagctttaagaaaataaktttttaaaagaaattcctgcatactcttctggaagtcaaaaattctaattcagagttcagcctctatcatgtcctttgtgtccttgatagttaagtcatg

SEQ ID NO: 12170 - DNA, 201 bp, Homo sapiens
gaacatctgaagtttgttgaaaacagaatgaaaacatataaacctgagatacttatgaaagttacacaaggaatacatcttgcttgtccattcttgtcaaratgaaaagcattaattcacactgcaatcaggttgccttaacataaaaaaaaaaaaacaaatccatgcagttaaacgtaaaaattgaaaaaaaaaaaaaga

SEQ ID NO: 12171 - DNA, 201 bp, Homo sapiens
ctcctcttgtctgtttattatgatgatggttggtcttggagttactgatgtttgtcattacttggctaagtgacctcaactccctgtcactggatattacygaagattcaccctcagtttaaattcagaaacaatgcttcacttgtcattagagctactaaaggacaaactgagacacattaaaatgttaaagagtttatt

SEQ ID NO: 12172 - DNA, 201 bp, Homo sapiens
ggctgagagtttggtgaccagaatcgagagggagccataatagcagggagggcacagatgaggagagctgcaggcacaggtaagaagaatatggcctctgytaatgtgtggcctggcagagaggctggggctaggggtggagtgggatggtgggatagagtataaagactttggtctttctctcattccagctttggaacc

SEQ ID NO: 12173 - DNA, 201 bp, Homo sapiens
gcacatagaccactcctttagggaatcttgtttaactgttgattaggtcagtatttggaaatgctcatggaaagggtcacatattaagagatggacatgtrgacttcttgtattttctagtggtctcacactcaaaaatcttctcaatcaagagtccctgagaattaaatttgagttaacataaagagagatatatcatat

SEQ ID NO: 12174 - DNA, 201 bp, Homo sapiens
taaatgctaggcaaaagagaattatctataagttcttacttagttgagtctgagaagtttaactttctaggttttactttgctactttcttctcaaagaargaaacattgatggaaaacaaattttctatttttcagccaacagcagtggttcattgttggacggaggctaagggcagtggacaagaaagaagtggaaaga

SEQ ID NO: 12175 - DNA, 201 bp, Homo sapiens
aaggaaactttcctgtagttagcatgatggtttatgtgacccagaaagattgcagcttctcaggaacagacatgtctgcccctttctgcatgtgcaaatgyaagagagtttccatttactgtgattccgacaaaattagaggtaatagcaaataatcacattctgttgaaactgcatgttatattatctgtattccctcca

SEQ ID NO: 12176 - DNA, 201 bp, Homo sapiens
gatgcctttaaatgctaggcaaaagagaattatctataagttcttacttagttgagtctgagaagtttaactttctaggttttactttgctactttcttckcaaagaaagaaacattgatggaaaacaaattttctatttttcagccaacagcagtggttcattgttggacggaggctaagggcagtggacaagaaagaag

SEQ ID NO: 12177 - DNA, 201 bp, Homo sapiens
ttaaatgctggctgctaaattcacatcttaaaaacctatggaaatttctggaaggaaactttcctgtagttagcatgatggtttatgtgacccagaaagaktgcagcttctcaggaacagacatgtctgcccctttctgcatgtgcaaatgcaagagagtttccatttactgtgattccgacaaaattagaggtaatagca

SEQ ID NO: 12178 - DNA, 201 bp, Homo sapiens
ctttttagtatgaaaaaaaattctaactattggataaacattcaagtcttcttttaaaaacttctcaattatgattttttttgggcagggtggcagttttmctaattgacaaccgctggtgatattcagcattgaaagtgttcacgcagcagacaagtggaggagaatttaatttgtctggtatgggctttaactgacaaa

SEQ ID NO: 12179 - DNA, 201 bp, Homo sapiens
caagggctgggttagcgtggcttctgttcctttgtttcttaacgttgttttgtgggaaatgtaacgcagagatgattaattgcagagcagatccaactctytctctgcttgtgataagtttaaataaaaatgccaaagtccaaattctgaaactatgtcaaagagtaataattcaaaaatttataaaaattacaccatgct

SEQ ID NO: 12180 - DNA, 201 bp, Homo sapiens
accaaaacagtgtctgtcatatattgtccttagttcacttggtttcttgagtgataagctcagttgtacacacactttattatgaatgtcataataatttrttttctgcatataattatgccactttaatggactagatcattgttttctttgacttgtaagtgacttctaaagcttccctgatctagttcattctcctca

SEQ ID NO: 12181 - DNA, 201 bp, Homo sapiens
agttttcaagccttaggcactctacagtatttaaaagtaggaagatcaaaatcagtatttttggacaaagagaccttatgctgaggaagctgcattgaaargcaatgagcaagaaaagctgaggcatgctttgtgaatttcacagggcttggggatgggcaggacttccagtgttctgtttgtctagagagcatatattaa

SEQ ID NO: 12182 - DNA, 201 bp, Homo sapiens
tacttggtcccttctcagctttcttctctgcagcactaatgtgagcccctgtgtctgtccctcaggccacaggggttccaggccagcacatcctggtggcrgtgctccctggcttacccaccactgctgaactctttgtcctaccctatcaggatccagctggagaaaacaaaaggtcaactgatgacctggagcaggtga

SEQ ID NO: 12183 - DNA, 201 bp, Homo sapiens
tcagtattatcagtattacaattttcgtgcacttttcaaatatatgttgattattgagaaataaaattagactttctggccagtgtttctttctcctgttsattcttctgaatataccacaggcattcaggtcattcttggctcctctagttcagttcttccagatcctatttcccacacaactaaggttgtttcacactt

SEQ ID NO: 12184 - DNA, 201 bp, Homo sapiens; identical to SEQ ID NO: 1915

SEQ ID NO: 12185 - DNA, 201 bp, Homo sapiens
aacaaaaaattatttctcgaagtcctggaggctgggaccttgagccccaaatcacttcactagtagattaggtatctggtgagggcctgcttccttgtacrtaaatggccattttctctttgtatcctcacatggcagaagggatgagagagatctctggggcttcttttgtcagggtattaatcccatttacgaaggttc

SEQ ID NO: 12186 - DNA, 201 bp, Homo sapiens
tgaaccctgcaaagccacaagggtagagctgcccagggttttggaagctcacctgttgcaccatcacccccatggatgtgggacaaggagtgaaagaagaytattttggagctttaagatttaatgactgccttgctggtttcaaacttgcataaagcctgtagcccctttcttttggctgacttctcccttttggaatga

SEQ ID NO: 12187 - DNA, 201 bp, Homo sapiens
aaaagagaaagaagaggggaaagggagagagggtgagagagagagaaattgacctgtattcgatgcctttaaatgctaggcaaaagagaattatctataarttcttacttagttgagtctgagaagtttaactttctaggttttactttgctactttcttctcaaagaaagaaacattgatggaaaacaaattttctattt

SEQ ID NO: 12188 - DNA, 201 bp, Homo sapiens
ttgctctgactcttccaaaagtgtgattgttgtttcaaaggaagggaaaagcttgtgtgtatgttgagttagttgtacaaggtctcgttttttattttttwttatttttgaaatatatgagaagggtaatagcagaaatatggttatacacatagagtaacaacggggctgttgaacgtggtaatcttagtgaatctggtt

SEQ ID NO: 12189 - DNA, 201 bp, Homo sapiens
acatatgacactctggccacttgagttacgagaggctttgcattggttttttctcatctctgcatgtgggtgttcctttaagtgcagtgtagattaagtayagtcaatagatgtcttttctaaatgttctcacagggtcgaggttttctgcagcgtttttatttgaagctgacttcttttagcaagtggggtttttagcaa

SEQ ID NO: 12190 - DNA, 201 bp, Homo sapiens
caatcaaaaacaaatttctggccgggtgcggtgcctcacacctgtaatcccagcactttgggaggccgaggtgggcggatcacaaggtcaggagatcgagmccatcctggctaacatggtgaaaccctgtctctactaaaaatacggaaagttagccgggcgtggtggtgggcgcctgtagtcccagctacttgggaggct

SEQ ID NO: 12191 - DNA, 201 bp, Homo sapiens
tatctgccccctcttggcatcccaaagtgctgggattataggtgtgagtcaccgtgcccagccctctgtaagcatttcatataatatttttatttttaatrttctcttagaccttgcctcttgcccaaatgtaactacagttttcagctgggtatgattctgaagtgtagcaggacacagatttttacatttgtagccctc

SEQ ID NO: 12192 - DNA, 201 bp, Homo sapiens
agaactggtagaaagattggtaagtgcaaaatgtcaagatgcaattgtgctcaatgtattctttctccaaagtggggaaagcatctgaacacttcttttgrggaatatggcagccaggttttgggggcttcaagagtaaatgtgtgatctcttcagagcagggaggacagagcagaggaagctcttccccatccatggcct

SEQ ID NO: 12193 - DNA, 201 bp, Homo sapiens
ctgcgtgtatcatgacacttttgtttgtgattatgcttcagtccacaatgaatttagtctttccattcccagccttattaatacacccttagtacttacartcctaaagcttcctggtaaagctttttcatcatattaaaatcagataagaatagcatctgcttgtgctatagtgttcatcttcagatgtatccgaccaca

SEQ ID NO: 12194 - DNA, 201 bp, Homo sapiens
tgctgacccctactttaaagtatggctttcttttagttgccttacatttgggcagtatatagattagtatgaatttatttatatatttgatatatgatggyatccaaaaggaggatcaaagatgaatcttgctttcaaggagtttgcagtctacttgtctacttgaatgtgtctagattaataaatggaagattgcagggt

SEQ ID NO: 12195 - DNA, 201 bp, Homo sapiens
gcttcctggtaaagctttttcatcatattaaaatcagataagaatagcatctgcttgtgctatagtgttcatcttcagatgtatccgaccacaagaagacbtaatattcaacaatcagaatgagagggcctcagcctttgctacagcctagcatcggctgcagacctcagactgcagcaggactgggcatcctctcagagg

SEQ ID NO: 12196 - DNA, 201 bp, Homo sapiens
  misc_feature (1)...(201): n = A,T,C or G, or insertion/deletion polymorphism (see Tables 1-2)
aaatggaagattgcagggtcacgtcttattcctcttagtagctctgatgcctgccccaattttgacacacagataagtaatgagtgaatgcagaaggaggngaggaagaggcaaattgcaaattgcaaacattattaatactatcaatgtctgtaaaacacttcagaagttgtgtctacatttagaaaaaggacagctgat

SEQ ID NO: 12197 - DNA, 201 bp, Homo sapiens
tgtatccatcgtagcaaactcttgcctgccagggaatgtcacagggattctgtcaaaggcaggcagatgctcctagctgtaggagtgagccagggctgccrtcatgcctgagccagggactaggacaagccgtagtccccagtcccctaggcaggagcagccgaatactaactcatttcctctgatgttgggttgtttttc

SEQ ID NO: 12198 - DNA, 201 bp, Homo sapiens
ttgttgctcacctgatccacagtggcaggcttctaactggtcctcccacttttacttggcaatcacttctctagacagcagccaatgggaccatttttttwaaaaaatcaactttattttgaggtaaaatatacttacataccgattttaagagtatagttcaatgaattttgacagatgtatataccgatataaccattg

SEQ ID NO: 12199 - DNA, 201 bp, Homo sapiens
  misc_feature (1)...(201): n = A,T,C or G, or insertion/deletion polymorphism (see Tables 1-2)
ctgaatccagcgtaattattttgcctcccgttgacactagccgtaagccaagtagataggcttgcatgctagttttaaccttgtgtttctggggtactgcntttctcctgggaataagtggtggtagtcatttcaaggatgaaacttaaggcaaggtggacagttgaacaacatgtaactgcccattttgaaataaaacag

SEQ ID NO: 12200 - DNA, 201 bp, Homo sapiens
ttttttaatgctcatgacttgcagtcttgtcagaaaaggtcacctgcggatccagttaatgcttcagtgtgaggagagtcaccacccaaagcctagtagtygctgcagtacgtaactgaaattctgatgaaagggtcactttctgcctggattcaagcagattccagtgattaaaatgtgcaaatgcatgtcccatgtcta

SEQ ID NO: 12201 - DNA, 201 bp, Homo sapiens
tgtatacattcaaacaaagtgttgacagtttcaactgtgaacactggggcatgatactgtacctgatttgagctaatacttgttacagaatgaataaaatmctatctagtttttagctttaagaaaataagtttttaaaagaaattcctgcatactcttctggaagtcaaaaattctaattcagagttcagcctctatcat

SEQ ID NO: 12202 - DNA, 201 bp, Homo sapiens
tcatgacttgcagtcttgtcagaaaaggtcacctgcggatccagttaatgcttcagtgtgaggagagtcaccacccaaagcctagtagttgctgcagtacktaactgaaattctgatgaaagggtcactttctgcctggattcaagcagattccagtgattaaaatgtgcaaatgcatgtcccatgtctatatgagggaaa

SEQ ID NO: 12203 - DNA, 201 bp, Homo sapiens
gttgcttttcaacttttaaaagaatattttttttccctcatgtatacattcaaacaaagtgttgacagtttcaactgtgaacactggggcatgatactgtrcctgatttgagctaatacttgttacagaatgaataaaatactatctagtttttagctttaagaaaataagtttttaaaagaaattcctgcatactcttct

SEQ ID NO: 12204 - DNA, 201 bp, Homo sapiens
aaaataaaatttactttgttgcttttcaacttttaaaagaatattttttttccctcatgtatacattcaaacaaagtgttgacagtttcaactgtgaacaytggggcatgatactgtacctgatttgagctaatacttgttacagaatgaataaaatactatctagtttttagctttaagaaaataagtttttaaaagaaa

SEQ ID NO: 12205 - DNA, 201 bp, Homo sapiens
gcccacctcagcctcccaaagtgtagggattacaggcatgaactacggcacctggcctcattttcccttctatatatgaaaatttcccttctttatgttayatccttggaaaaataaaatttactttgttgcttttcaacttttaaaagaatattttttttccctcatgtatacattcaaacaaagtgttgacagtttcaa

SEQ ID NO: 12206 - DNA, 201 bp, Homo sapiens
ctgaactctttgtcctaccctatcaggatccagctggagaaaacaaaaggtcaactgatgacctggagcaggtgagtcccctggaaaaggagacgttttcrgcttcaaccgtttgtggagtcttcaactttctaagcctccatttctgacccataaactggtgatcctaactacagcttcaccaaaagcacatgcaagagc

SEQ ID NO: 12207 - DNA, 201 bp, Homo sapiens
gtaactgaggctacaggcatgggccgcattgcctggctaatttttggtacttttggtagagatggggtttcaccatgttgcccaggccggtctcaaactcytgagtcaatcaatctgcccacctcagcctcccaaagtgtagggattacaggcatgaactacggcacctggcctcattttcccttctatatatgaaaattt

SEQ ID NO: 12208 - DNA, 201 bp, Homo sapiens
atagtaacatatactggtagacaaacagatacctgattatattactttctttgactcctaatttttaagacattcagcatattccagacagatttttgtcrtgctgtagtcattttacataaagagctgaccccccaaaaatcaattttgtaggtaagagaatttcagtatcatgcaggtttcctgaaagtccttgggact

SEQ ID NO: 12209 - DNA, 201 bp, Homo sapiens
attaggaaatatctgcttcctaggggaagaacaaagtaggatttaatgtttcaagcataggctctgaattgcaggccatgtatcaatcagagaaaacttaytgacagcaataacagggctttaaggagacttcttttctccagatgaagagtgattaagccagctagccactcagcttctttgagttggaaaaatgagttt

SEQ ID NO: 12210 - DNA, 201 bp, Homo sapiens
taaacatattcaaaaatttatttatttattcattaaaaaattaattcagaatcaaccatctgccatgcctggtgttaaatattaaggatatcccaggaatyctcagtttagagcaacagtctccatggtgacttacctgcacccacaccctaggggggtaattggtgattcactgaggtgtgggaagaagatactttctga

SEQ ID NO: 12211 - DNA, 201 bp, Homo sapiens
gtatgtattagaatatgtttatgaaattatggggcctgacattcgcacaaggaggctttgcacattaagcttctcttcttctatttgcaaggctgctcgtstgttgcatttaagtgaggtcttctccttaattagaagcagacagtgaacaaatctgctgaatctgggaagtaaccagaatatatggtcacgaatgcaaag

SEQ ID NO: 12212 - DNA, 201 bp, Homo sapiens
ttgttgctgttggatggaatgtttgctgtaagtctggtaagttcatttgttttatagtgttgttcaagcctactgcttctttattaattttctctctggaygatctatccattgttgaaaaatgggttattgaagtcccctattattatttgattgctgtctatttctcccttcatttctgaaatttttgccttatatgtt

SEQ ID NO: 12213 - DNA, 201 bp, Homo sapiens
aagttcaggctatatttacacatggctcacagtcttgtcgggtggatgtatttgtgtaagaaaagcctggaaacaagtgtcctaaaactccatcacacctgaatagaatgaatggtccggtgcatcgtgtgcatcatgcagtgcatcaggctgcatgtctgatggtggccagagcaaaaaaaaaatgtgctgagtgtctgt

SEQ ID NO: 12214 - DNA, 201 bp, Homo sapiens
tatactcattgtaaggattaaaatgagatcattcaggttggttacatatgtgatgagtaaatgttaactgctgctaaaaggaggaatagggaagagttggrtattaatgtgtttctgaaatgtggcaatctcattttgattcgattgaataatttatattttcaatgggaatttttaatgtgtgcatgtattttacttctt

SEQ ID NO: 12215 - DNA, 201 bp, Homo sapiens
aaaattccatatactgtcaggggcattaagaagaaaatcccattgacttaaggagccccagaaatcatagtttaaaatcaaagaaatgtttgtagactcaytgctggaggtttgggaaacagatactttgcattgcttgttcatagccatcacacagatcactgctgacagttgcccgcagtggcatctagccaatatgga

SEQ ID NO: 12216 - DNA, 201 bp, Homo sapiens
ctcataagagtatcttcctcgtatactcattgtaaggattaaaatgagatcattcaggttggttacatatgtgatgagtaaatgttaactgctgctaaaargaggaatagggaagagttggatattaatgtgtttctgaaatgtggcaatctcattttgattcgattgaataatttatattttcaatgggaatttttaatg

SEQ ID NO: 12217 - DNA, 201 bp, Homo sapiens
tctttaagccttacagtattcatcagtaaaatggtcctcataagagtatcttcctcgtatactcattgtaaggattaaaatgagatcattcaggttggttrcatatgtgatgagtaaatgttaactgctgctaaaaggaggaatagggaagagttggatattaatgtgtttctgaaatgtggcaatctcattttgattcga

SEQ ID NO: 12218 - DNA, 201 bp, Homo sapiens
caaaatgctgttagtgatatggacagtgaagttcaggctgccgaggtttcagatggaaattaggagcttttgggaactgaagcaaagaaactgaacccttkttataccttgctgaagaagttggctgtattgtgatctatgtcctaaagatctgtggaagtttggaattgagggtgatgacctagggtatctggcagaaga

SEQ ID NO: 12219 - DNA, 201 bp, Homo sapiens
taacaggtaggcttagatgctcataggtgaaaaggcctgctgtatgggatatatacaatataacagctgggagagaaaaatcttttcctggctgcttgggscagtatgtgtgtttggggagtagaatactaagtgttgccttgattgatggcatctggcaccaggaaatgaacatgcttatagtggagaaaatgacaatgt

SEQ ID NO: 12220 - DNA, 201 bp, Homo sapiens
ttgtgcagaagctttttggttttatgtactcccatttgtttgtgtttgcttttattgcctgttcttttgttgtcatatccaaaaaatcattgccaaagccratgtcagggagcttttaaactatgttttcttctatgagttttacggtttcagatcttacattgaagtttttaatccattttgagttaatttttatatatg

SEQ ID NO: 12221 - DNA, 201 bp, Homo sapiens
tctccaaactaaaatataatgattgtgtcaacatcctaaagtagttatgggaaataaagagtcaaaaccagcaaagaacagtgtctgagacctagcaagcrttcaacaaatgttagtctcattgttactcttcttaactgttccaaattatatggccatgccttatgctgtcttttgtcaactcaaccagaaggtattaaa

SEQ ID NO: 12222 - DNA, 201 bp, Homo sapiens
aacaaaattgctctgactcttccaaaagtgtgattgttgtttcaaaggaagggaaaagcttgtgtgtatgttgagttagttgtacaaggtctcgttttttwtttttttttatttttgaaatatatgagaagggtaatagcagaaatatggttatacacatagagtaacaacggggctgttgaacgtggtaatcttagtgaa

SEQ ID NO: 12223 - DNA, 201 bp, Homo sapiens
ctgatctcacagctttgagaagaggctttctggcctgttgagagcaaagcaatgatcccctgttttgaacctgagaaagcagtcctgatggtctctgaatkgccttccggggtcattgttcttgtattgaagaataatgtctgttctcagatatatacctctctggtcccatgctgcaaaaacaacaaagcctgatagctt

SEQ ID NO: 12224 - DNA, 201 bp, Homo sapiens
cattcagcaaatacaaattacctgcctgctatgtgcatagcactgtaagagatgctttatgctgtattgatgtataatgtatgatacatttatatatgatrtatgaagatgccaagtagttaacattcattcaatacttaccctcaaaaatctcgacttctaattatttctgacattaaatatattcacttgcaaaggtaa

SEQ ID NO: 12225 - DNA, 201 bp, Homo sapiens
cagcaagaacaataacaacacatacctgtaaacacactagcactgaagcgtggtacaaaaagttttcatatattatttaattctcactctaaccttcacartttgcattgtctccattttcttttctttttttttttttttgagacgaagtctcgctctgtcgcccaggctggagtgcagtggcaggacctcggctcactg

SEQ ID NO: 12226 - DNA, 201 bp, Homo sapiens
ttttaaatcactacatcttatttaaaaatcttaatataaagtatttataaaacacagcttccaccaatcacgtaaagtagaagatgatatttgcttaaacmaaagcaaaatgtggttaatatggaacttcaggaagccatgtaaataattgatcaggctagtgaaaaagtttgaaatttcattgaaagatattttaactct

SEQ ID NO: 12227 - DNA, 201 bp, Homo sapiens
ttaaagtgagcctaaaatgaaaaggattattgtcactcaagggacgcttccaaagcaaagacttattcaggaaggaaagaaaagggccaaggtcaaacagraggtaataaagtcaagcagagataaattgaccttaaataagtatttaattagattgaatcatgtttaatcacgtgttacagacatttgcccaacacgtta

SEQ ID NO: 12228 - DNA, 201 bp, Homo sapiens
agactctccacaaatatgcagagaaaggttcctaacgaggatttctgacttcatcccaaaggctggaaatggtatagattaagctaatggaatacagaatmtcacaaggttcttctcttttaaaggtcaacaggaagccagattatttttatttctcattaaaatttgactacaatctaaacgtaagaattttaataaggt

SEQ ID NO: 12229 - DNA, 201 bp, Homo sapiens
ctagttaaatttatttttgaacaaaggtagtcagcctccaagagattctcttttaaatgaatgacagcagacagttccaagaccattcatttgcttatatmtatttgctgtatctagacagctattatcatgcatgtggtacttcagaacaatttcacccagtctgctgtcaatagcaaccagctgaagaagcctgctcca

SEQ ID NO: 12230 - DNA, 201 bp, Homo sapiens
acctttgttcacagtgcagttcctcccctcaccttctcatagtttctctgcaggagccttcaagctcctatttattcctgtagttcaaaattctatttaarattcaaccaatctggcctttctttgaatctcttattttgtcagactctgtgaatatgaatgtaataaatttgtacgtcttttctcctgtctagtttattc

SEQ ID NO: 12231 - DNA, 201 bp, Homo sapiens
caaatgtactgcttcagcacactgagtactctgaaataaaggatattgaaaggcttcagaaatagcctcaaaatcaaggtctttctgaccttctccggcaytctacccttccctcctgaaacacaggagggactttctctgaagttcccttatctaagtaagggaagttttttctgcagaaggaatgcagttgtcttgagc

SEQ ID NO: 12232 - DNA, 201 bp, Homo sapiens
tggatggtcctttattgcatgtgaaacattttttcttccttgatagtttgttctttttccctagaatatatagaaaacttggacatattgaagacattatyaagtctgctcaagttagatgaggtggatcctctgtaaggcagagcaacatgatttcattcctaatggataaacatacatcaacaagcacagaaactccca

SEQ ID NO: 12233 - DNA, 201 bp, Homo sapiens
acagaagaaaatctaaagttgaaagctggggatctgttggacttccattcatttcacggatacagctagatttgtttttggttggcacatttctaaagttstgaatgttagaaaactgcaacagttgtctccaagtgccagcagttacatacatgcaccaaggctggtgaaacagacacaagggaagaaagtaagaaatgc

SEQ ID NO: 12234 - DNA, 201 bp, Homo sapiens
ttctcatggaaagataactcaaatgttaattgctcaatattggagatcagagcgatctccacaagtaggagttggcagagctattctgcttccatgtttgygacaatatcatttctctggtttttaaatcactacatcttatttaaaaatcttaatataaagtatttataaaacacagcttccaccaatcacgtaaagtag

SEQ ID NO: 12235 - DNA, 201 bp, Homo sapiens
atgtgaaatagcttttaagtgagatacgagcttttccattgacaggcaaagcaagttagaagaggaaaagcccaaattgtaggtgatgtttgcaatcagtyagtgagccctatgcctcatctgtagaaaatctgattgaccgtggagctccagatgatttaacactatacatagttctctgattcacttttaatttgttac

SEQ ID NO: 12236 - DNA, 201 bp, Homo sapiens
gtaactttggtataagagagctaaggattgatgtcacaatcttaccatctgcatccacatgtgctcatataaattgttaaacatataaagctaagtccctktcaggaagaacacaaaaatgaaaactcaaataaccaggcttatcttagactcatagtcagtgagaatttgttttttatgatgacaatgaggaaccatgag

SEQ ID NO: 12237 - DNA, 201 bp, Homo sapiens
ctgcatagtgtttctgggagtgggccggtcttgctgggcgcctggtaatctcctgtagcctgacagttggtaattccttggggatagtattcactgtgctstgctagtttgcaaactaatgagacacgtgctgcagccagtgttgccttcagtcggatggggcagaggttttagagagcatgcagatttctgctcagaaag

SEQ ID NO: 12238 - DNA, 201 bp, Homo sapiens
tgctgcaggcaggccagagcagccagtgtacacacacacacacacacacacacacacacacacacacacacacacagaatcacacaatgtgcagcctcacrggcgtcagttgtttcctgcagcacaggagggctataaacaagaaaagagaagggaaacccagttcacacaattccccatttctctcaaccacctttccag

SEQ ID NO: 12239 - DNA, 201 bp, Homo sapiens
tagcacctattatgagccaggacagttttagtctttgaatacaaagatgctgtgtgaggatttttgtcatttattaggatcacagtggatctttctggccktataccaaagcccacctgtgccatggagccttctttagttcttcctgcttttggggacaaaagaaatctctttcttctctgaatttaaatgtgatgatgt

SEQ ID NO: 12240 - DNA, 201 bp, Homo sapiens
acacacacacacacacacacacacagaatcacacaatgtgcagcctcacaggcgtcagttgtttcctgcagcacaggagggctataaacaagaaaagagargggaaacccagttcacacaattccccatttctctcaaccacctttccaggaagattcatatggaatgatgcagcgccacctactgtcccttttgtgcatt

SEQ ID NO: 12241 - DNA, 201 bp, Homo sapiens
ctattatgagccaggacagttttagtctttgaatacaaagatgctgtgtgaggatttttgtcatttattaggatcacagtggatctttctggccttatacsaaagcccacctgtgccatggagccttctttagttcttcctgcttttggggacaaaagaaatctctttcttctctgaatttaaatgtgatgatgtcacaga

SEQ ID NO: 12242 - DNA, 201 bp, Homo sapiens
ttgaccactccaaagaatcaactccaggaatcatacctgccatgtggtaggggctcaacccatgtggtaggggctcaacattaggggtgccacgttgggartgtgcactccatcgaaaggtgttgtgacagtttcgcatttggattttaatggaagctgttcattccctctgagagtccactggaggatttgtcacatttt

SEQ ID NO: 12243 - DNA, 201 bp, Homo sapiens
tgccatgtggtaggggctcaacccatgtggtaggggctcaacattaggggtgccacgttgggaatgtgcactccatcgaaaggtgttgtgacagtttcgcrtttggattttaatggaagctgttcattccctctgagagtccactggaggatttgtcacattttctaccttctgaagctcgtgggctcaagtggaacccaa

SEQ ID NO: 12244 - DNA, 201 bp, Homo sapiens
atctatttattctcttgttgctctgatttaatacacctgtttttcctccctgtcttccttgtttctttcattgaacagctgcttttctagtacctgtcagrtgctaagcacagggctagctgggatacagacacaaggatataggttaagagctttttgtcatccatgcctccctctctcctgctgcattgttctaccagg

SEQ ID NO: 12245 - DNA, 201 bp, Homo sapiens
tgcttcctgcctttcttctgaatgaaaattagatacccatagcttacaaaacaggcatttaatgaggtttagcaatcttaacaagatatgcacctaatgcwtggttgttatacttcaatcaatatgttttaataacctactgacgtttaattatcatacaataactagcactgtaaattgaaatctaatgcacaggtaatc

SEQ ID NO: 12246 - DNA, 201 bp, Homo sapiens
ctcatttctctcattttcttttttaaactgaaaattggattttaattctgacaaatttggatatcaacaataattgtgttactctttagtgtattggtttrtatatagtttctatgattattcattaataccaagctcttggaataaaattaaaccaagacatttaataaatctgttgatagcaagattatttcttttata

SEQ ID NO: 12247 - DNA, 201 bp, Homo sapiens
cataaattacattgagggtttggacttctatcaccttaaaaatggaaaccaatgaaattgtactgtctttttgagtggctttatgaaaaatactggcaacwctactattttatgtactattgaagttgtcactggcactagatgaagaatcgtatgatgttagtatagaaaaaactgccctctcattttgaatctaattga

SEQ ID NO: 12248 - DNA, 201 bp, Homo sapiens
cttgaacactgctttgcataattgtactgcataaattacattgagggtttggacttctatcaccttaaaaatggaaaccaatgaaattgtactgtcttttygagtggctttatgaaaaatactggcaactctactattttatgtactattgaagttgtcactggcactagatgaagaatcgtatgatgttagtatagaaaa

SEQ ID NO: 12249 - DNA, 201 bp, Homo sapiens
gaaaatttagaatgtatatttgtgttttatataaaaatgaccttgtgacttggcttgaacactgctttgcataattgtactgcataaattacattgagggyttggacttctatcaccttaaaaatggaaaccaatgaaattgtactgtctttttgagtggctttatgaaaaatactggcaactctactattttatgtacta

SEQ ID NO: 12250 - DNA, 201 bp, Homo sapiens
cccagggtgcttttgaaggactgaggaaggtcacctaatccagcccactgaaggcctaggagaccctctgtttctttttaagattcacctggaactggccrggtacggtggctcatgcctgtaatcccagcactttgggagactgaggcaggcagatcacaaggtcaggagatcgagaccatcctggctaacacggtgaaa

SEQ ID NO: 12251 - DNA, 201 bp, Homo sapiens
agccacccacaccaaagagacttagagaatgtggcgcgagatggctgtaactctttcctcttcctgccccctggtgaatttagtggattcagtaacaagasactgagcctctgcatttttccttctccaggttctgcaaactggaaataggatgaagtctaaaaaggttacaaaaaaaggagagaaagagcataaaactct

SEQ ID NO: 12252 - DNA, 201 bp, Homo sapiens
cactgaaggcctaggagaccctctgtttctttttaagattcacctggaactggccaggtacggtggctcatgcctgtaatcccagcactttgggagactgmggcaggcagatcacaaggtcaggagatcgagaccatcctggctaacacggtgaaaccccgtctctactaaaacaaaacaaaacaaacaaacaaacaaaaa

SEQ ID NO: 12253 - DNA, 201 bp, Homo sapiens
gtgtatgggctgtttgctagcaatatttatacccacttttaataacttgcaaattatggggtgggctattcacaaatctctagaaaaggagtggtaacttscaggtgttgctatggaacttctcaactgtcatggcactggtgggagtgtcttacgctaaggagagcagtgagggcaactagagattgcctttgctgtcat

SEQ ID NO: 12254 - DNA, 201 bp, Homo sapiens
aagagtaatctaggattaaaaaaaaaaaaagaaaactttctgcgaggaaggagctctggggtccagagtccatagggaaatctgttcaccttcaggtaggrtaagggccaaagtgggaacaaaagatgttagattctaagtcgaaagactttacatttttgtgctcccatccattgcctgtctgctgcacagaagctcttg

SEQ ID NO: 12255 - DNA, 201 bp, Homo sapiens
cctaccaatgtcccattagcaaggtacgaggtggccaaacagtggctgtgtatagagtgcggcaaagtctgcctctcttcccttctccatctcctttctgkgtgctgggaatgcatttattcttcataacaaccctagtgtaaagcaggtgatattatgatccccatttttttcagagtgatgaataacttgccccagcta

SEQ ID NO: 12256 - DNA, 201 bp, Homo sapiens
gactgcctgtcttatgctgctggcaggttagttcatttcaatgcatacctgtaaataaggctttttgccctactgttttgatacaaaagaatatttttcayggacttttggtaatttacagtggaacagtcttattagtcatccatataccagcatctgtttgtgaatgcttttgttctgtaacccagtgcagaaagaggt

SEQ ID NO: 12257 - DNA, 201 bp, Homo sapiens
tccggcactctacccttccctcctgaaacacaggagggactttctctgaagttcccttatctaagtaagggaagttttttctgcagaaggaatgcagttgycttgagccccctccctataatatcaatcaaaagattagctcactggaaaggagaccaaaggtccatggatcctgttcttctgaggactgctgcctaaaaa

SEQ ID NO: 12258 - DNA, 201 bp, Homo sapiens
cagagatatcaacctttaggaagtcttacagtcatatggaggttttatgtaagtatcacttagcatatacttttttatttttcaaaatgattcatggacaygaccaattactttccttggtgggtgagtcctactggtacatttaattatttattaatagattattattattttttgcttgagaggttagagctagtgtta

SEQ ID NO: 12259 - DNA, 201 bp, Homo sapiens
cgccttcgtgggctcctgtgcggcccgagcctccccaacgagcgccgccgcctgctccacggcgcccagtcccatcgaccacccaagggctgaggagtgcrggtgcacggcgcgggactggcaggcagctccacatgcagccccggtgcgggatccactgggtgaagccagctgggctcctgagtctggtggggacttgca

SEQ ID NO: 12260 - DNA, 201 bp, Homo sapiens
taaattattcactttagttagaggtagaaagaagggaggctggtcagtaggagttaaaagcgtaaagtttaaaaagttgtgaaatatttgcagtaaaatgrtagttacttcttgatggaattaattgtggccacataattccttttttccttcctgacatcagtttctaactccccctggtccccaacctattagagtgaa

SEQ ID NO: 12261 - DNA, 201 bp, Homo sapiens
actcatcctagactgctctcacagtgcgagcctgtcctttactgctgattttgacaggtcttgatacatttcagaatatggagttcaggagaagaactcasaaagcccttttctttgagaatggactttgttcgctcttcttttacactttccctaattctctgaggcagtctcttctaattctgagcccctgccctctga

SEQ ID NO: 12262 - DNA, 201 bp, Homo sapiens
gacctcgtgatccatccgccttggcctcccaaagttctgggattacaggcttgagccaccgcgcctggccgatggaatgtaaatcttaaattattcacttyagttagaggtagaaagaagggaggctggtcagtaggagttaaaagcgtaaagtttaaaaagttgtgaaatatttgcagtaaaatgatagttacttcttga

SEQ ID NO: 12263 - DNA, 201 bp, Homo sapiens
ggttttgtgcctttctcaggcacttcttttgaactagtcttctcaattctgtgtctgtattaggacatgtgactaaagagcattagatctgaagaattttrtaatagtctagatgtttgccagcctggatttagtttcagaaatgatttcttttgagttattagattgaagtatttttcaattaattatacacaagacttt

SEQ ID NO: 12264 - DNA, 201 bp, Homo sapiens
ctgcttgagtaagctatttatgtttgttagacagacagaaaagacagaagaaaatctaaagttgaaagctggggatctgttggacttccattcatttcacrgatacagctagatttgtttttggttggcacatttctaaagttgtgaatgttagaaaactgcaacagttgtctccaagtgccagcagttacatacatgcac

SEQ ID NO: 12265 - DNA, 201 bp, Homo sapiens
tagcatacttctagaagtctttgaagccctgtattgctggaatcagtatgtaagaattattgtgatgttgtggtaaactcaacttcatagattctgcaagsaaagtttggtggctgaaacttgagatatttaatgtgtgttcacataaacataaatatacatgtattttctttttgaatggtagataacagaaaaacatga

SEQ ID NO: 12266 - DNA, 201 bp, Homo sapiens
tccacagagcgacttatttcagctctgtgtatacagtaaatacttaaatagagacatactttcaaatgttctaaaagctactaagatatatttgtaaaaaygtagtgtaaggattaaagatcaaaagcagaagaaagtaagccttgatttaatcacttgcagatttattttcatggaatgcttattttgttaagcttttag

SEQ ID NO: 12267 - DNA, 201 bp, Homo sapiens
ggttgcttagtccagaatcttatgaactctacttgagtgcacatgggtttttgccagacacctttcattccttgcttttccaccagtctgattttggtaaytgagtgtagttaacatgggtcgcttacgaagaagaaagatctctgaggtcatcttctccagtgtcctcattttacagatgagaaatctgaggactgtaga

SEQ ID NO: 12268 - DNA, 201 bp, Homo sapiens
tctctgattacattttgcttaatttgattttaattttgagatcagaggtttgcaaatagacttttattctgtttatagagagaaatatttctgtttgaatraagtgggtagcagtagataactggagtgcctaattgctgctgttgctgtttttctttgctgttgtcattatcattatgaaaagcatttattatgcacctg

SEQ ID NO: 12269 - DNA, 201 bp, Homo sapiens
tagagaaggcttttttcctcatgaaccaaattctgctagcttgaaacttttcttccacagcgtcttcacctcttggccttcatagagttgaggaaaattayggccttgctctgggttatgttttggcttaaggaaatgttgtagctggtttgatcttctagccagaccactaaaactttctccatatcagcaataaacctg

SEQ ID NO: 12270 - DNA, 201 bp, Homo sapiens
aggggtataaataatgaagatggttggttaatgtctttcgactcaatgaggcctagaaagtgttgaattctactgaatattttaagtctgatatctttacygttcttcccattctacattcatttcaagtattttaaaatgcactcagatttcaatgcagccagagagttactgtcatgaactctccatttctcattggga

SEQ ID NO: 12271 - DNA, 201 bp, Homo sapiens
acagactttctgtccctaaaggattccttgattcatactcttgacagtagtagtagctacacgtatttcgtcttttacctttcacaacaatcgtattattyggtactattatctctactcttttttacaggtggtgtatagagccctagagaaattagaatgcctaggttccagtctgattgtatcttttattagctctat

SEQ ID NO: 12272 - DNA, 201 bp, Homo sapiens
tttaaaacccaataaataataaagggtaatgacatagagagtggtttgaagatttgtccattcacccttcatcaatatggattctatgaggtcttcatgastctggttcaccaccagggatacaacctcttggaaagactgcattgccttgtgaaatcccaaatgatgcctgttcttaaggacttcataagttacctgtaa

SEQ ID NO: 12273 - DNA, 201 bp, Homo sapiens
  misc_feature (1)...(201): n = A,T,C or G, or insertion/deletion polymorphism (see Tables 1-2)
taaattgaaatctaatgcacaggtaatcacacttagtgatgagagcactctcctttaaattttagtcagaggtgtccacattatattccaaatgccatttnttagcttcagaccctctatagatcctcagtgggattctgatattttgagcggaggaggaagggaagaaatttgcataagaaactccatagcaattgatct

SEQ ID NO: 12274 - DNA, 201 bp, Homo sapiens
aaatcccaaatgatgcctgttcttaaggacttcataagttacctgtaatttttttttaacttttacacacacctaactcaggtgttagaactggtagaaasattggtaagtgcaaaatgtcaagatgcaattgtgctcaatgtattctttctccaaagtggggaaagcatctgaacacttcttttggggaatatggcagcc

SEQ ID NO: 12275 - DNA, 201 bp, Homo sapiens
gaactcaccatgattttggtggaacatctattaattaaacaagaacagttttctttgataacagttggaaacttcaaaataataagatctggaaagggcastgtaatgcagcaagtccaagctctatccattactgtatgcatgatctcaggcaagttaccacatctctctaaaccttagatttcttatttatgaaaatga

SEQ ID NO: 12276 - DNA, 201 bp, Homo sapiens
ttcagaatcaaccatctgccatgcctggtgttaaatattaaggatatcccaggaatcctcagtttagagcaacagtctccatggtgacttacctgcacccrcaccctaggggggtaattggtgattcactgaggtgtgggaagaagatactttctgattattctttgctccgattttagtttctattttgtgtatattttc

SEQ ID NO: 12277 - DNA, 201 bp, Homo sapiens
taagtggactttttagggagcaaacaaacatctatgctcaagatgaaagctttctagaatctaggatttcctgtagtggaataatagccttttaaggcagwaaattttctgtccctgcaagttttcgattcgtagttagctgaccatagcttatgagattcatggaagatgttgctgaactcagagcaaggatggattcaa

SEQ ID NO: 12278 - DNA, 201 bp, Homo sapiens
taatatcagtgtccatctcataggattctacatgtgaagagctcagataacattgtatgtactcaaagagcattcgttgttatgatgttgtctgttaggattttttttttttttttagacgcagtctcgctcctgttgcccaggctagagtgcaatggcgcgatctcagctgactgcaacctccgccttccgagttcaagc

SEQ ID NO: 12279 - DNA, 201 bp, Homo sapiens
tgtgcccagccctatattctttaaatttttttaaaaaaaaaaaaaaggaaaaaaaaaaaaagctgaggtataatgaaagcaacatggggcctaggcgaaartacctgaattcaatttctagctgtccatttatcaggaaattttttaaatttctttgaataagtcactgaagttcagccattttcatcaaagacagataat

SEQ ID NO: 12280 - DNA, 201 bp, Homo sapiens
gctgaggcaggaggatcacttgaacctgggaggtggagtttgcagtgagccaagatctcgccactgcactccagcctggtgacagagcaagaatccatctaaaaaaaaaaaaaaaaatcctcatgacccatttgaattacagtttttatgtaataatgtaatttattttcaggtgcaataaactttcttcctgtcttgctt

SEQ ID NO: 12281 - DNA, 201 bp, Homo sapiens
catcagatctcgtgagacttattcgctatcacaagaacagcatggagaagatctgccccccaggattcaattaccttccaccaggtacctcccacagtacrtgggaattcaagatgagatttgggtggggacacagccaaaccatatcagtacccataagaaatggtacctcatatttcaaggaaagttccggtaaacttt

SEQ ID NO: 12282 - DNA, 201 bp, Homo sapiens
atggactgaaggtggtaaaagcaaattggccatctgctggggctggtatagacatggagatgatactgaataatattcagattgatgttttaccccaagcrtgcttggagaggttttgttttgcatgtttttcagcagacctggtttaaaaattcatgaatgcacctggttggttgtttctaccctctgtttttcatgtat

SEQ ID NO: 12283 - DNA, 201 bp, Homo sapiens
gagccaggaacaattttgagccagtgatctgagcactgccccagagcaagtctgtgttacataactactacctttttgaaaaatagtccaataatccccaytgggctcactgcatacttcctcagcttggagaatatgaacaatgttaacaataggctctggaaggaaatgctgaagtttatgttattagatggaggagac

SEQ ID NO: 12284 - DNA, 201 bp, Homo sapiens
tgggtgaaacatagaaaaaagggagaccagttgcaaagctacttgtaggagtaattcatccattgaactcattttcagggcattgtgtgagtgcctgaccrtggataccgatggtacttgtgatttttacacctactttctcaagataacactatagagggcagggccagtgcacacagtctgtcacaaaatgtgtatgat

SEQ ID NO: 12285 - DNA, 201 bp, Homo sapiens
tcccagctacttgggaggctgaggtgggaggatggcttgagccctggaggtgtaagttgcagcgagccaacatcgtgccactgcagtccagcctgtgcgayagagccagaccctgactcaaaaacaaaaacaacaaaacaaaataagagattggactttattgtgaatgtataaaggagtgacataatcagcattttagtt

SEQ ID NO: 12286 - DNA, 201 bp, Homo sapiens
aagaagaattagctgggtgtggaggtgtgcgtctgtagtcccagctacttgggaggctgaggtgggaggatggcttgagccctggaggtgtaagttgcagygagccaacatcgtgccactgcagtccagcctgtgcgatagagccagaccctgactcaaaaacaaaaacaacaaaacaaaataagagattggactttattg

SEQ ID NO: 12287 - DNA, 201 bp, Homo sapiens
tcagccctcattgagaataggtagcttttccaccctcattggtcagcagatgacttactttctctgattacattttgcttaatttgattttaattttgagrtcagaggtttgcaaatagacttttattctgtttatagagagaaatatttctgtttgaataaagtgggtagcagtagataactggagtgcctaattgctgc

SEQ ID NO: 12288 - DNA, 201 bp, Homo sapiens
actggcatcttacgaaaaagggccttgcaaactagattgaaagagtttggggctgggcgcagtggctcatacctgtaatcccagcacattaggaggctgasgtgagtggattgcttgagaccagcagcctgggtaatatggtgaaacctcatctctacaaaaaaaataggaaaattaggccgggcgtggtggctcacaccc

SEQ ID NO: 12289 - DNA, 201 bp, Homo sapiens
tgaatcttcttagctcttgctgttaagcccattggtctctagtgacattagctgtctcattttaatttcttctctacttcatgagtacatgttgtagatarataataggttccagttttattaggtgggatttgaagaaggcatttctggtataaatgatgttactggaacaaatgactaagagatgttaatgaatttcct

SEQ ID NO: 12290 - DNA, 201 bp, Homo sapiens
tttctaagcctgaaagaagatattttgtcctcaaagtgtgaataatctacatgagaaataaaatgtaaatgtgaactgatgtctctgtctgcctatcttaracgaagaatgggtaaaagattgatgagtggtgtagaccatcaaccctgggcacagtttactggaaggtaggattactgagggttggagcaagcaaggaaa

SEQ ID NO: 12291 - DNA, 201 bp, Homo sapiens
tcccttccagatcggggtttaggattctaagaaggtaaggcccagctgctggtaccgtattcaatcttttctatccctagctaagaaaaaatgtttacatrttaaaatagaaatgacttcaactcctttcaaaaggaaaattgaaaaccacagattgctgtctaaaaggattttaaagatttgtgaataaaaactattagt

SEQ ID NO: 12292 - DNA, 201 bp, Homo sapiens
gtttttttttttgtttttatttttgtttgttatgactaattgattagtgtggaacttggctgtggactgatgtagaattgttttcagtaattttgccaccwagtgaaaggtttttctcggctctttcctaacagcgactatggttatgagcgacacagcaatggccagtgcctgccggcattttggttcaatccatcctct

SEQ ID NO: 12293 - DNA, 201 bp, Homo sapiens
cctcagcaagagactaaattggaaaaggattgtattcagagtttagaagaaaatctgtgtggttttcatgaaaatcacctaagtatagatgttggggtcargatttccaagagttaacaacatcatgtagtttacttttcagtcttagagaaatttaggcaaatgatatatttgaaaaaaaaaattgtatatttgagttaa

SEQ ID NO: 12294 - DNA, 201 bp, Homo sapiens
actttactgcctctgtttaaaaactcaatctgccatgtctgtgtccacttaaatcctttccattatttaagtcctcatttggatatcacctcctgtctgamgatttctccaacactttcaagaagaagggaagcctgaatatcatgaagaaaatatctgatcttatgtgccgggtcactctctgtatgtctccctccaagc

SEQ ID NO: 12295 - DNA, 201 bp, Homo sapiens
atttcccccgggtaggaaaagtatatctttgagtgtcaggttgttgaagacttagaattaatcaagccaaatgcattaattgattgtgggtgtcagaggaratgagggcgggacaaataaggataaatcatttctaatgtcccttccagatcggggtttaggattctaagaaggtaaggcccagctgctggtaccgtattc

SEQ ID NO: 12296 - DNA, 201 bp, Homo sapiens
cctaaaactttactgcctctgtttaaaaactcaatctgccatgtctgtgtccacttaaatcctttccattatttaagtcctcatttggatatcacctcctktctgacgatttctccaacactttcaagaagaagggaagcctgaatatcatgaagaaaatatctgatcttatgtgccgggtcactctctgtatgtctccct

SEQ ID NO: 12297 - DNA, 201 bp, Homo sapiens
aagtaccctagtacctcttactcaacttaaatccaggtattgaaaatatctttaaagaaacctttgcattccccattagagggaaagacataatttatctkttgttgcaggtaggatttgaggtaatttacacaggggtggccaaattttagcccatgggctatatctgtcctaccacctgttttttatggcccacaagcc

SEQ ID NO: 12298 - DNA, 201 bp, Homo sapiens
tcaaactggacaaaggaatctgattttctcagagataaattgctcccctaaatcttcacccaaccaacacacacaatcaagaatgcgcatgcacgtgcacrtacacaaaaccattttaaagcatcactatcttctctcttcacagttaaatctgattagcacaatggtgatgggatttttttattggttattctgtatgtt

SEQ ID NO: 12299 - DNA, 201 bp, Homo sapiens
ctttatacaagattaaaaattttgcagacagaatagggcggggtaggagaaaaggccattagtgcctgtttttaattcttcatatcttgggtcttgggttsatcttaggttgttagcacaatcaccaagctgtgactggttgaacactttcttcattgtctcaatgtctaagatatttggaaccaaggctaacagtgtttt

SEQ ID NO: 12300 - DNA, 201 bp, Homo sapiens
tttgaaaaggaagactaaagatactaagtaatatttctagatttcctttcggcttgcataacacattcccatttcactcaaaaacatttttatttgtaaarcaattgaaggataatgaacatggtagcaactcacagagtagttttctgcctgaagggattagaggctcttggatcaaagtacagtgacaactccagggtt

SEQ ID NO: 12301 - DNA, 201 bp, Homo sapiens
gtagcaagcctcgtttatgggactatttttttttttaagatatcttaccttctattacaataattacaaatctctttatatagcatagctcttcacaggaraattatatatatatgtatgtgtgtgtctgtgtacatgaattagattctccaaaagagtattcagtaacatagtcattaagtaagtgataatgacaatttt

SEQ ID NO: 12302 - DNA, 201 bp, Homo sapiens
ataactaaactgaaaagagaccctttttaatttcacctgaaactatgtgtgtgaactcagcccatagtgggccctctatccatagcggaagagcaggaatytatgtcatttccctgaaaactagtactaaaaggtgaatgtactgaacaacttccttttgtaccccctattgttttttattttttttatttttccttttaa

SEQ ID NO: 12303 - DNA, 201 bp, Homo sapiens
ttcatggaagatgttgctgaactcagagcaaggatggattcaatggcattgcaaatctgtaactcggtgaacgtagtgataaaggagactttttgctttascaggattaagctaatttaaactggagaagtactgagacatttagaggttaaactaaactcagagtgccataaagtccttcttgagacatttgctcagcag

SEQ ID NO: 12304 - DNA, 201 bp, Homo sapiens
ttttcttttttttctgttttgaatcctcaaaccactatccaattagtgcttgtttccacagcagctacttccaggaaactgctgatgaggcttctcaaagsgggccagcacacaaggccactgctgtttaactagtgtatggttttggtgtaccggattcatgttccattgtaattctacagaaatcgtacaccctggaga

SEQ ID NO: 12305 - DNA, 201 bp, Homo sapiens
ccctcttctttttggttttcatgtattcgtttatttgtttttaatttagaaaacacaatcgctaaatatgtacatatgtgttaaaaaattaatacttgacmcgcataagaactaaagtcatttttcaacaatttatttctagctgtatagcaacctcaggttacatattgaatcattaaaatatcagtgactgaactgaga

SEQ ID NO: 12306 - DNA, 201 bp, Homo sapiens
aaaccttaaatcttggccttatctggtccagcccatcattttatagatagaaaattatggcccagacatagggaattactggcttaaagtcattctgctgwttggtgacaaatatgatcataacgatggtggtggtgatagtaattgacattgatgaagactttgctagccactggcatctgttctaagcatttggtttga

SEQ ID NO: 12307 - DNA, 201 bp, Homo sapiens
tcttctttttggttttcatgtattcgtttatttgtttttaatttagaaaacacaatcgctaaatatgtacatatgtgttaaaaaattaatacttgacacgyataagaactaaagtcatttttcaacaatttatttctagctgtatagcaacctcaggttacatattgaatcattaaaatatcagtgactgaactgagatac

SEQ ID NO: 12308 - DNA, 201 bp, Homo sapiens
actgaaattaccttaaagagtgatgatgggaccttctggaagtgaggttcccagtaataacctgtctgccatatgtattccactgctaatagacttcagaratgagactactcatgactgggtttattgcaatagcggcttggggtagaagggaggtatagccatctcttcctctctttgattttcttatgcagataaaag

SEQ ID NO: 12309 - DNA, 201 bp, Homo sapiens
ttaatattgaattaatacaactaaaattcacattatagatttgatatattcagcatgtatcttaagtactactggccagtcagaactattgatgaaatttrggggtataatattaagaagagattaattgacatgttttattgaacacctggcttgtgccttgttctctgcaagcataaaggtgaatataaaagaaacatg

SEQ ID NO: 12310 - DNA, 201 bp, Homo sapiens
taaaaataaagatataataactgatattaagaacttaggtttacaggaaattgaacccatatgaatagaagttaaatggaagaaaggacagcaggaaataygccatctagagcataaaagaaagaaatagaatatagagaaaaaacagtaagagacaaatggaaaatgataaaaaggtctaacacagatgcaattgtagcc

SEQ ID NO: 12311 - DNA, 201 bp, Homo sapiens
aaaagaagacaaaggggagagagagagaagcggatactctcgggttgggtgcctgctgttgttgtacagtcctctgtgttgaaataccaggtgttcaggayatgctgagagcaagaagcaggccatgtatacactggctgtttgagttctcagttaagacagtgtgacctgtcccatcttctgttatctctatgaggggag

SEQ ID NO: 12312 - DNA, 201 bp, Homo sapiens
tgtgttctctattaggtagaaacgtgactaggaaattcacgtggtacaaaatcattatctttttcctttatcatctactgtgtttgaggcacccgtacacrtagaaggataggatttccaacatctaaaagctttgcaatctcattaaagaggcaggaagtggtcttagatattttagagtaattttagatagaaaggaat

SEQ ID NO: 12313 - DNA, 201 bp, Homo sapiens
cataacgatggtggtggtgatagtaattgacattgatgaagactttgctagccactggcatctgttctaagcatttggtttgatctgctttattaaatctsctcagatttatgagaaatattctataattatgcattttacggatgagaaaacatgagacaagtataataaacgagctaagaattctgaatccagagggta

SEQ ID NO: 12314 - DNA, 201 bp, Homo sapiens
tgcactccagcctgggcgacagagcaagactccatctcaaaaaaaaaaaaaaaaaaaaaattggaaatggtaagggaaatatcaaacgtccaccctgactstaaatctctgtctgtatatccccctcaaccccatgtttttgtttttgtttttgtttttcagattcacattatctaacttgccgaatgcagaactgtacag

SEQ ID NO: 12315 - DNA, 201 bp, Homo sapiens
ctattcatgacacattcaaagaaagccaaaccatctatgaactgtctttcatatgatcaaggcagctcttgaatcaagatcagacaacttttaaaatgacrgtatcttcatgaacttattcaacttatcatgaatatgaacctgggtctgaaaatggcttttgtatagtcacaaaacagaattggagcttttataattgga

SEQ ID NO: 12316 - DNA, 201 bp, Homo sapiens
acatggtgaaaccccgtctctactaaaaatacaaaaagtagctgggcactgtgttacttgtctatagtcccagctacttgggaggctgaggcaggagaatygcttgaacctgggagacggaggttgcagtgagccaagatggtgccactgcattccagcctggcgacagagcgagactccatcaaaaaaaaaaaaaagaaa

SEQ ID NO: 12317 - DNA, 201 bp, Homo sapiens
ttcctgactttcaacttgacacttattcaaactctaaagtcaagtacacaacttacagattttaccaaaaatggatttccctcacttaaatcaatgttaaratagactgatagcttctctttcctgctctctcttccttctcacctgtgtttctttatcatttcttgtggaataaagagatttcttatcattaaatgaaca

SEQ ID NO: 12318 - DNA, 201 bp, Homo sapiens
aatgataacaataaaaaggtatatatatatataaactcttatctttttattgttatatatatatgtgtgtgtgtgtgtgtgtgtgtgtgtgtgtgtgtgtrtttatatatttgctatatttctccagaaattgtttaggcttatacagatgagtatgtatatgtatagacacgtatacttacacgcatgttcttgttgaaa

SEQ ID NO: 12319 - DNA, 201 bp, Homo sapiens
tcccatggcacgtggggattatgtgaactacaattgaagatgagatttggatggagacacagccaaaccatatcagtgagtgagaagaacttataatcaartcaagggcatagaagaactggtcctaagaagacggtgcccttccaaaagcacagtgcttcacttgccttttgctttgagtgattttgcacccaaccatgt

SEQ ID NO: 12320 - DNA, 201 bp, Homo sapiens
gttcacaaacctcagttcttgtcttctgcacacccacagggctaacaccatgtgaaagctgccaaggcttagggtttgcactctctgaagcaatggcctgwgctgtacattggcctcttttagccacagctggagctgaagcagctgggatgcagggcaccatatcctgaggctgcacagagcagtgggttctgggcctgg

SEQ ID NO: 12321 - DNA, 201 bp, Homo sapiens
aataaggcactgacttaaaaatagagctaaaatgatagtcattttgcaaataatttgggctcctttctttttataataatttcttctctcacctggaaaaygcttctctctatttaaaagttgtcctcttttctcccaaatcagaaactgttttagttagattgtgtgtgtgcacttgctaacttgctgtatttcacccta

SEQ ID NO: 12322 - DNA, 201 bp, Homo sapiens
catggggactttgcatggggaccccaaacccacatttcccttctcctctgtcctagcagaggttctccatgagggctccacccctgcagcaaacttctgcstggacatccaggcatttctgtacatcctctgaaatctaggcagaggttcacaaacctcagttcttgtcttctgcacacccacagggctaacaccatgtga

SEQ ID NO: 12323 - DNA, 201 bp, Homo sapiens
ctgcgtttaggacgctatgacatatcatcttcaagtagcctcaagtttttcctgtatttagtgattgttaattggatacctggtgtatacctgacatacascaggtgctggggatttattcatgatgaaaaccagtcatagcctcgatcctccataagctaagagcatggggcatccactcacgttctgtagtctttgaga

SEQ ID NO: 12324 - DNA, 201 bp, Homo sapiens
ttatatgtctgtatacattcacagcaacataagcaccaatgtacaacatttaagtctccactcttaaaaacgaaatattagtatcgtaaggccacagtaargatgtttactgattgtgagcactgattggaaagagagctccagaacaaggagagatggaaaaaaaaaacagagagaaggagacagagagacataaataac

SEQ ID NO: 12325 - DNA, 201 bp, Homo sapiens
gtttatcatcgcctttgttgattccagagagaatgatccatggtagtttcaccaacctgactatatatcccagaaattccagtgacctccattcacccagytaaacaatatatgtttcagtttaaatctcaatctctgtctttattttggtctccatctgcatatcatataagtacatataaatatatacataataaatat

SEQ ID NO: 12326 - DNA, 201 bp, Homo sapiens
ggtggctcatgcctataatctgagtgttttgggaggccgagatgggaggatcccttgagcccaggagtttgaggctgtgatcattcaactgcactccagcyggggcgacagagcaagatcttgtcttaaaaaatgttttttatgcttgtttttttccgttaaaaaatctgagtctgtggatcctcattagaaaaccagttt

SEQ ID NO: 12327 - DNA, 201 bp, Homo sapiens
tcatgattttttctgtaacagtatcaacaatcctgcttctataggataatgtttatcaaataccctctgccatcttctgtgcctagaacatttattccaawgaaagtgttgatgtcaacttcacagaagaggaaagtgagattcagaaggcacttaaactgcatcatagaagacctttgttttcattaggctttgctttca

SEQ ID NO: 12328 - DNA, 201 bp, Homo sapiens
ttaataaatgtgtattgcttgagttatttttaaaagttattttaaaatgaaaataaatgaaagagagagcaaacgagtttgtgaacttggcctcattaaawctgaattccaggcaacaactgtacaagagctcacattcaagttgcctgtttcccttttaatcactattgttgggagacagtctgctgtccaggctttttg

SEQ ID NO: 12329 - DNA, 201 bp, Homo sapiens
tttagtagcctgaagacagccctaacaaccacccagaaaagcatgaaataagataacacgggcctcctagcacagcattgaaaagcctgatagtgacagtwcaacaacaggctcagctgggcagctttcaaattgggttctttgtagccattatatgccacttcctctgcttcccaggtgcccacccacctgcatgaagct

SEQ ID NO: 12330 - DNA, 201 bp, Homo sapiens
cattttgcttaatttgattttaattttgagatcagaggtttgcaaatagacttttattctgtttatagagagaaatatttctgtttgaataaagtgggtarcagtagataactggagtgcctaattgctgctgttgctgtttttctttgctgttgtcattatcattatgaaaagcatttattatgcacctgtgatatgggc

SEQ ID NO: 12331 - DNA, 201 bp, Homo sapiens
ggctcacgcctgtaatcccaacactttgggaggctgaggcgggcagatcacttgaggtcaggagtttgaagccagcctggccaacatggagaaaccccatytctattaaaatacaaaaattagccaagtgggtgtctgtagtcccagctacttgggaggctgaggcaggagaattgcttgaacctgggaggtggaggttgc

SEQ ID NO: 12332 - DNA, 201 bp, Homo sapiens
cattaaaaggttgattataaaaacatatatttttaagtgggaaactgtccacaaaataccagaataaaagattacaaaatagtacaaacataaacccattragtcagagtttttgtctatgttgttctctcatatatcccaagtccctagaaatatacctggaggccaggcgtggtggctcacgcctgtaatcccaacact

SEQ ID NO: 12333 - DNA, 201 bp, Homo sapiens
gtttgtaatatgacattcatgatgttgtttctgtttctgcatttaggttctctcggtccagttctattttcttaaattgaagattggggcactgtcctaaycttcttagcatccctgtcagcaactctagctgtttccacttaatatttgcttactaaatatttccaattttatttgctatttccttgggaaagtgttttt

SEQ ID NO: 12334 - DNA, 201 bp, Homo sapiens
tcatgtatttcaaataaccaggtggactctgttcattgctgcagacaccaaaagaagctgtcttccggagcagctgtgacgggaagggttttggtgtgacygagaaggggtatatagctctttatcaacttcccttttctttcatgagcgcttctgtcctaactggatcacggactcatagacggaatctgtttttctttg

SEQ ID NO: 12335 - DNA, 201 bp, Homo sapiens
aatcttcgcaagtgtgcttgggctcatgtatttcaaataaccaggtggactctgttcattgctgcagacaccaaaagaagctgtcttccggagcagctgtracgggaagggttttggtgtgactgagaaggggtatatagctctttatcaacttcccttttctttcatgagcgcttctgtcctaactggatcacggactca

SEQ ID NO: 12336 - DNA, 201 bp, Homo sapiens
tggaaggacactttgaaactaatatttagtgttccttaaaattttctaatttctctttactcacctaacactttatattcatcataagtgattaggaaacmacaattccacttaacagatgaggaccatgaatttcccagacattaaatgatggtttggaattgcaaaatcagtgaaaaagattttcctgattttttaaat

SEQ ID NO: 12337 - DNA, 201 bp, Homo sapiens
  misc_feature (1)...(201): n = A,T,C or G, or insertion/deletion polymorphism (see Tables 1-2)
aaagagtgtaattatgcattcacttaaatctaaatgatgatactgtaaaaccatctgtggaaatctgcagttagctgcatgtgcattcgctgtcaggaacncctgatccggcagcagccaagttctccagtaatttaaatggaaggatcagttcctgaagaggattttaccagggttcaaaactttaaaaaacgtaataat

SEQ ID NO: 12338 - DNA, 201 bp, Homo sapiens
gccagtgctcttaggtaacatctgtgtcctacactaggccaggggggatttttacatcttgttagcagcatagagctgtcccgcgttggtgagagacactstgaaagactgccttctcccatgttccagaagatcaggcaatgagtttctcttgccgacagatcatcaaacctgtctatgacgcttctattactttcccaa

SEQ ID NO: 12339 - DNA, 201 bp, Homo sapiens
attattgatttctttcccctttgataactcaaaaagagtgtaattatgcattcacttaaatctaaatgatgatactgtaaaaccatctgtggaaatctgcrgttagctgcatgtgcattcgctgtcaggaacccctgatccggcagcagccaagttctccagtaatttaaatggaaggatcagttcctgaagaggatttta

SEQ ID NO: 12340 - DNA, 201 bp, Homo sapiens
aaaaataggttatcatatgtctcttcgttaagagatttggcaaggttctcctcctcttctaaccaaattcctgcaccatcggccacccttaatttgtcttyggtcagttgagttatccagagattcatatacataatcagaaagttatggggtctccctatgttgcccaggctggtctcaaactcctggcctcaagcgatc

SEQ ID NO: 12341 - DNA, 201 bp, Homo sapiens
ctctttactgtctttctccctattcttttccctttcccccttctagtgatttttgtaatgtaccggggagttaaaatccagctctgctccaggagtaatawttttttaatcaaaaacagataattattagtgatattcaaagccaaaaatcatggatttacccattcttggttctgttgactctgtttcaaaaggcataac

SEQ ID NO: 12342 - DNA, 201 bp, Homo sapiens
ggcaaggttctcctcctcttctaaccaaattcctgcaccatcggccacccttaatttgtcttcggtcagttgagttatccagagattcatatacataatcrgaaagttatggggtctccctatgttgcccaggctggtctcaaactcctggcctcaagcgatcctccctcctcagcctcccaaagtactgagattacaggc

SEQ ID NO: 12343 - DNA, 201 bp, Homo sapiens
tggacttcttgtattttctagtggtctcacactcaaaaatcttctcaatcaagagtccctgagaattaaatttgagttaacataaagagagatatatcatrtactatgtagttaatagagaaagaaaatatcctgtatcaagctgccctgaaaaacttttatctgccaatcaagactgaacccaactttactactctcaga

SEQ ID NO: 12344 - DNA, 201 bp, Homo sapiens
ttgatggcataagattatagtgaaggaaatccagtcacacactgcatttctgcaactcttatggaaactagctgtatcctatactgatccttttttcaagygtgataggagattttgccacctcaaaaagataataacctcttggaaggcgggtgggatgcctcagatggtggtttctgaactccacagagcgacttattt

SEQ ID NO: 12345 - DNA, 201 bp, Homo sapiens
ggggtttcattatgttggccaggctcgtctcgaacttccaacatcaagtgatccacccaccttggcctcccaaagtgtgtgagccaccatgcctgcaccaycccctctttaaaaaaaatatttatttaagaaacaacaaagacaaagagggggcataaaagtggggaaataagaaggaaacagaaaaatgcaaacactgat

SEQ ID NO: 12346 - DNA, 201 bp, Homo sapiens
cagagcaggaacatttggggtgggagtaggggtgggctcagatgcatcccatgtcagccatgtgacatgcatcttgtgtgtatatcccacatggttttccrggacttacctctgcttgtgtgtgaaacatttgagcctctcatagagtctcacctgcccagttctctgctcatttttctctgctctgtttcccccacaagc

SEQ ID NO: 12347 - DNA, 201 bp, Homo sapiens
agttttaggtgagggctgcatagagaaggtgggattttggtctgcctattttcaacatccagaaaaaaagccaaagatacgagtcgctttatttttataayattaagtttccatctgttgggaaatatgtgcgttactctgccactcgcacccaatattacctgatacaggatgtcttatgcagtctgatcacgtggagca

SEQ ID NO: 12348 - DNA, 201 bp, Homo sapiens
aagcccagtaggaaaataaaaacctttatggtcattgagagacatgactgaccttatttgcacattaaatcttagctggagtcatcattgtttcatttttwccttgatactttccacacagagttttcacaaaaggactttcttttgtttaagttattggtgagagagatcactgttcaggctgccttgaggataaattaa

SEQ ID NO: 12349 - DNA, 201 bp, Homo sapiens
tcctcactgctctcctgagctttatgtatttcttcattccaggtcagacttgcgtgcctcactttgctccctgacacctacacatacacacacactcacaygcacacacacacacacactttgctgcagacatcatagaaataaacacttgggcttctggcttggggagtaaggatgacaaaatgcagcacgtggagggcc

SEQ ID NO: 12350 - DNA, 201 bp, Homo sapiens
gttctctgaggacagaacatgctgtaggaagtcaggggagagttgggcatcttctggctgggatggccttcaagctggattgtagagtaggtacttcagasaaaccttgaaatgtagagaagattgtaagtaacagttggagattattacaaggatatttttagctgaatggatgtcataaccaaaggtcaagggaagaga

SEQ ID NO: 12351 - DNA, 201 bp, Homo sapiens
agatttgagtttgaatcttagttgtcctgctaaatcagcacgttgccttgagtaagtcacttaaattctttgagcctgagtctccccatctaaaatatggkgatagtatatctttcggaggttttttcctcaggaggcgacatcgtggatacaaagtgctttattcctagtaaatgctcaataaatgctacttactcatgg

SEQ ID NO: 12352 - DNA, 201 bp, Homo sapiens
aatagcaccttgaatgttagaaccctttcttcattgggttactgcctcttctgtagttctaaagctcttaagtgcagtaattatgtagcccgcattcttawttcatagtaggggtttggaatgtttcactgactaaataaatgaataaataattgaattgtatttattcatataattgatctctgagccattgactcattt

SEQ ID NO: 12353 - DNA, 201 bp, Homo sapiens
tatgcagtctgatcacgtggagcataaatgggtatcaaaaatactttaaagtgattgataaaaatcagcttgctttgggaatattctgtaggcctagtttrtaattgtgtttaattttattttgattaagtattctgccaggagaagcaggtggggagatctatactcatgggaaaagaggaaagcatattctggctaaca

SEQ ID NO: 12354 - DNA, 201 bp, Homo sapiens
ggattgaaaacatcttgaaatagactcccctccatgattagcctatttattggagtcttctagataaggggaataatttaggaaattactggtactttccrcttctgtttgttggcaaaagtaaacggggagcagagccataagaaataaaatgaatccatctatctacatatgaacaatacggcttgcagccaatgtcat

SEQ ID NO: 12355 - DNA, 201 bp, Homo sapiens
gtgtcttcaaatagcaccttgaatgttagaaccctttcttcattgggttactgcctcttctgtagttctaaagctcttaagtgcagtaattatgtagccckcattcttaattcatagtaggggtttggaatgtttcactgactaaataaatgaataaataattgaattgtatttattcatataattgatctctgagccatt

SEQ ID NO: 12356 - DNA, 201 bp, Homo sapiens
tgggattacggacatgagccaccacgcccagccagggttctcgtttttgaaggtgatattttgagatgaacagatgggaaagagccaggctttctactgayctctctgtttctttaagagaggatgaaggataaatcatactggaaaaaacacatcatggatagccagctctacaagtaggaatcagagaagacctccgta

SEQ ID NO: 12357 - DNA, 201 bp, Homo sapiens
tgacttgctgcttttgttttgtagggtcactgctttggctttctttagaaattcactgtcacatacacgcacaggcccacccacccacacacacataccascatatttatgggaatttataattttgtcctttaaaaatgcctcgactagagtgcagatgaaaagttttatatttttaatgatgccagcctgcagcccaaa

SEQ ID NO: 12358 - DNA, 201 bp, Homo sapiens
agcaaggctaaattttaatctttctgattaaaactaaatatatcaccaaattctattattttcatcttgcacaaaaatggatcacctgagtgtgcttgtgyccttgtacttgtgtcatctttggagatgactattggagagaaggaacggaacagtgcaattatggagtagagtgagcagtaagaggctgttgtggtagtc

SEQ ID NO: 12359 - DNA, 201 bp, Homo sapiens
gggcattcgctggaagggagtgagccgcagccgttagctgatggcattggctggaagtcaagttgagagggtctgtggccactcaggtgggtcagtgatayggaaataaaagctgacagtcccccatgggtcgtggaacttttagcactgatgagatgtgtggcaacaaggaggaccatgtgctggtgttggctggccagt

SEQ ID NO: 12360 - DNA, 201 bp, Homo sapiens
aaaaagtacattacaagatgatctccataatgagaacctttaaaagtctgtggataaatttcaaacatttcctaatatcatgccaagatctagtggatgayggcacaggacatggcaggcacagaccaagaattatgctgcaaagaaggaggccatcaatttggggttaaactatggtagcagatatcaaagaaacaaaag

SEQ ID NO: 12361 - DNA, 201 bp, Homo sapiens
agaaaagaaatatactggaaatagtaagggtttgaaacagtttttttcaattattatatactgtaaaattaaacttttgtgggaaaaaaagcaggaaaggwtatgactcaaaatgtttgccagtgataatgatgaatgttaggattctatgcaaggtttcttgtgttcattctttttgtcatttcttaataaatgtgtatt

SEQ ID NO: 12362 - DNA, 201 bp, Homo sapiens
aggtaatattcacataggtgaccagtgactcataaaatagtcaagctttgaacaatacctctttggaatatattaactgccacgaaaacataccttataawgtcagagtcttcgaaacatgtgtttgataactccttagcattgttaggaaatgtacaagtgaacttttgtgcttcctgaatgtaaattggcatccccaat

SEQ ID NO: 12363 - DNA, 201 bp, Homo sapiens
aacattaatgaatgcagttactcaaaatggagaaaaacaaggacaataaggaaggaatgtatctgaatggcatgagctcatgcgagttatgcagatttatwgcatgaaaagaaagtaaggtaccaagctagagactgtaaatttgtttaaggaaaatgccagtgtatcagcctattccaggactcaaagcaaagtagacac

SEQ ID NO: 12364 - DNA, 201 bp, Homo sapiens
aaatttggtattgcccttctcccaattaggaatctatcacttctgacctcaaaaacgagtcagaatttacactattctcttccttctacattacatgggaygttttccctttagggttacaaaaacacagtcccaataatctctctcttcaaaacttaacaaattaatgtcacaacatggagactatacttttgctaggca

SEQ ID NO: 12365 - DNA, 201 bp, Homo sapiens
agactggtctcaaactcctgacctctggtgatccacctgcctcagcttctcaaagtgctgggattacaggcgtgattgattacaggcatgaaccaccgtgmctggcctggggatttctaattttatcagtcccctttaataataaaaacaggttaaatgaattaactaaagtcatacaaagtgttaaaattggctctgtaa

SEQ ID NO: 12366 - DNA, 201 bp, Homo sapiens
tgtgaaatacagacttcagtgcccagagatctgatcttagagaagacaaatgatgtttgcctatttgtgtgtgtgcatctgtgtgtgtgtatgtatgtttkgtggtggcagtggtgtgtgtgtccatatttgccagtttatgtgtgtgtatgttcgtgtgtgtatgtttttagttgttagaagtgctgggcattacctgtt

SEQ ID NO: 12367 - DNA, 201 bp, Homo sapiens
aggctgcagcttctctatctttgaacaatattcagtcacttctcgagacttcactaagaattcctatgatggcagaatgcaagtgattaccatgagtgagrgtaagagggaaaaaaaatcctcataattgtgtcttcttaatttataattttattaggaggagtttacttggccctagtgatcacacctcacttagctttc

SEQ ID NO: 12368 - DNA, 201 bp, Homo sapiens
gttgggggaaagctagttgctaaggtataggaactaggatgctctaggccaaaatgtccatctactgttttcttacacatttgtgttccacagcagtgaayaaactcaccattaatagcttgttgtgaagtcatttctgtttttattgtgctaggatataatgagataaaattcaaatgtgcttggcttaggcttacaact

SEQ ID NO: 12369 - DNA, 201 bp, Homo sapiens
ttgttgcaagagtacacacccaacatgcgtaggacctgtatgcaagtcccagctaataacatgcaacatccttgctagaatgcagcctgcctttcatcaartgtagttttcattatcatttttattttaagtggaaattttactgtcaggctgtataaatacatagagtagatatattctaaggattgtgggtttagatgc

SEQ ID NO: 12370 - DNA, 201 bp, Homo sapiens
cttccttgtttttttaaggcatactctccgtcttttgaacacatagccacatttattttccccttatctccctgacattgctttttctctccttcagtgcmtgtgacttttaagctcctaaggacagagtttggagctccggcctgcaggatagaccgtatatgagctgcggtaccctgctctaattgtgtttcattttgg

SEQ ID NO: 12371 - DNA, 201 bp, Homo sapiens
ttccccttatctccctgacattgctttttctctccttcagtgcatgtgacttttaagctcctaaggacagagtttggagctccggcctgcaggatagaccstatatgagctgcggtaccctgctctaattgtgtttcattttgggtgcctaaatcccagtggaggctttttgatgtgggcattataagggactcaaagagt

SEQ ID NO: 12372 - DNA, 201 bp, Homo sapiens
taactgtggtatctaagctgagctaaattttgaatgtagtccttgttttgttcctagccattcctgtggttcttggttttcatgcagtttttcttaagggwctaaccactcctgacaggtatgtttctgaaattctctttgcggaaaggagagacttgaacctgtatgagaataagggagaatgagaaacatgttatccag

SEQ ID NO: 12373 - DNA, 201 bp, Homo sapiens
tccttaaagcacattaattgttgttcaaaacaattgaagattgaagattggagaaaactagtgttgggatagcatggagaagtgaatgggggaaatgagaygggcaatctacatgaaaactagaaaaaaggagcttatggagagaatcttgggttaagagtgagttgatgatccgttttgttaggaatttggcctttaaga

SEQ ID NO: 12374 - DNA, 201 bp, Homo sapiens
cagtgaggaggaacaggatcagggaccttctttaaaaagcagtctagtcacgttttcatagagcagttgtgctgttctggagatccacttcagcccctggytaccttggtctttccaaagcccgaaggctgaaaaagctaagtctgccacacagccaatatggcaccccctaccccaccccccaaccctaggagctccagc

SEQ ID NO: 12375 - DNA, 201 bp, Homo sapiens
ttgaaaggtacaaatttagacaatttctctgtgaatctgtgcataggaaatgtgtaactttagaagcatatgaatggagaaattcaggagcccaaagatayatttctgtgtttgtgaatttgggaattcctgacagtcttcatgattttttctgtaacagtatcaacaatcctgcttctataggataatgtttatcaaata

SEQ ID NO: 12376 - DNA, 201 bp, Homo sapiens
aagcccagaagattatcaaacccaaaccatttggcttcaattattataaatacaaagttttgcccatggttcattatgttcctcccatacatacctaactygggggaattacaaagaacactgaaataaatatgtgggagagggccttgttgaaattggatactggatattatgtatctacaactgcttagtttgttgcta

SEQ ID NO: 12377 - DNA, 201 bp, Homo sapiens
ttagggaaacctatttttatcatgggaaggatttttgttctcatgtgaagactgattctctgaagcctgggtatgtgtggatgtggatgtgtgtccatgtrtgtgttttcctcatccagatctttgaagaagagcacagtgttttgtacctggatcaaggtggagtcctggttgctatgaaacacacatctctcccaattc

SEQ ID NO: 12378 - DNA, 201 bp, Homo sapiens
tgcacacacacacacacactttgctgcagacatcatagaaataaacacttgggcttctggcttggggagtaaggatgacaaaatgcagcacgtggagggcytcaggttgctggcaatgctgattctcagtaggccattgtgcattgaggagattaagcattgtttttatctgtctgtttatctattgatctatttatttgt

SEQ ID NO: 12379 - DNA, 201 bp, Homo sapiens
ctcgtgtgggaagttgtaaggattatatgaaattaggcatttcaggtgcttagcacagaatagtaaaagcttaattaatgttttctcttcattcttttttyttgctgaagtgtccagcagaacttgatgatagaaattttcttctaagctcttctgtactttagacattaacaatttatggcttttgaatgtttgaaatat

SEQ ID NO: 12380 - DNA, 201 bp, Homo sapiens
aagtacctagttgatttttctgggatattatctgtgtctaacactgatgtagtaaaaaataaattaattaatgataaatcaggttcaggcagtaaattctratcaatgcatacattccaaaacttactttttccttcctcctatcttttcttgtcccccatatctgctaatttgcctggttctcagaggtggtttactgct

SEQ ID NO: 12381 - DNA, 201 bp, Homo sapiens
aggaatgtcatatacatgaaattgtaaaaatcacatttacaaaattgcaaatttttctatttggctgaaactaaaatttgttatagctagttataatttacacacacacacacacacacacacacacacacactttggaacctaatccttattatttttcactgttttggctgtttgatttttaggaaaactaatttttgt

SEQ ID NO: 12382 - DNA, 201 bp, Homo sapiens
gcttgatctctataaccaaatgttacatttgtggcaatgcatataatagttctgctttcagtcacttctgaatctagacatcctaggcttcttgcaggaamttgaagaataaagtgacagaaggcaattccccttttaggacctgtgttagtctattttcatgctgctgataaagacatactcaaatggtatttctagttc

SEQ ID NO: 12383 - DNA, 201 bp, Homo sapiens
tggtctgatgcatggtctgggggcaaagaatccctctctctgtaaccatctgggtgtgagtctgcatttctacctctcaatttctattcctgagtatattctctctctctctctctctctctgtcatttgtattctccttccactctatacctatagctactttgcaaggaaaagatggtgacttgtgacaaaaggaaatg

SEQ ID NO: 12384 - DNA, 201 bp, Homo sapiens
atgctgctgctgctaccaaatccttttggctactctgccaggtactatgctaagtgttcagtatacatcatcttatgtaatccttacaacaaccctaatcmggtttctttatgagatgcatgctgatattaatcatgatcattttgcagaaggggacattgaggcttagagagttcttgtcactggcctaaattcagaaag

SEQ ID NO: 12385 - DNA, 201 bp, Homo sapiens
tcctagctacttgggaggctgaggcaggagaatctctagaacccaggaggcggaggttgcagtgagccgagattgcaccactgcactccagccttggcaasaagagtgaaactctgtctcaaaaaaaaaaaaaaaatagttcacttccccgctggtaaaatcaggggttccctgtacacagcatgagagccacccctttat

SEQ ID NO: 12386 - DNA, 201 bp, Homo sapiens
gggccatgatgaccttgaacagctgaagacaatagggaaattagatacttagcaagcttgacaggaagggaaggagcgcaccagaatgagtaccaagactygttaacttgttaaataatgttaaagaaaatcagaaaaactgtattgctttgtttgctggagagctgttcttcctaaaactcaatgcagttattgcctgtt

SEQ ID NO: 12387 - DNA, 201 bp, Homo sapiens
cctaccttggcctcccaaagtgctaggattacaggtgtgagccacggtgccctgccaacttttttttttttttttttttttttttacaaattagaatgaawcattttttaaatgcaggacctatttcttatttatttgtttatttcataaattacaatgcttgtttttttaaaatcagggcacatttcttatttatttgtg

SEQ ID NO: 12388 - DNA, 201 bp, Homo sapiens
tattattaaataattcattgaaaaatatttactttgcaaatatcacatccctggaaaagtcctagtcattggggctaccgcagtgaatgaaacaatgccckcctactttggtggaatttataccctaattgaaagacaaattaacaaataaacgtagagtataggatttaaagtagtgttaaggaccatgaagaaaaatga

SEQ ID NO: 12389 - DNA, 201 bp, Homo sapiens
ctacgatgtgaatgggtgtgaagaggtacacttaagtaagcttccataggggagatagctcaactctgaaggtcatgagacgttttccatcttcacgtacsccataaaatattcatttataagtacttattagatattattaaataattcattgaaaaatatttactttgcaaatatcacatccctggaaaagtcctagtc

SEQ ID NO: 12390 - DNA, 201 bp, Homo sapiens
ttgtttatactgttttggaaccggggagcatactgcaaaatttaagttgctaaattaactagcatgttacttgtttcatgccagtggtaaaagattctgtwaatataaaataaagtgggcagtgggttggtttattctaagaaaccaagataatcttctcaagggaaagatttcttcctgctattaagctggagatatttc

SEQ ID NO: 12391 - DNA, 201 bp, Homo sapiens
actcacatgcacacacacacacacactttgctgcagacatcatagaaataaacacttgggcttctggcttggggagtaaggatgacaaaatgcagcacgtrgagggcctcaggttgctggcaatgctgattctcagtaggccattgtgcattgaggagattaagcattgtttttatctgtctgtttatctattgatctatt

SEQ ID NO: 12392 - DNA, 201 bp, Homo sapiens
cacactcacatgcacacacacacacacactttgctgcagacatcatagaaataaacacttgggcttctggcttggggagtaaggatgacaaaatgcagcaygtggagggcctcaggttgctggcaatgctgattctcagtaggccattgtgcattgaggagattaagcattgtttttatctgtctgtttatctattgatct

SEQ ID NO: 12393 - DNA, 201 bp, Homo sapiens
caagcgatcctcccatctcagcctcctaaaatactgggattacaggtgtgagccactgcgctgagcaattcctttaaacttatatttgttctaccctctartctgaagttctttgtccttaacagaaatggataaagagaggagaagtggagaggttctctcttctccctgtcttctgtcactgtggcccctccggcccca

SEQ ID NO: 12394 - DNA, 201 bp, Homo sapiens
aataaataaataaaagtaaaacgatagatattaccaatactctgtgatcagaaaactagttaagtcaactatagaatattgtacggctggcaaaacagtgygttctaatattacatcgtgtgttacgctgtgttcgtgatatgatgcaaaagtcttaaaaagaaaaaggagtgcctacacgaacactgaaaaagtactgaa

SEQ ID NO: 12395 - DNA, 201 bp, Homo sapiens
ggtggatcacttgaggtcaggagttagagaccagcctgaccaacatggtgaaaccccgtctccactaaacatacaaaaattagccaggcacggtggtatgyacctgtagttccagctactcaggaggctgaggcaggagaatcacttgaacctgggaggcggaggttgcagtgagctgagatcgcaccattgctctgcact

SEQ ID NO: 12396 - DNA, 201 bp, Homo sapiens
acagtttcttctcttgcccgggtaccttttctctctgtccttgaagaatttcacagaaaggggagctttgtacaaaaacaaacaaacaaactaacccagcrggaagaagctagagcccatgggaagttctggcctgatgtctgcaaagctgagccccacacatgcagagacctcaaaggccctaaaggggatgcaactatg

SEQ ID NO: 12397 - DNA, 201 bp, Homo sapiens
acacaatttgacctgctttttcatctggagaaaaggctatttggagcctttagtggtggcacaaagggttaataaacagtgttatgttgaggcaggcatcmgtttctttttctttcttgttttttttttgagacacaccctgttgccaggctggagtgcattggcgtgatcttggctcactgcgacctccacctcctgggt

SEQ ID NO: 12398 - DNA, 201 bp, Homo sapiens
ctctaatggatctccatgtataagagtaaaagccagcatttttttctgcagtgcattttccatataaagtatagtctgcatattagaaatttaatagatartgcagttttgtctcactgggacagaggcttacgcagtcataactctccacctgcacagtggaaagaacatgcctgcagggcctgaggagcaggttgccct

SEQ ID NO: 12399 - DNA, 201 bp, Homo sapiens
cttcatcccccaggtcagagcatctaagttcactgtaggttttgcttgcacagaagctcaggaggtctgcacatttggagaaagacgtgtgctttagaaamccatctttgaataggcaaggggagaagactgacaatactccgtaattatgcatggatttggacattttagagtcatcttccagagctcagttttgaaagt

SEQ ID NO: 12400 - DNA, 201 bp, Homo sapiens
agtcctgcctgtataacttaaactcactatctattcctttacatcaatgcctgtttcccctgtgccagatctctgcttctcttctaaattctggcttaacmtgagagattactagtaatttgatgttgagtttgatgttgtttagaacacggaaagtaacagggataaaagagctgttgatgtaggcaaaataaactagaa

SEQ ID NO: 12401 - DNA, 201 bp, Homo sapiens
tatctttctgtaagtaataaaaatgtaccaaagtcatcgtcattgcaagtaacctaggaaaactttggacatgtattaagtcctgcctgtataacttaaastcactatctattcctttacatcaatgcctgtttcccctgtgccagatctctgcttctcttctaaattctggcttaacatgagagattactagtaatttga

SEQ ID NO: 12402 - DNA, 201 bp, Homo sapiens
ttaaatagctttgtttcttcgtggctggagctcaaattgccaaaggggagtctgtaaagaagggcaatctctcaaagcaatccccttaggtgacttcagtmttcagaagaaaaaaggtagttatggactggctctgatagaaactcccttgaacagaatatgtctcctcgtttctgtcctgacatggctcatgctgagcta

SEQ ID NO: 12403 - DNA, 201 bp, Homo sapiens
tgctcagcttactaaaccataaaagtacattgcttcatctaggctcctttctgaggtcctttctcattcctgagcacattatttataatggttgataggaygtttattgtgattgaagcccccccgacacttttaccctgtaacaaccaatgtctacaagcagctcattctacaacttctcactttttgtttctgccaaat

SEQ ID NO: 12404 - DNA, 201 bp, Homo sapiens
taacttgctcaggaccatacagatgggtgacagggctgggattcaaactcaggcattatgcactgggaattcctacttcctgagatagtaagacagcctgragtgccttctgaatcatcgaagaaaattatagtcaaggtaatttctttgttaataatatactaacacgttctaggttttttgaatgacaatccatgttgg

SEQ ID NO: 12405 - DNA, 201 bp, Homo sapiens
tcaaccagagataatgcctttaaacagtggaaaacaaagcaaagtaattgcttttgtttcaaggtccttatcttgaaataaagaacattgaaaaataagaytgtgtaggaaactatagccatatcatgtcacagtttcagcgaaactagaatgcttgcatttgtcactgttgctgaaagagtgtctttataatgtgtgcgt

SEQ ID NO: 12406 - DNA, 201 bp, Homo sapiens
tcttctctgaatttccatcttctctcagtttttggcctcatgattcttttatttccttgctaggtctcttattacttttaatatttacccaacctttctgrtcatccatagtgagtctgtagttcaaatacctagtccactaaccttgccttttaaaacaatccctggctggccacagcggctcacgcctgtcatctcaga

SEQ ID NO: 12407 - DNA, 201 bp, Homo sapiens
agttttccccaggggaagagtgggccaaactctggactttcttctctgaatttccatcttctctcagtttttggcctcatgattcttttatttccttgctwggtctcttattacttttaatatttacccaacctttctggtcatccatagtgagtctgtagttcaaatacctagtccactaaccttgccttttaaaacaat

SEQ ID NO: 12408 - DNA, 201 bp, Homo sapiens
ggcaatacactaggtacaggctgagtctgtgtgtccttcatagcactgcacccaacactttgccaaataaaggcttgataagtgcacacaaaattaaggaygttgtttaataatcttcaatgattgttaggattgcctttatagtcaggttgtataatagggctctagaccgcaaaaggaaaatgttgttagcacaaagag

SEQ ID NO: 12409 - DNA, 201 bp, Homo sapiens
actgcctgtcttatgctgctggcaggttagttcatttcaatgcatacctgtaaataaggctttttgccctactgttttgatacaaaagaatatttttcatkgacttttggtaatttacagtggaacagtcttattagtcatccatataccagcatctgtttgtgaatgcttttgttctgtaacccagtgcagaaagaggtt

SEQ ID NO: 12410 - DNA, 201 bp, Homo sapiens
ttatttcctaatttaacttcaaacagcaattcttttgggagatagcattactgttcatcccccttaataaatgagcatactgacattctttcaaataattstttgctgtctcccaaaaagatggtagctaggcacattgggtaatctgctcaatgcacccagctactagggctggaaactaatcattgaccttcctttctc

SEQ ID NO: 12411 - DNA, 201 bp, Homo sapiens
tttggcggcacttaaggagcccttcagcccaccgctgcactgtgggagcccctttctgggctggccaaggccagagctggctccctcagcttgcagggagstgtggagggagaggcgtgagcggaaaccggggctgtgctcggcgcttgcgggccagctggagttccgggtgggcgtgggcttggcggccccgcactcgga

SEQ ID NO: 12412 - DNA, 201 bp, Homo sapiens
ttagaaaaccagtttgaaatcaaaaggacagaataaactctttaaaatacaatgccatagtttcccagtcatttcactgaatcactttccaggtcacaagyagacagtctgttgcctaaatgttctgttcatctcagtattgaatgacgcgattttgtgctaataaacaaagatggcacataggtaagcttcgctgagttt

SEQ ID NO: 12413 - DNA, 201 bp, Homo sapiens
tttttcttttcttttctttctttttttttttttttttttttgagatggagttttgctcttgttgcccaggctggagtgcaattttgcgatttggctcaccrcaacctctacctcccaggttcaagcaattctgcctcagcctcccaagtagctgggatgaaggcatgcaccaccatgccaggctaattttctatttttaat

SEQ ID NO: 12414 - DNA, 201 bp, Homo sapiens
atatccaaaggaaataaaatcactatcttgagatagctggtgcttctgtgttcattgcaacattattcacaatagccaagatacggaaacaacctaagtgwctgagaaatcaatggataaagaaaatgtattatatatacagtagaatatgattcaaccttagaaaaaggaaatcttgtctgggtgcagtggctcacgcct

SEQ ID NO: 12415 - DNA, 201 bp, Homo sapiens
catattataaaattaagaaaatattttgtttgtccattcaatcatcagacattgattaacaacttactatgtagaggccctagagatagtgaactaaagaygatgaaaggttccagtgtgtggtattgatattccagtctggaaaaggagatacacaaataaggaaataacgacaaagtagaattgatctggggatagcat

SEQ ID NO: 12416 - DNA, 201 bp, Homo sapiens
catatgagtttatacttcgtagattacctgatggctccttgtcggccatctgatgagggaacgccgtctgcttggtgaatgtgagacagagaaatccatamctttgtcagaatttatggttggtgggcagtggctttcctggaacatggtacaagaggcaattagtcttcagttttgtgtgcgcttttcatcttgtcggga

SEQ ID NO: 12417 - DNA, 201 bp, Homo sapiens
gaagttctttgtccttaacagaaatggataaagagaggagaagtggagaggttctctcttctccctgtcttctgtcactgtggcccctccggccccacgcrggatctccagcctccttcctctcacactgaatttaacatcaacacaagcacgcccctccaggaagtccttagcactgcttctctgaccacaactcttcta

SEQ ID NO: 12418 - DNA, 201 bp, Homo sapiens
atgggtgaacataagcataagtcagattagttagtatcatggaatactgaacaggtgaaaaagtggcagctttcttttcaacatgatgtggaagaactgasctccagtaaccaatggctaggcatgaaggttcctttaagcaagattattttagctgcattataactgtgaaatcacaaatttaaaatcattcattttgca

SEQ ID NO: 12419 - DNA, 201 bp, Homo sapiens
tgcccggctaatttttgtatttttagtagagatggggttttgccatgttggccagtctggtctcaaactcctgacctcaggtgatcctcggattataggtrtgagccaccacgcctggtcaagagttttttaataccagcatacattttaatttcttaggtattaatattcccccacccatttcttgaaataaaaaggggg

SEQ ID NO: 12420 - DNA, 201 bp, Homo sapiens
tttcttgaaataaaaagggggaaaaagagaagaaataaattaactgtatttcctgagccctagctctgtgccaggagtcttctaggtacttaaagatgtayattataggaaaaatatagaaaaaattatgttaacttattttaaagactaaaaaagtgacggcacagagatgttaactaacttaacaaaagttacatatac

SEQ ID NO: 12421 - DNA, 201 bp, Homo sapiens
gtgtgtgatgaggtctggcaggcgatttgtcagctagagtacagctatgtgctatcaatgataaggattctgtgtatgaggacacatggtagattaaagaycactgtgtcatctgtcagaagcattctttgaccctcataataatcaaatctctggcattctaatgtacttcgtaattcaattttatttcatttagtagaa

SEQ ID NO: 12422 - DNA, 201 bp, Homo sapiens
ccttagaggatggctatgaagattaattgatataataaagtgtgacatacatttaacagtgtctaatgcagagtaaaatctcaataaaggttagctaccamtatgtccgctcagattctcttctaatatttatttcacatatattattcacttaaccttattctgttaacgtatttctctattgccatgtaatcagcatat

SEQ ID NO: 12423 - DNA, 201 bp, Homo sapiens
taaagattattgttataaatttaagctctttgaagttaagaaaataaactctacatattaaaattgtacacaggtagcttcctagctgcatgaatttggayagatcagtgaatttctttatgtgtctcctcatctaaagatgagggacttggaggtggggtgccaatacctgccttagaggatggctatgaagattaattg

SEQ ID NO: 12424 - DNA, 201 bp, Homo sapiens
agtttttactaaaaggatttggacagtgttaaaaaaataatagaaatgattaaattactacaacaaagtatacatttgaatcttaagatgagagtcaaagyttaatgataattaactcaatgacttgatcattgtacttcattcctcactagccttgagtctccagtgtctagtgcaatagactcgtttgtagagccttgt

SEQ ID NO: 12425 - DNA, 201 bp, Homo sapiens
attcatggttttcaggggctggggaattaggacagtgggaagttactgctatggggtttcttttggggtgatgaaaatgttttccagttagattgtgatgrtggtcacacaaatctttgaatatactaaaaagcactgaattgcatgcttttacatagtaacatttaggatatgtgaattatatcttattttttaaagagg

SEQ ID NO: 12426 - DNA, 201 bp, Homo sapiens
gaggaagctgtaaaagtgtgggagcacggaatatatgggaaatctctgtaccttccattccacctaaaactgctctaaaaaataaattctatgttaaaaawaaaaagtccaagcccaggtgaaatgttattttctgaaagtaaccttctttgctttcccaaccatatagtactggtgtccatagtgccacatgacatttag

SEQ ID NO: 12427 - DNA, 201 bp, Homo sapiens
gagacagtaaaaagatgagtggttgcccggtgttgggggagtgcaggagatgaataggtggggcacagatgattcttagagcactgaaactacttcgtatrttataatggtggatacatgccattataaatttgtccaaatgcatagaatggacaaggccgagaatgaacctcaatgtaaactttgtactctgggtgatga

SEQ ID NO: 12428 - DNA, 201 bp, Homo sapiens
tccaaatatgtatgacatcctggaaaagaccaaactatggagacagtaaaaagatgagtggttgcccggtgttgggggagtgcaggagatgaataggtggrgcacagatgattcttagagcactgaaactacttcgtatgttataatggtggatacatgccattataaatttgtccaaatgcatagaatggacaaggccga

SEQ ID NO: 12429 - DNA, 201 bp, Homo sapiens
ttaactaaagtcatacaaagtgttaaaattggctctgtaaccagaatccagccctttcaacctcttgcattagccctcaccctgccaccatacatactctrtttggccttgctcctattacacagaagaagagattttgagagtctcagaggaaatagctgaaaaatctggaattcagactttgattcaaaatctgcaccc

SEQ ID NO: 12430 - DNA, 201 bp, Homo sapiens
gggcagatactataatcatacaattatagaattttaggagcggaagggattttaaaggtcatctaatgtgaccatttaattttaaagcttaggaagctgasagattgtgatttgtctgaggtcccaaagcaaaccagtggcagagcaccatcacagacttgctattagggatctcaaagcatgtggcagtagcactgggcc

SEQ ID NO: 12431 - DNA, 201 bp, Homo sapiens
aatgacagttttccccaggggaagagtgggccaaactctggactttcttctctgaatttccatcttctctcagtttttggcctcatgattcttttatttcyttgctaggtctcttattacttttaatatttacccaacctttctggtcatccatagtgagtctgtagttcaaatacctagtccactaaccttgccttttaa

SEQ ID NO: 12432 - DNA, 201 bp, Homo sapiens
gaaaacactgaatttagctctctcgcttgtctggtagaggaacattaaaatctgtgctgtaaagttgtgtgggcagaggcataataaatcgaggcaaaatkgatctttatatttcttagcaatgctcctctttcatgccctcataaatgaccaactgtatacatcttttattataggggaattgaacttaattactgcaga

SEQ ID NO: 12433 - DNA, 201 bp, Homo sapiens
tttctttctttctctttctccttcatcttactttctttttttctctttctctttttctttctttcatcttactttctctttttctctttctttcttctttytttctttctttctttcttctctgtctctgagattgttgctataggaacattcatatgaattttaataattgatttgcttttcaatagtaaagattttcaa

SEQ ID NO: 12434 - DNA, 201 bp, Homo sapiens
tggctcacacctgtaatctcagcactttgtggggctgaggcatgaggatcatttcaggccaggagttagagtccagcctaggcaacatagcaagaccctawatctaaaaaaaattaggcctggtgcagtggctcatgcctgtaatcccagcactttgggagggcaaggcaggcagataaggaggtcaggagatcgaaacta

SEQ ID NO: 12435 - DNA, 201 bp, Homo sapiens
gtcaagtcaaagcacagatcatcttaaacccttttgcaggtgtctaactagctgcgtgactttatgcatcttaacccctctgtgctccagtttttctgttrtatcaaacataaataacatctgtcctttctatctcctagatgtcctaacatccacatgagataatatgtaagaaagcattttgacaaacacacaatagaa

SEQ ID NO: 12436 - DNA, 201 bp, Homo sapiens
tacccagttcatagatttgtcactgagactgcaggagactgaatgacttgcatgaagtcttccagcttgttaatggcacatgagaattcatgccaggggarccttgattacctacagtgctatattctctctataatgaatgacctggaagtgcagaaaggtgagttagaataccaggaccgccacttactagctgtgtta

SEQ ID NO: 12437 - DNA, 201 bp, Homo sapiens
tgagaaaagtgagggtggtgcagctggagtggtttgctttgatctcttccagctgcttcataagaggccaaatttaaggccttctgatgcctccactaatktttctttcctctacaccaggctgcatggtctatttcagttttgaactcattccattctcagaaattaaagtgcttccaaatgtaagttaggcaatagagc

SEQ ID NO: 12438 - DNA, 201 bp, Homo sapiens
aatagacattaatgccatttgttgtgttggaagcttcctccttccattcaggtgactgttctgtgacctgtgcctgttacagtagctcgagcttcttacartcttgtttttatgatccagctgacatcaggagggcggccacattactacgtgtcctaccgaaggaatgcatttgcccaaatgaagcttccgaaatatgct

SEQ ID NO: 12439 - DNA, 201 bp, Homo sapiens
tgcacacagtttcttctcttgcccgggtaccttttctctctgtccttgaagaatttcacagaaaggggagctttgtacaaaaacaaacaaacaaactaacycagcaggaagaagctagagcccatgggaagttctggcctgatgtctgcaaagctgagccccacacatgcagagacctcaaaggccctaaaggggatgcaa

SEQ ID NO: 12440 - DNA, 201 bp, Homo sapiens
ctgtgtccatgaggtttcaggattgaaatcagctgtgaaataagtataaaagtgtgtgtctataaagataaaatttaatttcatgctctttactaccacaygaatggtggtgataatagtaacttttacaattaagaatggtaggccaggtgcagtggctcatgcctgtaatcccagccctttgggagacccaggtgggcg

SEQ ID NO: 12441 - DNA, 201 bp, Homo sapiens
ttctcattttcaaacactgccctaaaacccctgtgggagttgaaagccagagaactacattagagaaatctcttaaaaagctagcaaaactgcctgaaaawgttagacaagctatttgcaaacaaactggctcagagataacacagggacttctatatggtaagataccactttttcccctatcataatgagacatttgta

SEQ ID NO: 12442 - DNA, 201 bp, Homo sapiens
actgaacccttggggaaaggggtactctgtgtcacatattcatcatctataagattgccaataaccatagggctgttgtgaaagcttaaatgagtccaggytcggtggctgatacctgtaatcccagcactttgggagaccaaggcaggaggatcatgaggtcaggagatggagaccatcctggccaacatggtgaaaccc

SEQ ID NO: 12443 - DNA, 201 bp, Homo sapiens
ataccactttttcccctatcataatgagacatttgtaactaaaggaggtttttgttgcacagaagcttatttacctctctccctctggtgctcttgttcargatgctgtgagccttgcttctaaagtccaaattgacatcttctttctccaggatctcaactctgtctcttactgaatcttccttctctggtcagcgtttt

SEQ ID NO: 12444 - DNA, 201 bp, Homo sapiens
gagggtaggaagtagggcttggcagaagttggttcctaccaatagaaacaatgaaaaatattgaaaggatgggcaagagaaaggaactgagatgagaacayttcccatgtaaatggtacatatatacagtgttttctatgtcaccagaggtcttatttatgcattattataacctgaacagacctcaccactgcttccgcc

SEQ ID NO: 12445 - DNA, 201 bp, Homo sapiens
tagggcttggcagaagttggttcctaccaatagaaacaatgaaaaatattgaaaggatgggcaagagaaaggaactgagatgagaacacttcccatgtaartggtacatatatacagtgttttctatgtcaccagaggtcttatttatgcattattataacctgaacagacctcaccactgcttccgccagtgctaattgc

SEQ ID NO: 12446 - DNA, 201 bp, Homo sapiens
gtaaaataaataaaacctccttcttttgtttttgaatacagacatatcttgcccattcacgtcttagtagtgcaacaagcactacttaaacttaagctatktaatcctcataacaaccttctgaagtaagcttctcattatcatcattaacagatagggaacctatggcatagagaaggtaagtaatttggctaaagttac

SEQ ID NO: 12447 - DNA, 201 bp, Homo sapiens
gcatgcctggccggccttccccttgtcatgtgggacacagttgctattgctagtttctcaattatctttctagaaatgttctgtgaattgccaaatgtgcrtgtgtgtgtgtgtgtgtgtgtgtgttagtgtgtgtgtgtgtttgtgtgtatgtagtcttactttgcttgggttgccgtaacagaataccatagactgggt

SEQ ID NO: 12448 - DNA, 201 bp, Homo sapiens
aatcatactcttaccaaatgatccagcaattgcactccttgcaatttatccacaggagttgaaaacttatgtccacacgaaaacttgtacaccactgtttrtagcagctttgtttataattgctaaaacttagaagcaacaaaaatgctttctggtaggtgaatggacaaagaaactgtggcaccatccagaaaatggagt

SEQ ID NO: 12449 - DNA, 201 bp, Homo sapiens
agtctaaaagtagatcttcctctcattcctgattttagatcttgtaggccttctccttgttatttatttatttatttattttagacagtctcactctgtcrcccaggctgcagtgcagtggtgcggtctgagctccctgcaacttctgtttgctttgttcaaatgattccccttcctcatccttcccagtagcttggatta

SEQ ID NO: 12450 - DNA, 201 bp, Homo sapiens
gataaattagcttctcatttctaatcttattttgaattgtctgaaatctgagctagaactaggctaaattgaatgagtaatcttttttattttattttatwtttttgtcccaaacacttctactactccagcatggaacctccttttactgagtataagttatttaacaccgtggtcttagaacatttaaaattactatag

SEQ ID NO: 12451 - DNA, 201 bp, Homo sapiens
acaaaacaaaatgaaacaccaggccaggtacagtggcttacacctgtaatcccagcactttgggaggccaaggtgagcaaatcacctgagctcaggagttygagactggccaacatggtgaaacccggtatctaccaaaaatacaaaaattagccagctgtagtggcacaaacctgtaatcccagctactttggaggctga

SEQ ID NO: 12452 - DNA, 201 bp, Homo sapiens
gcgtgagtcatcccactcccctctagggcctccttttacagtgctcatatgcagccctcatcctcctgccctctttcctttaaagctgtgagttccttgtraagaagaaaagctttcacttagaataactgctcacctgtaaggctaggagtaggttaagaatcttctgaaaatgtgccccatttcttagaattgtggaag

SEQ ID NO: 12453 - DNA, 201 bp, Homo sapiens
gtcttggctgggttttactataatatacaatggattaggacttctgtttgaattgtgaaactattaaatgattccatgtctctggaaagcaatgagccctstaggtattgtgcttagacgagattacacagatgcttctccagtgcccgaattctctccactgtgaaaacaagctttgaaaatccttattttgacagcatc

SEQ ID NO: 12454 - DNA, 201 bp, Homo sapiens
gctttgaatcctaaggagtcagtcatcaccgatgctggggaacccataagcaggtggtgaggattatgggatttatcagggaaggctcaaatggggctacycaccagctctgttgcataggcaggaagggattagtagaagagtcatgtcagcagcagctgcgtgatgagatttgtgacaaaatgtggtaaaggatgctgc

SEQ ID NO: 12455 - DNA, 201 bp, Homo sapiens
gagtgagtgatgggtcatgaaactgtgtggcagctacttggccattgcagaatattaagatttttgcattttaccatctggaagagtgaaaagagttgaaraaaataaaatgtagccaaatggatcatttaggctttgaaggaccaaagtccagctgttagaggcacatgggggtctccagcagttactctatcttgaagg

SEQ ID NO: 12456 - DNA, 201 bp, Homo sapiens
ttctgtagcattgatccaagatggaaaaataatcctgacagagtcaaggtccctgtttggccaagcattctttgcctgcccctgtccttcccttgtcaaarattagctaattttcaagttttgcaaatttgtaaacttaattttctgttgtttctttctccaacaattctttgctgcagataatgttactcacagacccgg

SEQ ID NO: 12457 - DNA, 201 bp, Homo sapiens
ttgtggttagctgtgatcagtcttggctgtaaacggatagttccatagatagagactctcaggcctccttcattttctaccactccattttttggatgatraatactctcactcttttatctatctgaaattaattttgacttaacttgtgacctatctacttgtttagtcctcagaaaatatgaaaaatacccaaattct

SEQ ID NO: 12458 - DNA, 201 bp, Homo sapiens
atgggtttgcttgaatgtggatagcctgctttccgcattttcagttgtagcagtttggtgccagtgatgcatggccggtttaagcagtcgtgctttgcctytcaagttagtcatctttggtttcatggaaagagtcctcccttagaggaataacaggtggaaagatctattaggttatcctgtgcattatgagattgccta

SEQ ID NO: 12459 - DNA, 201 bp, Homo sapiens
cttcatcttcagtgagacatggaatctgcacctggtgattcagtgagcaagaggtaacctgcgatcattcagctttcagctcagttgttcctcaggaatakattccttttctaatttaatggcaaatctgatattatagacacactggctgtgaatgcttgacttggctatacattttgatacagtttttttttttcggtg

SEQ ID NO: 12460 - DNA, 201 bp, Homo sapiens
gtgtccatgggtagaacgtggggcttccagagtagctagagattgtggagaagtcccaagaatgaagaagccatggaagttagagcctcaaaatctgagtsaaatacttgctgattcctgaattctaaggagcaggtagaaactactgtcaagactgaaagagctgagagaggatttcagtttctgatcactgcaggggaa

SEQ ID NO: 12461 - DNA, 201 bp, Homo sapiens
tggcaaatttttaacctctgtttaggaaatggtgccaagcactgccagcattaaaaaataataataaatggtgcttataattctagtagggcttattaggktcagggcattgaacatgcaggcaggtctgagataacgtaggaaatgaggtgatgagtgttaaagttttgatcactcaaatcatgttaactaatgaggtga

SEQ ID NO: 12462 - DNA, 201 bp, Homo sapiens
ttaaagaggcagctggtaaatattccttctttgcattgaaggtgataatcattgcataagacattgtttggattctgtactacttctttcaaacaaaaackaatttatctaattcaaaggtgctttttaaaaataggcacatgggccaggcgaggtggctcacgcctgtaatcccagcacttttggaggccgaggtgggtg

SEQ ID NO: 12463 - DNA, 201 bp, Homo sapiens
gatcctcccgagtaactgaggctacaggcatgggccgcattgcctggctaatttttggtacttttggtagagatggggtttcaccatgttgcccaggccgrtctcaaactcctgagtcaatcaatctgcccacctcagcctcccaaagtgtagggattacaggcatgaactacggcacctggcctcattttcccttctata

SEQ ID NO: 12464 - DNA, 201 bp, Homo sapiens
gaagtgagtgcacacagtttcttctcttgcccgggtaccttttctctctgtccttgaagaatttcacagaaaggggagctttgtacaaaaacaaacaaacwaactaacccagcaggaagaagctagagcccatgggaagttctggcctgatgtctgcaaagctgagccccacacatgcagagacctcaaaggccctaaagg

SEQ ID NO: 12465 - DNA, 201 bp, Homo sapiens
atttactggcctgttttggtcctgtaggtactctgctagatactgatgtgcagtgtcgtgtactctgatggcattatgtaggagctcattcatacataaakacaggataatcagagagtgagtgatgggtcatgaaactgtgtggcagctacttggccattgcagaatattaagatttttgcattttaccatctggaagag

SEQ ID NO: 12466 - DNA, 201 bp, Homo sapiens
cttctgcttagaagcatttctgaacttcagatgtatggatgtacctgctttaccacattttcatagttggcttaagcaagagatctttttatcttccttcmtaaatcaactttcaatattcttaaatcacctttgcagctcttctcggaaatctcttagatttactggcctgttttggtcctgtaggtactctgctagata

SEQ ID NO: 12467 - DNA, 201 bp, Homo sapiens
acttttgcttttggtctggcaaactatatctttatcattccctactcaatgcatagtgtcctctctgatattaccaactactgatatatggagcctttttwaaaaaaattctaaacaaaagccacttctatttcttgtacctaattattgccaatcaaaatgtcttgggctctaaatctgttgtatgatctgtagccttga

SEQ ID NO: 12468 - DNA, 201 bp, Homo sapiens
gggaccatacttaacatctaaccatgttgcttctcccgttcttaggggtcctcccaccaagtcaaatgctacttttgcttttggtctggcaaactatatcyttatcattccctactcaatgcatagtgtcctctctgatattaccaactactgatatatggagccttttttaaaaaaattctaaacaaaagccacttctat

SEQ ID NO: 12469 - DNA, 201 bp, Homo sapiens
gcttttttcctctgctctttcttctttgcttgggttcagggagactatgagtttcatggctacatgcagcatgatgaggtggggaagtggcgtcaggtcartgtgtacccttcggttgtttgcaggctcccactaaagaatgttgtcccttggcctttcatattgactctgtgtctgatgcaactgtagatgagacagatt

SEQ ID NO: 12470 - DNA, 201 bp, Homo sapiens
atacatagagtagatatattctaaggattgtgggtttagatgcctgtggatattaatagtctgggggctctgccgagttccactaaggcacatgtgaagtsattaatatggatgtttcttttcatgtttctccattttttaggtctgtgatggggtcaaataaagaaccagaccttgtgcatcttgaggccagaactgtgg

SEQ ID NO: 12471 - DNA, 201 bp, Homo sapiens
cttatatgccacttgaatgtatcttactgacttccagttaaaattcattgctttctggataaatccaactctttagaacagacacttaaactttcagtggyttttttcctctgctctttcttctttgcttgggttcagggagactatgagtttcatggctacatgcagcatgatgaggtggggaagtggcgtcaggtcagt

SEQ ID NO: 12472 - DNA, 201 bp, Homo sapiens
ggagaaaggtattagaaagttagagctgacactagatacgctcattgctaccggagtgttgttgcttatgggccttctcagtggacagagtagggaaatgygtgtgcatactaacccgtatgtatacatatctctataactacacatgcacccatacacatatatctgcatctacattaaactaaacatgagttcccattg

SEQ ID NO: 12473 - DNA, 201 bp, Homo sapiens
atcaatcaccaggaccctgctgactagctgccttggcctccttctgcaaggctgctgcttctagatggtattaagacagactcagaaaagggagagtttcrgttaattaatggcactgaatagaaagcaagctgtgatcctcggggaactctacactgtcatgtaagttcctggcgtgagtaatcaggaggctgagcctct

SEQ ID NO: 12474 - DNA, 201 bp, Homo sapiens
gcgcacatccttcctgctaattttctctgtattcacacacacggacccctgttagctcttcaaatcagacaacactggggctgatggctcagggctggatrccttcctttctcctgtgccccaaaggatgaagaggtggcttttcctgttttgcctggcagtaccctcactccatgcggacatcccattcttttgcagagc

SEQ ID NO: 12475 - DNA, 201 bp, Homo sapiens
tacctctgtttttttccccatcattctttctggccttgattctggctcttcatcctctgtgtctgtgatggctgcttgcctacctaccagccttgaacctsgtacttggagggagtcagtttcatgggcctgacttcctgctccttctctgtgatctgttgtgggccccacattggcattgacagccataagcatggaagc

SEQ ID NO: 12476 - DNA, 201 bp, Homo sapiens
tccttttctacctctcatcaagtgcactgatgcatggaaataatgcacgtagtatctgcctcacagggggctattgtgtctgtgcttgtaagcatcttacrcaacaggcatctacaaaagctacttgccttttcctatggacacggtgcattatttttctagcagttttatctttctaaaataagctttttaaaaaaatca

SEQ ID NO: 12477 - DNA, 201 bp, Homo sapiens
agatcctaaacttaattctgtttgcatatttggtttatatcccctttcccaaataaggaaacatttgtagattctggggattaggatttggacatttccckttaggaaccacgattcagcccactgcaccttcctactgtcatctcttatggctcattcctttcagtcacattggccaccttcatgcgtctccaacataga

SEQ ID NO: 12478 - DNA, 201 bp, Homo sapiens
actgcagaaaaggaggtgtgtaaaatatctagaatagacccataaatctatagagacagaatgcaggttggtggtgattaccaggggttgggggtcaggakaacagggagaaacggcttcatgagtaaggagttgactttggagtgatggaaatgtttccgagctagacagaggtggtggttgcacaacatcgtgaatgtg

SEQ ID NO: 12479 - DNA, 201 bp, Homo sapiens
tgctggaggaagagatgcacccctgtgctggtgaagctgcttgttgtctggggtgaatacccgaggttcatggtatcacgccaaggaaattgagtactcacgacacccaagaaatgggtttaggagcacagttttaataagcaaaagaaagagaaaggagaatagctccctctcttatgagagagagggggcccacagcga

SEQ ID NO: 12480 - DNA, 201 bp, Homo sapiens
tatgccatttactgaaaatttgatatatgccaggtcttgagttaccagtggtattttaactgatttaatgctcagaaaacgttatgagattggtgtttttwaaaaaaaaaaaaaaaaacttattttaggtttggtgttatttttaatcccattttacagatgagaaaataaaggcttggagaagttaagaacaactcaagg

SEQ ID NO: 12481 - DNA, 201 bp, Homo sapiens
cttccaaactggcttctgttcccttatgggctacaggactagccttggcagaactggagtatttgtctctgcttcctgtgttcatttctgccacatggtgrcaaccactccatcggccagtgccgaagggcttttgcaccattccagaaggaaagcctcttctaggaggtcgagttagggagcagaatcccccaaccccac

SEQ ID NO: 12482 - DNA, 201 bp, Homo sapiens
ctactgctcttgggcaaggcctgggtaatatgcctctaccctccaggcgtgactgctgtgcttctgacattgatgatcctcattcctgtcttgggagctgscatcataggtctgattttaaggatgcagaggcaaaacaaagacatctggtggcaaatcaattttgatgatatcaccattcttccccagaacaaggtgagg

SEQ ID NO: 12483 - DNA, 201 bp, Homo sapiens
taataaattaatcagtgataatgcaagtcaatgagaaagaatcaagtatggcagcctaccttacctacagcaagaaaatgagggaaatgaatgacttgtatttgtttggttgttgggatgaactttgttggtgtccttcagtatcatgtcgcctgaaaagtgttgatgcaaaaggtgaacaggaaggagcagcacaggtct

SEQ ID NO: 12484 - DNA, 201 bp, Homo sapiens
gggagctggttccggcctcgggcaacccagaaaggggctcccacagtgcagcggcgggctgaagggctcctgaagcaccgccagagtggacgccgaggccraggaggcgccaagagcgagcgagggctgctagcacgttgtcacctcacttttatcatcctcgttttacagaagaggaaactgaggttcagagaggtgcca

SEQ ID NO: 12485 - DNA, 201 bp, Homo sapiens
cctgccaccacgctgggctaatttttgtatttttagtaaagatggggtttcactatgttggccaggctggtctccaactcctgacctcgtgatccgcccgycttggcctcccaaagtgctgggattacaggcgtgagccaacgcgcccagcctatccccattttataaacgagtgagctgagattcagagaggctgtggaa

SEQ ID NO: 12486 - DNA, 201 bp, Homo sapiens
tttcttaagcttgctgcctatacttttaccaccagaagcgacaaagccagtgacctgggagtcagtccggtgaggaaacctctcagtcatgggcagcacgrtgaagggtggtggtccactgctagtcattagtccaaccatcaatcaaccaacagactcctgtggggaagactcatctgggtgttgagagggcaaaaagga

SEQ ID NO: 12487 - DNA, 201 bp, Homo sapiens
ttgccttttcctatggacacggtgcattatttttctagcagttttatctttctaaaataagctttttaaaaaaatcacaagaagctgaaataggacagaaraaaataaagggagatatatagtaatgtcccagatttttctttctttatcatgaagtctttcagatccacaaaagcatctcagatttctttgggtagggag

SEQ ID NO: 12488 - DNA, 201 bp, Homo sapiens
actgtgacgtggttgagttaatcaccgtgcgtgaggttagactttgatcgttcctctgatttatttgctgcagacagacttcctgggtttacctcccagckctgccacttgtaggtgttactttaccttacctttcagtggcagttcccttatttgtaaaatgggatctgtaacagttcttatctaacaaggtctttataa

SEQ ID NO: 12489 - DNA, 201 bp, Homo sapiens
gtctatgcaattgaattcatgctgcttcatgaaagaatagcataaatctattttatgaaactattcccagtataggtttaggtggaaaaaaatcaagctgvattatggtatgatatcatcatatatatatatatatgtgtgagtgtgatgtcatatatatgtatatatacatacatatatgtataatgagtgggtatatac

SEQ ID NO: 12490 - DNA, 201 bp, Homo sapiens
cgggcggacggaacagagattcctcctaatttagtgctggacggtgacccaagaggccaagaacctcttgagaccctgctttgcttgtcttattgaaggtragcccttactctgcctaccttcacgacgccgtcctgctctatgctgagaccgtgaagcaggtggtaaaggctggaggcgacttccaggatgggtggcagc

SEQ ID NO: 12491 - DNA, 201 bp, Homo sapiens
agaaatagcaaacagcacatcaggccctgtaaagcctctgcaccaagcctctgcaaagggcctgcaaggcctctgcacccagaccaggagggaaggggctrccatgagaacagagattgcaaacttgtgccccagggcctggcagcatggaggcgtggggtgggtggggtcaggggaggaagatgggaggaactggaggaa

SEQ ID NO: 12492 - DNA, 201 bp, Homo sapiens
taactggaaacaaacttttttttttatttttaagtgctggatgagcttccccagtgtgggcctgagaaaatacatctgcctgcccagtgtggccctttaamcctaacaggatgctatctctgaactgtcttcttccctttgctggtccccattgaccctgtctcagattcactgaaatgacagaaaccctgtgtctggttt

SEQ ID NO: 12493 - DNA, 201 bp, Homo sapiens
aggctgaaccaggccatgaactaggtcagctggcttgaaggcctagcccgctgtattccgtatcagacaacaacagttgaggaactactgtcatttctacygggcagctgagaccttcccaagggaccctcagacacaagcggctctcacttctttttcttccacagctaccgccgtgtccctgctgaagctttaacaaag

SEQ ID NO: 12494 - DNA, 201 bp, Homo sapiens
ctgtacatgaggtagagtcaaatagaacaaactgagctgacgctgacctttatttttttttttaaagacccacagggaatttctccaatatgacctggccscatggctcccttcctgaagacagacctggctgtggattttataatgagctctgtgaaactcagtctgcttttacgggtaagtatggctgtttggagaacg

SEQ ID NO: 12495 - DNA, 201 bp, Homo sapiens
tacattttgtatttggtatttcgaacagccttggaaggtagatattattgttattccaatgtacaggtaaaaaaacccaaggcttaattaaggtaccttayctaagatttcagcactcccaagtggcatacctagtcttccagactgggcctttcagtctgagctcaccccacacaactctgccttctggagagcttatgg

SEQ ID NO: 12496 - DNA, 201 bp, Homo sapiens
acaagtgaaacattgtttatatttatggtataccatgtgatgtttcggaatacgtatactgtgtagaatgattaaatcaaggtaattaacctaaagatacmtcttaagtaagcttaagatacatccccatattttttacttagaaaatatggacctcaatgttatgacaaatctattttcctatgtgagtctaggtctcct

SEQ ID NO: 12497 - DNA, 201 bp, Homo sapiens
ggtggggaatgggccattgaaggccaccatttgttgagtgcctgtggccctggacgtgaccctagacactttatgcatgttatctccctacatcctcagarcaacaacgtgatcgtatgtacatgaggtacgcgtgattatcttcattttccaaatgagtaaagtgaggctcagagaaatgaaggaggcagcttagagggc

SEQ ID NO: 12498 - DNA, 201 bp, Homo sapiens
aaattttgtttttattattaattaattaatctttttttttttttttttttgagacagcgtatggctctgtcgcccaggctggagtgcagtggcgcgatctyggctcactgcaagctctgcctcctgggttcaagcaattctcatgcctcagcctcccgatgtagctggggatcacaggcatgcaccaccacgcctgactaa

SEQ ID NO: 12499 - DNA, 201 bp, Homo sapiens
attatttccatgattatttttctaagagaatgtcaggttcttctaaaaggggtcaggcatttttttttgtgcagtttggtacacctgtaaagggagatagwggcaaactctcctgaatccatagaaatagaggctgtagtcggtcttttacgtggagggtggtggatgcagcaacaggagagtagccactagatggcgccc

SEQ ID NO: 12500 - DNA, 201 bp, Homo sapiens
agctagctcagtgcctggccatgcacagggccaccgaaggggttgatttgggcagtgaggagcttgatgattggctcctaggtgcatttctttccagcttkttttctcccctccctagccctaagtggagctttttctggttcattctgagttaagaacattccactttttctttgattctagggaaaccatgtggccatc

SEQ ID NO: 12501 - DNA, 201 bp, Homo sapiens
cgggtaccccgcaaggagatgtttacagcttcgccattctgatgagggagctgatctaccattgggaccacgggccttttgatgacctccacgaggcaccrgatggtaaagcgggacagcctgcttgggaggttttggtcgtgtgggccagctttgaaatgctggttttttaaattaattgttttattaatatacaattta

SEQ ID NO: 12502 - DNA, 201 bp, Homo sapiens
ccacaattgtttttaaaaataaaggcaatacagagaaggaacttgaacatgaaaaccagctgtaattttagtcttgagtaaaccaccgttaacatgttagygcacatccttcctgctaattttctctgtattcacacacacggacccctgttagctcttcaaatcagacaacactggggctgatggctcagggctggatac

SEQ ID NO: 12503 - DNA, 201 bp, Homo sapiens
tggataccttcctttctcctgtgccccaaaggatgaagaggtggcttttcctgttttgcctggcagtaccctcactccatgcggacatcccattcttttgyagagctctactggactgccccagagctgctgcagttcccggagatgccctggtcgggtaccccgcaaggagatgtttacagcttcgccattctgatgagg

SEQ ID NO: 12504 - DNA, 201 bp, Homo sapiens
tagactttgatcgttcctctgatttatttgctgcagacagacttcctgggtttacctcccagctctgccacttgtaggtgttactttaccttacctttcartggcagttcccttatttgtaaaatgggatctgtaacagttcttatctaacaaggtctttataagaattgactgaaaatatgcaaagcacatagcatggtc

SEQ ID NO: 12505 - DNA, 201 bp, Homo sapiens
agcattaacccaaaggtttctctggaaaaacgctatggcaggtgggcatggcactttgaaggggaagagctccctggtggtcatcacctactctagctcastgagtctaccctctactctgtgccaggaaaacagaggacagcttggcattttgctttggaaggatcattacctcctgagatggagtgtgcacattctggg

SEQ ID NO: 12506 - DNA, 201 bp, Homo sapiens
tacacaagcatgtgcaactggcggactctggttttcattcttatagttatcatcttaacgtgcagctcagaggatgcaaaaattattcttctggctgcagyaaacctgggactcaacactggagaatttgttttcatcattttgcagcagttggaggtgggtaccgttgaccactcaatggctctggtagtaagaggtagc

SEQ ID NO: 12507 - DNA, 201 bp, Homo sapiens
tggggtcttggcatctgaattgttttttaaatgctcccaagtaattctgctgtgcatctgaagacaaaaccattgcctcaagtccacttttcccttccctatgtgccaagtggggttcaatgactcttcctacctgtccagttaattgaatgccttggattcgtacctttgcatgtatcctgggctctcctgagaccagtg

SEQ ID NO: 12508 - DNA, 201 bp, Homo sapiens
cttcagcctcctaagtagctggaaatatagacacatgccatcatgtcttgataattaaaaaaaaattttttttgtagagacgcgatttccctatgttgccraggcagctcttgaactcctgggctcaagcaatccttctgacttggcctcccaaagtgctagaattacaggcgtgagccactgtgcctggcccagaacaga

SEQ ID NO: 12509 - DNA, 201 bp, Homo sapiens
gaagacctactaagggtcagggactgcaatggatagtttacctattatgcctcatttaactattgtcacattcaacccaacagcagttttatccccctcctttcttttttttttgagatggagtctcgctctgtcacctaggctggagtgcagtggcgcaatctcggctcacagtaacctctgcctcctgggttcaagtga

SEQ ID NO: 12510 - DNA, 201 bp, Homo sapiens
tttttggaaggaagtactgacaaatcagaaaatgatgcacctccaaaaggtgtatgggtcactgcttctcattgccctcagctcctacagaaaaggccgtsgagacgaaggcttttggaaacaagtctaccaaacaccgaggaggtcgcccttccgcagcaccatctcctgggaggagcaggtgtgatgccgggtcttcca

SEQ ID NO: 12511 - DNA, 201 bp, Homo sapiens
gcactcagcttcctcatctataaaatgcattcccttttgtacttggccttgctgctgagagtgaccaaattacttcctgttttacagccatcccagagagscacacctgtgtcaaaaggcatcaacagtaactcatctagtgtgatgatttctgtggacctcagctcttttgtcaagagccagcagtgggaagagctcttc

SEQ ID NO: 12512 - DNA, 201 bp, Homo sapiens
ctctcttaccctagatatccattgtgaccgcctccctttctcttcacttttcctctcatctctgccttcaggcacattgttttggcagggaaacttttcamctcccctgttgctttctcccacacattgatgatccattccaactggtgtgtaatggcagaaagaaggtagaactaagaatacaccaatgtctatgcaatt

SEQ ID NO: 12513 - DNA, 201 bp, Homo sapiens
gacctactaagggtcagggactgcaatggatagtttacctattatgcctcatttaactattgtcacattcaacccaacagcagttttatccccctcctttyttttttttttgagatggagtctcgctctgtcacctaggctggagtgcagtggcgcaatctcggctcacagtaacctctgcctcctgggttcaagtgattt

SEQ ID NO: 12514 - DNA, 201 bp, Homo sapiens
aggtagcaagtatggagcactcgttatgacccacatgtattagctcactgagcactcactacaaccctgtgaggtaggcactctcgcgtcctcttcttaarattaggacactaagacagagctggaagaacttgcccagagttcttctccacagctagtgaaaggctgaaccaggccatgaactaggtcagctggcttgaa

SEQ ID NO: 12515 - DNA, 201 bp, Homo sapiens
ccgtttttggaaggaagtactgacaaatcagaaaatgatgcacctccaaaaggtgtatgggtcactgcttctcattgccctcagctcctacagaaaaggcygtggagacgaaggcttttggaaacaagtctaccaaacaccgaggaggtcgcccttccgcagcaccatctcctgggaggagcaggtgtgatgccgggtctt

SEQ ID NO: 12516 - DNA, 201 bp, Homo sapiens
ctgtccctcggccccagacgactgctgacatgttgtcacatctgattgttcgagggaagcataaatctcaggttttaagtgaaattaactggaaacaaacttttttttttatttttaagtgctggatgagcttccccagtgtgggcctgagaaaatacatctgcctgcccagtgtggccctttaaccctaacaggatgcta

SEQ ID NO: 12517 - DNA, 201 bp, Homo sapiens
gctgcagcaaacctgggactcaacactggagaatttgttttcatcattttgcagcagttggaggtgggtaccgttgaccactcaatggctctggtagtaasaggtagcaagtatggagcactcgttatgacccacatgtattagctcactgagcactcactacaaccctgtgaggtaggcactctcgcgtcctcttcttaa

SEQ ID NO: 12518 - DNA, 201 bp, Homo sapiens
tatagagatatgcttctcctcaagcaaagttctattttaaaaaatcttgatttgaaaacaaattaattaggaggatgtttgtttatatgtttttcattagrattgttcattttccaggcagattctcagagtattcctattaaaatatccagattactttggaattctaatctgttctatttatttaaaaactcagtttac

SEQ ID NO: 12519 - DNA, 201 bp, Homo sapiens
atttgatatatgccaggtcttgagttaccagtggtattttaactgatttaatgctcagaaaacgttatgagattggtgtttttaaaaaaaaaaaaaaaaaacttattttaggtttggtgttatttttaatcccattttacagatgagaaaataaaggcttggagaagttaagaacaactcaaggttgttaaggcagtaagt

SEQ ID NO: 12520 - DNA, 201 bp, Homo sapiens
tgggcaggctggtcttgaactcctgaccttgagtgatccacctgcctcagcctcccagaatgctgggattataggcatgagccgcccagcccctatcccattttttttttttttttttttgagacagagtctcactctgtcgcccaggctggagtgcaatggcatgatctcagctcactgcaacctccacctcctgggttc

SEQ ID NO: 12521 - DNA, 201 bp, Homo sapiens
atggggtcttggcatctgaattgttttttaaatgctcccaagtaattctgctgtgcatctgaagacaaaaccattgcctcaagtccacttttcccttccctatgtgccaagtggggttcaatgactcttcctacctgtccagttaattgaatgccttggattcgtacctttgcatgtatcctgggctctcctgagaccagt

SEQ ID NO: 12522 - DNA, 201 bp, Homo sapiens
actgtgattgcgccgctgcactccagcctttagagaccccgtcaaaaaaaaaaaaaaagggatggggagaaattttgtttttattattaattaattaatctttttttttttttttttttgagacagcgtatggctctgtcgcccaggctggagtgcagtggcgcgatctcggctcactgcaagctctgcctcctgggttca

SEQ ID NO: 12523 - DNA, 201 bp, Homo sapiens
tgaaccctccgcagccgctggcccaggtgctgagcccctcactgcccggggctggcggcgctggccggagctccgagtgcggagcccacccccacccggawctcacgctgtccagcgagcggcacccagccccggttcccgcccgcgattctccctccacacctccctgcaagcagagggagctggttccggcctcgggca

SEQ ID NO: 12524 - DNA, 201 bp, Homo sapiens
ggaaatgtttccgagctagacagaggtggtggttgcacaacatcgtgaatgtgctaaatgccactgaattgttcatttaaaatggttaatttttttttggsggggggatggaatctggatctgttgctcagggtggagggcagtagtgcaacctcgactcactgcaacctctgcctgctgggttctagtgattcttctgcc

SEQ ID NO: 12525 - DNA, 201 bp, Homo sapiens
tagagctagagcaagcagcagcaaaactttagcccaaaaagcaagacaacaaactttccaaaaagaacccaaaagggttatcgctgttagcccacgcagcyttttattcccttatctgaccccacccacatcctgctgattggtccacttaacagagagctgattggtccattttgacagggtgctgattggtgcgtttac

SEQ ID NO: 12526 - DNA, 201 bp, Homo sapiens
gaaatgtttccgagctagacagaggtggtggttgcacaacatcgtgaatgtgctaaatgccactgaattgttcatttaaaatggttaatttttttttggckgggggatggaatctggatctgttgctcagggtggagggcagtagtgcaacctcgactcactgcaacctctgcctgctgggttctagtgattcttctgcct

SEQ ID NO: 12527 - DNA, 201 bp, Homo sapiens
tttctagccatgaaattgaggagataaatatattttaactatattcaaaatccatgataaatgctgttcagttgtccacttacaaaggatattttcgggcttttttttttttttttttgctgggttgtctcttaatggctgatgcctggatctcagcctgagattctgatatcattggttcggggtgctgcctcagtgtca

SEQ ID NO: 12528 - DNA, 201 bp, Homo sapiens
gttagaggtggttatctattgttagcaggggagggggtcacaaggtgtatggtggggagatcataagactcattgtccagaagaagaaagtcacagggtcrattgatcagttggggcagggtaggaacaagtcataatggtagaatgtcataaggtgggttaattagttaaggcaggaactggctgtttcacttctttgtg

SEQ ID NO: 12529 - DNA, 201 bp, Homo sapiens
taacacaaacttaccaaagaatgaatatgatagtgtttttgagttgctgtgtcttgaaataaactgtaatttttcttgaaaatgttagacctcttcagatstcctcttcagagtgattccagctctaaaatctatcacttctatctgattttttcttttcttcttccctgattacagataaatatatagagaggaaagtat

SEQ ID NO: 12530 - DNA, 201 bp, Homo sapiens
aataaataaaaaataaaacccactacttcatttgtgtattctgaaaatgaacggtgatgggattaaacggcagaaaagtaccatggcctactcctccctcyggccagcccaactcagaaagtccaaatgcccttgaaagtccacatgtccaaaggtcctctgtgaactcctcttagctgaagtgtggctgacaagtcacaa

SEQ ID NO: 12531 - DNA, 201 bp, Homo sapiens
acacggacccctgttagctcttcaaatcagacaacactggggctgatggctcagggctggataccttcctttctcctgtgccccaaaggatgaagaggtgkcttttcctgttttgcctggcagtaccctcactccatgcggacatcccattcttttgcagagctctactggactgccccagagctgctgcagttcccggag

SEQ ID NO: 12532 - DNA, 201 bp, Homo sapiens
aactggcggactctggttttcattcttatagttatcatcttaacgtgcagctcagaggatgcaaaaattattcttctggctgcagcaaacctgggactcarcactggagaatttgttttcatcattttgcagcagttggaggtgggtaccgttgaccactcaatggctctggtagtaagaggtagcaagtatggagcactc

SEQ ID NO: 12533 - DNA, 201 bp, Homo sapiens
tcagcctcctgagtagctggtattacaggtgcatgccactgcacccagctaatttttgtatttttagtagagacggggtttcaccatgttggccaggcttrtcttgaactcctcacctcaggtgatccacccacctcagcctcccaaagtgctgggattacaggtgtaagccaccacacccaggcaacttgaggctttttt

SEQ ID NO: 12534 - DNA, 201 bp, Homo sapiens
gccagagggatcctattagaaaatgaggcagattatgtcacttctctatcagaagcctcccctggcttcccatctgaggagtgaaaactaagtcctcctcrtggcctacaagaccactgaaggcgttgaaaccgtgtaacctctgcggccttctggattagtttcctagggggccataacagtgaccacaagcttggtggc

SEQ ID NO: 12535 - DNA, 201 bp, Homo sapiens
gtttgttccttcacatgttcagatgtgtctggagtttcttccttttggtgggtttgtggtctcgctgacttaaggagtgaagttgcagaccttcacggtamatgttacagctcttaaacgcagcgtggctggaattgttcattccttcacgtgggtttgtggtctcgctggcctcaggagtgaaattacagaccttcacag

SEQ ID NO: 12536 - DNA, 201 bp, Homo sapiens
ccatgttggccaggcttatcttgaactcctcacctcaggtgatccacccacctcagcctcccaaagtgctgggattacaggtgtaagccaccacacccagscaacttgaggcttttttctccccttctcttatggaattttaatggaccaaaatgggccagaaaacaaagtaaccatggcaaactaggtctttagtattgt

SEQ ID NO: 12537 - DNA, 201 bp, Homo sapiens
ttgtgtatactgttccctctgccgggacacctctcgcctcatattcctatgtacaaatttgccccattctttcttaagggctacaaaatttttcactgtgrgaatatgccataagtggtaccttgatacacattttggaaattgctgcaatgagcagctctatatctttgcacacatggtgaatgttgtttcaggctagat

SEQ ID NO: 12538 - DNA, 201 bp, Homo sapiens
cctgggaagatttccagttattaggtttaatgttttctgccccacattgcgttagttctggccaaaaatataagctatattagagtcaaatctgttcaatygttaaagctcactgtgcttcaggttgagtcactaggaatcttttgaattactgagtttttcaggatgttttgagaaactcggatcatgaaatggattgga

SEQ ID NO: 12539 - DNA, 201 bp, Homo sapiens
tttgttccttcacatgttcagatgtgtctggagtttcttccttttggtgggtttgtggtctcgctgacttaaggagtgaagttgcagaccttcacggtaartgttacagctcttaaacgcagcgtggctggaattgttcattccttcacgtgggtttgtggtctcgctggcctcaggagtgaaattacagaccttcacagt

SEQ ID NO: 12540 - DNA, 201 bp, Homo sapiens
ccccttctcttatggaattttaatggaccaaaatgggccagaaaacaaagtaaccatggcaaactaggtctttagtattgtcagaacaggcacactccacrtaggaggagatgttttgttctgtgaaatgtcaagctgctatataacaagatttgtctacgtcaaacacagatgaaagtcccagcaacattgacttggcat

SEQ ID NO: 12541 - DNA, 201 bp, Homo sapiens
atccggaatcgttcatcactcccagtgggttcacggtctcggcagcttcaggagtaaagctgcagactttcgcaccatgttatagctcacaaaggtaacayagagctagagcaagcagcagcaaaactttagcccaaaaagcaagacaacaaactttccaaaaagaacccaaaagggttatcgctgttagcccacgcagct

SEQ ID NO: 12542 - DNA, 201 bp, Homo sapiens
tacgcgtgattatcttcattttccaaatgagtaaagtgaggctcagagaaatgaaggaggcagcttagagggctgatgaaaggcaggctctgtcctgtcaygcggctgcaatgccattgtcacttccccgatgtccgttggcaacccttaactaggacacctgaaaggcaagcaatattttcctggaatgtgtagctggaa

SEQ ID NO: 12543 - DNA, 201 bp, Homo sapiens
gtacctgtggcttcacattcaaatattgcttcatttttggttctgtttctatatgttcactctctcaacacttggcagaagtatttgctgttaaaattccygtgcgcttcttgcatgtctagaccaaagaagtgggggcagggatttttaatgagattggttgactgaaatgaaattgatttgtggattggtgaatgatta

SEQ ID NO: 12544 - DNA, 201 bp, Homo sapiens
aggcaagcaatattttcctggaatgtgtagctggaagctctgttccactgaggccctaagggtcttgggagaaaacatcaatgtctggtttcttttaaagycatgtgagcatactggccagtgtgatgagcaagctggaagtgtatgccaattacctggaggaagtggtgcaagagaggaccagccagctgactgcagaga

SEQ ID NO: 12545 - DNA, 201 bp, Homo sapiens
tgtcctagagtgatgcatgtaacaggtcagaaagatcagggttcaaatcctggctctcttattattaactgtctgaccttggcactcagcttcctcatctrtaaaatgcattcccttttgtacttggccttgctgctgagagtgaccaaattacttcctgttttacagccatcccagagagccacacctgtgtcaaaaggc

SEQ ID NO: 12546 - DNA, 201 bp, Homo sapiens
ataataaggtcccaggtgaaacttgggtcaaatccagcaccatgttggatccaattggtcttagctggcttggcccacaccctgttcttttcagggtcttrtcagccctgaaaataatggcttatgcagctatttcagttcctttttgctagtcatgtgtaactgcctggaattttctgttctcctgcagccactcctgtt

SEQ ID NO: 12547 - DNA, 201 bp, Homo sapiens
tggaacttgcatggggtggaggtcagggagtgtgacgcgtccaaacatggggcctcaaggttggggacaaatgaggggccttaatctctgaccccaccccmacccttggcctccctcatggaaaacaaaggtcactctgtcactttgttttcaggttgagaccattggagatgcatacatggtggctagtggactccctac

SEQ ID NO: 12548 - DNA, 201 bp, Homo sapiens
catgcatgccatctcttggagaggaatgcacacccagaattccaagcgcccctcagcatgtcattttcaccctaatggaaggagctctgttaaaatcctakaatataaaatcgttgactgtaaaatatctcatacttggggtaggcatggcactagcaaaggcaggaggaaagcagaaaaaaaccttgtgtgtatcaggga

SEQ ID NO: 12549 - DNA, 201 bp, Homo sapiens
gcaccgaaccacctaacatctgcattgtcacccagtattgcaaaaaaggaagtcttaagataagcaaaacagtaaaatgctccttaggtttgattagtggyagataataaagaagtttctcagtgccctctgctattcatccaaggtcagttcctctctgttctagttgcaagacctgaactatcttgtcaggctaccttc

SEQ ID NO: 12550 - DNA, 201 bp, Homo sapiens
agaccattggagatgcatacatggtggctagtggactccctaccacaatggaagccagcatgtggctgagattgccaccatgtccctgcacttcctcagtkccaccatctgcttccaaattgggcacatgccccaggagaagctccagcttcgtattggcctctacacaggtagacaaaactgatggcctgatggtccagg

SEQ ID NO: 12551 - DNA, 201 bp, Homo sapiens
cgttcatcactcccagtgggttcacggtctcggcagcttcaggagtaaagctgcagactttcgcaccatgttatagctcacaaaggtaacatagagctagrgcaagcagcagcaaaactttagcccaaaaagcaagacaacaaactttccaaaaagaacccaaaagggttatcgctgttagcccacgcagctttttattcc

SEQ ID NO: 12552 - DNA, 201 bp, Homo sapiens
ttctagccatgaaattgaggagataaatatattttaactatattcaaaatccatgataaatgctgttcagttgtccacttacaaaggatattttcgggcttttttttttttttttttgctgggttgtctcttaatggctgatgcctggatctcagcctgagattctgatatcattggttcggggtgctgcctcagtgtcag

SEQ ID NO: 12553 - DNA, 201 bp, Homo sapiens
gttctggccaaaaatataagctatattagagtcaaatctgttcaattgttaaagctcactgtgcttcaggttgagtcactaggaatcttttgaattactgwgtttttcaggatgttttgagaaactcggatcatgaaatggattggatattcaaactctcatttgcatacgacatagtcaatgtaagtataacacaaactt

SEQ ID NO: 12554 - DNA, 201 bp, Homo sapiens
gaagctgcggcatcaccatctagcagccccacataggggggattatttccatgattatttttctaagagaatgtcaggttcttctaaaaggggtcaggcatttttttttgtgcagtttggtacacctgtaaagggagatagaggcaaactctcctgaatccatagaaatagaggctgtagtcggtcttttacgtggagggt

SEQ ID NO: 12555 - DNA, 201 bp, Homo sapiens
gccagcatgtggctgagattgccaccatgtccctgcacttcctcagtgccaccatctgcttccaaattgggcacatgccccaggagaagctccagcttcgkattggcctctacacaggtagacaaaactgatggcctgatggtccagggatggcagcaggtagttccgggttccactcctaggtccagggcttttaggaac

SEQ ID NO: 12556 - DNA, 201 bp, Homo sapiens
gggctggcggcgctggccggagctccgagtgcggagcccacccccacccggaactcacgctgtccagcgagcggcacccagccccggttcccgcccgcgaytctccctccacacctccctgcaagcagagggagctggttccggcctcgggcaacccagaaaggggctcccacagtgcagcggcgggctgaagggctcctg

SEQ ID NO: 12557 - DNA, 201 bp, Homo sapiens
ggttctgtttctatatgttcactctctcaacacttggcagaagtatttgctgttaaaattcccgtgcgcttcttgcatgtctagaccaaagaagtgggggsagggatttttaatgagattggttgactgaaatgaaattgatttgtggattggtgaatgattatattcccttccacaactgcagagtctttacaccctaac

SEQ ID NO: 12558 - DNA, 201 bp, Homo sapiens
gccactgacttattgagtgattttgccaggccacttcccctctctagaccttgacctccacgtaggtagaatgaatgaggctggcccaattgaagtctaasggctttccttcaacaaggattttattgctttttgtttctagggagctgagtcccatatctctgtgagactttgatttcctaggctttagcaggaagccag

SEQ ID NO: 12559 - DNA, 201 bp, Homo sapiens
tggagaatttgttttcatcattttgcagcagttggaggtgggtaccgttgaccactcaatggctctggtagtaagaggtagcaagtatggagcactcgttrtgacccacatgtattagctcactgagcactcactacaaccctgtgaggtaggcactctcgcgtcctcttcttaaaattaggacactaagacagagctgga

SEQ ID NO: 12560 - DNA, 201 bp, Homo sapiens
gcactcgttatgacccacatgtattagctcactgagcactcactacaaccctgtgaggtaggcactctcgcgtcctcttcttaaaattaggacactaagasagagctggaagaacttgcccagagttcttctccacagctagtgaaaggctgaaccaggccatgaactaggtcagctggcttgaaggcctagcccgctgta

SEQ ID NO: 12561 - DNA, 201 bp, Homo sapiens
cgtcctcttcttaaaattaggacactaagacagagctggaagaacttgcccagagttcttctccacagctagtgaaaggctgaaccaggccatgaactagrtcagctggcttgaaggcctagcccgctgtattccgtatcagacaacaacagttgaggaactactgtcatttctaccgggcagctgagaccttcccaaggg

SEQ ID NO: 12562 - DNA, 201 bp, Homo sapiens
tttctgaggccaggtggctgcccgtagatcttagtgtatctctgttctgttctctgcatcgtttctgccaggcagggcattctgaatagaagaacattctsctagcaaaagccaaggtggtcttgtgactccatactagtgcttcccaaaccttaatgtgcagatggatcacctgggactcttattaaaatgcagattctg

SEQ ID NO: 12563 - DNA, 201 bp, Homo sapiens
atcattttgcagcagttggaggtgggtaccgttgaccactcaatggctctggtagtaagaggtagcaagtatggagcactcgttatgacccacatgtattrgctcactgagcactcactacaaccctgtgaggtaggcactctcgcgtcctcttcttaaaattaggacactaagacagagctggaagaacttgcccagagt

SEQ ID NO: 12564 - DNA, 201 bp, Homo sapiens
acattctgctagcaaaagccaaggtggtcttgtgactccatactagtgcttcccaaaccttaatgtgcagatggatcacctgggactcttattaaaatgcrgattctgggtcagtaggtctggtgtggcacctgagattctgcattttaaataatctcctggccgggcatggtggctcacgcctgtaatcccagaacttcg

SEQ ID NO: 12565 - DNA, 201 bp, Homo sapiens
gataaatgctgttcagttgtccacttacaaaggatattttcgggcttttttttttttttttttgctgggttgtctcttaatggctgatgcctggatctcarcctgagattctgatatcattggttcggggtgctgcctcagtgtcagggtttcaaagctcccggggtgattgtaatatgtagcagctcaggctgcttggag

SEQ ID NO: 12566 - DNA, 201 bp, Homo sapiens
catggtggctcacgcctgtaatcccagaacttcgggaggccaaggcgggcggatcacgaggtcaggagatcgagaccatcctggctaacacggtgaaaccycgtctctactaaaaatacaaaaaattagctgggcttggtggtgggtgcctgtagtcccagctacttaggaggctgaggcaggagaatggtgtgaacccgg

SEQ ID NO: 12567 - DNA, 201 bp, Homo sapiens
tgctgattggtccacttaacagagagctgattggtccattttgacagggtgctgattggtgcgtttacacaccttgagctagacagagtgctgattggtgygtttacaatcctttagctagacataaaagttttccaagtgccgacccaactcaggaaccctgctgccttcgcctagtggatgccgcctgcggagctgcct

SEQ ID NO: 12568 - DNA, 201 bp, Homo sapiens
aacaagtctaccaaacaccgaggaggtcgcccttccgcagcaccatctcctgggaggagcaggtgtgatgccgggtcttccagctcaggctccctcctccycttctttgatcatatttgtgtttgcctttgcatttctccctcttatttctcctcatctctccctaccccccttacacacatgcaggtgcacacacacatg

SEQ ID NO: 12569 - DNA, 201 bp, Homo sapiens
aaaagttttccaagtgccgacccaactcaggaaccctgctgccttcgcctagtggatgccgcctgcggagctgcctgccagtcccaagccacgcacccacscttctcagcccttgggcggtcgatgggcggggccctttggggacgctggggctgcgcggaagcccactggtggcgggggggggcggaggggaggcatggc

SEQ ID NO: 12570 - DNA, 201 bp, Homo sapiens
gttcaagtgattctgattctcatgcctcagcctccagagtacctggaattacaggcacccaccaccacgtccagcaaatttttatatttttagtggagatrgggtttcaccatgttgggcaggctggtcttgaactcctgaccttgagtgatccacctgcctcagcctcccagaatgctgggattataggcatgagccgcc

SEQ ID NO: 12571 - DNA, 201 bp, Homo sapiens
tcctgtttcttaaggcatgcccaaggaaagaaaaagttcacgtctcatttacagtgactttaggccagacttagagtgagagcatgcgtgagaaagcacayatacacaagcatgtgcaactggcggactctggttttcattcttatagttatcatcttaacgtgcagctcagaggatgcaaaaattattcttctggctgca

SEQ ID NO: 12572 - DNA, 201 bp, Homo sapiens
ttgcttcctgatgctcatctgtacaggtatccacaggtgggccttcctctggagctgatgatatgtggctgttccgttcaactgaggagaacgagaaaaaraaaaagtatctgcaggtggcatgagttcgtggggtgatgtctgggtttggagactggttctcgtcctagctcagctgagccacctggagcaaccattgcc

SEQ ID NO: 12573 - DNA, 201 bp, Homo sapiens
tttccagagtactttttttttttttgagatggaatctctctctgtcgctcaggctggagtgtgatggcgtgatctcggctcactgcagcctctacctcccrggttcaagcaattctgccttggcctcctgagcagctgggactacaggcatccaccaccatgccaggctaatttttgtatttttagtagagagagggtttc

SEQ ID NO: 12574 - DNA, 201 bp, Homo sapiens
aaatgaacacagagatgggcgcatcccctgccccaggcccctctgtctgtgtttctgtccatctgtctctctgccttggttccttccagcagtgttatcarcacctggtctgcctcatttgctcattttcacccttgcagggcatgctgttcctccacaggagccccctgggctcccacagcaacctgaaaccttccaact

SEQ ID NO: 12575 - DNA, 201 bp, Homo sapiens
gatgggaatggttgcttatgcctgaaatcccagcactttggaggctcaggtaggaggattgcttcagtccaggagtttgagaccagcctgggcaatatagtgagatgctcccgccccaccatctatacttaaaaaagaaaaattagctggtgtggtgacatgaggctgaggtaggaggatcacttgagcctgggaggtcaa

SEQ ID NO: 12576 - DNA, 201 bp, Homo sapiens
cttaacaccactgtgagaaggaattcaaggataaatcagaaagtagtgaaagtatggagatttactgcaaagtgaagagtacacactcaggaaaggggagygcgggcagacttgagagagagtcacgcaatggaatttggggcttctaccttcatgagtttctttaaccaaggggtagaacattcatgaggattcctggaa

SEQ ID NO: 12577 - DNA, 201 bp, Homo sapiens
gcctctgtgatgggggccctggcaccacagacttctgaagatgggttgtagtctcattcttgctttcctggtggggatgagtataggttggggagtgaacygctttcaaatcacattcagctgaccaactgctttgatctttcttgttctcgttttctcagttgtaagatagggataacacctgttaccacatgcagaaat

SEQ ID NO: 12578 - DNA, 201 bp, Homo sapiens
aagaaatagcaaacagcacatcaggccctgtaaagcctctgcaccaagcctctgcaaagggcctgcaaggcctctgcacccagaccaggagggaaggggcygccatgagaacagagattgcaaacttgtgccccagggcctggcagcatggaggcgtggggtgggtggggtcaggggaggaagatgggaggaactggagga

SEQ ID NO: 12579 - DNA, 201 bp, Homo sapiens
agctgctgcagttcccggagatgccctggtcgggtaccccgcaaggagatgtttacagcttcgccattctgatgagggagctgatctaccattgggaccaygggccttttgatgacctccacgaggcaccggatggtaaagcgggacagcctgcttgggaggttttggtcgtgtgggccagctttgaaatgctggtttttt

SEQ ID NO: 12580 - DNA, 201 bp, Homo sapiens
ttcattttccaggcagattctcagagtattcctattaaaatatccagattactttggaattctaatctgttctatttatttaaaaactcagtttacaaatrtaagagcacaattactattgaaaatgaagtgtagtaagtggcacaaagttctgatgtttggctgtctaaacccaacatgaatttcagaaatcatcaacca

SEQ ID NO: 12581 - DNA, 201 bp, Homo sapiens
ggtaatatgcctctaccctccaggcgtgactgctgtgcttctgacattgatgatcctcattcctgtcttgggagctgccatcataggtctgattttaaggmtgcagaggcaaaacaaagacatctggtggcaaatcaattttgatgatatcaccattcttccccagaacaaggtgaggccatatgtgacccagatgtccca

SEQ ID NO: 12582 - DNA, 201 bp, Homo sapiens
cacgagagcattgttcccttctttggtatttgcaccgaaccacctaacatctgcattgtcacccagtattgcaaaaaaggaagtcttaagataagcaaaasagtaaaatgctccttaggtttgattagtggtagataataaagaagtttctcagtgccctctgctattcatccaaggtcagttcctctctgttctagttgc

SEQ ID NO: 12583 - DNA, 201 bp, Homo sapiens
tgatcactaggatgtatttattttaagctggcctggccttcttggcttcacactaaggagctggaaatagttttctccattttgggtgtcccagccccagytgactccagggacaaggggctatgctggtggctcctgaacaaatgaacacagagatgggcgcatcccctgccccaggcccctctgtctgtgtttctgtcc

SEQ ID NO: 12584 - DNA, 201 bp, Homo sapiens
tgccagttaaaggagatcttagtgttaagcagctagctcagtgcctggccatgcacagggccaccgaaggggttgatttgggcagtgaggagcttgatgaytggctcctaggtgcatttctttccagctttttttctcccctccctagccctaagtggagctttttctggttcattctgagttaagaacattccacttttt

SEQ ID NO: 12585 - DNA, 201 bp, Homo sapiens
gaacttgcccagagttcttctccacagctagtgaaaggctgaaccaggccatgaactaggtcagctggcttgaaggcctagcccgctgtattccgtatcasacaacaacagttgaggaactactgtcatttctaccgggcagctgagaccttcccaagggaccctcagacacaagcggctctcacttctttttcttccaca

SEQ ID NO: 12586 - DNA, 201 bp, Homo sapiens
caggctctgaaccgctgtgtcagctgcctacctggccagcgcgatgtggataatgccctgagggcagttggagatgccagcaagcgactcctgagtgactyggtaggaggacggtagggggtgggggaacgtaggagtcaaagaatgccaggcctctccttcctccctctcggttgtcctttgaccctgacttcccagatc

SEQ ID NO: 12587 - DNA, 201 bp, Homo sapiens
gaggaggttcaagaaaggtgggcatcttccaagagggccgttgccacgggaaggcatctcatcagctcaaccttgggcctcccatcctagccatttccatsctggatagatttgagctttccctctgagtcccccacttgtcaccctaggattttggagattaccaagatggctattactcagtacagacaactgaagggg

SEQ ID NO: 12588 - DNA, 201 bp, Homo sapiens
ctctggtaagtgtcccacttccaccacggtgccagggcccttctctcaccctcagctgggccgagccaggagttaggcagtcttttcccaggtccctattygtattctctccctagaccctggttctcttttaccttctcttttctccaaacatccattccagtccctgtttctccccacttgtctttagacttcagccca

SEQ ID NO: 12589 - DNA, 201 bp, Homo sapiens
gggcccttctctcaccctcagctgggccgagccaggagttaggcagtcttttcccaggtccctatttgtattctctccctagaccctggttctcttttacsttctcttttctccaaacatccattccagtccctgtttctccccacttgtctttagacttcagcccagcaggcactcactggaaccattaactccagcatg

SEQ ID NO: 12590 - DNA, 201 bp, Homo sapiens
tccagcatgcaggccgtgcaggctgcccaggccaccctggatgactttgacactctgccgcctcttggccaggatgctgtaagtatgggatggaggagagkccggtggtactgaagctgagactccaagggatagggatgaggtgaaccaaaccagggcagatcctgaaggcttttcctctctctttcaggcctctaaggc

SEQ ID NO: 12591 - DNA, 201 bp, Homo sapiens
catggtggatgactctaagactgtcactgacatgctcatgaccatctgtgcccgcattggtaaggggccctagtacagttgaaagcctgggccagaaagcstcaactctctcaaaaggcatggatgcagtacctgggaagctaacaagccatctccttcctcaggcatcaccaatcatgatgaatattcattggttcgaga

SEQ ID NO: 12592 - DNA, 201 bp, Homo sapiens
gatgtcattgccacagccaatctgagccgccgtgctattgcagatatgcttcgggcttgcaaggtagaaatccttgaggcatttccgtgaggcagctttgrgccagaacatagtgggagagaaactgtagggatctgcggggcctaaagctaacatattactctggggacaggaagcagcttaccacccagaagtggcccc

SEQ ID NO: 12593 - DNA, 201 bp, Homo sapiens
ggctcccttccctccccagtctctagcactacttgagtgtctgggaaagaagatcccttttagagacagataagaaaggacaggacaatgcattgaccttrtcaccttcaacagagccaggaggaccgagcccaagttgtgtccaacttgaagggcatctccatgtcttcaagcaaacttcttctggctgccaaggccctg

SEQ ID NO: 12594 - DNA, 201 bp, Homo sapiens
ttctggctttagctagaattgcaggcatctgggattccagcttctttattccattctctaagcccaaggcccttgctgtggccaccacagttaggggacaragattctggactgtgttgtttacagacaacataggtgggaaatagggacccaggatgtacaaggcctagtcacaagttggggactgcctagggaagaagg

SEQ ID NO: 12595 - DNA, 201 bp, Homo sapiens; identical to SEQ ID NO: 1941

SEQ ID NO: 12596 - DNA, 201 bp, Homo sapiens
gacagtgtaatggagaactcaaaggtcagcacagccaggaactcggaggagagagggcagtaggatggagctaaccagatgctgccctggggttctgaggrcatgctctgactcccctgatgtcctctgttcctcaggtgctgggcgaggccatgactggcatctcccaaaatgccaagaacggaaacctgccagagtttg

SEQ ID NO: 12597 - DNA, 201 bp, Homo sapiens
tgtatagagagagtaaggtagctttgtgggaaagagctctgcctaggctggggtgcatctggggagaatgagtgtgcatttgagtatggaggggctgtacygggggaagttctgtgcagcccttcagctagctgcccagtccagctctaaatgagtctccagcagcctgaggccggatatgtcagtctcacccacagccct

SEQ ID NO: 12598 - DNA, 201 bp, Homo sapiens
taggaaagctttgggtgagttggggattaggtggggtccgtttaggaatcaagggtcgctataggagttaaaagctggggttaaaacttaagagttagtgkgagtcaggtccgttttagataggtaaggtttagattacggtcattatcttgtttgctgggatggccatcatacgtcataatttgagttcagggtcaggtt

SEQ ID NO: 12599 - DNA, 201 bp, Homo sapiens
agttgcaggactgagtattaacttgatgacttggaacaagcaaggactgagttacagggactgggtcctttctctggcctgtcttgaaaatgtttcctggmctcccagagtctatttccccttctccaaaacacaagagttgaccagataacttctgagatagatccctttgagttagagaatcacatttctagcttgact

SEQ ID NO: 12600 - DNA, 201 bp, Homo sapiens
gtggtgagaagagagctctgaaaatcccggacagggaagagccagcaggacacagcaggagacaaagagagaaaaatactgaaccaggcaaaaatgaaaasaaggcaggagtagggctgagaaaggtgatcagggacaaggggcaagagagatacttggatgaaagtagggaggtacaaattccagtggtggggcagggca

SEQ ID NO: 12601 - DNA, 201 bp, Homo sapiens
tacaaaaaattagccaggcatggcagcgggcgcctgtagtcccagctactggggaggctgagacaggagaatggcgtgaatccaggaggcggagcttgcarcgagctgagatcgcaccactgtactctagcctgggcaacagaacgaaactctgtctcaaaaaaaaaaattgtcaggactcattcttttgatgtaaataat

SEQ ID NO: 12602 - DNA, 201 bp, Homo sapiens
cccttttagttgccatcatccattgtctcttctctgcctctggaatatgaatgtagttcagtatctctgcccctacccccatctctgaagcaagcatgtcrctcttttttgagattatctgaagaattttgctgcagtagccagagggaaaccgggtaaaattttccctatagggaacatgggttaaaagtctcacaagcc

SEQ ID NO: 12603 - DNA, 201 bp, Homo sapiens
tgaggtcgggagttcgagaccagcctgaccaacgtggagaaaccatgtatctctactaaaaatacaaaattagccaggcgtggtggcacatgcctgtaatmccagctactcgggaggctgaggcaggagaatcacttgaacctgggaggtggaggttttggtgagctgagatcgtgccattgcactccagcctgggcaaca

SEQ ID NO: 12604 - DNA, 201 bp, Homo sapiens
ccttatcagcctccatcccgttaccctctcgttctcatatcttgtactcctcaacctttccagtgtccccataattctctctcgttagagttagcatccarccttaattccttagctgtgatatgaaactctttgctaaattcttccccattttatgcacaggcacacaagaattgtgggcagatgagtgagattgaggcc

SEQ ID NO: 12605 - DNA, 201 bp, Homo sapiens
cactggtaaaggctgcgtcggctgcccagagagaactagtggcccaagggaaggtgagtgcttaaatacccagaagaatggggacaggttggcactttgaygtccacatccacatccatagccagcgagtctttgaagtgaggaaaatgcaggtctaagtaggctcttctccttcctacaggtgggtgccattccagccaa

SEQ ID NO: 12606 - DNA, 201 bp, Homo sapiens
cccagatgctgagggacgctgtcaggagggcagtcatgttgcctgcgctggtcccaactaccctatgcccctgctgtgcatcctcactgaactaagtcccsgatctccaccctcagatcatcgcagcacaggaagaaatgcttcggaaggaacgagagctggaagaggcgcggaagaaactggcccagatccggcagcagc

SEQ ID NO: 12607 - DNA, 201 bp, Homo sapiens; identical to SEQ ID NO: 1938

SEQ ID NO: 12608 - DNA, 201 bp, Homo sapiens
ggctactggctgaaaatacccattggagactgtccttctcccgtaagaacccactggagaatctttttctccaagatcctaaacccagaaaaaaaatagcyccaaagaaatgatgcaagagcttttgccagtctctttttctgtccctaaagcccccatctaccttgtctacaccacttttccccacctttgtccccaccc

SEQ ID NO: 12609 - DNA, 201 bp, Homo sapiens
agaaacaggaacaacagagctcctctcctctccccacagcaagcagctcacacccaggaagccctggaggaggctgtgcagatgatgaccgaggccgtagrggacctgacaacaaccctcaacgaggcagccagtgctgctggggtcgtgggtggcatggtggactccatcacccaggccatcaaccaggttagagtcttg

SEQ ID NO: 12610 - DNA, 201 bp, Homo sapiens
cctctgccggcccccagcccctgctggtgcagagctgcaaggtaagactctaggaaggatgtgggagtggaagagggagacttgtgggtctcttatgacawtttcacctacaggcagtggcagagcagattccactgctggtgcagggcgtccgaggaagccaagcccagcctgacagccccagcgctcagcttgccctca

SEQ ID NO: 12611 - DNA, 201 bp, Homo sapiens
caggaggctggagaaacaggaacaacagagctcctctcctctccccacagcaagcagctcacacccaggaagccctggaggaggctgtgcagatgatgacygaggccgtagaggacctgacaacaaccctcaacgaggcagccagtgctgctggggtcgtgggtggcatggtggactccatcacccaggccatcaaccagg

SEQ ID NO: 12612 - DNA, 201 bp, Homo sapiens
tgcccaggctggtctcaaactcttggactcaagtgatcctcccaccttggcctcccgaagtgttaggattgcaggcatgagccaccacacctggcctaaarttattttttaattgacataattttacatattcatgaggtacatagtgacatttcaatacatgtatagtaatcagatcagagtaattaacatatccatcat

SEQ ID NO: 12613 - DNA, 201 bp, Homo sapiens
tcccccctcagctagatgaaggaccaatgggtgaaccagaaggttccttcgtggattaccaaacaactatggtgcggacagccaaggccattgcagtgacygttcaggagatggtgagtttgggcgagtcccagaggactgccctcggagagctgactttggatataacttcactcgttccattatcaccaggttaccaag

SEQ ID NO: 12614 - DNA, 201 bp, Homo sapiens
ccccgggaccccccgagctggtcggtgctggccggccactcccgtactgtctcagactccatcaagaagctaattacaagcatgaggtattgagggatggrgaaccagtgtggctggggggcatacattgtggcagaatggaggatgggcacttgagtgcaatgagatgggatggtgttgggaggatacaggggaaggata

SEQ ID NO: 12615 - DNA, 201 bp, Homo sapiens
ttgagggaagtgttctggttttgggcctgagggaggtgtcttggatctcactttgccctccccctacacagacggtccgggaactcctggagaacccagtscagcccatcaatgacatgtcctactttggttgcctggacagtgtaatggagaactcaaaggtcagcacagccaggaactcggaggagagagggcagtagg

SEQ ID NO: 12616 - DNA, 201 bp, Homo sapiens
agcaacagcccctctgctggaggctgtggacaatctgagtgcctttgcgtccaaccctgagttctccagcattcctgcccagatcagccctgaggtgaggygatgtgaagggggaactgatgggccagcttatcacctcatcttccagggactcctgagacttaccttcctgcctcccctctccccagggtcgggctgcca

SEQ ID NO: 12617 - DNA, 201 bp, Homo sapiens
tccacagcctcaaaggcactttgtggcttcaccgaggcagctgcacaggttattttcctgagatgggttctttgaatggcccctactttctttaccccatyttctctcagcctgacatacctgtagataaatcaagaagtttatgtttgcaaagccaactctatggaatctgggttgtcctcctcctgaagtggagacact

SEQ ID NO: 12618 - DNA, 201 bp, Homo sapiens
agtaattggatcttagcaggacacatgtaatgcccatccttaaaaccctccataaccccatacaggccacatggtaatccacggccctctgattcccacaytcaagcataaagtgctcctccccttctccccactgtgcttaacacaatcctcaccacttagtgcctgcgtgctactattttctgtgtgtaggaggtgacc

SEQ ID NO: 12619 - DNA, 201 bp, Homo sapiens
cacagcctcaaaggcactttgtggcttcaccgaggcagctgcacaggttattttcctgagatgggttctttgaatggcccctactttctttaccccatttyctctcagcctgacatacctgtagataaatcaagaagtttatgtttgcaaagccaactctatggaatctgggttgtcctcctcctgaagtggagacacttg

SEQ ID NO: 12620 - DNA, 201 bp, Homo sapiens
atggggaagacctggaccaggcaccttggacgggctggagcgggtaggggagatctgactaagctgggccctccctcagggagggcatcctgaagactgcraaggtgctggtggaggacaccaaggtcctggtgcaaaacgcagctgggagccaggagaagttggcgcaggctgcccagtcctccgtggcgaccatcaccc

SEQ ID NO: 12621 - DNA, 201 bp, Homo sapiens
atcgcttctgcatagcccttatcagcctccatcccgttaccctctcgttctcatatcttgtactcctcaacctttccagtgtccccataattctctctcgktagagttagcatccaaccttaattccttagctgtgatatgaaactctttgctaaattcttccccattttatgcacaggcacacaagaattgtgggcagat

SEQ ID NO: 12622 - DNA, 201 bp, Homo sapiens
tgatggctctgcttgcttctccagtctcatcctactctcttcctttctgtgccccatccccctgcaccatcagttctgagaacatgccaagctcttatctkctgcaggctcttccactcagttctctccagctttttgaacactgtgctccttccagttcatcaggcttcagcctcaatgtcacctcctcagagagccctt

SEQ ID NO: 12623 - DNA, 201 bp, Homo sapiens
aatgtgaattagcctaataaccttcatcagttttgaactgtctttaaaagaggctttgcttgtgtgcacaaaggtgtgtatttatatatggctctcaaackttttactgctacttacagtaagccatacttttcactctaagacccaacatacacaaacatatctaaatagagattggataaaaacccttgctatgtagtt

SEQ ID NO: 12624 - DNA, 201 bp, Homo sapiens
agctccatgagaacagggagcatccctagccccttgcatagaatctgccacctagctgatctttaataaatgtttgcagattgaacccatacatcaaaatrttttatgactttcacatattatgtaaaagtccaagttcctcggtgtgatattcaagtccccaataaccttttcttcaccattcctatattccagaacatt

SEQ ID NO: 12625 - DNA, 201 bp, Homo sapiens
tggaatgcatcgcaggaatgtattgagggaggaggagttccctgggagggggacacggcagtggggagttgctgttccatcaaacacaatggaaaagggakcaaagttctcaggccaaaggaggaatgagctagcttctactcatacttgtagcagccttgttctttgccaccaccacccacaattcactgatcagttctt

SEQ ID NO: 12626 - DNA, 201 bp, Homo sapiens
gctccgccttctaccccaagctagaaaaaggaagagttctagcctgaaagggaactcgggcgtcgtcctggcgtcctctccggattgcgccgcaccctcgyttcctgccagggaggggctgccgggctttggcggctcccgagcatcgagaacggggccagagcagcttcctgcctgccccccgcgaccatagagcgcggg

SEQ ID NO: 12627 - DNA, 201 bp, Homo sapiens
gagtcttcagtcccttcttgttcccaggctctcggccttgagagttgacccctttgtcccctaagactactcacccctcaggtctgtgttccatggttccstcgttctttaggcccaaggtcatgggagaaatagtcaggggcaacatggtacaagctgttcagccacattggggtcttcataagcctaaagtgatccatc

SEQ ID NO: 12628 - DNA, 201 bp, Homo sapiens
ttttatggcctagctctgcctctcaccccttcaaggcttctctctattttgggaatgaaaacccagccaaaagccacttttgtaattacttttgtgatttcaaacaaacaaacaaacaaactccccagttgcttcagtcagaaacaataaccaactgccttgttacattcactgtgatgtgtgaatgtctgcaccaaatca

SEQ ID NO: 12629 - DNA, 201 bp, Homo sapiens
tttatggcctagctctgcctctcaccccttcaaggcttctctctattttgggaatgaaaacccagccaaaagccacttttgtaattacttttgtgatttcaaacaaacaaacaaacaaactccccagttgcttcagtcagaaacaataaccaactgccttgttacattcactgtgatgtgtgaatgtctgcaccaaatcac

SEQ ID NO: 12630 - DNA, 201 bp, Homo sapiens
agccaggtgggaagatggtggcagctgcaaaggcctcagtgccaacgattcaggaccaggcttcagccatgcagctgagtcagtgtgccaagaacctgggyaccgcgctggctgaactccggacggctgcccagaaggtatggaagctggttctggctttggaagatgaggctggagtcctgtgatgagaggaaatctgtg

SEQ ID NO: 12631 - DNA, 201 bp, Homo sapiens
ttatggcctagctctgcctctcaccccttcaaggcttctctctattttgggaatgaaaacccagccaaaagccacttttgtaattacttttgtgatttcaaacaaacaaacaaacaaactccccagttgcttcagtcagaaacaataaccaactgccttgttacattcactgtgatgtgtgaatgtctgcaccaaatcaca

SEQ ID NO: 12632 - DNA, 201 bp, Homo sapiens
ctttcatagaaaggggaacagcctcagggccactctgctgaagactagtgaggctctgggtagggacagaggatcaaagccttcagtcacaggtacaaagsaaacagctcagaatctggagccttcccgggcctgcctttctggcttctgccgaccctcatctgggcctacagctgcttctctgttgtgctgccagtccat

SEQ ID NO: 12633 - DNA, 201 bp, Homo sapiens
caggtgggaagatggtggcagctgcaaaggcctcagtgccaacgattcaggaccaggcttcagccatgcagctgagtcagtgtgccaagaacctgggcacygcgctggctgaactccggacggctgcccagaaggtatggaagctggttctggctttggaagatgaggctggagtcctgtgatgagaggaaatctgtgcag

SEQ ID NO: 12634 - DNA, 201 bp, Homo sapiens
tatggcctagctctgcctctcaccccttcaaggcttctctctattttgggaatgaaaacccagccaaaagccacttttgtaattacttttgtgatttcaaacaaacaaacaaacaaactccccagttgcttcagtcagaaacaataaccaactgccttgttacattcactgtgatgtgtgaatgtctgcaccaaatcacat

SEQ ID NO: 12635 - DNA, 201 bp, Homo sapiens
ccacagtcaccatgtgacattccctacccaggtctcccacgtcctggctgcgctccaggctgggaatcgtggcacccaggcctgcatcacagcagccagcrctgtgtctggtatcattgctgacctcgacaccaccatcatgttcgccactgctggcacgctcaatcgtgagggtactgaaactttcgctgaccaccggta

SEQ ID NO: 12636 - DNA, 201 bp, Homo sapiens; identical to SEQ ID NO: 1949

SEQ ID NO: 12637 - DNA, 201 bp, Homo sapiens
cccgtctcgacctcccaaagtgctgggattacaggcgtgagccaccgcgcccggccaatcactactttcttaaaatagtactagtgacaaaatttccagtyacttgagttatcacttaactttgccttttcccacattatcaagtataaaactacctattagctgtaaagtattttgctttagtatatgaatccttaaaac

SEQ ID NO: 12638 - DNA, 201 bp, Homo sapiens
accaggcttcagccatgcagctgagtcagtgtgccaagaacctgggcaccgcgctggctgaactccggacggctgcccagaaggtatggaagctggttctkgctttggaagatgaggctggagtcctgtgatgagaggaaatctgtgcagaataacccaatacgcagataattgtgtaatcagaggcattggtgagacaca

SEQ ID NO: 12639 - DNA, 201 bp, Homo sapiens
agggtactgaaactttcgctgaccaccggtaagacaggaactgggcctaagggaggcagacaggtcggggcacggggctggaagaggcaggatagcattcrctggaatggggaagacctggaccaggcaccttggacgggctggagcgggtaggggagatctgactaagctgggccctccctcagggagggcatcctgaag

SEQ ID NO: 12640 - DNA, 201 bp, Homo sapiens; identical to SEQ ID NO: 1952

SEQ ID NO: 12641 - DNA, 201 bp, Homo sapiens; identical to SEQ ID NO: 1953

SEQ ID NO: 12642 - DNA, 201 bp, Homo sapiens
ctgcaatctttattcctcacccccacccccttttctcttcccaggctgcatatctggttggtgtctctgaccccaatagccaagctggacagcaagggctrgtggagcccacacagtttgcccgtgcaaaccaggcaattcagatggcctgccagagtttgggagagcctggctgtacccaggcccaggtaactcaaggga

SEQ ID NO: 12643 - DNA, 201 bp, Homo sapiens
cagccaaggaggtggccaacagcacagctaatcttgtcaagaccatcaaggttcccattgcttgaattcccagcctctccctgacctgtcctatcttctcycccgagtcccccagttattctctgaagccttctaccaaatcccctctgcctgagcccaagctctttctattcagactgaccacctagcctctccccaaat

SEQ ID NO: 12644 - DNA, 201 bp, Homo sapiens
aagcactggaaaattgagatgtattatcacttctctgacgcagaggactggcaactccagtacatactgtgggggctccctaatcccagattcaatgtcayagtatcagttgaggaccttggagatcaaatcccttctataacctccccgacaagtggcagtctagactttgaactccagctaggagcccaggacagctgc

SEQ ID NO: 12645 - DNA, 201 bp, Homo sapiens
tggaccagctggggagtaagggtaggcatgactcagctcccttatcggggtctcaccagaggcttccgtgcttgaggaggaagggggtgtctaagtgtccrgaggaaatggggggagacatgcagtttcagcttagtgtgaagggtcctttcagtcctgcttcttggctccacagactcctccagcttctcggatccacca

SEQ ID NO: 12646 - DNA, 201 bp, Homo sapiens
tgatgagggagacccaggaaaagcagaaaacacaagaggacaaatataggagcactcaggaaatgaatgagccccaaggctgtgggtgagccatgacccargctttttttttttttttttttttaaagatgtggtctcactgtgttgcccaggctggtctcaaactcttggactcaagtgatcctcccaccttggcctccc

SEQ ID NO: 12647 - DNA, 201 bp, Homo sapiens
caagatggctattactcagtacagacaactgaaggggagcagattgcacagctcattgccggctacatcgatatcatcctgaagaaggtgagcactgcctrccctagccttctccttatcgcctcttgccctctccacaagccagtcctttagaaatgggcactcagattgcttgaacctgggaggcggaggttgcaatga

SEQ ID NO: 12648 - DNA, 201 bp, Homo sapiens
atgtgctggacaaggccagcagcctcattgaggaggcgaaaaaggcagctggccatccaggggaccctgagagccagcagcggcttgcccaggtcagataytgggaaagggccactccctctcccccaggttccttcataaggcccaccctgattgaggccaaagcttctgagcctcgtccacactcacagagtgatgtct

SEQ ID NO: 12649 - DNA, 201 bp, Homo sapiens
gacagcttgggcttttagtctcagctccatccctgcttttgctgtgcaattcagttcaatattcttgtaatcttttatttacctctgatttgggataacartacttgccccgtgtaggactgataggatcaaatgaggtagcataatctgaaattactgtgaaagagtatagtctttgtccactataaggtgttaccccca

SEQ ID NO: 12650 - DNA, 201 bp, Homo sapiens
gatctgtcccctttcattactcccaggctatgtgcccaccttttcagccctcctttaccagacttctccctgcatcattccccactcttctgtctgacttmccctctcaccttgcagcttcctcctagcactgggacatttcaagaagctcagagccggttgaatgaagctgctgctgggctgaatcaggcagccacagaa

SEQ ID NO: 12651 - DNA, 201 bp, Homo sapiens
cactgtgttgcccaggctggtctcaaactcttggactcaagtgatcctcccaccttggcctcccgaagtgttaggattgcaggcatgagccaccacacctggcctaaagttattttttaattgacataattttacatattcatgaggtacatagtgacatttcaatacatgtatagtaatcagatcagagtaattaacata

SEQ ID NO: 12652 - DNA, 201 bp, Homo sapiens
acattttcacctacaggcagtggcagagcagattccactgctggtgcagggcgtccgaggaagccaagcccagcctgacagccccagcgctcagcttgccytcattgctgccagccagagcttcctgcaggcaaggcaccccctctgcacttctctgacctgaccttcccacctttctaagcttccatctcccacagtttg

SEQ ID NO: 12653 - DNA, 201 bp, Homo sapiens
ccaggacctgggcaacagcaccaaagccgtgagctcagccatcgcccagctactgggagaggttgcccagggcaatgagaattatgcaggtatgtgggcaragagccaggcatggggcatattgtgagggaggtaggaaaatgggagctggatgagggatgggactgacagacgaaaccactggaatcagggcctggcaat

SEQ ID NO: 12654 - DNA, 201 bp, Homo sapiens
aaccagaatgtaagctccatgagaacagggagcatccctagccccttgcatagaatctgccacctagctgatctttaataaatgtttgcagattgaacccrtacatcaaaatattttatgactttcacatattatgtaaaagtccaagttcctcggtgtgatattcaagtccccaataaccttttcttcaccattcctata

SEQ ID NO: 12655 - DNA, 201 bp, Homo sapiens
tctgagtgcctttgcgtccaaccctgagttctccagcattcctgcccagatcagccctgaggtgaggcgatgtgaagggggaactgatgggccagcttatyacctcatcttccagggactcctgagacttaccttcctgcctcccctctccccagggtcgggctgccatggagcccattgtgatctctgccaagacaatgt

SEQ ID NO: 12656 - DNA, 201 bp, Homo sapiens
gggacctagaccaggcttccctcgctgcagtcagccagcagcttgctccccgtgagggaatctctcaagaggtgagagggagagggttatatggaaagatrtgtctaggaagagaaatatcagactcaaagaagctgggggatcaaggagtggcttcttagggacatcaaaggctgggatgtgcgaaggagggttagggta

SEQ ID NO: 12657 - DNA, 201 bp, Homo sapiens
actcatgggaagtcccagggagtagggtgagagagaggggacctgacccctagtccaaccccttgcctcaggtgtcccagatggcgcagtactttgagccrctcaccctggctgcagtgggtgctgcctccaagaccctgagccacccgcagcagatggcactcctggaccagactaaaacattggcagagtctgccctgc

SEQ ID NO: 12658 - DNA, 201 bp, Homo sapiens
tctcggggaacccctcaggacctggctcgagcctcaggccgatttggacaggacttcagcaccttcctggaagctggtgtggagatggcaggccaggctcyggtatgaagaggcagagggtctggttgaatggttcccactaagggttagataggaggcagttgagtgaccagtcctgacttgctcctggctcccttccct

SEQ ID NO: 12659 - DNA, 201 bp, Homo sapiens
gctgaccaccggtaagacaggaactgggcctaagggaggcagacaggtcggggcacggggctggaagaggcaggatagcattcgctggaatggggaagacytggaccaggcaccttggacgggctggagcgggtaggggagatctgactaagctgggccctccctcagggagggcatcctgaagactgcgaaggtgctggt

SEQ ID NO: 12660 - DNA, 201 bp, Homo sapiens
gagggcttttgaaatgggaagggtgggaaggggcttcagcatctgcttctgccaggcactgttttacaccctggggatacatcagtgagaaaacaaagtcytacactcatgggacttacatttaagtgaggggaggtaggaaatgcagaaataaacagagaccagacagcacaggggccatgggggtttggcactgagggg

SEQ ID NO: 12661 - DNA, 201 bp, Homo sapiens
gccaggcactgttttacaccctggggatacatcagtgagaaaacaaagtcctacactcatgggacttacatttaagtgaggggaggtaggaaatgcagaartaaacagagaccagacagcacaggggccatgggggtttggcactgaggggactgtctgtatcccagtgaactggctggaccatggtcggacactgaggga

SEQ ID NO: 12662 - DNA, 201 bp, Homo sapiens
ggccctctgattcccacattcaagcataaagtgctcctccccttctccccactgtgcttaacacaatcctcaccacttagtgcctgcgtgctactattttmtgtgtgtaggaggtgaccttctgcctaaaggatatgcaaccggaaacgtccttgtgctgggaaccttctctctctgcttctttagtctacaatgcatgtt

SEQ ID NO: 12663 - DNA, 201 bp, Homo sapiens
atgggatcaggtagggtagtacagggacttgctcccaagactccaggatgaccacttccaatccaagatcaagaagtggagtaaagaagctgggggtggasggatcccaggagatacctcctacctcctctccccaccccattgtaacagcgccaccacattgtctccccgtcatcatcgagtgtatccgcctcatgtgtg

SEQ ID NO: 12664 - DNA, 201 bp, Homo sapiens
ttccagattgcccccagaaccacgcttatgagctagaagtttctatattctaacaactctctacacaatgacttaactgtaatgtgagaaaaaggaagaarattcctaatactttttgggcagttttgcataatgtttattcttaggaaagcatggttaaaatgcaactcaaagtacgaccatgaaattactgaaaaggtt

SEQ ID NO: 12665 - DNA, 201 bp, Homo sapiens
tgtgtttcaagcccaaagcaagtggaaaggtgcaggaaaattcatccttaagctaaaggagcaggtgcaggtaaagtttaaagttattttgctctgttctwaagttatctgatacccataattacactgtagccagatctggaagctggtgaaatttaggagaaagttcctgagtcaaggaatggagttaggagaaaattg

SEQ ID NO: 12666 - DNA, 201 bp, Homo sapiens
tatgattcttaggttaagcatttgtggttattgaaaacagatactccaattgatagctatcaagattgagttgatactgcaacaacataaaagtgtgtcaraaaataatgttattgggagtggaggaattagggagatttcctggtagtggaaaaatggctccatttgttgcttatctgtttgtgttcttttgagataaat

SEQ ID NO: 12667 - DNA, 201 bp, Homo sapiens
gatgatcgctttggcagattccagcatctaaaagcctgtctggtcatagctatggaaagaccatttcagcacagtaagcagaaagcatagcatattataaygatgtgaggcagtgtcatgtccaaataggttctttcacttgaaatgttttagaaaaaatattggtttttgaatttgtatattgaaccatgtttagaaacg

SEQ ID NO: 12668 - DNA, 201 bp, Homo sapiens
catgtggccgagcttgcggttaagcagtcctagaggggagctcctcagccctactctctccaaagctctagagagaagaggaaagcgctcttctgaaatartgtcatgtgacagaggaacctgagtttaacctaacaccaatggaaggttctttgttcccacaggcatctcgagaagataaaaagaaaggcatttctttcg

SEQ ID NO: 12669 - DNA, 201 bp, Homo sapiens
actgctgataaaaaccccctcagggtaagggaaatttcagctcactttggaaaatcaaatttttccttgacaaagcacatctcccctctcagagcagataytgtattctttccctggaacatttcacagcacattccaggagtaacagatattttactccagaaatttcttgactaaaaaaaatacagtaggcaaataaac

SEQ ID NO: 12670 - DNA, 201 bp, Homo sapiens
gcttgcggttaagcagtcctagaggggagctcctcagccctactctctccaaagctctagagagaagaggaaagcgctcttctgaaatagtgtcatgtgasagaggaacctgagtttaacctaacaccaatggaaggttctttgttcccacaggcatctcgagaagataaaaagaaaggcatttctttcgcaagtgaactc

SEQ ID NO: 12671 - DNA, 201 bp, Homo sapiens
ccttctcagctcttgacctcagaaagtatccaaaccaaggaggagaaacctgtgggtggcttgtcctccagtgacacaatggattaccgacagtgactaasggcagcatgtttaacccaggtatagtaagtcattgcaccatcctggaacagggcttaacttaaactactttgtaaggaaggcataattagtacaatgtct

SEQ ID NO: 12672 - DNA, 201 bp, Homo sapiens; identical to SEQ ID NO: 1985

SEQ ID NO: 12673 - DNA, 201 bp, Homo sapiens
gataagcgttggtccatgcttaaagcaatgtgtccgagacactgtatgtgagtatcgcgccaccctccaaaggacttcaatatcgcagtacatcaccggtwctctcctagaagcaaccacgtctttgggagcaagaagtggccttctcagtacttttggaggatccactggacgaatgatgctgaaaggtaatgcctgaaa

SEQ ID NO: 12674 - DNA, 201 bp, Homo sapiens
taatgcatgagccgagtgctcagagtgtttgcacttggagcatctgagccttctttcttaataagtcatcttggcattttgtcaacaagttaatttgcttycctaagaaactagattaatacttcctgtactttgtgctattcacagatctacaatgcagtgagaagagaagaaacagaaaatacagttggatctctactc

SEQ ID NO: 12675 - DNA, 201 bp, Homo sapiens
agacctgggtgcaggaagatccatcaggagagagttgcagtaaacaacagaagatgacaaggggcctgatttaggatgacagtgagaatataagggaaaartggctcccagatgcctagaagaaagagtcccagtaattcagtgactgttcacatagggaggctgaaggagagggaggggtcaagactgaattcaggcttt

SEQ ID NO: 12676 - DNA, 201 bp, Homo sapiens
ctggagggggaggccatctagggtagatttaagcatcaacctgattttaatttttttttaatatgagcttagatagaaccaaatataatttaatagtctcyattttttgttacagaagatttttggtaatttggtccaaaagatgtattaaaatgcttagagtcaaccaggaccaacctggtttccatttttctgtcccat

SEQ ID NO: 12677 - DNA, 201 bp, Homo sapiens
actccagagttcccctcttgtaaactttgagtcagtaatgccatcttcccctatatgagacaacacactattataacttactgtgtgaattttgactcaastattcctttttacccaatgtaatcagaaatagatgagtgatcagtgacagatactgataaaacagttaattaatttgccataaaaagaacagatgagaaa

SEQ ID NO: 12678 - DNA, 201 bp, Homo sapiens
gaagctctgtgtacgccatagttgaggaatttttattgaggcttcatcacctcagcatgattaatttagtcagtcttcagttcctttcccctccctagagsatggtgggtggggcttaaacttccaagcttgtaatcatgccttggtttttctggtgcccagccctcgtcttgaagctatccaggaacccaccaaaagtta

SEQ ID NO: 12679 - DNA, 201 bp, Homo sapiens
caaaaattttatccaaatgctcgtaacaacattagtcataacagccaaaaaatgtaaacaaaccaaatgtccatcaactgatgaataaacaaaatgtggtrtatacatacaatggaatattattcagttattaaaaagaaatgaaatatttatacatattacaacattgataaaccttgaaatcattatgctaagtgaaag

SEQ ID NO: 12680 - DNA, 201 bp, Homo sapiens
atgtggtcaattttggaataggtgtggtgtggtgctgaaaagaatgtatattctgttgatttggggtggagagttttgtagatgtctattaggtccgcttsgtgcagagctgagttcagttcctggatatccttgttaaccttctgtctcatcgatctgtctaatgttgacagtggggtgttaaagtctcccattattatt

SEQ ID NO: 12681 - DNA, 201 bp, Homo sapiens
tctctaaagaaaatgtgcaaatggccaataagcatgtgaaaagatgcacaacatcattagtcgttaggaatattaacatcaaaaccataaagtacaggacrggcatggtgactcacgcctgtaatctcaacactttaggaggccaaggtggaaagattgcttgaggccaggagttcaagcccagcctagtcaacgtggcaa

SEQ ID NO: 12682 - DNA, 201 bp, Homo sapiens
tcaaaggccttttctgcatctattgagataatcatgtggtttttgtcattggttctgtttatatgctggattacgtttattgatttgcatatgttgaaccrgccttgcatcccagggatgaagcccacttggtcatggtggataagctttttgatgtactgctggattcggtttgccagtattttattgaggatttttgca

SEQ ID NO: 12683 - DNA, 201 bp, Homo sapiens
gttctaatacatttctgacaattaaaaacatttctcgccccaggaagttagacaaggcacatgtaatgccccttctttcttctttccctacacccatgtcmcgattatgagcagagaccatatcctgagtgactaacttgattaattgattaataagcagataggcctatgtacacaattatcctaatgttacacagaaca

SEQ ID NO: 12684 - DNA, 201 bp, Homo sapiens
tttttctttttttttttttttttttgagacggagtttcgctcttgttgcccaggctggagtgcaatggcgcaatctcagctcacctcaacctccgcctccygggttcgagcgattctcccgcctcagcctcccacaaattttcttctttatacttctttatattttccacgttttcacagtgagcatgtttctttggaact

SEQ ID NO: 12685 - DNA, 201 bp, Homo sapiens
tagtctgagtcataatttaaacttctactggaattgagtcttcaaaccaagaaatagtgaataaattattacagttaaagtaacaaaaagatatttttaayggtgtttagattttggtaattgaattctaattacagatattatactatcatcaggaaagtctaacaagttttgtcaactggaaatatatatttggtattt

SEQ ID NO: 12686 - DNA, 201 bp, Homo sapiens
tctctctctctctctctctctccccacccctccctctctccccacgcccctctctctctttctccctttctctctctttctcttggaagcttcttattaasaatcctggctgggcacggtggctctcacatgtaatcctagcactttaggaggtcagggaaggaggatcacttgagcccccaggaattcgagaccagcctg

SEQ ID NO: 12687 - DNA, 201 bp, Homo sapiens
agtgcgagactagcctggccaacatggggaaactctgtctctactaaaactacaaaaatcagccaggtatggtggtaggcacctgtaatcccagctactcrggaggctgaggcaggagaatcacttgaacccaggagatggaggttgcagtgagccaagatggcgccactgcactccagcctaggcaacagagggagacct

SEQ ID NO: 12688 - DNA, 201 bp, Homo sapiens
tgcacctgggattccctatctgtaaaaggggtgtaacagtcctaacttaaaggattgctgtaaaaagtagcaataaagtatctagtgtgattagcacatcktcgggagcatggtgggtggatcacttgaggtcaggagttcaagatcagcctggacaacatggtgaaatgccgtctctactaaaaatacaaaaattagtgg

SEQ ID NO: 12689 - DNA, 201 bp, Homo sapiens
acacctgcagtcccagctacttaggaggctgaggcatgagaactgcttgaacccaggaggaggaggttgcagtgagccgagaacacaccactgtactccckcctgggcaacacagtgagactcccatcaagttttcaacttattttctttcactacaataagcttgtatattctatttgtatctttctctaaagttaatag

SEQ ID NO: 12690 - DNA, 201 bp, Homo sapiens
tctgttcctctgacaaacaaactgcctgtgaggccgggcatcgtggctcatgcatgtaatcccagcactttgggaggccaaggcaggtggatcacctgagrtcaggagttcgaggccaacctggccaacatggtgaaaccacatctctactaaaaataacaaaagttagctgggcatagtggcacgtgcctgtaatcccag

SEQ ID NO: 12691 - DNA, 201 bp, Homo sapiens
ttgcctttcaaattgatatcaggaggatagaccctttcctttttttcttttttctttttttttttttttttttttttttgagatggagtctcgctctgtcrcccaggctggagtgcagtggtgcgatctctgctcactgcaaggtccacctcctgggttcatgccattctcctgcctcagcctcccgactagctgggacta

SEQ ID NO: 12692 - DNA, 201 bp, Homo sapiens
tctttttatgaaaaaaaacactcaacaaaataggaatagaaaggaacttccccaacctgataaagtgtatctatgcaaaacccacagctgacatcacacakgctgatgaaagactaaaaactttccgcctaagatcaagaaccaaaaaagatgtactgtcagttctagccagggcagttaggcaacaaaaataaataaaag

SEQ ID NO: 12693 - DNA, 201 bp, Homo sapiens
tgagaccccaccagattagcccattcataaagatattttggtgctgcttgtatagaaaccagctgcataggttgatttgctcagacatccagaagcctctmtggtttgtatttggttctgagggaaagtataatctgagtcattctctcttttctgtctttcatcctcacagaggtgaatgccatcgctaaccctccaaac

SEQ ID NO: 12694 - DNA, 201 bp, Homo sapiens; identical to SEQ ID NO: 1981

SEQ ID NO: 12695 - DNA, 201 bp, Homo sapiens; identical to SEQ ID NO: 1984

SEQ ID NO: 12696 - DNA, 201 bp, Homo sapiens
ggaaaggtgtccttattagcattctagaaggggtggctggatctccaaggatcctctgttctttccaggttcctaaggtaatattagatgttttagattgsttctgttctcatacctccccattgtcctcaagtaagccaggaagctcacactgcctgccctctgtgttcctccaattctgcaggtgcagattggtagtct

SEQ ID NO: 12697 - DNA, 201 bp, Homo sapiens
atatttagctatattaaagttatttatcacatgtcagctataaatagaatattgatatgaaaacaaaaataccttacagatacaatatttttgtttgaaargagggaatattttatttcagatagaaaagtctaccagcactttgagaggtcgaggcgagcacatcacttgaggtcagaagtttgagaccagcctggctaa

SEQ ID NO: 12698 - DNA, 201 bp, Homo sapiens
tgtattagaaaaaaaaactaaactgttcatttttaaccagtctgagtgtgtggtatgtgtgtctgtagactatatttagctatattaaagttatttatcayatgtcagctataaatagaatattgatatgaaaacaaaaataccttacagatacaatatttttgtttgaaaagagggaatattttatttcagatagaaaag

SEQ ID NO: 12699 - DNA, 201 bp, Homo sapiens
gatgcctggaaaagatcaaacagcaactgtctgggaacctgagaatgctgccccacacacctagggcccaaatgtgggctcttgctgaggatgtaacctaraggagagtgacaacaaggacgaagaccctgacaagtgcatctccatctgttcctctgacaaacaaactgcctgtgaggccgggcatcgtggctcatgcat

SEQ ID NO: 12700 - DNA, 201 bp, Homo sapiens
actatgttgggtgccaagttggtttgttttctggagttgcccgaacttcaggggattggttataaatgaatgaagaataacagaaggtgtgggaacactartggcttcatgtttttcagccattcaacacattttttgagcccctattaggtgttaggtgctggaaaaggaacaaaacataattcctgccctcatggaatt

SEQ ID NO: 12701 - DNA, 201 bp, Homo sapiens
acagagtgagactccatctcaaaaaaaaaaaaaaaaaaagatttttgaaactttttttcaaatgaagtaaatggttaaaacgctatctttaattttttttwaaatgattcaggcaggtagtttctcctagtggtagtttatgacaaatgtcaattactatgacaagatgctaggaaacaaatatagtcaagcagtcatatt

SEQ ID NO: 12702 - DNA, 201 bp, Homo sapiens
tcactctccattgctgaagccaataactgtagatcatcctggccttctgccccatttaagacttgatcattctatttccttagtatctttcaaatccattyatcttgatctgtctttattgccttggccctggttcattctcacctggcttgtggtagagtcttcctaattggtctcatttcctctgggtttgccacctct

SEQ ID NO: 12703 - DNA, 201 bp, Homo sapiens
aatagttcccatggaatattcagtgctctgcacttacttctcttagcactgaatgccagaacggccactagcaggggcaggatgggaaactgtagtagccygtcacgagcaggctgatcatccagggcctggcctggaagacagactgggtaagtatagtcttcatttggccattgtgctcaactggcaatgtgcccacag

SEQ ID NO: 12704 - DNA, 201 bp, Homo sapiens
ggtctcagcaagttactaaacttctttgcatctcactttctttccaggtaaaacagagatcataaaggactttatgatataggctatccagggatgtttgrggaattagatgaaatactttagggaaagatagtgccagaaagacccagggcagaaaccaagagaagccaagaactgaagtccttccattctcacctctat

SEQ ID NO: 12705 - DNA, 201 bp, Homo sapiens
atgatcaactaaaactgctagacttttatcatataaacagccatcaagctcatcatttctctgcataggttgtttcatttattattttctcacatgggcayagtattttatatttaagtctactacattttaattttggggcattcaggcctatcaaaataattttgaatcttaattcagctctgtattgaattaactaac

SEQ ID NO: 12706 - DNA, 201 bp, Homo sapiens
attagtttatgaatataaagagactttatatttatcatcgcttttattagtcaccacactccttatgataccgggcattttattatccccatcttatgagygaggaaataagagtctcagggtaggtaggaaacttgctcaaggtcacagaaatagtgaaaggcagagccaagaaatgaacctacattcctttggctccac

SEQ ID NO: 12707 - DNA, 201 bp, Homo sapiens
cgctctgtccttcctgctccatcattattgttggctggttgtcggtctccttctacttgctcaccattcacattctaattggtgaaaatttgcatttcacygcaagtgaaaaagtgacttgcgggcttacttttgcttaccagtgacaggtgcacacctgcccgaggaccaagagtgaatcacagcatggtctccaaacat

SEQ ID NO: 12708 - DNA, 201 bp, Homo sapiens
atctgtaggatcagcatattggttagtgggtcttgaactctgatggccatgtactctgccagaggatcaggagtacatgcagctgctgtgatgtggttgtsagcttttttttcttctttagtatgtgtcctgtggcatagatttggccaacagcttttagctattggggaatatataatacactcttagtcttcagtttat

SEQ ID NO: 12709 - DNA, 201 bp, Homo sapiens
caaatggaggaaatggacaaataaacgtgcaaattttaagatagtataaatgttataattgaaataagcacaggatatagggccccagagggaagtccctataccatcttcattgacatctgaggtttctacaaccatttaagtacctgaagaaatctaaacaggtatttaaccagggaaaacaagccctgacccatatta

SEQ ID NO: 12710 - DNA, 201 bp, Homo sapiens
gtcttataagaatccagttataggacaagctggatttagtgggatgaaatcataaaatgcttttacttttctgatttgattgcctttcaaagcttccaacyagctctccctccctcaaccctggattatgctacattgagagatcctgtagttttccagtcactttcctagttaacacacaatctcattctcctatgctct

SEQ ID NO: 12711 - DNA, 201 bp, Homo sapiens
ctgtcaaagccattgacttattggagacatgtttaattctgttttaaagcaggtatcagttaacacctctgtcctgagactggtagaaacaataatggatscggtggaaatcagcaaatagatgaataggaattttgacctatgtgagcagtgttattactattaaaaataataaacatgacccagagaagcactgcagca

SEQ ID NO: 12712 - DNA, 201 bp, Homo sapiens
ggagttttgctcttgttgcccaggctggagtgcaatggcacgacggtcagctcactgcaacctccacctcctgggttgaagtgattgtcctgcctcagccwctctagtcgctgggattacaggcacctgccaccatgcccagctaatttttgtatttttcgtagagacaggctttcactatgttggccaggctggttttga

SEQ ID NO: 12713 - DNA, 201 bp, Homo sapiens
tgaaaagagagtactggaaaatagcttcaatcttaaataacttgcactcatccttttgctcatattgctaattggagcaagtctggtgggacagaatcacwacagtggcctgcccttgtgcccatgaaggccttgtctttgttgcagtgcttggagcagtagtagctggcacgggcggatcaaaggcggcatgaagggatt

SEQ ID NO: 12714 - DNA, 201 bp, Homo sapiens
tagagctttgcttaaggtgtcattggatcaccaaaaagaacatgattatttcttgccggaacccagggaaggccacatggaggaggtaaaattttaataawagggatgtggattggaagaagttgtatggaagggcatttgcagctgcgaaattcccaagttttcaaatgtcctggggcatcctctaacttcttctgagat

SEQ ID NO: 12715 - DNA, 201 bp, Homo sapiens
agtgaatgggactttaagattcaactgagtttaaatccaaaatccaagaagaccatagaacctggtgatttccctaaatgaggaataatctcaaaccaggrcagacctcaacattgatcccagtgcattttgtctcacaccccagacccactgctgcctagtttcatgctcctatatttggcttaaaactaaactgatctt

SEQ ID NO: 12716 - DNA, 201 bp, Homo sapiens
ccttgtcttgtccaatgtatgattttccctggaacttttatgagctgagtaggatgagcaagagaggaagtgttctttaagagagtcaatgtgcggccacyctcagctgcgtggtgttgcctatagcaactaagatttattttataaacacatatatggtccttactgtacagcaggcactgctcaaaacagtgtacaaat

SEQ ID NO: 12717 - DNA, 201 bp, Homo sapiens
catgtgaactcagtagcaaaagcacaaagaaacaaataggcagtgactcagttgcaagaaagtattcatcatacaatgttacttcactaaagggggaaaasaatcctgcagcctcagaaacagacagtcagtgtccattaattaaataaatgccatgtgaaggatttgaaaactaatcagcttttgagttcctagctgcac

SEQ ID NO: 12718 - DNA, 201 bp, Homo sapiens
attatgaaaaatagtcaataaacctcaagaatcttgtcaatgaattttttttaaaaaaggttaactgccaaacaccttttcagaaacacaaaatatgacargattcaaaaaatcattttgagaggcacgggtgagaagaactaggtttttttccctaccccaccttctttgtccaataaagtaagaagaaacaaccgacgc

SEQ ID NO: 12719 - DNA, 201 bp, Homo sapiens
ctttaatttattggaaatcaaatgttttcattagatgtaggggactgtgactctccagctttggttgagtgggacgaggtctatgcactcagtggttcttyttgtttttgttcggtgagccctttcagcctatgtcgtcctgtttttctttttggaaacagactggcagcagtctcttgcgttttgtgttactttaatcta

SEQ ID NO: 12720 - DNA, 201 bp, Homo sapiens
gacctcatgaaccacccaccttggcctcccaaagtgctgggattacaggcgtgagccaccatgtgtggcctgctcattctttaaaagattggcaatagctrcaacattttgcatgcttgctctgtttcatgcttagcaaacattaccaaatctgacctccacaacaatacctctaggaggtagtctttttgtcttagttta

SEQ ID NO: 12721 - DNA, 201 bp, Homo sapiens
tttgaccattggccctgtgtgtgtgtttgtgtgtgtgtgcgtgcgtgtgtgtgtgtgtgtgtgtgttacctccatgctaagctgcttctgcggtagctctrgagagcctcataaaagagctaaataaataaaaggggtacgggatatccttattagagagaagagtgtttagtaggaggttattatctgttttcttgagag

SEQ ID NO: 12722 - DNA, 201 bp, Homo sapiens
gttaagaacattagtgtaaggggtccccaaatatctgctattccactcactgaacccacccctctctgctaatggctccatcctaaggaggaagagatggrcttccctctctttcccaggaatgctgatcccccagcacaggctagtttgttcttcctagtgcctctcagctggccccttctctctttcctttattacttt

SEQ ID NO: 12723 - DNA, 201 bp, Homo sapiens
gtgtgtttcatttgcattaaacatttgttagagattgcagaatgtttactcaggtacctttgctgatagtagactgtttcattttggtgatgtctgaaagrcaacaatataataataagaaaatgccaaggttcctatttctataaacattatatagtagaatatattctttctatgtagaataattgttttgctaaatat

SEQ ID NO: 12724 - DNA, 201 bp, Homo sapiens
acggtcagctcactgcaacctccacctcctgggttgaagtgattgtcctgcctcagcctctctagtcgctgggattacaggcacctgccaccatgcccagstaatttttgtatttttcgtagagacaggctttcactatgttggccaggctggttttgaactcctgtccttaggtgatctgcctgcctcagcctcccaaag

SEQ ID NO: 12725 - DNA, 201 bp, Homo sapiens
tcctggaaaatagtgatctcatttctgtcccaatggatttgcctattctggatattttgtataaattgaatcacacaataagtggccttttttgtctggcrtctttcacttaagatagtgttttcaaggttcatcagcattgtagcatgaatcagtacttcatttcttttatggctgaataatatttcattatgtgcgtat

SEQ ID NO: 12726 - DNA, 201 bp, Homo sapiens
ggttttctatatttttgatattttctagattttctacaatgagtagtatctttataatcataaagatgaataaaagttttaaaaatagtttcaattctcawttcaacaataaagaattgatctttgctgaagtttgccctttgcccccaagtgaaccataactacttcattactcacacaataagaaaccagtgagaacca

SEQ ID NO: 12727 - DNA, 201 bp, Homo sapiens
tgaagttgcagatttgttgtatgtttttagaccagtgcagagatggggttcagaggaacatttcacatgggctttgatgttagaatcctttggcaaatcaygtttgcctttcaaattgatatcaggaggatagaccctttcctttttttcttttttctttttttttttttttttttttttttgagatggagtctcgctctg

SEQ ID NO: 12728 - DNA, 201 bp, Homo sapiens
accacatattgtttattggtaaaaataatgatggccatttgaattatgtatactttttggccattacaaatagtgctgctatgaaattcaagaaaaatgtwtgagcatatgtttttatttatcttgagtatgtacctaggagtggaattgctgggtcatacaactcaatgtttagcattttgaggaattgccaaactgctc

SEQ ID NO: 12729 - DNA, 201 bp, Homo sapiens
taggagtggaattgctgggtcatacaactcaatgtttagcattttgaggaattgccaaactgctccaaagtgtctgcaccatttgacattcccaccaacartgtatgagggttctgatttatccacattcctatcaacacttgctagtcctacaacacatacctacagccatcctagtaggtatgaagtgatacctcatgg

SEQ ID NO: 12730 - DNA, 201 bp, Homo sapiens
gccttttggcatgcagtttgaattttgacaatgcatacagttgcgtaatgaccaccacgatcaggatagagaatatcattacaaagggatgatactgatcycaaaagttttcatcccaaaagttccttttgcctcctttgtagtcattcctcccctatctcaaacctctgggatctgatttctctttttatccttttgcct

SEQ ID NO: 12731 - DNA, 201 bp, Homo sapiens
aatgaccaaatacagagtttgttcattgatttgattcatcctgacctaagtgtggctcatcacagtttcattctgaaaactgacatctctgcagctacttsaacctcaggggattaagtctgtcctctgctaaaagtaccagtacctgttcagtgccttctgcaactagtgtgtcctctcgggtttttctttgtgattctt

SEQ ID NO: 12732 - DNA, 201 bp, Homo sapiens
tgtctatccctaataacctcagcaatatttatatgcccatatagacaagaatagaagaaatactgaaagaaaatatacctaatgtctgtgtgtggtagaaytgtaagtgggttttctatatttttgatattttctagattttctacaatgagtagtatctttataatcataaagatgaataaaagttttaaaaatagtttc

SEQ ID NO: 12733 - DNA, 201 bp, Homo sapiens
gaagatagctggtgacttcagaccctttgttgttctgaaccccaaactttcctgcctcagtctataagcccaaggccctgtggttaggcttagtaggttcrattattttagcaggctgtttgaagaagatgtagtgatcccaatccacttccactcagaggcacaccaaagtatttgttccagccacataggatactttac

SEQ ID NO: 12734 - DNA, 201 bp, Homo sapiens
taactatattatccccattttacaggtgaggaaactgaggcgcagagtggttaagtaagtttcactggattaccaagctaataattagtagagacaggatktagagccaggcagtctgcttaacaacactgccataaagctttatggcactagtaccactcgactgtattaatttgttacatgcctatcttcctctactcg

SEQ ID NO: 12735 - DNA, 201 bp, Homo sapiens
gaattgttcattacatggctgtgcttgttgagggtcagggagcattcagagtccctgtgcagtaagaaacagagtagcccaagccctttttcagctgtgtsccaccttttcctggcagagccctgagcaataactggggtgggagttcaggtttattgatgttttattctgtgactgctttcttagggtatgagccaaaaa

SEQ ID NO: 12736 - DNA, 201 bp, Homo sapiens
tctcttggagcatgccatttagtgaggggaagatatattacatacataaattaattacagttgtgagaagtgtttgaagaaaaaagtgcaggattttatgyggcctaacctacgggcgatgagggtagccagtgagggcttttattagggagtgaggttcaaatctgtacttgggaggcaatagtaattagttaaagtcaa

SEQ ID NO: 12737 - DNA, 201 bp, Homo sapiens
aacaccccctgacatggcagatcataaaaggatccagtgagaaggatcatgtgggcatcacaagagaatcaggcaagtgtgggtgatgagaaattaagggrccccagcctcatagggtgactaaaagaaaaaagaaaaaccaatggggaaaaattttaaagatgattatcatattaccctgagccagggaagctgagaagt

SEQ ID NO: 12738 - DNA, 201 bp, Homo sapiens
taatgtgcaaagaaaaaggagaaaagaagtttgactggatagacacagtcatgatggagaaggagaaaactagacatgtggaaaggaaagagctgagagcmttgaatgacttggggctaaaaggcagcccttgttcattcatgaggataggaataacattatgaacggtatggtttagaccagttgcttaggctgtagtgg

SEQ ID NO: 12739 - DNA, 201 bp, Homo sapiens
attattttggtttcattttaaaaatgcagcctcttgtgtttaaatttatacaaattactcttagatttagtccatgttaaaaagagaggattgaaaaaaakcagagagagggttggattagataagtgcttttcagatggggttggaagagcccctagaatttatgattgtctttgtcaaacaccgtgtaattctgtcctt

SEQ ID NO: 12740 - DNA, 201 bp, Homo sapiens
aacccttttctgtgtcagtttgtttgaattctctaaaagctagagatttattattttggtttcattttaaaaatgcagcctcttgtgtttaaatttatacwaattactcttagatttagtccatgttaaaaagagaggattgaaaaaaagcagagagagggttggattagataagtgcttttcagatggggttggaagagc

SEQ ID NO: 12741 - DNA, 201 bp, Homo sapiens
taaagaacatattcatctatctgaagtagtagttagctgaaggaattccaccttttcttaaagttgaacagtttatttgatgtgatcttttttaaaaaaayaaactttctaaagaatgtgaaatatttatttccaaggcagaaataacctaatgttctacttcctagaaacatcatgttctaacattgtgagtacagagga

SEQ ID NO: 12742 - DNA, 201 bp, Homo sapiens
tgaacccaggaggtggaggctgcagtgagccaagatcatgccactgcactccagcctgggcaacagagcaagactccatctcagaaaaaaaaaaaaaaaaacccacagctaataggagcagataaattggcttgttatggatctatcaacatcatcagaagcacagtagtttcctcctctcaggagataggtatatccttt

SEQ ID NO: 12743 - DNA, 201 bp, Homo sapiens
ttcccatttttccagattaacaatgaattttaaccttttgtatatgggagcctcacatttatctctatttctgctcttcttggttttggtatattattacrtcctacaaagttctttgtgaattttgtttctgtcatctggtacatttattagcagtttctcaaactgtgtcttcatcccaagttgcccttgagtcagcca

SEQ ID NO: 12744 - DNA, 201 bp, Homo sapiens
attggcaaaatggtatattgtctttctacaaatttacctacagtcaacttggactctcaaaatccacagctaggcggggcacagtggctcacacctgtaaycccggtactttgggaggccgatgcaggtggatcacaaggtcaggagttcaagaccagcctggccagcatggcgaaaccctgtctctattaaaaatacaaa

SEQ ID NO: 12745 - DNA, 201 bp, Homo sapiens
taattggttacataaaatagttattgtctggcttcaatagtcgctctaacctgacttaggtgataatagctacaattagttgaacacttctgcaagccagsatggtgctatgtgcttcacgcatatgtgaagcctttttaaatatcctgcatgctccttaggtcattctcaatttacaggatttggaaaacttagaactta

SEQ ID NO: 12746 - DNA, 201 bp, Homo sapiens
ttgatgatgatgaagagaagagcaaacaggccacagacctggcttcccttcccaagaggaggacataaaggaaagcatgctgagtgaatatccacaacctrtgaaggcagaagaaatattagtctctaatttgaaacagcatcaagtaatggaaagggcaggaaccctcaggtttaatctgaaagtttcttctaactagtt

SEQ ID NO: 12747 - DNA, 201 bp, Homo sapiens
tattttgtctctttcaaattgaagagacctgaaccttaggggagagataatgtctgttgtgtgcaaagggaccaaccgctaataaattcatcttctgagtygtaatttttatggatgataaaatatccattgagccccactgttcaatgttgtaagggattgctgttgagatagcaacatgtcttgttttctggtctggaa

SEQ ID NO: 12748 - DNA, 201 bp, Homo sapiens
atgctgagtgaatatccacaacctgtgaaggcagaagaaatattagtctctaatttgaaacagcatcaagtaatggaaagggcaggaaccctcaggtttartctgaaagtttcttctaactagttgtttgtggctgatagcaaaggcaacctcttggggccttattttccttacctataaattgtaaaatatcagcattgg

SEQ ID NO: 12749 - DNA, 201 bp, Homo sapiens
gcatcagtggggggaggtgcacccactgacccccacgactagactaactggtggctcagacagcgccctctctcaaaagctgttcttagacagcggtgctrggcttattttctggcaccatgacaaccaaatggtgcccctttcagtggttctttattctagtggcttgcttaaacacattcagagcttcacattaaatat

SEQ ID NO: 12750 - DNA, 201 bp, Homo sapiens
agaccctggttgaaccagccagttctccttttgatggccacaaaccaaatatgggcagtgtaatgatggtatgactctggcctgactaatatttttgtgargagaatgccattattatggtgaccatattttccaaacaaaaaattgggaactttttattcagaggaaagaggggcagaatatttgaaattgagactgacc

SEQ ID NO: 12751 - DNA, 201 bp, Homo sapiens
agagagagtatatgtatataaatagatttgttaaattcaatatgatagttgttccttatagtatgtgaacaatactcactataaagtttaatgtctttctrcaaaatggccttatcctcatgcttcatttgaaaatacgaaaaccatctttggccagagtctgctgcatgtaacaattgagatgctttctgtggctataac

SEQ ID NO: 12752 - DNA, 201 bp, Homo sapiens
gctcatagtactgccatggaggacttcattttgaaacaggaggaaaatggtttctatctttggggtcatccattagtgcagatacttgagaattgttccaygtacatttaaataaatgtaatgggttgttttccctgccttcatttcttttttattttattttattttttgagacagagtctgactgtcacccaggctgga

SEQ ID NO: 12753 - DNA, 201 bp, Homo sapiens
aatgtgaatgaaccagtgcaaatctaattggttgctagaaaagtcaggagcctcaaaatgaatgacttgctagtggtggcaaagaatcaccatctacatgyaaagaaaacacattagatgccctgagaatccagtgactgtttttctcagagtttttatttttctgtatttttgccgagtacatttagtagctaccatgtt

SEQ ID NO: 12754 - DNA, 201 bp, Homo sapiens
ctcttccccactggaacagagaagctgaggagattagaattccagttttcatcagatttattcccttacgagtttcattcacagatgctcacccaacatayatgtactggacagactgctgatttaattatcttcttcttaatggtctgttctatctaccagtgtccagtggggccaggatgaattgatcttggtgggatg

SEQ ID NO: 12755 - DNA, 201 bp, Homo sapiens
aggtgagctctcaacaaaaaggcaggatggtatgttggcccttgttttgcaattgtcattgggttgttttgttttgttttgttttttgagacagagtctckctctctcacccaggctggagtgcagtggtgcagtcttggctcactgcaacctctgcctctgaggttcaagcgattgtcctgcctcagcctcccgagtagc

SEQ ID NO: 12756 - DNA, 201 bp, Homo sapiens
ttggaaggcagaggttgcagtgagctgagatcacaccattgcactccagcctgggcaatgagagtgaaaactccgtctcaaaaaaaaaaaaagaaaaaaawatatatatatatgtaacttgagcttttgtaattttagaccccttatttattttgtagataaataagcaaagctcccaagaagtcaatcaacttgcccaaa

SEQ ID NO: 12757 - DNA, 201 bp, Homo sapiens
tttagaagagcactttggccaaagtggagggaggtgtggcttccaccttgtgcagaggattgacaagcaagggcagggccgcgtggtacaaagagcaggartcacatgctttcagaaaggcagagcagggccaaatacccaattctgagctgggtgacctcgatatctgttacagctgaagattccacagatgccacaaat

SEQ ID NO: 12758 - DNA, 201 bp, Homo sapiens
ctggccaacatggtgaaaccctgtctccactaaaaatacaaagattagccaggcatggtggtgcacacctgtaatcccagctactcgggaggctgaggcaygagaatcacttgagcctgggaaggcggaggttgcagtgagccgagatcacgccactgcactccagcctgggcgacagagggagactctgtctcaaaaaaa

SEQ ID NO: 12759 - DNA, 201 bp, Homo sapiens
agatttaatttgtggaatagttcccacatagaatatacctccgttatttaatttattctgagtgggatgaagtgtgactgttgtgtctgaaactgagcttmgggggttgttcatcccataatggctgctatagtcccctttagggagagtccccttaggggagcccttggcatggggcctgtagtagaagcccaaaagcca

SEQ ID NO: 12760 - DNA, 201 bp, Homo sapiens
ttgcacctcagtgcttggcagatgcagaagctgctcccttgagaatggaagaaggacactgtagaaagtgccatagttgcagaatctgcttttttttttttccagagacagtgtgtctctgtcacccagtgtcactctgtcacccaggttggagtgcagtggtgccatcctggctcactgcagcctcgaccttcctggctc

SEQ ID NO: 12761 - DNA, 201 bp, Homo sapiens
caggacttccccacctaccaagccatgtccctgtgtccctacctcctcagagagccctgacccagacctcttcctcttctgcttcccacccttcactgccractttccttggatgttccattgatatgttctttctgaacatttttcttgccccttttcctctgcctctcctttctggcttctttgaaagaaatgaaggat

SEQ ID NO: 12762 - DNA, 201 bp, Homo sapiens
acttggaaggcagaggttgcagtgagctgagatcacaccattgcactccagcctgggcaatgagagtgaaaactccgtctcaaaaaaaaaaaaagaaaaawaaatatatatatatgtaacttgagcttttgtaattttagaccccttatttattttgtagataaataagcaaagctcccaagaagtcaatcaacttgccca

SEQ ID NO: 12763 - DNA, 201 bp, Homo sapiens
cttagtccctcatttaaatgcccattctcacagcacccctgaaccttgagatgtctttagattctgcatgaacacctcacaggtccaaactcctctctgcytcaggccctttgtatgtgctagtccctctgtctgggacacactctcctagctaccagcctctttttacctggttgttaacttcagtttatgttctcaggg

SEQ ID NO: 12764 - DNA, 201 bp, Homo sapiens
cctctactttacctcaagctccttgaggggtgtgttcttcatcatatatcagagcccagcacagtgcctgagacatagtaggtgctcataatgtatttttraatgaatgaatgttatttgtaatttctgtcaatgaaagccaatgggtggatacaagatcaatacacaaaaattaataattttttccatacattagcaatg

SEQ ID NO: 12765 - DNA, 201 bp, Homo sapiens
agggcttaccacatacctccatggtgccatgctagtgccaggaacaccagggaaaagacaaggtccgcagaaggacatagacatgtaaacaaacacagtgygagctaaaaagagacatcgttgagtcacccacaaagtgctgtgggggcagagagaaggaaaatagagagctgaggggcaggcacagagggctccacagag

SEQ ID NO: 12766 - DNA, 201 bp, Homo sapiens
gtgcctgtaatcccagctaccagggaggctgagcaggagaaatgcttgagtctaggagttcaagcccagcctgggcaagatatatagcaagacctcatctytaaaaaataataattaaatttttaaaatcacagttaggtaatagtgagcttttcacacatcagagtaaaaaaaatcatattatttaatgatatgataaaa

SEQ ID NO: 12767 - DNA, 201 bp, Homo sapiens
tacttgctgatattatgttatggagatgacttctttccttaaacctcatgaaccaacctctgctagcctccaacttttcttctgcagcttcctcacttctytcaaccttcataaaacagaagagagttcagggccttactctcaattaggctttggcttaaaatatgttgtggctggtttaatcttctatccagaccacta

SEQ ID NO: 12768 - DNA, 201 bp, Homo sapiens
ctgaggcaggtggatcacaaggtcaggagatcgagaccatcctggctaacacggtgaaaccccatctctactaaaaatacaaaaaaaaaattagttgggcrtggtggcgggtgcctgtagtcccagctactcaggaggctgaggcaggagaatggcgtgaacccgggaggcggagcttgcagtgagccaagatcgcaccac

SEQ ID NO: 12769 - DNA, 201 bp, Homo sapiens
cttctctagctatgaaagtcctaggtggcatcttcttccaatagaaggctgtttcatttacaataaaaagttgttgtttggccgggtgtggtggctcatgyctgtaatcccagcactttgggaggctgaggcaggtggatcacaaggtcaggagatcgagaccatcctggctaacacggtgaaaccccatctctactaaaa

SEQ ID NO: 12770 - DNA, 201 bp, Homo sapiens
agccttggctatgaaataacagttggccttcatctcctcactttggagtctaaagaaaaatcttccttcatgtcttggttttagagttcctccaatgacakattgattctggatttatgacaccaattataaaatcctatgctgctgtttctgtttctacctcctataacccacccaccccaagcggtttctagagaagga

SEQ ID NO: 12771 - DNA, 201 bp, Homo sapiens
gtaggaaacaaccattccagagagccattggtccagaagaggagatcatgcaaattttaagcagctggtttccagaagagggatacatgggcaggattgtsttaaaaacccagcaggaagtaagtgtgtctgggtgcagcctacacagtaacgactcattatgtgattagccatttaccactcacaacctccctgaaattc

SEQ ID NO: 12772 - DNA, 201 bp, Homo sapiens
gaatatttgtccagtcaacagaccaaaaaaatgatcttttttttggctttggtttcgtttggtgtttttttgtttgttgtttgtttgttattggtataagwtgtcacgttttaatatttgaatggtgtttttttttttttacttttcagtttctatcatctatgccgtaagcacttcccaagtaaatatttcttgaaagag

SEQ ID NO: 12773 - DNA, 201 bp, Homo sapiens
ggagtagagtggtaccatcttggctcactgcaacctctgcctccgaggttcaagagattctcctacatcagcctcccaagtagctaggattacaagcccawaccatcaagcccagccaatttttgtatttccagtagagatggggtttcaccacgttggccaggctggtctcaaactcctgacctcaagtgctccgcccgc

SEQ ID NO: 12774 - DNA, 201 bp, Homo sapiens
cgcctcacacccagacttacaatgtgtaaacatgcaaccctagtcaaaagaaaaacttctttttttaaagaatttattaagcttttttgaatgacagacttccaatcctcaaatataaggataaacattatgtgaatggtgtctacataatgcagagtattttaatgggtagaagaccatcaaggcaatggtatgtttatc

SEQ ID NO: 12775 - DNA, 201 bp, Homo sapiens
cgccatctctattaaaaatacaaaaagtagccgggtgtggtagtgcacacctgtaatcccagctactagggaggctgaggcaagagaatcgcttaagcccrgaaggcagaggttgtggtgagctgagatcgcaccactgtaccccagcctgggtgacagagcaagattctgtctcaaaaaaatattaaaaaattaaaaaat

SEQ ID NO: 12776 - DNA, 201 bp, Homo sapiens
ccatatattaaactatttaatcttcacaacagttccattttactctcatagctagcagggccaggatttaaattcaggcagactggttccaaaacccacaractactcacatataataagagaatgcttatagtcaaggaaggtgctaggttaattaaaagcaagaattttccagaagagagcattaaaaacgctagattt

SEQ ID NO: 12777 - DNA, 201 bp, Homo sapiens
gccgtttattttaattttgctacattatcaatttcagtgtatgtcacctttcatcatcccaagtcccttcttacaagccatatgcaaaaaaaaaaaaaaaacccttcattgcaatgaggcactcaacaatcatgtggtatgaggcccacagaaaggaaggaacttccccaccatcagaagctaggtcagtggcagggcaag

SEQ ID NO: 12778 - DNA, 201 bp, Homo sapiens
caaaaacagaacattcgggccaagagggcagcctggtatgtccagggaattgcaagaagttttaaaggcatttgggatgaccaagaagataaacgggccakatagcagaggaatgacactgagaataggaagataaatgagatacccagaccctatcctcaagtgcctcacagtttatagactctgagcaaatctttagac

SEQ ID NO: 12779 - DNA, 201 bp, Homo sapiens
aacagacaaaaacagaacattcgggccaagagggcagcctggtatgtccagggaattgcaagaagttttaaaggcatttgggatgaccaagaagataaackggccatatagcagaggaatgacactgagaataggaagataaatgagatacccagaccctatcctcaagtgcctcacagtttatagactctgagcaaatct

SEQ ID NO: 12780 - DNA, 201 bp, Homo sapiens
ctgtatgcacacacatacattatatatagtatatattagcacacatgtatgcacacatacacatgcagaattatatatgtgtgtatatataatctatatartatattcaatgcataaatattgaataaaagaatttgttcacttcctttgttcaataaatatatatcaattattttttcatatctcattctctccagcaga

SEQ ID NO: 12781 - DNA, 201 bp, Homo sapiens
gtagatagtggtgctgatattagggttggttctactgtctttatctggattcatagaatataggaactttatctaaagtaaagttttctcaacactctttrgcccagaatgttaaagaaaaaaacgttgtatccacatttaatatgatttgaaacttcaaaatagatttgctagcatgaataaaaccatttataacgctga

SEQ ID NO: 12782 - DNA, 201 bp, Homo sapiens
gtggaaacaagggtgagttttgatatttcatgtggtgaaatgaaaaaatgtttttcctggaggctcttgttttctttcccataaaataggcacaaatgccmttatttattactttatgatttcatttccctagccaagtatgttatccaggcatattaagttgcaatagcaaattctcgatttttttttgtagtttgtagc

SEQ ID NO: 12783 - DNA, 201 bp, Homo sapiens
agagtcaggcacacaaatataacaaaaataaaccagaggcagatccatgcagtggtgagaatacaagtgaaactttgaactcaaggtcctacattaagtcraagagaagtaggaagaaatggaatgaaaggtgctaggtgaaccatgagaaaagcctccctagaggaggtaagcttcattcattcattcattcattcattc

SEQ ID NO: 12784 - DNA, 201 bp, Homo sapiens
cactgtgccagtaacattaggaagtcctaacaacattttttaagaagtgtctttactattcctggccctttagttaccctgtctgtctgtctgtctgtctstctctctctctctctcataattattgttgaagtataacacatctacagaaaaatatgcaaatcatataaggtgtacaggtcaatgtatttcacaaagtaa

SEQ ID NO: 12785 - DNA, 201 bp, Homo sapiens
agcatagtatactaatcagcatttatattaccttttccatgagcaaacatgttttgaattccaagtaaccaacttactttataaacttctaaatgttatgyctaaagttatatggtgctcagtgaggactggaaattgtcaggaatggcttcatggaaagtggggcttgagttagacctagaggggtctgtagaaggaggt

SEQ ID NO: 12786 - DNA, 201 bp, Homo sapiens
ttaccatttgaattcaacctttgcagttagaatgaccagatacccattacaaatgatcatctctttgaaaacttctgcttggcattttcaagaaacttttyggcagaaagtcatttgtctcctttttctggacctgggaacagcactgggaagtgttcaggccttttcccaaatataatccctgagcgtttggaagctgag

SEQ ID NO: 12787 - DNA, 201 bp, Homo sapiens
accccctacacaaggaatcagattgaaatgagcctaagaatagacaaagaatagaaaatgatacacatagtacaattggattgttatctggataagtggcrggtaacagtaaaaaattaatactggagacgtaaatttagagcaaatagtgccatccttgaaagccaaaaagagatttagagtttgttctgaagacaaatg

SEQ ID NO: 12788 - DNA, 201 bp, Homo sapiens
tttgtatgtgctagtccctctgtctgggacacactctcctagctaccagcctctttttacctggttgttaacttcagtttatgttctcagggaagccttcytagaccaccacaccccttctcctagctaagatcagctattagttgtgattctttcatgagtcagtctctaccatgagattggacatgctattagcccagg

SEQ ID NO: 12789 - DNA, 201 bp, Homo sapiens
tcagttcctgctctgcaccaggcactgtgccaggcatgaagcatccagggagttgttagaccaggagtgagaaagagaagccataaacatcattatcaccrtatttcccatcttcagagtaaccatatgagtgagttcctatcattacacacattttgtagataaggaaactgaggaccaaagaaggaggtgttatgtcaa

SEQ ID NO: 12790 - DNA, 201 bp, Homo sapiens
gttttccagtcactttcctagttaacacacaatctcattctcctatgctcttgaatatgaatgagtcttgcaaatttaaggctgtataaaaaaaaaaaaaagcaagttgtttaaaacagggatccccagcctttttagcatcagagaccagtttcatggaagacaatttttccacagactcggggtgtgggggtgggggca

SEQ ID NO: 12791 - DNA, 201 bp, Homo sapiens
aaacatacataattccagggtcaaacacaactgtattacacgagttcttaaccttggtaatatccacaaatagaatttagggagtctacgaatataaatgraaaaaaattacatctttattttcactaacctctagctgaaatttagcatttcctctgatcataaatgtagggaataaactacagtaatataggcaatacc

SEQ ID NO: 12792 - DNA, 201 bp, Homo sapiens
catctgtcagttgtatgtggaaaagctgaaaatatctcagggcaagtaagtcaaatcttataggagaagatcatcttttttttttttttttttttttttttgcgatggagtctcgctctgtcacccaggctggagtgcagtggtgcaatctctgctcactgcaagctctgcctcccaggttcacaccattctcctgcctca

SEQ ID NO: 12793 - DNA, 201 bp, Homo sapiens
gtagaaaatgcaacttcctatgtacttattcccaaaatattgtttgttttgcttttcagtttgttaaataatcaatctatccctatggtaaccaaaaaaaatgcagaaaaaaatctacacagactttaggcactgtccctacacattaaattcatcagaatgttctttgaaactcagtaggttctctagactagaaaaagt

SEQ ID NO: 12794 - DNA, 201 bp, Homo sapiens
tctggctattctaataatttgctgctaaatgtttattctttctatacttctttccaaagcctttaaatctgggacagatatacagttttgtttttttttttgtttttttgggtgtttttgagacagagtcttactctgtggccaggctggagtgcagtggtgtgatctcggctcactacaacctccgcctcccaggttcaa

SEQ ID NO: 12795 - DNA, 201 bp, Homo sapiens
atcatgccattgcgctccagcctaggcaacagagtgagagcttgtctcaaaaaaaaaaaaaaaaaagaaagaaagaaagaaagaaaaagaaacagaaaatagaaagaaaaaagaatcctacagtaaattatcttttaaataaaaattctttcacaatgtgagcaatgaacttataatttatgctttatacattcacattct

SEQ ID NO: 12796 - DNA, 201 bp, Homo sapiens
tctattttctaatcttcaactttcacataaactgttttctccactgcactccagcctgggcaagagtgcgagactctgtctcaaaaaaaaaaaaaaaaaaactgttttctaaaattgaacatgtgccttcacttacagtagtccatctcccacattaaaaaaagaaggtaggccaggtgcggtggctcagagctgtaatcc

SEQ ID NO: 12797 - DNA, 201 bp, Homo sapiens
attaagttaaaaaaaaagatgggtcttcaaagtcaaagagtgtttacagaatctgtaggatcagcatattggttagtgggtcttgaactctgatggccatrtactctgccagaggatcaggagtacatgcagctgctgtgatgtggttgtgagcttttttttcttctttagtatgtgtcctgtggcatagatttggccaac

SEQ ID NO: 12798 - DNA, 201 bp, Homo sapiens
gaggcggaggttgcagtgagccaagattgcaccattgcactccagcctgggtgacagagcaagactctgtctcaaaaaaaaaaaaaaaaaaaaaaaaaaawtttaagaacatgaaagagctgatgatgaaacctgttggatgaactgatgaaccaccccccaccaaaaaaaaaaaagatataatctcattctttatagatt

SEQ ID NO: 12799 - DNA, 201 bp, Homo sapiens
atctattttctaatcttcaactttcacataaactgttttctccactgcactccagcctgggcaagagtgcgagactctgtctcaaaaaaaaaaaaaaaaaaactgttttctaaaattgaacatgtgccttcacttacagtagtccatctcccacattaaaaaaagaaggtaggccaggtgcggtggctcagagctgtaatc

SEQ ID NO: 12800 - DNA, 201 bp, Homo sapiens
ggggagaataaatgaaagagaatagacaaatctgtgcaaaagaactccaaataactcatgaatactccaccctctagaaggtggagcctaactccctactygttaaagtatgagctatgcatattgacttccttccaggaagtacagtagggaaagggagtaaaaatgagtaactttacagtaaggaaagctgagaaatat

SEQ ID NO: 12801 - DNA, 201 bp, Homo sapiens
ccgcgcccggcctcggtatttcttttgagctcctagaatgtaccaggcattgtacgaggtatacaaatatgaacaagacagccaccgtgttagagagaaacagtaaacaattacagtagagcagagttcctcaacctagacactaggttgacatccaattatttcctagaggcaaaattgcctctgtttgagaaccactgt

SEQ ID NO: 12802 - DNA, 201 bp, Homo sapiens
ttaacttggcatctgcagtttacaattattgctattttacaggctcatcagttagcatctatgcaagtgcaggcttataatggtgggaatgccaacccccsacctgccaataatgaggaagaggaagatgaggaggacgaatatgattatgactatgaatccctttctgatggtaagagaaacagatccctatgctgtgca

SEQ ID NO: 12803 - DNA, 201 bp, Homo sapiens
aatgaggaagaggaagatgaggaggacgaatatgattatgactatgaatccctttctgatggtaagagaaacagatccctatgctgtgcacaggaaaattyttggatgatttgccacatttttctttctaaaataagtctagagcgccaaagaccagtaatacggatggttgtaatattgtccaggagtttctgaattcag

SEQ ID NO: 12804 - DNA, 201 bp, Homo sapiens
tgcgatactaaatcttgagtgagaaattagctttcttgtttttcattttaaaaggtcatcatcacgatacacttctaatacctttagagtcattccaaatrgaaaagcaaaaaaagagcaaaatataagattatatcttatgatataatattcagatatattttattttctgttatgattatcacttagtaaattaataac

SEQ ID NO: 12805 - DNA, 201 bp, Homo sapiens
aattgcaaattcaaacagatagataaggccaggtgcagtggctcatacctgtaatcccagcactttgggaggccgaggtgggtggatcacttccggccagsagttcgagaccagcctgtccagcatggtgaaaccccatctctactaaaaatattaaaacaaaatagtggggcttggcggtgtatgcctgtagtcccagct

SEQ ID NO: 12806 - DNA, 201 bp, Homo sapiens
cccagctacactcaagctgccatccttggagctcacaaacacattacagtttcctacttttgtgatcttttcctgtttctcttctgtgtgcaagtagcccrtggtcatttaattagtctgctcaggctgccatcatggaataccacagactaggtggctgaaccacagaaatgtatttcctcgcagttctgaaggctggaa

SEQ ID NO: 12807 - DNA, 201 bp, Homo sapiens; identical to SEQ ID NO: 1975

SEQ ID NO: 12808 - DNA, 201 bp, Homo sapiens
tggagatttctagtttattcattaacagcagaaggatggaagaaaattcctctggcaataccatgtcagcctcttcggtaatgaagttctgtttcactcarcatatttatggggattgctacactgaaggtgggcttttttgtggcccagcaaagtggtcggtgtgagttattaattaggtagctatggaaattaataaca

SEQ ID NO: 12809 - DNA, 201 bp, Homo sapiens
ttaatatatttacttccccattgcttgatgcttcctattgtgttcaccatgtggctctttcacaggaggatggacggtatgaaggcccaactttggctcaygctgtggagttgtttggtggcagacggtggagtgctcgaaaccccagccccggaacatcagcaaagaatgctgagaagcccaatatgcagagaaacaata

SEQ ID NO: 12810 - DNA, 201 bp, Homo sapiens
tacacagatgcacatgaatgcgcaaaagtccatgtggatgatatgccttttgattatttggaaatgtgttattcaacattgagatccactccaagaatcayctgatggatcttggtaccactagacaaactaccttcaacctgtagagaagatttttaatgattcttaagctatataaaataccaggctctagaatgataa

SEQ ID NO: 12811 - DNA, 201 bp, Homo sapiens
agagaaacaataccctgggcataagcactaccaagaaaaagaagaaaatcctcatgagggtagagtgttatttgtttattaagcattaaacccatcttccmggaccgctgtatggtgaacatcaccataaaacacttaaggttgtttgggttgaggacaaagtcaggtataaaatagaagatacaagggcttaccacatac

SEQ ID NO: 12812 - DNA, 201 bp, Homo sapiens
tggaatatccttcatttgctctttcagtcattcttttagaaatattgactgagtgcccactgtgtgccatgcactgttctaggctctacggatccagcaaygaaaaaacaaataaaactccctacccacatggagcttccattgcagttagatggagacagattagagaaataagataaatataccctatgataagcgcca

SEQ ID NO: 12813 - DNA, 201 bp, Homo sapiens
ttcgccctaagcctagacatggcctaatcttccttcttcacgcagagattattaatcaatcagaatttgcacattaggtgaatggaatcttcttgccatcygaggagctgaatcaaattcttagagcttcaggatgggccacgtggaccaaggagacattttctgcccctccagcctaaggccttcctttgcatgttgagc

SEQ ID NO: 12814 - DNA, 201 bp, Homo sapiens
aataggcattactacagagatataaataaagtgctttgggagggcaactgggaccaagaagtggtagaagaaccagatttctaaagatgacagcatataartggtaaagtaattatccaattattatatcaatcatacttttatatataattataaaataataattttatatataattataaaaaatctgactataaaaat

SEQ ID NO: 12815 - DNA, 201 bp, Homo sapiens
ttgaaggtgggtaggtcagaaaatagagacctacctgaactaaagcagtgatgggagagaaatacaggcttggaaccatcgtgagctttgtgttcccaggktgagagtggagaggtaactgacgatgagatggcaacccgaaaggccaagatgcacaaagagtgtcgaagccggagtggttctgatcctcaagacattaat

SEQ ID NO: 12816 - DNA, 201 bp, Homo sapiens
ctatgttttatttattcgtttctcttttgagtctggaatataatcagttggaaatgaggaaggaagccccattcattcgcctctttgtgatgccatgaaartgatagcatgtttgagctgatggagggccttggaaataatcagaggagaccctttcattttatagaaggattctgaggcccagagaagtgcagtttgcct

SEQ ID NO: 12817 - DNA, 201 bp, Homo sapiens
tgcttgtatagaaaccagctgcataggttgatttgctcagacatccagaagcctctctggtttgtatttggttctgagggaaagtataatctgagtcattstctcttttctgtctttcatcctcacagaggtgaatgccatcgctaaccctccaaaccccctcccttccagaagagcccactctttgaccacagctgggtc

SEQ ID NO: 12818 - DNA, 201 bp, Homo sapiens
gagggccttggaaataatcagaggagaccctttcattttatagaaggattctgaggcccagagaagtgcagtttgcctgggttcctccaatcaaaggtggkgaacatgggcttaaaaccaggttgcctgactctaggccaactgagttggacagtgttgaggtaaactctgaaaagctggtgttcctgcccaccacagctc

SEQ ID NO: 12819 - DNA, 201 bp, Homo sapiens
caagacagagtatgcttcttactttttttttttttagttttgcttacattttatttttacttatacacaagggtaagatattatagaaattggtgtcactrtaagtctaaaagagcactttcagtaaatataaaataaaatttcataatgatgcatcttagcacaaatgaagcaaatgatgtctacaaatccatatccatt

SEQ ID NO: 12820 - DNA, 201 bp, Homo sapiens
aagcaaaatctatccataagcatttctttggaactgcaaaggagagccagcctgaaatgtttttgaagagtaaacacagtacatggaaattaatttttaargagcccgcttatacagtgtatgaaatatcaatatcatctttagctcataggcaactttttgtggttttattaactgacttatggggagaatcattgacaa

SEQ ID NO: 12821 - DNA, 201 bp, Homo sapiens
aggagaacattaaagaactgcagctacccctctcatactattacatcgaatcttcgcacaatacctacctcacgggccatcagctcaaaggagaatcctcrgtagaactctacagccaggtacagggaatgccacttggaatgtggtttttattaaacctaattatttatgtaacccccaaagtcaaaaaaacctgacccc

SEQ ID NO: 12822 - DNA, 201 bp, Homo sapiens
gcctactgtgtgcctttgaaggaagagtcagggaggccaggagcctcagcctgagccctggctcacaggttctgtgctgtcaccgagctacttacttcacycctactcttgcctggtctttcccttgggctgtgagtcagaagacagtggttgaagtctctgcttactcattttgcagccataagattctctagcactcaa

SEQ ID NO: 12823 - DNA, 201 bp, Homo sapiens
atctcagcaggaagggaattgggttgaaaaaatcttgaaatgtcaatggggtcttcaagtaggcttgtctaacttctgtacagatgaagttgtgcctagcragctgaagtcgcttgtctgactaataaacagtagagccgggtcatgagcctgaccatgtgttcagtcacaggggaggatcctttgtcctaaaatgcttaa

SEQ ID NO: 12824 - DNA, 201 bp, Homo sapiens
tatttggctaattccactgtacatatattatcagtatctagaaatttcggttggcctctttcatcaagccacattctgattcaattttcaggaaacttagkcagtttctaaactattcagaaagctggagggggaggccatctagggtagatttaagcatcaacctgattttaatttttttttaatatgagcttagataga

SEQ ID NO: 12825 - DNA, 201 bp, Homo sapiens
tgaaaattatgcaaagaggaaaagaaattgatttataaatggtcccacaataggatcaggatagttcggagctaacagctcagttatatcaagacattttatgtaaactgttagtgatggattttaatctcatcatattaaagtgggatgaaataagtaggaccctattctagggccatcaattaatacaattacaaaagg

SEQ ID NO: 12826 - DNA, 201 bp, Homo sapiens
ctatagttcgagatcatgtcttagagttggttacttctgagaagagttcttatatttggctaattccactgtacatatattatcagtatctagaaatttcrgttggcctctttcatcaagccacattctgattcaattttcaggaaacttaggcagtttctaaactattcagaaagctggagggggaggccatctagggta

SEQ ID NO: 12827 - DNA, 201 bp, Homo sapiens
agaatgcttatagtcaaggaaggtgctaggttaattaaaagcaagaattttccagaagagagcattaaaaacgctagattttattagagagaacagctgtrgcaagtcctttggaaaggacatagatttacttctatcttaaaaaattaaatttacgcttgtttgtcacgtggtaattcatgttcaagggattatgttaaa

SEQ ID NO: 12828 - DNA, 201 bp, Homo sapiens
ggaaacctacatgaaaggttgacattgtttcaaagcttctagcattcaatttgtgttcctttgagtgtgatgtcatgcttatactgagatacatgcttatrctgggaccgccagatttattagggttacactgaccaggtttctttttattctttaatttatttgggcctctcttattgctgtttcccaccagtcactaga

SEQ ID NO: 12829 - DNA, 201 bp, Homo sapiens
tatcttggtttcttttaaaccccatgatcctttcaaatgatcaatttcatgaaaaattagtagagagaatagatcagattaagtcctttgactctaagccmatcagcaaatgataatgaaatgttgttaaactgttggtggatttatcagaaatggccaagtttggttactagcaattaaatccacatttggctacagcta

SEQ ID NO: 12830 - DNA, 201 bp, Homo sapiens
ttccagttaaaatttgtatattttaatgaagatgacttactcattacaataaaattaaaggatttttttcaatacatgacacttctacttttgagtgtttytaaattgtttattgtttttaaagagtaagcctcattttaatgagctatgaaaattcttgctcttgggaacatttatagaacataataaaatgcttataat

SEQ ID NO: 12831 - DNA, 201 bp, Homo sapiens
tgcaatgattatggaggcagagcttatatgtgcacttttaggtttgaaagtgtttaggttccaagcaattaactattaccaacataatagagattttttttattttttaagcaattaaatgggaagagaaagcatacttattaagtgactttggtttttttatggacattgtacattttgcttcctctaactaaattctta

SEQ ID NO: 12832 - DNA, 201 bp, Homo sapiens
ggtggaggttgcagtgagccgagatcatgccattgcgctccagcctgggcaataagagggaaactctgtatcaaaaaacaaaacaaacaaacaaaaaaaaacagaaaaaagaaaatatgtattacatttcttttaagaaaagaattatcatattttgataaagtcattttattttaatgatgcttatcattctgtgtctgg

SEQ ID NO: 12833 - DNA, 201 bp, Homo sapiens
gaaccaggaggtggaggttgcagtgagccgagatcatgccattgcgctccagcctgggcaataagagggaaactctgtatcaaaaaacaaaacaaacaaamaaaaaaaaacagaaaaaagaaaatatgtattacatttcttttaagaaaagaattatcatattttgataaagtcattttattttaatgatgcttatcattc

SEQ ID NO: 12834 - DNA, 201 bp, Homo sapiens
ggctgaggcaggagaatcgcttgaaccaggaggtggaggttgcagtgagccgagatcatgccattgcgctccagcctgggcaataagagggaaactctgtmtcaaaaaacaaaacaaacaaacaaaaaaaaacagaaaaaagaaaatatgtattacatttcttttaagaaaagaattatcatattttgataaagtcatttt

SEQ ID NO: 12835 - DNA, 201 bp, Homo sapiens
gcttatcaacccagatgctagtcaggatagagaaggtaacttaggtggacaccagcatctaagcaccaaagtaaaggtggcagcaaaataatcatagagcagaagcagatgatttagaggctgcatatcataaggggagggtgtagacatggattatttttaaatattgtcctccagtctgtgtagcaggaaaaacgaatc

SEQ ID NO: 12836 - DNA, 201 bp, Homo sapiens
atattcatataaaaatgaatgtagagttaaacatgaaaatcaatcaatgcaatatatcatatgaatagaacaatagacgaaaaccacatgggcatctcaayagacatagaaaaaggatttcacaaaatccaacatctttttatgaaaaaaaacactcaacaaaataggaatagaaaggaacttccccaacctgataaagtg

SEQ ID NO: 12837 - DNA, 201 bp, Homo sapiens
acttagtaaatgtgaccaccttttatgctttggtcaacattttgacatttgtcactgaatcttcatttcctttttgtgtcatttattattttataactagyggtggccctctcaccatttaatgcttataaaattatgaatacatcagaccataataagaattgtccgtgaggcttgtaaacagatgttggggtgtgtgtg

SEQ ID NO: 12838 - DNA, 201 bp, Homo sapiens
ttcatgtgcttataaacaagtagatgttaacacactcccgatgtatatgacaacctccgtggaggtcatatggaaacatgcgggccttccactacggcccygccgctgtgctgagtgttgtatgcatgtcttctgtacttctcaaaacaacctggcaaggtagaattataatcctcatttcaaagatgggaaaactgtgac

SEQ ID NO: 12839 - DNA, 201 bp, Homo sapiens
gaagttctggttgatgattcttccttcagagacagcaggggctgggcagtcgggtcccttcaggtgaagggattacagagtaattagatatgattcaccakctgtctcaaagtagtatcttcttgtattttttatatttatatctgtaactgtagacagaaaggaaattgccctgaaagaaataactggccagtaagtaat

SEQ ID NO: 12840 - DNA, 201 bp, Homo sapiens
gaaaagcaaaaggaaggaaaaaaagatattttgggaggggcagttgtggaggagttgtgggcatggtccagggggttatgatgtcagggtaagcccagaascttctgggagaggtgcttaaagaattgggctgggggccagattctctcctcattctgtgcttactattgaaataagcaaaataatctgctaccattaaca

SEQ ID NO: 12841 - DNA, 201 bp, Homo sapiens
tacaagggataaattatctagaagtgagtgtgcagcctatggacaggcacgtcccctccaccccatagacttcttactctatggagagggcacagctggaygacagccagtgtggagccttctgaaacctggggtccagggcaggatcctgatggcatggtctcagggcagtgctgcctaaaggatgagtagggttcaatg

SEQ ID NO: 12842 - DNA, 201 bp, Homo sapiens
gatgctggccctcttgtggaggtggcccagaagcttcacatcctgaattatccctatagtatttgccttggcccccttttgagtcaacagcatttcatcakttatagaccaagggctggggtggagagatttcagtcttcctgagaaccttcactcccactgccctcagtccatcacattctgcttttcctcctggtgaga

SEQ ID NO: 12843 - DNA, 201 bp, Homo sapiens
aaacagcccttgcagaccagcagtgggcttggtgctgtttggacagggaatttgggaagcgtgggtttacaagggataaattatctagaagtgagtgtgcrgcctatggacaggcacgtcccctccaccccatagacttcttactctatggagagggcacagctggacgacagccagtgtggagccttctgaaacctgggg

SEQ ID NO: 12844 - DNA, 201 bp, Homo sapiens
taattgatgaagcactttttttttcccctgaattaactgagaaaaccctactaacttaagaatgacatataaggtcatttctctagcatagacagtcatgygtcatgacatgttgatagtcaagcagttgagtctattcaacaatttgattacataaatattgagcacctaatatgtaccaagccctgttctgggcacatg

SEQ ID NO: 12845 - DNA, 201 bp, Homo sapiens
cagtgcatttgagtgctctcagtgcagtcggcacagccagagcagctgggagcaaggccttctccaggcttacataaagcataggtcttgaccaaatgtgraaaacctttagggacatgaaaaccattagggatccgtagccctgacttgaaccaagcagaataaacaaacccctgcccaaattggaactcactggacgcc

SEQ ID NO: 12846 - DNA, 201 bp, Homo sapiens
cagtcatgcgtcatgacatgttgatagtcaagcagttgagtctattcaacaatttgattacataaatattgagcacctaatatgtaccaagccctgttctrggcacatgatctgctcctttggggcatgtaatagtgcttgcctgatagaaggtgcctcaggcccatgcttgctagggcacagtgaagataatagccaatt

SEQ ID NO: 12847 - DNA, 201 bp, Homo sapiens
cagttaagaatggaggaatttttactatgacacagcaccattgtaaaaaatctcccgcctcgtgccaaggggtccgtgctgctaaactcctcccctgagtyagtgcatttgagtgctctcagtgcagtcggcacagccagagcagctgggagcaaggccttctccaggcttacataaagcataggtcttgaccaaatgtgg

SEQ ID NO: 12848 - DNA, 201 bp, Homo sapiens
tatatcctggaatctacttaacctgtcttaagtataagcttcctcgtctgaaattcaggataataacacctaattcatagactgttgcaaagctaaatgargtaacgtgggaaattacattacaagctacaactatacaactgcaaaatgagttggatgaaatgatctggaagatccccttcatctctagtctgggccatt

SEQ ID NO: 12849 - DNA, 201 bp, Homo sapiens
taatcccttgcagaagttcgagcctagcatcagtatgtgtcatcagggactaatgtcatttgaagggtttgccaggtaacttttaaaatatcttttgcccmtcttttaagagtagatgcatttttcccatgcagtcttaagaaaatttgtttcacctaggtttctgatggataaagaaaattttgcctcaaaaaatgatga

SEQ ID NO: 12850 - DNA, 201 bp, Homo sapiens
caggaggctgaggcagaattgcctgaacctgggaggcggaggttgcagtgagctgagattgtgccactgcactccagcctgggcaacagagcaagactccrtctccagaaaaaaaaaaaaaaaaaagcccctctagaggaacagctgggctgggctgaggtagcctagagaagaggaagtgagaaaggaaaagtgcaaaga

SEQ ID NO: 12851 - DNA, 201 bp, Homo sapiens
gctggtctcaaactcctgacctcaagtgctccgcccgcccctcagcctcccaaagtaccgggattacagacgtgagccaccgtgcctggccttcattcttyatttaaatcagtgacttgaccaaattacaccttagatcaagggtctttatgctgggtctaaatgaagacttcccaaaagtgtttgctgtatcatgtggaa

SEQ ID NO: 12852 - DNA, 201 bp, Homo sapiens
tgatggaagtcagcaggaatggagtcagcatgacagacaatgtgacgtgctgtggaagaaataaaggcagccctaaccaggcagtgtccccagggtaaggygctgaggatgactgcacagcagcaaagagggctaatatgctccactatggtgagtctgggagagttggtgagaaaactgacaaagcactaatttcaactt

SEQ ID NO: 12853 - DNA, 201 bp, Homo sapiens
cagggaccatagtctaaactgaggagtatcaacaagccccatgatactgtcgttgcctcatcaagaggcagtaggtggcccaagtgtctcctgagcatgaragccttccttcccagagacgcgtggaccagcctatgtaccagctccttcacaattttactcaccactttgctggtgatgtctgtggaccaaatagcagaa

SEQ ID NO: 12854 - DNA, 201 bp, Homo sapiens
aatttttgtatttttagtagagatgaggtttcgccatgatggccaggctgctctggaactcctggcttcaagtgatccacccatctcggcctcccaaagtrctgggattataggcgtgagacactgcacccagccgtcattaggtttaaatgaggcctttgtggactatgctgcaattagaccttggctgtgaagcatata

SEQ ID NO: 12855 - DNA, 201 bp, Homo sapiens
ctttccaggttcctaaggtaatattagatgttttagattgcttctgttctcatacctccccattgtcctcaagtaagccaggaagctcacactgcctgccytctgtgttcctccaattctgcaggtgcagattggtagtctagtttccttttttggatactattttctttttgtgagactttgtaataaaatggtacattt

SEQ ID NO: 12856 - DNA, 201 bp, Homo sapiens
ctcaagtagctgggactacaggcatatgccaccatgcctgactgatttttgtatttttagtagagagggggtttcaccatgttggccaggctggtcttgawctactggactcaagtggtccaccctcagcctcccaaagtgctgggattacaggcgtaagccaccacacctggcctcggttattagaagttactgtgtgct

SEQ ID NO: 12857 - DNA, 201 bp, Homo sapiens
taagaaactgtgaagggggcaggagcaggggacagcttctttcctagttcctcttcctaagactttttaaataattcaaccagtctaaaatatctactatrtttatgaagtgtacatatatttatcaattatagataaaaggcattgattgtatgttttccttcattctttttagactgtgtttggagaaaagctggtgac

SEQ ID NO: 12858 - DNA, 201 bp, Homo sapiens
cagaacaaagccagttttagttaactcgtctaaaatggaaaacaaatacctgactgtgtgtggcggcttatgcctgtaatcacagcactttgggaggctgmggcggtagatcacttgaggtcaggagttcgagaccagcctggccaacatggcaaaatcccgcctctactaaaaatacaaaaaattagtcatgcacctata

SEQ ID NO: 12859 - DNA, 201 bp, Homo sapiens
ggaaaatccaagaaagtaaactgcagagatgttgatgtggggtgtggaggaaagaccaatgtcttgagctttggcccaaggttatcatggacagaactgayggcccataatcctgggtatttggaaggtgctctgggaggctaagaaagttaaatatggaattaccaggtaaatatctttggttataagcaaaaaagattc

SEQ ID NO: 12860 - DNA, 201 bp, Homo sapiens
tagaacagtaacactaaaagggaccttggagataataactggccagcctcttcgtgataaagataagaaaactggggcaaagagtaggttatgaggaagarggtttcagttatttgcccagtatcacacaattacacagtacagactgtgggtctctccagggcagagtcttttttctttttaaaatcattgttctccagc

SEQ ID NO: 12861 - DNA, 201 bp, Homo sapiens
ctgccactgaagaaggggctgggtatgatatagggtaaaatcccagcacgctgggacgctgaggcgggaggcttgcttgagctcaggagtttgagaccagygtgggcaacatagcaagaccacatctctacaaataatataaaattagcccagcatagtggtggtgcctgtagtcccagccactcaggaggctgaggtggg

SEQ ID NO: 12862 - DNA, 201 bp, Homo sapiens
ggagaatagacagttaaagtaaaatcggggtatggttagagaagggagaaacagatcatggacagccataagtcacaatgtcccactataagaggtcaccmaaaggtttctttgtcaagtacccaagttattcagcatcctgggatccacagcaggatgcaggaagtgggaatgcacaagtcataacatcagatagttatt

SEQ ID NO: 12863 - DNA, 201 bp, Homo sapiens
ccctaatttgcaaagtaagtctaaatgaattttcctacagtggtagttctgcaatttaacctctgtaaatgggatgggaagtttttgttccccagttgatrtattaaagcatgtcactggaactcagcagtgatgtgaccaggacaacgggggacatgatgaaattcctgacagagaatcttgtgagttagaaaacagtca

SEQ ID NO: 12864 - DNA, 201 bp, Homo sapiens
tttcctacagtggtagttctgcaatttaacctctgtaaatgggatgggaagtttttgttccccagttgatgtattaaagcatgtcactggaactcagcagkgatgtgaccaggacaacgggggacatgatgaaattcctgacagagaatcttgtgagttagaaaacagtcacttgggtggccagatcattattcttctgtg

SEQ ID NO: 12865 - DNA, 201 bp, Homo sapiens
agctaataacaaaatcaccattctgttcatcaggttgcctgctttatccccttttagcctcagctacctggcataaagtaactgttcttactcctgtgggwggcagcatggtatgtgaggaagaagagcatgagttcttaagttagaatcaaattaggaatcaaatccttatccaggaatcaaatcctgattcccccaagg

SEQ ID NO: 12866 - DNA, 201 bp, Homo sapiens
aatggtgctggggaaactggatatccatatgccaaacaatgaagttggacccttaccttccaccctgtataaaagttaactcaaaatgaatcaaagacctrcacagaagacctagaactataaaactcatagaaaatatagaggaaaagcttcacgacattgggtctggcaatgatttcttggatatataccaaaggtaca

SEQ ID NO: 12867 - DNA, 201 bp, Homo sapiens
agtcagtggggaatatggttatcttggcacaatcgcttctcatcacctgaatggcactgaattaattgtccagggactcacctttacccaagccaggtaaytggaaatgattaacttgggaaatgtattatcttctttcagcaccaaaggccctgtccctcaaagatgctgcagaattcagcccctgtgggccagtcacaa

SEQ ID NO: 12868 - DNA, 201 bp, Homo sapiens
gggaaaggtcattttgaatgatgcaagaaaattccttccaaaatgagcatgtgtgacaccaataaggtatttgatgtgaggagagggagtaaactgttctrtttggctaagcccaagagtactgagaaaagcaaaaggaaggaaaaaaagatattttgggaggggcagttgtggaggagttgtgggcatggtccagggggt

SEQ ID NO: 12869 - DNA, 201 bp, Homo sapiens
aaccctgtccacacatcacccccacccccactgccctctggcctggctttaggcctaggggttacaatctaccctctgaaggactgatccagataaacagyccttgcagaccagcagtgggcttggtgctgtttggacagggaatttgggaagcgtgggtttacaagggataaattatctagaagtgagtgtgcagcctat

SEQ ID NO: 12870 - DNA, 201 bp, Homo sapiens
aaaatgatgtttttatcagactcctgaaggcagcctcaccctttcctttagggggccagggcgtgagtacaagggaggccccagcatgttggccttcccascttctcttcccatcctggcttgtgtgccagagtatgtatacctcaggcctcaagttcaaaccctgtccacacatcacccccacccccactgccctctggc

SEQ ID NO: 12871 - DNA, 201 bp, Homo sapiens
tccctaaaaggagggatataggggagaggtgaggtgattggagaatggacaggggcctggtgggccaaagtaaagatttggctttgcagaggacacaagcragacatggtggaccagggaaaggtcattttgaatgatgcaagaaaattccttccaaaatgagcatgtgtgacaccaataaggtatttgatgtgaggagag

SEQ ID NO: 12872 - DNA, 201 bp, Homo sapiens
acactccaggtgggaagtcaaggaagttctgctcaagaaaatgatgtttttatcagactcctgaaggcagcctcaccctttcctttagggggccagggcgygagtacaagggaggccccagcatgttggccttcccaccttctcttcccatcctggcttgtgtgccagagtatgtatacctcaggcctcaagttcaaaccc

SEQ ID NO: 12873 - DNA, 201 bp, Homo sapiens
ttcatatgttcactccttcgctgactcttgtttaaacttaccgagggcagatcctgacaggtcaccgacactgctgcttacccgtgagcatagcagatccrgcatctgccttaatgaggatcacagcactaaatgtgcgctagggtcagggtgatgtgggggcaccacagagcatgcagtgtgtggacacactccaggtgg

SEQ ID NO: 12874 - DNA, 201 bp, Homo sapiens
gagacaatgaagaaatgatgcagtggacatagtgagaggtaaggtccatttggtagctgtggttacagtttggagaatgaggtgaaaatttgaacctaaarcattagagagccattgcagacccttaagcaggttgaattttgaatagtggcacattaggaccaatagcctggaggcaccctctataggaaggagagtggc

SEQ ID NO: 12875 - DNA, 201 bp, Homo sapiens
gatgacagcatataaatggtaaagtaattatccaattattatatcaatcatacttttatatataattataaaataataattttatatataattataaaaaatctgactataaaaattttaattataattatattattatataattaaatataattaaaatataattaattatagttatatataaataattattaattgtta

SEQ ID NO: 12876 - DNA, 201 bp, Homo sapiens
atgttctctaccctcaaggaggtgacaatttagagaaaatggacatatacacaactggtttaattgcaagacagagtatgcttcttactttttttttttttagttttgcttacattttatttttacttatacacaagggtaagatattatagaaattggtgtcactataagtctaaaagagcactttcagtaaatataaaa

SEQ ID NO: 12877 - DNA, 201 bp, Homo sapiens
ggagttgtattctgagattcacacaagctttggggcacttcagttcaaggatttaggaggctgaactgggagttgggacaaaaaggagaagggctgtaaayacagacaggtcatctgtgaacaaccttctggttgggttcttcctgggagatacaggaagcgttccaagcagggaaagcaagtgagatagtgccagggtga

SEQ ID NO: 12878 - DNA, 201 bp, Homo sapiens
gtcacaagtgattccttgaacaaatgtatgctcaaacaccactaaggatctacctttgaattttacagtcaccagaaacaccctgtgtgacagtagcgggyattttgcccctgtttatactcagagacacattttggcatcaataagcagactcatctaaaatccatttcaaatagatgttgttgtggatgatctgggaac

SEQ ID NO: 12879 - DNA, 201 bp, Homo sapiens
aagttagcattcctggacccatctttacatttgctacatatttccatgcaaggaagcataaaggtccaaacaggaacttttacttcatattcatgttttaagcagaaattattcgtttaaaatctggttgatcagacttgctttgagattataaactaccattttgtaaactttgaaatgtagagttcttcagcttgcatt

SEQ ID NO: 12880 - DNA, 201 bp, Homo sapiens
aaaggctacagaatttgcccaatatcacataggttgaaagtggctaagccaagatgaaacatatatgtgtgtgtgtgtgtgtgtgtgtgtgtgtgtgtgtkcgtgcacacacattactgcatctagttgcaatataaatacttgtaataggaaatatcatgaataaagaaacatgggcattaaattctggtttgttggaag

SEQ ID NO: 12881 - DNA, 201 bp, Homo sapiens
atagctctaattccaagatttgtttatttaaagaaatatcctgacttgttagtattgtgaccttgaaattattttcttggtatttaaaagtatgctttaawgtaatattgggtgtgtttctctaccagttaatcaactaaaaagtattcattagctgcccactgtggcctagtgctatggcacctaagaatggagaagatc

SEQ ID NO: 12882 - DNA, 201 bp, Homo sapiens
gctaaaatgcattttctcctcaacttggtttcctatttagcattcctaaaactcctgtatgctatattggcatgggcatgagttgataactgtgtttacayatacacataaatatatgtgacatatgtcttattgcctcaaataaattataaactctttataagcaagaaagtattttatgcttaattatgtttgctgcta

SEQ ID NO: 12883 - DNA, 201 bp, Homo sapiens
tgaggaagaggaagatgaggaggacgaatatgattatgactatgaatccctttctgatggtaagagaaacagatccctatgctgtgcacaggaaaattctyggatgatttgccacatttttctttctaaaataagtctagagcgccaaagaccagtaatacggatggttgtaatattgtccaggagtttctgaattcagtc

SEQ ID NO: 12884 - DNA, 201 bp, Homo sapiens
tacctgggaggctgagacacgagaatcgcttgagcccaggagtcacagaggttgcagtgagctaagatcacaccaccgcacaccagtctgggtaacagagygaaaccctgtctcaaaaaaacaaacaaaaaacaagtatgtaagtgttcttctttaacatattattagtgtattattacataatatgtttttctttaacat

SEQ ID NO: 12885 - DNA, 201 bp, Homo sapiens
catctgcagtttacaattattgctattttacaggctcatcagttagcatctatgcaagtgcaggcttataatggtgggaatgccaacccccgacctgccartaatgaggaagaggaagatgaggaggacgaatatgattatgactatgaatccctttctgatggtaagagaaacagatccctatgctgtgcacaggaaaat

SEQ ID NO: 12886 - DNA, 201 bp, Homo sapiens
ttatcttgatcagaataaaaaggaaagcagacagattgcaccagagctttctgaccttgtaatctattgtcaagcagtaaaatttccaggtaagattaggmaatatcatctataacttttaaagatatcaaaggttaaaaatatgccatttatttaattgggcattgtgaacactctcaaaataactaaattgtgttgctg

SEQ ID NO: 12887 - DNA, 201 bp, Homo sapiens
ctaggttgcatcccaatttagttgtttatcacattttgaggtgaaagtacatacttcattgtatttgagtctttgggattacagaaagaacacattgtttyaaaatgtaaagagttggctgggcacagtggctcatgcctgtaatcccaacactctgggaggctgaggtgggtggatcacctgaggtctggagttcgaggc

SEQ ID NO: 12888 - DNA, 201 bp, Homo sapiens
atatcactatgaagtgataatatatttgcttcatggctatttgtttgtttgtgttgctataaagaaatacttgaggctgggtaatttataaagaaagaagkttaattgactcacagttctgcaggtgtacaggaagcatggtgccagcatctgcttctggtgacagcctccggaagcttacagtcatggcagaaggtgaag

SEQ ID NO: 12889 - DNA, 201 bp, Homo sapiens
aaactgacaaagcactaatttcaacttttttcaaatttgaaaatcacttttttccatgttagaaacaaaaagctgtaagaaacaagccaaacgttacctcyttaacatcagaatggactaattcttagtgtgttacaaagatggttacatatagaaatatctatagatacacatatatacacaagttagtataacatacat

SEQ ID NO: 12890 - DNA, 201 bp, Homo sapiens
ttgtctgcctccctcccctgaggagtactgctgtatagtaaagaacaactgaaataatatgacatgagaatactcggtcagccttaatgtaggtctttacyggttttaccaggaagaggcagtattgaaggtgggtaggtcagaaaatagagacctacctgaactaaagcagtgatgggagagaaatacaggcttggaacc

SEQ ID NO: 12891 - DNA, 201 bp, Homo sapiens
aaggacctactctggaccagtcactgttctaagtagtttatgtatattttctcattcaacaatcttgtgtttgggggtactattattgtatttatttaaamatgaggacaggcaggatttggggggacattagaccctgcaaaattctttggctttgggggtcctagtggtagagaggctttgccccatctggtactggct

SEQ ID NO: 12892 - DNA, 201 bp, Homo sapiens
ttctatttcttttcaaaatctcctgtgtgtctatcttttttctacttctctttctgatttttatccagtttcccattatctaggttcctgccattactccytcattcattcattcattcactcaagagatttatttatttcaattttttagttttaatttttgtgggtacatagtaggtgtatatatttatgggatagaga

SEQ ID NO: 12893 - DNA, 201 bp, Homo sapiens
ttagcagggttgagagtcacttcaacaaactatatattttatatttatagtcttaaatatatagtttttagattatatatttaatatacataaaatagacytcatgatattctctatactttcttatatatttgaaatatttcaaaaaaaacttttaaaatccaagacaaaaaaaaacaggtcctctagaactagaaatac

SEQ ID NO: 12894 - DNA, 201 bp, Homo sapiens
acgtcaccacacccggcctaatctctcatctttaaatggggctaataatatatctaccccaaatgctttatatgagtattcagagaaatgacatgtttaargcacttatcagggaccaaagacacagtagtggtttgatgttagttcccaaaaaaaaaaaaaaccactaacataacagcattattagaataactaatgata

SEQ ID NO: 12895 - DNA, 201 bp, Homo sapiens
ctgtctgaatgattgtccaggatatatttcctactgtataaacaagaatgtctcattcttctatctcactcaccaccaccaccattactatcaccacccaygcattttctaaccacttatgcatttccagcctatcattttcctcctctgttcttcctggaaactataaacacaaatagcaaaacaaaaaactttcctctt

SEQ ID NO: 12896 - DNA, 201 bp, Homo sapiens
cggcatgtttacatctgagatttttgttttttaatttttgtgggaaaaaaagtatacatttggttttaaattgtgatttaagcattgcaaacatttctaayaaaactctttgtcctaaccagacaatgaaacctaaaggtacttctgcaagcatagtgtgcttggaataaaatccccattaattaacttgccattactgac

SEQ ID NO: 12897 - DNA, 201 bp, Homo sapiens
atgggacaatataatccctattgccagttttctaagactgcttgcaacctttcatgatgacttcccaaggggtaccagcaatgattccacagtcacatccrtaaggcctttctgttttctggtagatcatgggtctagacctagtgatgatctgacctcaaataaaccaggtgatccagagctccagtgggctcagaccta

SEQ ID NO: 12898 - DNA, 201 bp, Homo sapiens
atataggcaatacctattgtcatcaatagaaatggcaactttttcattatacttcacagttgtcgctaatatctccaagaattatttatgctcaatttatmttttcaaaaatgttaattaacttactactatgttttctactgtgttaataaacacatatattctaatagcacaaatttgttcctataacatgtgatcact

SEQ ID NO: 12899 - DNA, 201 bp, Homo sapiens
atatctaccccaaatgctttatatgagtattcagagaaatgacatgtttaaagcacttatcagggaccaaagacacagtagtggtttgatgttagttcccmaaaaaaaaaaaaaccactaacataacagcattattagaataactaatgataataaattccgttttttattattatgatcacccccacttaacaggtgaga

SEQ ID NO: 12900 - DNA, 201 bp, Homo sapiens
caaatttgttcctataacatgtgatcactgtattcaacagtatttcctttgtaaccatttcattttatgcatttaaaacatcattctgagaagggatcctrtctcaccagacaaccagagaagtctgtgatgcaaaaacaagtgaagaacccctgccatattaacatttaatatctaggacttcgtgactgtcattttata

SEQ ID NO: 12901 - DNA, 201 bp, Homo sapiens
tgataataaattccgttttttattattatgatcacccccacttaacaggtgagaaaactgagacacagagagactaaatgaatgacctgtggtttcagagstgacagttgaacccagttgttctggcttccagagccagcattcttggctcatctgcttgatacttttgaatcaaaagctgagggaccttctttccaccac

SEQ ID NO: 12902 - DNA, 201 bp, Homo sapiens
gttttggctctcaagaaagcttgtgcccatttcaccacccctcacatggaatgagaatgaaagataaagtttctgaaacataggtacatggagattctgcygggttttgataagatataatttaaaatcatgatcagaaggttgctcagctggcttggggaggagatgccttctaaagtcagaatcctgtaaggtattcct

SEQ ID NO: 12903 - DNA, 201 bp, Homo sapiens
acccactctcacatccttaggaccctatcttgtctttatttttaaatttcgacctgaacttaaaagtgaattgccaaaacttttaaaatctaattttaaaytaaacttggatttcttccattcacttccataaccttgggaatcaaagacgaatcagtgatttcactaattcagagttagagatgatatgacctacagctg

SEQ ID NO: 12904 - DNA, 201 bp, Homo sapiens
accttaaagtagaaaagttccattacatcaaaagagaattttcaaattcagatttttcacctattttgagtgaccttgccttgaaattagcatggctttayatactgtaaagaaaaggaagaaatggagtttgcatttatttaatagatgctctggactggacattttcacatttcttaaaatctcattcagttcttatga

SEQ ID NO: 12905 - DNA, 201 bp, Homo sapiens
gaaaggctacagaatttgcccaatatcacataggttgaaagtggctaagccaagatgaaacatatatgtgtgtgtgtgtgtgtgtgtgtgtgtgtgtgtgygcgtgcacacacattactgcatctagttgcaatataaatacttgtaataggaaatatcatgaataaagaaacatgggcattaaattctggtttgttggaa

SEQ ID NO: 12906 - DNA, 201 bp, Homo sapiens
gtcatccttacgaactttgctgttacccagtgtccaggctggatgacaggtatttccaggaagagaatgagtgacatgaatatgtgacatttccccaactcaggtgaccacaaaactgtttttcttgtaaatgccagtattccagagatcattctttggaaaactctgttctagggctcatcagagactttccgtttgttg

SEQ ID NO: 12907 - DNA, 201 bp, Homo sapiens
agtcatccttacgaactttgctgttacccagtgtccaggctggatgacaggtatttccaggaagagaatgagtgacatgaatatgtgacatttccccaactcaggtgaccacaaaactgtttttcttgtaaatgccagtattccagagatcattctttggaaaactctgttctagggctcatcagagactttccgtttgtt

SEQ ID NO: 12908 - DNA, 201 bp, Homo sapiens
agttgcttatcagcttaaggagattttgggctcagacaatggggttttctagatacacaatcatgtcatctgcaaacagggacaatttgacttcttctttycctaactgaataccctttatttccttctcctgtctgattaccctggccagaacttccaacactattttgaatatgagtggtgagagagggcatccctgtc

SEQ ID NO: 12909 - DNA, 201 bp, Homo sapiens
tccatcttgaattaattttcgtataaggtgtaaggaaggcatccagtttcagttttctccatatgggtagccagttttcccagcaccatttattaaatagrgaatcctttccccatttcttgtttttgtcaggtttgtcaaagatcagatagttgtagctaagcagcattatttctgagggctctgttctgttccactggt

SEQ ID NO: 12910 - DNA, 201 bp, Homo sapiens
acatgtttgaagtgaattaaacggagttggtaaaggtagagaaaaaggaacagggaaaaacaaatgctgtatgatttcccttatatgaagtacttagggtrgtcaaaatcatagagaccttaagtagaaaggtggttaccggggatgaggaagggcaatgggaatggggagttagtgtttacgggctatagagtttctgtt

SEQ ID NO: 12911 - DNA, 201 bp, Homo sapiens
ggggactaagagtagtttcttcatagattcttgtaaaggtttagaaagaatgtatccaagccgagtgcagtggctcatgcctataatcccaatgggtggaytgcttgagctcacaagttcgagaccagcctgggcaacatggtgaaaccccatctataaaaaaatacagaagttacaggcgtggtagtgcccccctgtgat

SEQ ID NO: 12912 - DNA, 201 bp, Homo sapiens
agctttttgttatggctaattacacttcaaaacttgtacctatatgaaggagtcagaaaattgccccagtaattttttcctaatgttttttaacgagatgyttataaatggtatgaagaaggatggaaggaggtagcacaagatttaaatttttccccagagataaagaaaaaggaataagttcaaaagaataacctcttc

SEQ ID NO: 12913 - DNA, 201 bp, Homo sapiens
cacacttgaattgacatttgcaggagaatttcactagagcagagaggaccccccctgccccaaacagaaaaaccatgttgtacaacagtagttaaagaaayttgggctggacgggcacaggggctcatgtctgtgatcccagcactttgggaggccaaggcaggaggatcacttgtgtccaggagtttgagacgagcctgg

SEQ ID NO: 12914 - DNA, 201 bp, Homo sapiens
ctattctctacccttactcaactcctccatcctgtctgggagactcaacaattcctcttccaggctccatgtcctcctgccctgcctaaacttggtgacasctctagctcctgggaatctggtgatctctattcacccaccactacctatttcatttgctctgcctgaggtgtgttcactaacaggttgttgaatatggct

SEQ ID NO: 12915 - DNA, 201 bp, Homo sapiens
ataagcagactcatctaaaatccatttcaaatagatgttgttgtggatgatctgggaacatggagggtaagagagagtataacaagtttcagagaccctakcaactcacaagatctaggctgatacactaccaagtctagacccaaaatccttaactagggttgaccagcttgtaggagcaaagccagtatttgatcctaa

SEQ ID NO: 12916 - DNA, 201 bp, Homo sapiens
ggggattttctgaatgttcttgtttatacaatgtgcagaaaatttttgcacagagagtcatgcttttgttggcaaaagaaagtgagcacttgctgattttytggcaatcctaacaaaaatactgaggtgtatttatactctgggggccaaaacgaatttcaaaatgacagtgcttagctctgtaaccatcccagctttcct

SEQ ID NO: 12917 - DNA, 201 bp, Homo sapiens
gagaagggaaggtgaagggaaggcgaagggaaggtgaagggaaggctaagggaaggtgaagggaaggctaagggaaggtgaagggaaggctaagggaaggyaaagggaaggctaagggaaggcaaagggaaggagaaaggaaggcagaagggaggaaagaaagaaggaaggaaagaagaaagggagggagggaggaaagaa

SEQ ID NO: 12918 - DNA, 201 bp, Homo sapiens
agagagagagggagagggagagggaggagaaggagaagggaaggtgaagggaaggcgaagggaaggtgaagggaaggctaagggaaggtgaagggaaggckaagggaaggtgaagggaaggctaagggaaggtaaagggaaggctaagggaaggcaaagggaaggagaaaggaaggcagaagggaggaaagaaagaaggaa

SEQ ID NO: 12919 - DNA, 201 bp, Homo sapiens
gagaggtcgaggcgagcacatcacttgaggtcagaagtttgagaccagcctggctaacatgatgaaacctgttactactgaaaatacaaaaaaaaaaaaaagttaaccaggcgtggtggcatacacctgcagtcccagctacttaggaggctgaggcatgagaactgcttgaacccaggaggaggaggttgcagtgagccg

SEQ ID NO: 12920 - DNA, 201 bp, Homo sapiens
ttctgcatctacaaaatgggaataaaagcaacaacttcggagagttgttttgaggaataagtgtgacaatgtatataaagaacttaggccaggtggctcakgcctgtaatctctgtactctgggaggcaaagccaagaagatcacgttaggccaggagttcaagacgagtgtaggcaacatggcgtgatgctgtctcaaaa

SEQ ID NO: 12921 - DNA, 201 bp, Homo sapiens
aaagaaagcagataactctgcttgcaacaaaggaaaggtgggtgaacggtttctgttaaatgacactttgaccatgtggtactcttgtcagtttcagatgrgattccacttgctccctgtccctccctttcacctttcccctcactttcccttagatacctgccaaagttcacttggtgatattaaaagacacccaccttc

SEQ ID NO: 12922 - DNA, 201 bp, Homo sapiens
aaataactaaattgtgttgctgaaatcattgttataatacctcctaaatatctttattattataatttgccttgatgctcatgaagaaaaataccataaartattcatttttcaggtcacacaatgtctttttataatagttaataattataaaagttataatactcataatttctaattgctaaatgtattaaatactta

SEQ ID NO: 12923 - DNA, 201 bp, Homo sapiens
taataattataaaagttataatactcataatttctaattgctaaatgtattaaatacttaagtactaggatttgtgctattttacgtacatctcctttacygttcataatgattctacaaggtaggcggtattatctccattttaaaataaagtctgagagggatgaagtaatttgccccaagtttcagagtatatcagtc

SEQ ID NO: 12924 - DNA, 201 bp, Homo sapiens
gaaggtcttcagggacaataacaagcatggagctatcatctcccatgataacaacgctttcttctggaatacttcctgaaggacctgcctgaggctgtttyacagttaacatatatatatatatgtaacttaaaaaaaagtatatatatatatacacacacacatatatacacatgtaatgtagaatgagtatactctaaa

SEQ ID NO: 12925 - DNA, 201 bp, Homo sapiens
cctgctgccacccgcatcgactcttccaacccgaaccccctcatgttctggctccatgggatacagcttgtggcactcaactaccagactgatggtaaggrgcctgcatgctcacctcgctcctttgcatcttacatttcagtaaatgcagtttgacagcattttttcaaaggggcaagattccagactggggcacaccat

SEQ ID NO: 12926 - DNA, 201 bp, Homo sapiens
gtcaacacacccccgaaattttttaactgaccaccctgaagaaaacaagcaggctttaacttgagcttgctcaccaaaatcactcaagtccttccagctgyatggccccagtctccaaaataaatccccttcctctgctggtctgaggctcacttcagcctccccacgtcctaggctttgaactcctgtgacttttaacct

SEQ ID NO: 12927 - DNA, 201 bp, Homo sapiens
gaaggggcctgtaaggtctcctggtcctgccccttttttaatgcagtttttcaaataccaagctgctcttgacaaagccatgcccggtttatgtttaaagytctttttggagcagggatttcctaacactgcccagttaacctgtctcactacgcagttgttcttgcagtcaaaaggtagtgtcactccaaccactttgca

SEQ ID NO: 12928 - DNA, 201 bp, Homo sapiens
cttctgatacttaatgtataaggtgcattgtaagtaatactgaatccaaactaacctatatacactacctccttgctatacaccttcactctgggctcagrggcttgccttctatagggtgagggttacagtgagagttttgctgttgctctatcctatatattatagcataaagtgttctcttcttcgttcctttgagat

SEQ ID NO: 12929 - DNA, 201 bp, Homo sapiens
gagcagctgctccctcctttcctaaaacagatcctagccagaattttccctgaagggctcttcctgccagcttcctctcttctaggaagcagaggaagttytcttcctttggcttctccctctctggccattcctaatgaagacaaatagcaatggcaccattatttctcctgttttccttgttggggcctcccttctaga

SEQ ID NO: 12930 - DNA, 201 bp, Homo sapiens
agttcgagaccagcctgtccagcatggtgaaaccccatctctactaaaaatattaaaacaaaatagtggggcttggcggtgtatgcctgtagtcccagctrctcggaaggctgagcgggaagcagaggttgcagtgtatcaagattgtgccactgcatttcagcctgggtgacagagcgagacactgtctcaaaaaataca

SEQ ID NO: 12931 - DNA, 201 bp, Homo sapiens
atacactacctccttgctatacaccttcactctgggctcagaggcttgccttctatagggtgagggttacagtgagagttttgctgttgctctatcctatrtattatagcataaagtgttctcttcttcgttcctttgagataatgatttcttgtctgatccaccctcagcctggttgtcacagctgggtagtgcccccag

SEQ ID NO: 12932 - DNA, 201 bp, Homo sapiens
tatcaagattgtgccactgcatttcagcctgggtgacagagcgagacactgtctcaaaaaatacatagctaggggccgggcacgatggcttatgcctgtawtcccagcactttgggaggccaaggtagatggatcacctgaggtcaggagttcaagaccagcctggccaacatggtaaaaccccatctgtactgaaataca

SEQ ID NO: 12933 - DNA, 201 bp, Homo sapiens
gattgtatcaatgttaatttcctggttttgacaattgtgctatgattatgaaagatgctaacattagaggaagctgagtgaagggtgtacaagaactctcygtactgtcttttgcaacttttctgtaaatctaaaattacttcaaaataaaaaaaaattgtaagcagtgagctcagagagattgagtcacttgtctaagta

SEQ ID NO: 12934 - DNA, 201 bp, Homo sapiens
ctgggtgacagagcgagacactgtctcaaaaaatacatagctaggggccgggcacgatggcttatgcctgtattcccagcactttgggaggccaaggtagrtggatcacctgaggtcaggagttcaagaccagcctggccaacatggtaaaaccccatctgtactgaaatacaaaaactagccgggcgtggtagtgcatgc

SEQ ID NO: 12935 - DNA, 201 bp, Homo sapiens
cccaggaggcaaaggttgcagtgagccgagatcgcgccactgcacttcagcctgggcgacaaagtgagatactatctcaaaaaaaaaaagaaaaagaaaawtatatatatagatagatagatcgaatagatcgataagagtcaacagtggaagcaccatttttcaattgttgaaaagaatttccaggctggaaagtgcttg

SEQ ID NO: 12936 - DNA, 201 bp, Homo sapiens
taaaaacaagataaagttaaaagggagagaaaaaattgagataactgatggtaatgtgaagtactaaaaatggcaaaattagaaaaataaagtgatgacaagaggatttttcatataaggcagctaagtgttttcaaatgtgcatattgtaccagccaacataataaattgagtgtgttaaactcaatttttccttctcaa

SEQ ID NO: 12937 - DNA, 201 bp, Homo sapiens
ataaaaacaagataaagttaaaagggagagaaaaaattgagataactgatggtaatgtgaagtactaaaaatggcaaaattagaaaaataaagtgatgacaagaggatttttcatataaggcagctaagtgttttcaaatgtgcatattgtaccagccaacataataaattgagtgtgttaaactcaatttttccttctca

SEQ ID NO: 12938 - DNA, 201 bp, Homo sapiens
tgaacctgagaggtggagcttgcagtgagccgagctcacgccactgcactctagcctaggcaacagagtgagactccatctcaaaaaaaaaaaaaaaaaaagatttttgaaactttttttcaaatgaagtaaatggttaaaacgctatctttaatttttttttaaatgattcaggcaggtagtttctcctagtggtagttt

SEQ ID NO: 12939 - DNA, 201 bp, Homo sapiens
gaactaggaattgccagcttagtaatctttttaagacaaaaccattttagcattattcctttgctgaaaacaaaccagcgaaaacaaaaacaaaaacaaaacaaacaaaaaacaaaaaaaagcatcaaggggtgccctcctctgatgggtgaaatctccttgctttaacattccaggtctcctttatcaggccagctgacc

SEQ ID NO: 12940 - DNA, 201 bp, Homo sapiens
ctaatgatgttgagtatcttttcacctgcttatatttgtatatcttctttggataaatctctgttcaaatattttctggcaatatttctgacaatgaagcrtgacattaagatataatctcattcttggctgggtgcagtggctcacgcctgtaatcccagcactttgggaggccaaggcaagtggatcacctgaggtcag

SEQ ID NO: 12941 - DNA, 201 bp, Homo sapiens
agcccaagaatttgcagttccaacaaactcctgggtgaggaggatgatgctggtctggggaccacactttgaggaccatagctctaagtcttcaattatttctccactgtgccctttctccattgcttgcagcatgctaagcagtgccctgtgctggggacaaaatgtttattaaagcttggtccctgttccagtggggaa

SEQ ID NO: 12942 - DNA, 201 bp, Homo sapiens
gatcatgctcacttcaatgcaaaacttgtttcccacatgagctagatgtttcattttttcccctacatcttggcaaaataagttataacaagtcttagacrgcaaaaaggtttgtcttagatgcattgtggagtttgttttggctccagtttttgaacttttcacagaaatgaataaatgaccaagatgtaaatcattaag

SEQ ID NO: 12943 - DNA, 201 bp, Homo sapiens
agctcttaagtctactttttatacaatagagcttcataccattattctgtatataatcttttcaccaaaacactgtcgcctgattgtttcaacaaaagacctctttgttttgatagccaagaaaaaccttaagctcagtagagacatgagagcaagctttttaaattacaaaatgtaagtgctaaaaccatatttttggaa

SEQ ID NO: 12944 - DNA, 201 bp, Homo sapiens
tataacaagtcttagacagcaaaaaggtttgtcttagatgcattgtggagtttgttttggctccagtttttgaacttttcacagaaatgaataaatgaccragatgtaaatcattaagcgtgagtcagttttgtcaagaaaaatgaccctgtgtgatggaagtcagcaggaatggagtcagcatgacagacaatgtgacgt

SEQ ID NO: 12945 - DNA, 201 bp, Homo sapiens
taaatgggtatgagacttaacttggaggtgaaaaaaggacctaaaattgattgtggtgtaactatattaaaaactattgacttgtgtactttaaatgaatraattgtatggaatgtgaattatatctcaataaagctgctgttaaaaaaaaaaaaaagccaagggttccttttggcatgaggacttcacactgaataagta

SEQ ID NO: 12946 - DNA, 201 bp, Homo sapiens
ggtcatctataaagtttctgtttgttttatctgttgtgaatttccatgatttttgtccccctttgatggctaatttattttccatcctgtattagagatayatatttaataaaatttaaaatattcttttttaaaaatgcatgaagcacaaggaaggtgaatgggtgattaacaagatagtgattcagattgaatattaaa

SEQ ID NO: 12947 - DNA, 201 bp, Homo sapiens
attatgctacattgagagatcctgtagttttccagtcactttcctagttaacacacaatctcattctcctatgctcttgaatatgaatgagtcttgcaaayttaaggctgtataaaaaaaaaaaaaagcaagttgtttaaaacagggatccccagcctttttagcatcagagaccagtttcatggaagacaatttttccac

SEQ ID NO: 12948 - DNA, 201 bp, Homo sapiens
gattggatattattttggcattttatagtgcttgaataataagtttattattttaaatgtttgtagtgccgccgaaggtttataaaggtttatggctgtcrcagttttgctttcatgacctgttgttgatcgtatctttgatttatgtgaggcctagacaggaacagaatccctaatcatgaaatttttcctatgggaaaa

SEQ ID NO: 12949 - DNA, 201 bp, Homo sapiens
aaaagcaagttgtttaaaacagggatccccagcctttttagcatcagagaccagtttcatggaagacaatttttccacagactcggggtgtgggggtgggrgcagatggttttcagatgaaactgttccacatcagatcatcaggcattagattctcataaggagcgtgcaacctagatcccttacatgcacagttcacag

SEQ ID NO: 12950 - DNA, 201 bp, Homo sapiens
gagcagaagcagatgatttagaggctgcatatcataaggggagggtgtagacatggattatttttaaatattgtcctccagtctgtgtagcaggaaaaacraatcacattagaataactttaagcccagaactgaagaacattagagtttgtgtaaacacatcaggcattttgtgagtggttgataatgcaacctctggag

SEQ ID NO: 12951 - DNA, 201 bp, Homo sapiens
tatgtgaatggtgtctacataatgcagagtattttaatgggtagaagaccatcaaggcaatggtatgtttatctatcattatgtgcattgtttcagaggtrtagcagggttacactgatttgtgcacactttttcacttgattggaatgatgatttttaaactatagccccagatgaagttctgggaccatgtccagggga

SEQ ID NO: 12952 - DNA, 201 bp, Homo sapiens
atttattgagcaccttgcatgtgccaaatctcatttactgtatccacacccctataagatgtacattatatggctcagtagttaagattgggaacaatggktgaggccatctgggctcgatttatagcatccaccacttactcgttatgtttcttgggtgttttcactttttctgcttcagtttcctcatccataaaaatg

SEQ ID NO: 12953 - DNA, 201 bp, Homo sapiens
gcatatagtagtcatttatcaatctgtgggacgaatgggtgattatctctttttcatgctggagcttagggaaaattgatgcaaagttcttttgaactttmaatttataaggtgatacttaagcgacaaagtaacaagctatattggctttctttgttgtttgttttacagatctccctttacatttaaatgctgcaatgt

SEQ ID NO: 12954 - DNA, 201 bp, Homo sapiens; identical to SEQ ID NO: 1987
  misc_feature (1)...(201): n = A,T,C or G, or insertion/deletion polymorphism (see Tables 1-2)

SEQ ID NO: 12955 - DNA, 201 bp, Homo sapiens
atacagtgagcaacctttcatgttaataactatacatgtacattaccatttttaccagctgtgtattattccattctatacttacacttacagtcataccrtaaattataaccaatcttccattgtgggaatgttctattatcactaaagctgctctaagatggaacatttgtaaaacagggactgttagtctgttagtgc

SEQ ID NO: 12956 - DNA, 201 bp, Homo sapiens
gtgagcaataggctctgctggcgatgcataacttgcacctcagtgcttggcagatgcagaagctgctcccttgagaatggaagaaggacactgtagaaagkgccatagttgcagaatctgcttttttttttttccagagacagtgtgtctctgtcacccagtgtcactctgtcacccaggttggagtgcagtggtgccatc

SEQ ID NO: 12957 - DNA, 201 bp, Homo sapiens
gggatcgatcacacaagcaaatttttgacttcataacctgtcaccacccacaccacttccaggcactcttttgtgtaacagacagttgatatctctggctrgaaagtgattttcaaggggccataagcaggttcacttttttctatgtcctaagagggcagtttttgcttgttgggtggttcttggcaacaccattcagca

SEQ ID NO: 12958 - DNA, 201 bp, Homo sapiens
cacccagtgtcactctgtcacccaggttggagtgcagtggtgccatcctggctcactgcagcctcgaccttcctggctcaagcaattctcccacctcagcytcctgagtagatgggactacaggtgtgtgccactatgcccagataatgtttttctatagagatggggtctcactatattgcccaggttggttttaaactc

SEQ ID NO: 12959 - DNA, 201 bp, Homo sapiens
aaattccacttgtcagtccccaggaggaatagtaaaaattatatcttcctttggtttggttctcttgaggctggacattccccatatcttcagaacttacrtcatctggcaaaaggtaaaaatggggcttcctcatctgttctgaacagtgagtctcttccttctctcaattgggtaattctccgctcttaattcctgcta

SEQ ID NO: 12960 - DNA, 201 bp, Homo sapiens
tggctagagagcccctgcaaggcactgcccactcagtagtgatacttactgtgaagggccgtgggtctagactgaggcatttacacttggttctggaagagaggaaagaagccaaaccagttttcctataggaaagatctctagaagtggatcaaagaatgtacactttttgaatttcgatgggtagtactcagttgcctt

SEQ ID NO: 12961 - DNA, 201 bp, Homo sapiens
aaaaagtaaattaatgaatataaagtgattagaacactgtccaaaaaaagtggagatggagcgaagaaggcactcagaaatggcaagaacaaaggcttagmtgcaggatatgtctcaggatgggggctggaggggtcatgtttggcaggagcagggaacatacagggggccttgagaaatggagctggaatggatgtcctg

SEQ ID NO: 12962 - DNA, 201 bp, Homo sapiens
cccaaatacccactccctgggagactcagcaagaggtggcagtgggtattcagttgtacacagcaatggagtatgtagaaatctagaaattcgttcactcwctcatgagacatttattttccagaaaggtgtttggcatcagaaaaatgtggcaataggaagcagggttccttccagctgcagggtgggattcagtgggag

SEQ ID NO: 12963 - DNA, 201 bp, Homo sapiens
ttcataaaagagaaaatggaaggcagtagcatggtaatgtaaaagcacaggcttttgatttggctcattcctactttgcaggtgtgtaaccttgggcaagstagtttactcactctgaatctcacctttctcatctgtaaaatggcagcagtattagtaccagccttgtagagctgaaaggataggataagcagcgtccct

SEQ ID NO: 12964 - DNA, 201 bp, Homo sapiens
cactgtccaaaaaaagtggagatggagcgaagaaggcactcagaaatggcaagaacaaaggcttagctgcaggatatgtctcaggatgggggctggagggktcatgtttggcaggagcagggaacatacagggggccttgagaaatggagctggaatggatgtcctggtttgcaggtgcattgggccctaggtcagggcaa

SEQ ID NO: 12965 - DNA, 201 bp, Homo sapiens
aaagtgcactatagagtttttttaagttagaaaaaaatgtgttctctgatcctaattttgtgaatattgtgtgtgtttatagaaaaatatgaaatgtaacracaaaaacattagcagagattacctctgggtatgagattattattttaaattttcttcttctttttctttttttttttttttttttgagacggagtttcg

SEQ ID NO: 12966 - DNA, 201 bp, Homo sapiens
attatagaaattaaatccccagatttgagtggggacacaaccaaaccatatcaccaaccataaaccctacctgattgtctcaactgattgccctgggcacraaatcacatgatggttatgaagacaggctgaaaagatgcacaacttaccatcgtaaagagatactgtgtcaacaataaaggggaaaaattccttattgaa

SEQ ID NO: 12967 - DNA, 201 bp, Homo sapiens
aacctcctaattttctttttcttttgtagagagagggtcttgctctgacatccaggctggagtgcagtggtgtgatcacagctgtaacctcaaactcctgrgctcaagttatcctcctacctcagcctgtcaagtagcggagactacaggcgcacaccaccatgcccagctaattttaatgtttgtagaggtggtggggga

SEQ ID NO: 12968 - DNA, 201 bp, Homo sapiens
gttttggctccagtttttgaacttttcacagaaatgaataaatgaccaagatgtaaatcattaagcgtgagtcagttttgtcaagaaaaatgaccctgtgkgatggaagtcagcaggaatggagtcagcatgacagacaatgtgacgtgctgtggaagaaataaaggcagccctaaccaggcagtgtccccagggtaaggt

SEQ ID NO: 12969 - DNA, 201 bp, Homo sapiens
aaacaagccaaacgttacctctttaacatcagaatggactaattcttagtgtgttacaaagatggttacatatagaaatatctatagatacacatatatamacaagttagtataacatacatatattcccttgctctgtcatctgagagggcatagaaacaactgacatcccagtagcaacaaggacaccttgtgctcaga

SEQ ID NO: 12970 - DNA, 201 bp, Homo sapiens
agtgatgtgctcaaggccaaatcctagtcaatggaaaagtctgagacccaaattcaagtctttttgaccattggccctgtgtgtgtgtttgtgtgtgtgtgcgtgcgtgtgtgtgtgtgtgtgtgtgttacctccatgctaagctgcttctgcggtagctctggagagcctcataaaagagctaaataaataaaaggggta

SEQ ID NO: 12971 - DNA, 201 bp, Homo sapiens
cctggagcatctggtagtgccaagcagtaaggaggtgcttcaacggaaacacaagtgatggggtgtgtcaaagagataagataactgaaagagctcccaasagccaaagctggagcaacttgcaagacaaagtaaaggaaaaatatattataaccaaaagtataaaataaatattcttgactctatgctgacatgattgaa

SEQ ID NO: 12972 - DNA, 201 bp, Homo sapiens
aagtgatgtgctcaaggccaaatcctagtcaatggaaaagtctgagacccaaattcaagtctttttgaccattggccctgtgtgtgtgtttgtgtgtgtgtgcgtgcgtgtgtgtgtgtgtgtgtgtgttacctccatgctaagctgcttctgcggtagctctggagagcctcataaaagagctaaataaataaaaggggt

SEQ ID NO: 12973 - DNA, 201 bp, Homo sapiens
aagaaaaatgccgtgttcaggccgagtgcagtggctcatgcctgtaatcccagcactttgggaggccgaggcaggcggatcacgaggtcaggagatcgagrccatcctggctaacaccttgaaaccccatctctactaaaagtacaaaaaattagctggacgtggtggtgggtgcctgtaatcccagctattcaggaagct

SEQ ID NO: 12974 - DNA, 201 bp, Homo sapiens
cagcctagtgagcagttaagagctgggctctggaaggagtcccggctccaccgttaactagcagtggagccttcagcaatttacttaatctccctaagccwcagtttttctcacctctataatgagaatcatgaaaataacacctaatctagagagtcatgaggattcggtatctgaaaaagcaacatggcacatagaaat

SEQ ID NO: 12975 - DNA, 201 bp, Homo sapiens
aatgaggaaagtccaaagtgtcttttcctatttggactgaaaaattaattatggctttgggaataaaggtagtgagcatcatatctcatttctagttaacyggtagttccctttacatataaagagcaattacttttgaagactcaaaaaatatatagtcttaaggtgtgcttcatattatttccccatggtttcattttt

SEQ ID NO: 12976 - DNA, 201 bp, Homo sapiens
ttttctttctttctttttctttttttcttttttaagctagaaaaaaggaatgaggaaagtccaaagtgtcttttcctatttggactgaaaaattaattatkgctttgggaataaaggtagtgagcatcatatctcatttctagttaaccggtagttccctttacatataaagagcaattacttttgaagactcaaaaaata

SEQ ID NO: 12977 - DNA, 201 bp, Homo sapiens
ttgcagaagagatttgcagtttttcatgtgtaagaaccgtgcatgaagattttgccagctgctctggtctagttagatgattaaacatctgcttcatcatygaagctcattgtaaaagaaactgatccatctaaaaaagaagtcatgcccatccaaaggatacgtcattcaaataattttgtagataagtatatgcatccc

SEQ ID NO: 12978 - DNA, 201 bp, Homo sapiens
ccagcctttaagtccttgcctgagctagttccctcttcttgtcatatctctatttactccacgtattagtccattttcacactgctataaatatactactsgagactgggtaatttgtaaacaaaggaggtttaattgactcacagttccacatggctgcagagggcttaggaaacttacaatcaggcggaaggggaagca

SEQ ID NO: 12979 - DNA, 201 bp, Homo sapiens
taaagttttatgaacactgctttttgtttattaaatgttttctctctacctaaagtctaagatattcacttatattttctgctagaagctttaaagttttrtttttgacatcgaattccctaacccatttaaatctttgattttgtatatggtgtgacgtaggcaggaatccattgtcattttctgtgtcaatattcattt

SEQ ID NO: 12980 - DNA, 201 bp, Homo sapiens
tcagaggagctggggaggtgagggacacccaaatgcaatttaaatgtataccacaacaagctgggcacggtggctcacacctgtaatcccagcactttggraagccaaggcaggctcaggagtttgagaccagcctggccaacatggcaaaactccatctctactaaaaatacaaaaattagcagggcgtggtagcaggca

SEQ ID NO: 12981 - DNA, 201 bp, Homo sapiens
aacttctgtgttcaaaagatcctccctacttcagcctcccgagtagctgggactacaggcatgcatgcctggctatttttttttatttttagtagggatgrcatctcactgtgttgcctaggctggtcttgaactcctgagctcaagctatgctcctgcctcagccttccagaatactgggattataggcatgagccagtg

SEQ ID NO: 12982 - DNA, 201 bp, Homo sapiens
aaagttaaaatagattatatatctttatttatttaacaaaaaatcatgtaattataaggccatgattgcaaagttaattaaatgattggggcaagcttcaraagccagtcctttctggccctggttgcagttttggcgccacctggtggcagttatctattctgactttaatcaatgggtacaattctagttggaacttcc

SEQ ID NO: 12983 - DNA, 201 bp, Homo sapiens
cttcaaaatggtgattactatgtgaattcatgtcaaaaaaaacttcagattttaaattttagttgttttgaagtttatataaaggtacactgtgtacaatmttttgggacttattttacactgtattttattcctaagattcatttatacttttgtaggttgctgtagttcatttgttttaattgctgtattatattcctg

SEQ ID NO: 12984 - DNA, 201 bp, Homo sapiens
ccaccgttttctttcacaggagtccatgggatttattccaaaaataatattgatttctgaggcccttttgccattttgttttagccagttcttttcctccygccttttatgacttcacataaaatttaaagggatataattgctctcaatagaattgaaattttcctgttgtgttttcaaagcatctattttgaaaattgc

SEQ ID NO: 12985 - DNA, 201 bp, Homo sapiens
ttggatctctataaagcattgataataatggatttaggaagtgactctgcagtgacaatgtcatggtcccagaaatacctaagccagtaggtactgaccayctctcaaggatcctacagaggacaagtaggaggcctactctgatcctctcccctcctctaaatcacgcttctctgagagtttacatggtttcagagaagt

SEQ ID NO: 12986 - DNA, 201 bp, Homo sapiens
ttccttgaaggttaagtatatgtaagatgtttaatacaatgcctagcaaatggtaaacattacttaagggttacttgctgttcttactgtatgataacttrgttaatattagccatcttattcaactgactttgaattccaaagggcccagacttacatttctttaacttatctttgtctcccctaaaagtacagcacagt

SEQ ID NO: 12987 - DNA, 201 bp, Homo sapiens
caagtggaaaggtgcaggaaaattcatccttaagctaaaggagcaggtgcaggtaaagtttaaagttattttgctctgttcttaagttatctgatacccataattacactgtagccagatctggaagctggtgaaatttaggagaaagttcctgagtcaaggaatggagttaggagaaaattgtttggctttgttttcact

SEQ ID NO: 12988 - DNA, 201 bp, Homo sapiens
tctgcctttatgacaatgaggaacttctgatataaaactgccaaactgcagaaactcacaattaaagaactcagtgatgcctcttcccagagccaaatttkacttaaaacagcccaaaagaaggcccaatacattgagatcatgtttccacatttaaagagcaactcctaaaataactgatgtcctatattacactctgca

SEQ ID NO: 12989 - DNA, 201 bp, Homo sapiens
tcaactggatgtgaatctccttaactctacaatcatccaacaaatgtttctccattttgtgtctcctctgtgaaacctcttcctaaaaccaagatacatarttgatatgcaagtcaaattatcttatcaaaagggaaaaaaacttaatttgacaattagctacttgaggacatctaatttctctcgcattcgttgatatga

SEQ ID NO: 12990 - DNA, 201 bp, Homo sapiens
taagtgatgtgctcaaggccaaatcctagtcaatggaaaagtctgagacccaaattcaagtctttttgaccattggccctgtgtgtgtgtttgtgtgtgtgtgcgtgcgtgtgtgtgtgtgtgtgtgtgttacctccatgctaagctgcttctgcggtagctctggagagcctcataaaagagctaaataaataaaagggg

SEQ ID NO: 12991 - DNA, 201 bp, Homo sapiens
ttaagtgatgtgctcaaggccaaatcctagtcaatggaaaagtctgagacccaaattcaagtctttttgaccattggccctgtgtgtgtgtttgtgtgtgtgtgcgtgcgtgtgtgtgtgtgtgtgtgtgttacctccatgctaagctgcttctgcggtagctctggagagcctcataaaagagctaaataaataaaaggg

SEQ ID NO: 12992 - DNA, 201 bp, Homo sapiens
tctgtctaaaaacaaacaaacaaacaaacaaacaaataaacagactagagatatggaacagaaagaaagttctaggtcagaattcaggttaatatccaaaragttgggatttaagaaccacagttctggaagcagaggacagacatttgaatagcggattattttgacagcatctgagacaatcccctctttttgaagcta

SEQ ID NO: 12993 - DNA, 201 bp, Homo sapiens
ccatcttggctcactgcaacctctgcctccgaggttcaagagattctcctacatcagcctcccaagtagctaggattacaagcccataccatcaagcccasccaatttttgtatttccagtagagatggggtttcaccacgttggccaggctggtctcaaactcctgacctcaagtgctccgcccgcccctcagcctccca

SEQ ID NO: 12994 - DNA, 201 bp, Homo sapiens
tcacccttaaaggaaaaggtgtcccttggcctcttcaaaacaaaacccctatctctgcttctgattttcctccccaaccctcaggtcctctaggaccagamcctgttacctcagatattctctccttcttcttgatctctgctggatcttcctaacatactggttagtgacccggacaaccatgagactctgtcataatca

SEQ ID NO: 12995 - DNA, 201 bp, Homo sapiens
atttcccaccccagcttctcacccaactcctgccttcacccgtcctggattctggacctttgtcttccctggtcactggaacctgattgtctttgtttcarctgtccaccaatttggtcccagactcttggattgcactggattggtgataccatttattccttttcctccctttgacctctcggctctggggccatagct

SEQ ID NO: 12996 - DNA, 201 bp, Homo sapiens
agctctgcctcctacttgttataaccttgggcagtgtacttaatctctctgattctcatttcttcacccataaagtattgatggtaatgatacatactttrcagagttatttatggatcccttctcagggcccaacgtaatgagtaacaaatttatggcctttttacttcaagttgttttaggatccatagagatactcca

SEQ ID NO: 12997 - DNA, 201 bp, Homo sapiens
gtgatggggtgtgtcaaagagataagataactgaaagagctcccaagagccaaagctggagcaacttgcaagacaaagtaaaggaaaaatatattataacmaaaagtataaaataaatattcttgactctatgctgacatgattgaataaataaatgggggagaataaatgaaagagaatagacaaatctgtgcaaaagaa

SEQ ID NO: 12998 - DNA, 201 bp, Homo sapiens
cgtgaatctgggaggcagaacttgcagtgagccgagatcgggccactgcactccagcctgggtgatagagcgagactccatctcaaaaaaaaaaaaaaaaagaaaaatgccctgttcagtaacacaatacaagggcaagcctaaatagattacagagtcacttttaaggagttgaaatttcaactgtgatctgaaagagga

SEQ ID NO: 12999 - DNA, 201 bp, Homo sapiens
gtaggatattggtgcattcctagaatagtgcctcacaaatactaataaattaccagagagaaaatggtaactgtgtggcggagacacctggcagacaccarcctgaccaggtgatcaagattgacatcaccagtgatgcaaaagttccacatcctgtaccctctgcggtgatgcaccaagcagagcccagcttcattctga

SEQ ID NO: 13000 - DNA, 201 bp, Homo sapiens
gtagggtttctgtactaggttccaagggagtagtaggacttcaaaataaatattaatggggatggaaaatgttgagttgccttgcttgtagtttttggctwatttattttcattttatgggaacaggactgtcaactctaaatgcatctggctctagcagaggaaaagaaaggaaaagcaggaagtccatttttggcaaca

SEQ ID NO: 13001 - DNA, 201 bp, Homo sapiens; identical to SEQ ID NO: 1982

SEQ ID NO: 13002 - DNA, 201 bp, Homo sapiens
ccttctttgattcttgtcttgatttttaaccacaatgctatattacctccaggtaaataaagatttttctctagggaccctgacagaatagctataaaacktggtatactgtctcttaagtgctatatgagtggcagggtaatttgggtagtcttagaaggcttcatgggagaagtgggatattagttcctgccaggggcc

SEQ ID NO: 13003 - DNA, 201 bp, Homo sapiens
aaaggtatgaggttaggggcatgcctagtttcaaattctgacctggcacttactatttatagctctgaggcttaatgcaagttacttaccctctctgtgcygctatttatttctaaataattgtacctacctcttagagttgttgtaaagattagtagacttttatacgttgaatgttaacatatgttaacaaacacgtta

SEQ ID NO: 13004 - DNA, 201 bp, Homo sapiens
ccgttgttctttttcttttatttgtgagaagcagagccaaatgcaagacactgagcccagcaggaggggccagacctggcccaggaagagccagtatggtstgggctgcaaggaattgagccaggaaccccaggctcataaaacatcagcactgcaagggccttagagaccatcaggtccaacccttcattttcagaatag

SEQ ID NO: 13005 - DNA, 201 bp, Homo sapiens
aataacattgtcaattctttaagtgctcagagatgcccttttaatttggatgtagccaggttttgtgagttcatttctccccttagtctagtttctttccmtccttcacttggcaggtagttctctctggttaatgagtgtgagtgcttcaaagcatacagagcagccatggggtccctcccagtctctcaggaggatatt

SEQ ID NO: 13006 - DNA, 201 bp, Homo sapiens
ttctcctcttactccatgctctaaaggattcagagtgaggcacctggaggaaaaacagacacaaaactacagaggaggcaacaaaacaaaaccagaggcascctgttttcctttcataaatgctgcaagcgcagtcgaacccgctatggaaacccgacgctttggtttgcctttcagggtgctggcatgaatgaataataa

SEQ ID NO: 13007 - DNA, 201 bp, Homo sapiens
ttataaattaacacttcctcttaagtctaaaattgtgccagtctgtggcttcctgatttaaatcctgaccctgagtttcaggttgagtattctacctcccycagcaatgcctccttgaggtttgatttggaatgaatcttgtgactcactccctgacgctgtgtagtagaagggcagaggatttggctaagcctggaaatg

SEQ ID NO: 13008 - DNA, 201 bp, Homo sapiens
tatttttcagtattaaaaaaagagggagggcagacatgtattcattgcctgctgtatgtcaggcactgtgtctataatttgcatatagtaatttaacaaaktataaattaacacttcctcttaagtctaaaattgtgccagtctgtggcttcctgatttaaatcctgaccctgagtttcaggttgagtattctacctccct

SEQ ID NO: 13009 - DNA, 201 bp, Homo sapiens
aatcaaaagaaggatactatttcatgacatgaaaattatatagaattgaaattgtattgctcattaataagggttagggagcacagccatactcattcttytatgtattgtctgttggtgcttttaccctctaatggcagagttaaatagccacaacagacactgtatgacctgcagaaactaaaatatttgttatcttgt

SEQ ID NO: 13010 - DNA, 201 bp, Homo sapiens
catcctacagaatgtaaggcctgtaatctttgaaattacataaagacatgaaagacagggaacagtagaggaactattccagattggaagagacagaagaraacaaaatgcaaagtgtggtcccccgaccagcacatcagtgtcatctgggaatttgctgaaactgcagaatcttctgctcctacccccacccactgaatc

SEQ ID NO: 13011 - DNA, 201 bp, Homo sapiens
tctagactcactgcaacctctgcctcctgggttcaagcaattctcatgcctcaacctgaggcatgagtatttgggattacaggtgcgtgccactatgcccrgctaatttttatatttttagtagagacagggtgtcaccatgttggccaggctggtctcaaactcctgacctcaggtgatccgcccaccttggcctccgaa

SEQ ID NO: 13012 - DNA, 201 bp, Homo sapiens
ggcaggagaatcgcttgaacccgggagacggaggttgcagtgagccgagattgcgccactgcactccagcctagcgacagagcgagactccgtctcaaaamaaaagctagggaggcttctcttatagtcattggtgcatctatgtgaattgacatcccatgttatgacctcctttacaatggtcttttcaagaaagagcac

SEQ ID NO: 13013 - DNA, 201 bp, Homo sapiens
ctaattggtctcatttcctctgggtttgccacctctgtctgtcctcatctagggcatcccaaacagatctatctaaatatgatcatgtcactcctctgtgraaaaccctccatcagttctccattgctttcagggtatagtttataccagaagtaacaaattcacatgccaggaggatcccaagaagatgatgtgcaggca

SEQ ID NO: 13014 - DNA, 201 bp, Homo sapiens
tatttctgtcacctaggtaggtagctgaatcttactaagcctcagttttgtcatctgtaaactggaaatgacaatactacttgatagggtttttgtgaggwttataaattaagcaaattgcacggcatactataagtgccaatatagatggtggctatcgtgattaatgtgtgtatcacacccttaaaataccaagctgaa

SEQ ID NO: 13015 - DNA, 201 bp, Homo sapiens
atgcaaattttaagcagctggtttccagaagagggatacatgggcaggattgtcttaaaaacccagcaggaagtaagtgtgtctgggtgcagcctacacartaacgactcattatgtgattagccatttaccactcacaacctccctgaaattcagaatttcttgtaattgcaacttggtttatattcttcttaagtaaat

SEQ ID NO: 13016 - DNA, 201 bp, Homo sapiens
atagaaataaatcttttagtccattttaaaggcaaatagttttcagatattctttgttttatattatatactgagctttcatcaactcatagcaaaacttsctttgcagatctcaatttgcctatagtacctcatgggcataaaaatatcctttacaaatttctgacctcttccagaaaagatataaaagcatagaattcc

SEQ ID NO: 13017 - DNA, 201 bp, Homo sapiens
caattttacccagaatggtacaggaagtcattgaaagttgtgatcaaattgcatgtgtccttttctgacttgtttctgtcattcagcccagttgatatgcrtagccatggttgattcttttccattgctctatcttattctactgggtacagcttggccctgtgggtggtttgggccatacatcaaccgtggacagtggac

SEQ ID NO: 13018 - DNA, 201 bp, Homo sapiens
ggaagaaagaaaggaaggaagaaaagaaggaaggaaggaaggaaagaagaagggagggaggaaggaaggaaggaaggaaggaaggaaggaaggaaggaagsaaaataatgtgtgctgtagaaaatgatggtgtcttcaagagcagttttgagggcagaaacattggcaaaagcaatctccttttgaccatattttatattg

SEQ ID NO: 13019 - DNA, 201 bp, Homo sapiens
cattcccttactttccttttatacagtgttattgcatctacatgtattcttaagaactgtatattttaataaatgccactgaattgtacacttcaaaatgrtgattactatgtgaattcatgtcaaaaaaaacttcagattttaaattttagttgttttgaagtttatataaaggtacactgtgtacaatcttttgggact

SEQ ID NO: 13020 - DNA, 201 bp, Homo sapiens
gatcacaaggtcaggagatcgagaccatcctggctaacatggtgaaactccgtgtctaataaaaatacaaaaaattagccaggcgtggtaaaaaaaaaaaagtaataataaccttagttggtgcatagtttctcaggtttgtcctgccttctctgatccattatggttttcttggctgatcctgtcttcatttctttaaga

SEQ ID NO: 13021 - DNA, 201 bp, Homo sapiens
tgttatctaaattgttttttttattatccaaactctgcaccccagagcagtggctgggaatgagattgtcagtccacaaccttgggcacaaggacatcatccaacacagtgatggttgaggaagaggtcgccacatcacaataatgcactccgttatgcacaggtacaagcagggccatcactagggtgagacaagtgagt

SEQ ID NO: 13022 - DNA, 201 bp, Homo sapiens
gtctttcttttttatcctcggtgactttgatcccttttgtctccctcaccctagattgtctctggtcagaatgtgtgccccagtaatagcatgggaagccygtgcattgaagtcgacgtcctgggcatgcctctggacagctgccatttccgcacaaagcccatccatcgaaacaccctgaaccccatgtggaacgagcag

SEQ ID NO: 13023 - DNA, 201 bp, Homo sapiens
ttgttatctaaattgttttttttattatccaaactctgcaccccagagcagtggctgggaatgagattgtcagtccacaaccttgggcacaaggacatcatccaacacagtgatggttgaggaagaggtcgccacatcacaataatgcactccgttatgcacaggtacaagcagggccatcactagggtgagacaagtgag

SEQ ID NO: 13024 - DNA, 201 bp, Homo sapiens
gttgttatctaaattgttttttttattatccaaactctgcaccccagagcagtggctgggaatgagattgtcagtccacaaccttgggcacaaggacatcatccaacacagtgatggttgaggaagaggtcgccacatcacaataatgcactccgttatgcacaggtacaagcagggccatcactagggtgagacaagtga

SEQ ID NO: 13025 - DNA, 201 bp, Homo sapiens
ttacctcacttggtctatatttttgcaagagtttctgttggataatatcctagaagtaagatttctagtacaaagaatacacgtttaaaattttgttttgsctctcaagaaagcttgtgcccatttcaccacccctcacatggaatgagaatgaaagataaagtttctgaaacataggtacatggagattctgccgggttt

SEQ ID NO: 13026 - DNA, 201 bp, Homo sapiens
tttgaagcatcagtggggggaggtgcacccactgacccccacgactagactaactggtggctcagacagcgccctctctcaaaagctgttcttagacagcrgtgctgggcttattttctggcaccatgacaaccaaatggtgcccctttcagtggttctttattctagtggcttgcttaaacacattcagagcttcacatt

SEQ ID NO: 13027 - DNA, 201 bp, Homo sapiens
gtaactcagggggcagcactctcttggcgaaaagacgcctgttggttgcatgcctgttgccatccctgcccattttaaggtctttctacctgtcatttgcygacttccaggagcatcttcttttcagtagccatggttaacaagcttttcccaattctgtattactccaggatatcgacatcttcagctgcgaaaccttca

SEQ ID NO: 13028 - DNA, 201 bp, Homo sapiens
aagcacagtagtttcctcctctcaggagataggtatatccttttagaacagtttatgaaataataacatagtatatgagatattaagctaagaagtttctrcatcaccaagatacaagctcagatttttgctagatttgtctttctttattctgcataaacctattatttactcacattttttctttttaaacatagaacc

SEQ ID NO: 13029 - DNA, 201 bp, Homo sapiens
cctgggcaacagagcaagactccatctcagaaaaaaaaaaaaaaaaacccacagctaataggagcagataaattggcttgttatggatctatcaacatcakcagaagcacagtagtttcctcctctcaggagataggtatatccttttagaacagtttatgaaataataacatagtatatgagatattaagctaagaagtt

SEQ ID NO: 13030 - DNA, 201 bp, Homo sapiens
gagtgcagtggcacaatctagactcactgcaacctctgcctcctgggttcaagcaattctcatgcctcaacctgaggcatgagtatttgggattacaggtrcgtgccactatgcccagctaatttttatatttttagtagagacagggtgtcaccatgttggccaggctggtctcaaactcctgacctcaggtgatccgcc

SEQ ID NO: 13031 - DNA, 201 bp, Homo sapiens
caccagcaatgcaaaagggttctagtttctccatatcttttttttttttttcccggagacggagtcttgctctgttgcccaggctggagtgcagtggcacratctagactcactgcaacctctgcctcctgggttcaagcaattctcatgcctcaacctgaggcatgagtatttgggattacaggtgcgtgccactatgcc

SEQ ID NO: 13032 - DNA, 201 bp, Homo sapiens
caaacccttccttcttatttagcccatcactcctcaaaccctgagaaagctcagcagaaaacctcctcagccttcagcaatacaaagtcatgctatcattkttcaaggatagggaaagccagtcctttgaaacacaatagcagatttccttgaaggggaggagaaatgctttggtgtcttcttattttttttaacagcttt

SEQ ID NO: 13033 - DNA, 201 bp, Homo sapiens
taaatataggtcttctagagctcaggcaccagaaccctgaacccctaaccccaaggctcagtcccttacaaggaaccccaaacccttccttcttatttagsccatcactcctcaaaccctgagaaagctcagcagaaaacctcctcagccttcagcaatacaaagtcatgctatcatttttcaaggatagggaaagccagt

SEQ ID NO: 13034 - DNA, 201 bp, Homo sapiens
gttgcacaggtgaattataactagtttttcccagctcctatgaattacttccttcaaagatgcggatcttaatgatatgctccttttcctgtgttttggtwattacatatgtgtccgttctggttcctcaatcagattgtaaatcgattaaggacaagaaataagttctgcattattttactctccataatgcaagcataa

SEQ ID NO: 13035 - DNA, 201 bp, Homo sapiens
gcattcaacaaatgccagatattgggctaaataatttacatattccatgttgtacaatcatcttaactaccttaggattttgatatgataattaacacttytattgctaagcaaactgatttcctgagaaattatgtacctcatcaaggttacttagctagtaagtgaaataactaagatttaatccaggcagctgacact

SEQ ID NO: 13036 - DNA, 201 bp, Homo sapiens
tttgagcaaagaaattcatcattgtgtggttctgcccatgtatttatttaaccaataaagccttccagtcattctgacaaccaaaaaccctttcccgactrtattagtccattttcatgctgctgatgaagacatacccaagactgggtaatttataaggaaaaagaggtttaaggggctcacagttccacctggctgggg

SEQ ID NO: 13037 - DNA, 201 bp, Homo sapiens; identical to SEQ ID NO: 1988

SEQ ID NO: 13038 - DNA, 201 bp, Homo sapiens
ctgtctgagggtctgtcatgtggttgcagtcaagatataggttgcagatacaatcatctaaagccttgactatagctggaggatccgcttccaagatggcrcactcacatgggtgttgtcaagagtcctccatactttccacagggatctcttcttacaatatggcagcagattacccccagagcatgcgagagaggagta

SEQ ID NO: 13039 - DNA, 201 bp, Homo sapiens
ggtggcaggcgcctgtaatcccagctactcgggaaactgaggcagagaattgcttgaacccaggtggcggaggttacagtgagccaagatcacgccactgyacttcagcctgggtgacagagtgaaactctgtcccgaaagaaagaaagaaagatacacaggaagaaagaaaggaaggaagaaaagaaggaaggaaggaag

SEQ ID NO: 13040 - DNA, 201 bp, Homo sapiens
ggctcacgcctgtaatcctagcactttgggaggctgaggcgggtgaatcacgaggtcaggagttcaagatcatcctggccaagatggtgaaactgcgtctytactaaaaatacaaaaaattagccaggcgtggtggcaggcgcctgtaatcccagctactcgggaaactgaggcagagaattgcttgaacccaggtggcgg

SEQ ID NO: 13041 - DNA, 201 bp, Homo sapiens
tctcggctcactgcaagctccgcctcctgggttcacgccattctcccgcctcagcctcctgagtagctgggaccacaggcgcctgccaccaagcccggctrattttttttggtattttttagtagagacggggtttcactgtgttagccaggatggtctcgatctcctgacctcgtgatccacctgcctcagcctcccaaa

SEQ ID NO: 13042 - DNA, 201 bp, Homo sapiens
tcacccaggctggagtgcagtggcatgatctcggctcactgcaagctccgcctcctgggttcacgccattctcccgcctcagcctcctgagtagctgggaycacaggcgcctgccaccaagcccggctgattttttttggtattttttagtagagacggggtttcactgtgttagccaggatggtctcgatctcctgacct

SEQ ID NO: 13043 - DNA, 201 bp, Homo sapiens
atgctaacctaagacattaataaacggggacttgggtgccaggattatgggaattctctgtactattcttgctatttttctataaatctaaaaatattccrgttgctccacatccacaccagcccttgtcaaaaagctcagtttcttcatttgtaaatgggacagcagtccctaccctaccactcactcaggattgttgta

SEQ ID NO: 13044 - DNA, 201 bp, Homo sapiens
tcacttttatggtgagaactttttaaagtgtattttgtttttataatttcaacttttattttaaattcagtggatgtatgtgcaggtttgtttcatgggtrtgctgtatgacacttgaggtttggggtacaaatgatcctgtcacccaggtagtgagcatagtacccaataggtagtttttcagcctttgcccacctccct

SEQ ID NO: 13045 - DNA, 201 bp, Homo sapiens
aggagaatttcactagagcagagaggaccccccctgccccaaacagaaaaaccatgttgtacaacagtagttaaagaaacttgggctggacgggcacaggsgctcatgtctgtgatcccagcactttgggaggccaaggcaggaggatcacttgtgtccaggagtttgagacgagcctgggcgacatagcgagacccggtc

SEQ ID NO: 13046 - DNA, 201 bp, Homo sapiens
tgaaataaaatccaagataacaagaccctgcatggttttgctcctgcctacttctccaacttaactttatttatttatttatttagaaatggagttttgcycttgttgcccaggctggagtgcaatggcacgacggtcagctcactgcaacctccacctcctgggttgaagtgattgtcctgcctcagcctctctagtcgc

SEQ ID NO: 13047 - DNA, 201 bp, Homo sapiens
aaacatctgacatttatactgcttttctagccccattctatttctcttttagtgaatgtagtgagtggttgctatttcaacccaagcacttggtgttcacrtcttgcttgttccttggtggcttctgtttgttagtttctattgtggcttttgaagaaggtacctgggtttgattaaatttgttacacccttcaattatat

SEQ ID NO: 13048 - DNA, 201 bp, Homo sapiens
cctcccaggttcaagcaattctcgtgcctcagcctcccgagtagctggatcacagatgtgcaccaccacccttggataatttttttttttttttttagtaragatggggtttcaccatgttggccaggctggcctcaaactcctggccttaagcaatccacctgccttggcctcccaaagtgctgggattataagcctgag

SEQ ID NO: 13049 - DNA, 201 bp, Homo sapiens
gaggactttcattgagaagactcttaggggctggcataaagtaaaatccattcttttcttcaaagcacttcctagttccaggagattctctttgcacgtawacagactctccttcccttccaggtagaagctgtctccgtggtttcctctctgcacccactattctgagcccatttcctcctgggactgtcccttcctggg

SEQ ID NO: 13050 - DNA, 201 bp, Homo sapiens
ttgcatggtctcctttttaattcccaaagttcaaaatctccacctccgtatcttgtgccactctagcagttgctgcttaccctaaagccagcaaattacartgacaagaacagaatttctcttatgcttaaaaaaaacttaaataaagtctatacaatataagggtgagagaaggtggcatttccacagacttagataata

SEQ ID NO: 13051 - DNA, 201 bp, Homo sapiens
accatcaggagttccaaagtggcaggactttttttttgtttcctttcttactaaacagagtggtcaggagaagaaaccaacaagaaatgtaacctacctcyagaactcaggaactcaggtacccttaaggatatcagaaacaatgaaatatggattggcagaagcatcttcaccaccatcttcagatgtaattaatgcagc

SEQ ID NO: 13052 - DNA, 201 bp, Homo sapiens
tcctgacagccgcccttccagccttctcctgccttccatagagagatgctatggactcttggtccagagactcaaattcaaggaaaagaagaggcaacatktgcagtgttgatccttgagttgaacaaaggtgagagataagggaagagggtcacaggggctgggtgagaagtaatgtggagagggtgtgatgctggcgag

SEQ ID NO: 13053 - DNA, 201 bp, Homo sapiens
cagtatatgctcttgatgctttaatacaatctgagagcctatgtttccatgcccaagggctctcctgccaactttgcagcctatttgagaagctgcaggaygataagcaaccattagcatcagctgtgctatttgtgatccaaagagactcatccaccgggaacaggaccgagaacactgtatcccagaacattgcatcct

SEQ ID NO: 13054 - DNA, 201 bp, Homo sapiens
agggttgcacatcccataacgttcaggagctcagacatatgaacaagtctgaagctacgacagtatatgctcttgatgctttaatacaatctgagagcctrtgtttccatgcccaagggctctcctgccaactttgcagcctatttgagaagctgcaggatgataagcaaccattagcatcagctgtgctatttgtgatcc

SEQ ID NO: 13055 - DNA, 201 bp, Homo sapiens
aagcatgttagaagaatcacctaacaataagacaatctacactctatgaaagcagaacacaacccaccagagggaatgagaaaaaggaaggggtggaaccsagccaaggaatcttttgccaaggggagaaaaaaaaaaaaaaataaaggccagagaagaaaatgcagcaggtgcgcacaggtttgacacctggtcgaccac

SEQ ID NO: 13056 - DNA, 201 bp, Homo sapiens
tattgtagcttgaattccatggggtctgtccaccttcctaaaacccttttaattattagggaggcattaccaaagttggaatgatctgcagtatatggcaygtcaaacaagaaagcttagcttccacatctacgtggtaaccttggggaaattattaaaccatgctcagtgaaatgcaaggggaagctgataatgatgcct

SEQ ID NO: 13057 - DNA, 201 bp, Homo sapiens
tttgtgatccaaagagactcatccaccgggaacaggaccgagaacactgtatcccagaacattgcatccttggtcttgaaatgaacagcagcttgatttgwttgcaaagcacagtggaagaatttggaaaagcatattgtagcttgaattccatggggtctgtccaccttcctaaaacccttttaattattagggaggcat

SEQ ID NO: 13058 - DNA, 201 bp, Homo sapiens
tttttttgtttcctttcttactaaacagagtggtcaggagaagaaaccaacaagaaatgtaacctacctccagaactcaggaactcaggtacccttaaggrtatcagaaacaatgaaatatggattggcagaagcatcttcaccaccatcttcagatgtaattaatgcagctgttgaatttggttgactatccacctataa

SEQ ID NO: 13059 - DNA, 201 bp, Homo sapiens
aaaaacctgaaaactgaccgggctcagcttgtttattttcgtggacatgtgggctatgattttacagagcacatatgttatattgttctatttctgtgtcycacttgtccacttggcataaccacacatgctggtatttcatagggttgcacatcccataacgttcaggagctcagacatatgaacaagtctgaagctacg

SEQ ID NO: 13060 - DNA, 201 bp, Homo sapiens
aacctaaactgactttgggtgttgtctctcactttttgattccaaccgctcctgattttctgtcttcttcttaactaagacttactgagtgctgttaagtwttcaatggataagctatgtctcaacttttcaataccttgttgcggtggctccgcctgcagtcccagcactttgggaggctgaggcaggaggattgtttaa

SEQ ID NO: 13061 - DNA, 201 bp, Homo sapiens
cccataacgttcaggagctcagacatatgaacaagtctgaagctacgacagtatatgctcttgatgctttaatacaatctgagagcctatgtttccatgcscaagggctctcctgccaactttgcagcctatttgagaagctgcaggatgataagcaaccattagcatcagctgtgctatttgtgatccaaagagactcat

SEQ ID NO: 13062 - DNA, 201 bp, Homo sapiens
tgatcatgtgactaatggctctcgtgaagttcatattgaggtgaatttagagacttcgcatcctttctatgtccctattaatttattggattacaaaaccmggtttccttgtatttcacagaattcatcaagcttattatagatttaaattaatcaatatatgacctataattcaaaagcacacacatgagcctaagctgt

SEQ ID NO: 13063 - DNA, 201 bp, Homo sapiens
agggacagtggttggggaaggttctgggcttccggaaagagcaactgtgccgcgttgtcagtgtagcagctggagagtgtgggaggactttagggagaccrcagagggggagttataggaaacacagcagcactgggaagctgttgcctgctatgcagcaaggccatgaggccctgggccctccagccagtccctgatcat

SEQ ID NO: 13064 - DNA, 201 bp, Homo sapiens
cttagtgacttttctgccctcacaaagccagttagcaggcaatgtagagaagaaagcggaccacctaagtcctggttaactaccttttttctcagaagcargggccgctaagggagagatgtgaaggtcaaggaagctctgagctcctgacagccgcccttccagccttctcctgccttccatagagagatgctatggact

SEQ ID NO: 13065 - DNA, 201 bp, Homo sapiens
gcagctcaattttgtggtaatcctgaggtcacaaataagctgtttttgtgcatgcgactgtatcctttggtgtttgctctatttgtaaactgtgtcagtakgatcgcttgtagcatcttggaattatctggaaatatttttcagagcaacctcagaatgcttttcacaaatgtcattcccttattctttgaggactttcat

SEQ ID NO: 13066 - DNA, 201 bp, Homo sapiens
attaaagcaagatgcaaatacaagaatgaatttgtccattgaaaacattcatttttatgaacagagtaatgtacttcttaatttttagtttggtcacattraataaatgatccataaagtgcatttaataactctgtgttacatagaactgagatccagaataacacttttcctaagaattaaacagtaagaatcatatac

SEQ ID NO: 13067 - DNA, 201 bp, Homo sapiens
gacaaaaaccctgacaggtataaattgtgaaaagttctagtcttcatttttctccccatatgaactcctttgggtgctaatgataagcatgttcattgtaratatggattttgtggcattcactatgtatcgtcccatggcagttagttgtaagtattctcttaacaatgcatatagcttggaaaacatcgcattcagcac

SEQ ID NO: 13068 - DNA, 201 bp, Homo sapiens
gagtctaattgagtaggcaaagagctttctgggcactggatatgtctttggagggtgcatcttcacatccttgcactattactacatgatctttctaaaamtgtgtttaaaatctattttaatattgaaaacagacaccatcactgctgctgcggaaaacaatttagtggttcctccaaagttcaatatagaataaaccta

SEQ ID NO: 13069 - DNA, 201 bp, Homo sapiens
gaacagctggcaaggagtgacacagaataccttgcttctgttaattatctattggtacaaaggcctttttggtacgcagggcgagaagtgggaggtgcctraatgggcaccacagttccctcgatcctattcattttggaaaagtattgacttaaactccagtgggttctaaagacggcctcgagactccagacaccgtga

SEQ ID NO: 13070 - DNA, 201 bp, Homo sapiens
ggtgcatcttcacatccttgcactattactacatgatctttctaaaaatgtgtttaaaatctattttaatattgaaaacagacaccatcactgctgctgcrgaaaacaatttagtggttcctccaaagttcaatatagaataaacctataatatcaactggcagtcctgcttctaggcctgtactccaaagaattgaagac

SEQ ID NO: 13071 - DNA, 201 bp, Homo sapiens
tgatctttctaaaaatgtgtttaaaatctattttaatattgaaaacagacaccatcactgctgctgcggaaaacaatttagtggttcctccaaagttcaayatagaataaacctataatatcaactggcagtcctgcttctaggcctgtactccaaagaattgaagacagggactcaaacagatacttaatattcatagca

SEQ ID NO: 13072 - DNA, 201 bp, Homo sapiens
gatctttctaaaaatgtgtttaaaatctattttaatattgaaaacagacaccatcactgctgctgcggaaaacaatttagtggttcctccaaagttcaatrtagaataaacctataatatcaactggcagtcctgcttctaggcctgtactccaaagaattgaagacagggactcaaacagatacttaatattcatagcag

SEQ ID NO: 13073 - DNA, 201 bp, Homo sapiens
ggacaaatattatatgactccacctaaatcaaatatctaaggcaagttcatagagacagaaaggcatggctcacgcctgtcatcccagcactttgggagtycgaggtgggtggatcagctgaggtcaggagttcgagaccagccagtcaacatggtaaaaccccgtctctactaaaaatacaataattagctgggtgtggt

SEQ ID NO: 13074 - DNA, 201 bp, Homo sapiens
atctaaggcaagttcatagagacagaaaggcatggctcacgcctgtcatcccagcactttgggagttcgaggtgggtggatcagctgaggtcaggagttcragaccagccagtcaacatggtaaaaccccgtctctactaaaaatacaataattagctgggtgtggtggtgcgtgcctataatctcagctactcagaaggc

SEQ ID NO: 13075 - DNA, 201 bp, Homo sapiens
ttggggcctgcacaggtgtctgtcgctcgtcctggcttccagcatcaagagacagacttctccaggctgcatcttctggagactggctcagcaggggcgcrggctcctgctttgtggaatgcacgctccctcagggcccaggggaagggagggatggtgctttgtaattgttgctgttcttgttgatttgcctttgtgctg

SEQ ID NO: 13076 - DNA, 201 bp, Homo sapiens
tgcacaggtgtctgtcgctcgtcctggcttccagcatcaagagacagacttctccaggctgcatcttctggagactggctcagcaggggcgcgggctcctsctttgtggaatgcacgctccctcagggcccaggggaagggagggatggtgctttgtaattgttgctgttcttgttgatttgcctttgtgctgggaattgt

SEQ ID NO: 13077 - DNA, 201 bp, Homo sapiens
tcatacgactgtggattttcctgtggaaagagatgggaagctgggtggctggtcggcgtgttagactttgcttagtgaatctctccaggtgataactgcargggtgactgcaggggcctggcttggcttcgaaagcagtagcagcagcagcggagacggtcctgtggcacccagctgtttaacttccaccgaggcaggggg

SEQ ID NO: 13078 - DNA, 201 bp, Homo sapiens
tcccttcactatagcaaacaggctccttgtagacagtgttcatgagtcttttcaaacttcatttgctttcatttttgagcttcttgaaagtgtaagcctgktaagtttaaattattttccttattcttattttcaaggtgaatgattcttctagttatcaagcagagtaaaactctcctttttaatggtggaaacattagt

SEQ ID NO: 13079 - DNA, 201 bp, Homo sapiens
tagtgcagacggtagtgaccaacacacacaaagcacagtgcggcacaacgcacttcaacgcactgtaatccaccaggtgcggacacacctccttcagcacrcgccccttgttgtcccgtccagcaaaaggacagctcggccacagcaggtgaagccacctgcccaagtgtccagcgcccgctattgggtgaagctgggacc

SEQ ID NO: 13080 - DNA, 201 bp, Homo sapiens
gtgcagacggtagtgaccaacacacacaaagcacagtgcggcacaacgcacttcaacgcactgtaatccaccaggtgcggacacacctccttcagcacacrccccttgttgtcccgtccagcaaaaggacagctcggccacagcaggtgaagccacctgcccaagtgtccagcgcccgctattgggtgaagctgggacccg

SEQ ID NO: 13081 - DNA, 201 bp, Homo sapiens
agtgttttctgcatttttcttgcatcttgccaattttttcatctactgataaatgggactcatttgcaatttttctccattggctcttctttaatttcttycctctgacaacttgttactaacagagtaatggaagtttaatccttagttttccagagtaaaagatacaaaatatctgctcccccactgccttcctttaaa

SEQ ID NO: 13082 - DNA, 201 bp, Homo sapiens
ttggtgtgggagcagtaagtctcttaagtgccttaagcctactggggcacttttatattccatttgcatgcatttctcgaaccatttatgaagggtcctakcttgtggttgtgtagtggtctccatgagcatatgaaaagccttacctgggtgtgggatctatgcagccgtgcagtggggaagggagagaatgcacaggga

SEQ ID NO: 13083 - DNA, 201 bp, Homo sapiens
agatcattgagaaatgaaggcaaaagctcgtagtttgtaatttaggtatacaccaaagtcctagggtaatcagcatacattgtagcctttaagatatgtgrttgtctgtcctggggaggcaatcacttcgctccattgtgatgattgcaaggaaaagaattcgagttttctttaaatctgaaagtaatggttttatcttat

SEQ ID NO: 13084 - DNA, 201 bp, Homo sapiens
gtcccctcccatagccgaccccctcctgtaccccagggtttgattgatatttgcttttgtattgtaattactatttaatatccagccctcctgaggtttgyttcactgcagtcacattgtattgcaagcagaaaatgtcacgtcgcctggagctgttggggtagtgtggttgtggtcctttgggtatttcctggcacacct

SEQ ID NO: 13085 - DNA, 201 bp, Homo sapiens
cctgcagggctttgttccgttttttaatctgccggttggggtccagggcgtatttcatctccagggccaggcaggcggcgggttccacttcactctccgaygttgtgagtatgcatttgccggtgtccttactgaccatggttcctgcattcagaaacagcaacagaggtgtcagtgggacagaaatacacactcaagcac

SEQ ID NO: 13086 - DNA, 201 bp, Homo sapiens
atttcccttttagtttcttctaaaggcagagtaattacagtgaacatctccatgaagctatcccctggcaccatcattggtgcaggtccaagactgaccarcccctctctgctggcaaatcccagctgcacgtcactcagagccagtggtcagcaaactgtggcccctggcgtggttgtgtaaataaagttttgttgacag

SEQ ID NO: 13087 - DNA, 201 bp, Homo sapiens
tggaaagagatgggaagctgggtggctggtcggcgtgttagactttgcttagtgaatctctccaggtgataactgcaggggtgactgcaggggcctggctkggcttcgaaagcagtagcagcagcagcggagacggtcctgtggcacccagctgtttaacttccaccgaggcagggggcccgagcagggacagaagaggcc

SEQ ID NO: 13088 - DNA, 201 bp, Homo sapiens
cttccaccgaggcagggggcccgagcagggacagaagaggccggggtgaacatcaccctttctacagtggctcgatgccttgcttcacactccagttttartgttcgtgtgatacttgctattctctttctagaacattgccgttaggagagggtcccaccctttgtgttcgctccctccctgccctcatctgctctgttg

SEQ ID NO: 13089 - DNA, 201 bp, Homo sapiens
caaacgttttctgccagatgaagtgtttctgctgtgcctgcctctctgggagggaacgtggagcagctccctgagcattcaggctccgtggggaagtcggrctgattttaaatagatcccggttttccaggcttggagctgaacggcatgacggggacggacgtggccgatgtcccaccccctctgcctctcaaaggcagc

SEQ ID NO: 13090 - DNA, 201 bp, Homo sapiens
agtccctcattccagatactagcaggtttacttcgggctagtgagcacatgaggaaaaccatgtatgatgggcccgggtttgattttgcaaaaagatatcraagcagtaaggactccagtgggtaagatctgtggctctgcgtcattatcaataactgcatcaaaaagcacattttgatatcatgcctcagaacgaggaag

SEQ ID NO: 13091 - DNA, 201 bp, Homo sapiens
gttctagaaacattcttttgagatccaccccgttcctctcctggttctcaaggatgctgtcaggcgtcactcatccctgcgggtcccagccccatcctcaygtcgggcccaggcatgtgtggagggcagcatgagtgggatggaggcgggcgagcgattgactcagccacggcgggaacttctgcttctaggctcaggcct

SEQ ID NO: 13092 - DNA, 201 bp, Homo sapiens
ttcccctgtgaagagggctttctggcaggctggaatggtttgttgcaccacagaaatggaagccggaccttccccggccatttctaactacttgtgagagyaaaaggagattcgggggggtctaacaagaatattgggttgcttggagtattgtttccctaacagcttcgttaattggtcacattttcatctctctatttt

SEQ ID NO: 13093 - DNA, 201 bp, Homo sapiens
gtctcaatttcttggatacaccattgtgggttactgatgccacatacagttgattaagtaagggataacatggattagctctctctcaattgataaagggsgtgtgaattcaattagattaatgacccaggtgtctttggtctttgtttcttgtttaatttacttgcagcctgagtgcatgctcaggtgacacgctggtgg

SEQ ID NO: 13094 - DNA, 201 bp, Homo sapiens
tcccagcactttggaaggccaagatgggaggatcacttgagtccaggagtttgagaccagcctggacaacacaacaacacccccttctccacaaaaaatasaaaaattagccaggtgtggtggcgcgcacctgtggtgccagctactcaggaggctgaagtgggaggatttcttgagcccagggggtcggggctgcagtga

SEQ ID NO: 13095 - DNA, 201 bp, Homo sapiens
catagcagcccagtcttgagcctagtagacctgccagccccaagtcggacaggatggagcccaactcatgtggggaggatggttccggctgagtggctgtrccaggtcagaccccacctggagacggtgtcttttctgtcaggacatcagttatgtgacatcttccccatcctcatgttttttagcatctgccacctccac

SEQ ID NO: 13096 - DNA, 201 bp, Homo sapiens
cccatcctcatgttttttagcatctgccacctccactgcccagcaaaactccgcctcctccccctccaaagacaactcgcaagcagacatcggtggactcygggatcgtgcagtgacatcgcaaggctctctggaaagagtgtgctgcccctccccatctccatgccctctccttctgtgtcccctgagtctgctgtttac

SEQ ID NO: 13097 - DNA, 201 bp, Homo sapiens; identical to SEQ ID NO: 2058

SEQ ID NO: 13098 - DNA, 201 bp, Homo sapiens
tgggtccatcctaagcttgcttcagaagacggcttctaagcttatgtagtcatttttttccttagtcacattgtcaggggctgtcattacctgctcaggtyttagtggttctaactgctgcctctgaggtttcttggaaattcagcttgtttccagaatggtggcagtgctagggatgaccaagtgacagggttgggccag

SEQ ID NO: 13099 - DNA, 201 bp, Homo sapiens
tgacctgtcccctcccatagccgaccccctcctgtaccccagggtttgattgatatttgcttttgtattgtaattactatttaatatccagccctcctgargtttgcttcactgcagtcacattgtattgcaagcagaaaatgtcacgtcgcctggagctgttggggtagtgtggttgtggtcctttgggtatttcctggc

SEQ ID NO: 13100 - DNA, 201 bp, Homo sapiens
agttcttgttaacaaaatgactcgactttatctgtcgagttgattcctgtttgcactccccattatgctgccctgggaatctgcaaccagaggcaggttcyttggtagagggcacttatgagtctgtgagtgcccacttggaaacgcctgccagcaagttgaccctgaggtccgccccccagcccatctccccatctgtca

SEQ ID NO: 13101 - DNA, 201 bp, Homo sapiens
gcaagagcatgcagagccttgggagctgcaccattagcaaggactccttccagatctccacgctcgtgtgctccaccaaactgactcagaacggtgcgttygagaggagaaacacactcaccccaggagctctgccccagtcctgtcttttccatgctccttcctatgtggaggtgtgctccgtaggtgcatgaacgtcac

SEQ ID NO: 13102 - DNA, 201 bp, Homo sapiens
agcaatcatcaatttttttgttttttgttttacagctaaggataaatctgagaaaatatttgcactagcatttgtcaagctgatgagatacgatggtaccmccctgcgagacggagagcacgatcttatcgtctataaggtatctggttgcattggtgcaatattgctgctatagacagtttcagtcttttctgggctccc

SEQ ID NO: 13103 - DNA, 201 bp, Homo sapiens
accacagttacctggaagaatgtagaatgatcttgtcccgtcattctcccccattcccctcatctcatagattctcacatttgattattcatccctagacrtggcctttacacctttcctttcttcctgtgcgtgctggtaccacgcaagcctgggtgacctgtccagcccttacctaccttgcctaactttgtgcttttt

SEQ ID NO: 13104 - DNA, 201 bp, Homo sapiens
actgtaaagacctcacagtgctgccatcagcatgcgctctggacttcggcggtgccacataaggtggccccagtgctcatcccaggaagaatggcccctgsttgtctcggcaaatgactcccacggaagctgtggagagccacgaaggtggcaggcggcattagaggggctgtaaagggaccgatgcctgagaatttcttc

SEQ ID NO: 13105 - DNA, 201 bp, Homo sapiens
ctctccgacgttgtgagtatgcatttgccggtgtccttactgaccatggttcctgcattcagaaacagcaacagaggtgtcagtgggacagaaatacacaytcaagcaccggccgcacaaacttttagccaccacgacgactgcctgtttcctaattatatttaagcaggtgaggtcggcctttatgttaaggaaaatcac

SEQ ID NO: 13106 - DNA, 201 bp, Homo sapiens
ccactgtaaagacctcacagtgctgccatcagcatgcgctctggacttcggcggtgccacataaggtggccccagtgctcatcccaggaagaatggccccygcttgtctcggcaaatgactcccacggaagctgtggagagccacgaaggtggcaggcggcattagaggggctgtaaagggaccgatgcctgagaatttct

SEQ ID NO: 13107 - DNA, 201 bp, Homo sapiens
tccgacgttgtgagtatgcatttgccggtgtccttactgaccatggttcctgcattcagaaacagcaacagaggtgtcagtgggacagaaatacacactcragcaccggccgcacaaacttttagccaccacgacgactgcctgtttcctaattatatttaagcaggtgaggtcggcctttatgttaaggaaaatcacacg

SEQ ID NO: 13108 - DNA, 201 bp, Homo sapiens
tgctttcacggatcccagacttgggatgtccctgttaagttacgggctgggtttggaacacactctgtgcttggcttggtcctttgtgccttctgggatgygaattttaatcttctttcttggcttaaccttataaaatgcaccagagtgtacacgtgttgctaaggctaatattgaaagaaaatgttgacttcatttagg

SEQ ID NO: 13109 - DNA, 201 bp, Homo sapiens
tgtccgttcccttcctcaatacagtctgccacgccttcttcacctgctcatgccccgtggtcactgtggcagcgtgcacacagcagactctacagttcccrtaaccaccccacctgttcttgagagcatcgatatctcctcgcctagccatattttagtggaaatgctgtgtaatcacgaccaactctagcttatcaaaaa

SEQ ID NO: 13110 - DNA, 201 bp, Homo sapiens
agatttaccccattaacatggaatgtgcctcttaaatgtgtatcgtttttatttttttccttgagacggagtcttgctctgtcacccaggctggaatgcartggcgtgatctcggctcactgcaacctacgcctcctgggttcaagcagttctcctgcctcagctcccgagtagctgggattacaggcatgcaccaccaca

SEQ ID NO: 13111 - DNA, 201 bp, Homo sapiens; identical to SEQ ID NO: 2033

SEQ ID NO: 13112 - DNA, 201 bp, Homo sapiens
tgcctcagcctcccaggtagctgggactacaggcgcccgctaccacgcccagctgatttttttgtatttttagtagagacggtgtctcaccgtgttagccrggatggtctcgatctcctgacctcgtgatctgcccgccttggcctcccaaagtgctgggattacaggcgtgagccaccacacccggcctaaagtagttat

SEQ ID NO: 13113 - DNA, 201 bp, Homo sapiens; identical to SEQ ID NO: 2034

SEQ ID NO: 13114 - DNA, 201 bp, Homo sapiens; identical to SEQ ID NO: 2035

SEQ ID NO: 13115 - DNA, 201 bp, Homo sapiens
ccgccttggcctcccaaagtgctgggattacaggcgtgagccaccacacccggcctaaagtagttatttaaataagcattttcctatcaaacaatagctcraaaaggtagaatcactgctgtttttagggtttcagcctcagattccggcgccttgatttactttgattggagtcgtttggcatgttgcagaaatcaccct

SEQ ID NO: 13116 - DNA, 201 bp, Homo sapiens
tagggtttcagcctcagattccggcgccttgatttactttgattggagtcgtttggcatgttgcagaaatcaccctgcattatttacagaggtgtcagatrgcaaactcatcttcataagatgtgggaaataaagaggacccaagagactatctgctctctctcatttgtcggctcctgttcctgtcgctgtgcacagagt

SEQ ID NO: 13117 - DNA, 201 bp, Homo sapiens
ttgatttactttgattggagtcgtttggcatgttgcagaaatcaccctgcattatttacagaggtgtcagatggcaaactcatcttcataagatgtgggarataaagaggacccaagagactatctgctctctctcatttgtcggctcctgttcctgtcgctgtgcacagagttagaggctgagacccccgactcgcagcc

SEQ ID NO: 13118 - DNA, 201 bp, Homo sapiens
gattggagtcgtttggcatgttgcagaaatcaccctgcattatttacagaggtgtcagatggcaaactcatcttcataagatgtgggaaataaagaggacycaagagactatctgctctctctcatttgtcggctcctgttcctgtcgctgtgcacagagttagaggctgagacccccgactcgcagcccctgctctattc

SEQ ID NO: 13119 - DNA, 201 bp, Homo sapiens
tttttgcagactcatgctccaaagcaggaattgtgagcttcttaggctctacttttgctctggtttccaggatgctcaaagccaaattttgccctcacacrttcagttaaattttcgttttattctcctgccttccaaaagctttctggactattaaaaatccatctttactttaactacctagtttcatatgcgctttca

SEQ ID NO: 13120 - DNA, 201 bp, Homo sapiens
agagctttaggtttctcaccaaaacttcatctacctcttcaagtccgattaggagcagggaaattgatcctggttctgcattctctctactcccatccacytcatcactccaaacaccatggagagccataaccccaagatgccatcgtccccctctcccctccccacctacagtcacaacacccgctggccacccagacc

SEQ ID NO: 13121 - DNA, 201 bp, Homo sapiens
gctcatggagacccaagtggggatgacacggcctcaggctagagcagacgcaccctgggaatcctctgtattcttgttggcatcacagcccaagcctgtgyccagcagggctgaccagaagaaaggtctggggcattttaggttttagttaagagtttgatggaggcttaagcttttattgatttgaaaaagaaaagaaag

SEQ ID NO: 13122 - DNA, 201 bp, Homo sapiens
ttttatttttatttctcaatatttatccaaaataattgaacataaggacttgaagagagatctgtacactgatgttcatagcaacatttttcacagttgcsaaaaggtagaagtactcaagtgtccatcaacagataaatgggtggtatacacgatgtggcatatgcatcccaaagcctccatttcctcatttgtaaaata

SEQ ID NO: 13123 - DNA, 201 bp, Homo sapiens
agcctcccgagtagttgggattacagacgcctgccaccatgcccgggtaatttttgtatttttagtagagatggggtttcaccatgttggccagattggtyttgaactcctggcctctggtgatccacccaccttggcctcccaaagtgctgggattacaggcgtgagccacggcgcccggcccggattcagtttttaagt

SEQ ID NO: 13124 - DNA, 201 bp, Homo sapiens
ggctattaaggaaagggtatactgaagcgggtccaacctcccatctcttcatggtcatgggctgactcagtttttgttgttgttgttgtttttgttttttkttgttgttgtttttagacagagtcttgctcttgttacccaggctggagtgcagcggcgcgatccagctctctgcaacttctgcctcccaggttcaagcga

SEQ ID NO: 13125 - DNA, 201 bp, Homo sapiens
ttatcccaacacttgctaactccacgttagggctcttagtggctaattgtctctaagcttgatttccagactggtttatcctaacacttgctaactccgcrttggggctcctagtggctaatcggctccaagctttggagggagcattttaaggtcttttcaatcaacacattttattttctgatgacctagaaacaggtg

SEQ ID NO: 13126 - DNA, 201 bp, Homo sapiens
agaagttgccaagcaccagtgagaatgggaaaatgtggacaacgtcaccacctgccaggtagcaagcacctaggctcctacaaatgggcaaaaaaaaaaawaaaaaaaaaaatcggtctcagttttcagcctatggcaaatgagccttcagcaaatgacatgagcatgctaaatgattgcagtgtccatagcaggtcttga

SEQ ID NO: 13127 - DNA, 201 bp, Homo sapiens
ctttccagaagatgtgcagctcttagcacgtcatacatttcttctgcctaagtgttgactactggcattgtgaaattaacaggtacattcttattttcctwtattaattggacaaaacttcttgtaaaaatggagttgctctcactcctttcttggcgaatcaacaaaaaatggaattggggaaggccttggccatgagcc

SEQ ID NO: 13128 - DNA, 201 bp, Homo sapiens
agcatccttttgctggtcctctgtctttgagtgcagttctgtgatactcagatgtcttccagaactatcggctgtttgattgtggaaattcctggaagacmagggctcctgttccttctctcgccacccgtgctttttgtctttctcaccctctgttcctttaagaccacaaagcagggactcggacactggtgacacgga

SEQ ID NO: 13129 - DNA, 201 bp, Homo sapiens
gcaaatctaaatctttctgctgatagagagtcttgcgtcaatgttgatggctgctgactgatcaggatggtggttgctgagggctgaggtggctatgacarttttttaaaataaggcaacagtgaaatttgccacatcatttgatgcttcctttcactcaagatttctctgtagcctgtgatgctgtttggtagcatttta

SEQ ID NO: 13130 - DNA, 201 bp, Homo sapiens
cacgcacagcccgggagagtccctgaaacattttagctcatccacataccttgcatggtgtggaattcaacaaggagaacccatttctcttaatcattacrctcattaagaaaacacgaagctcacaacagaaaataatttctaactattattattctgtggtttctgcttttgatcaagataagaatagccgaagcaccc

SEQ ID NO: 13131 - DNA, 201 bp, Homo sapiens
ggcctcatctctctggtccagctggaaatgtgattgcttcctggggtggccatgactaagggattcctgtctcagctgcctctatatggagaactgagctsaactggtaaacgctcagtttccctttcagaaaagaatgttactctcaagagcagcagtgattcaaatggccttttgactttaaaaaattctccatttaaa

SEQ ID NO: 13132 - DNA, 201 bp, Homo sapiens
agacccacagcttcttgccactagaacacagggtccagcgttgggcactgtccttcaacactgggcttcctacacacacacatccaatccacgcacagccygggagagtccctgaaacattttagctcatccacataccttgcatggtgtggaattcaacaaggagaacccatttctcttaatcattacactcattaagaa

SEQ ID NO: 13133 - DNA, 201 bp, Homo sapiens
tttcaattcttgaaggtggccattcccatcgaggacgttaaccgcagtcaccttcggtttaccttccgccacaggtcatcacaggactgtgagtagtcaarcactttcttcccccaagtatttttaagggagaactgggggaaagcgcgagaggccactctcagttgttctggaactcgctatcataacacaataaggctc

SEQ ID NO: 13134 - DNA, 201 bp, Homo sapiens
tttggcagaaacaggtgactttagggatacctggagtagaatccaagaatctagagacccccaagcaagccacttatcctctccagtcatgagtgtctctrtgggtcacgtcataatatctgctgccaccttgtcatggtgtcttgaggctggaacatccaagatggcgtccttcacgcgcctggcacactgcttcactgc

SEQ ID NO: 13135 - DNA, 201 bp, Homo sapiens
aattagctgcatgtgttctgaatctgtgtgatggaactggctacttataaaacagtgttcatcttctctgacagagaagtcatgattacaggcttataccrcgcggatctttgaagagcttcacttataacatgtggaatacaggccacttcttatactaatggctgggaaagttcaaaatcatcatctgcagacgcgaaa

SEQ ID NO: 13136 - DNA, 201 bp, Homo sapiens
attttcctacagcttgagagagaaaaagcctatgattttccttattgaagaagcttatcatcccttgcactcaatttttgggaggattattctcaattttyagctcttacttacttcttttaatctgggtttacttacacattgcaccctggataaaagtctcttgctcccacttcttggtacgtgctcttgtagagcgtt

SEQ ID NO: 13137 - DNA, 201 bp, Homo sapiens
ggtttccctgtttaaattccaaacagaatttcattttcctggtaaaccattgtgaggttgccaccgtgacctacccttcatctcagtttgccttggtcacrgctctgtggcttccccgtgttgcagcctctcatgctgagctcttgggtgagcctgtcctcgttcccctggcccttggcaggtggcttgggagctggtcct

SEQ ID NO: 13138 - DNA, 201 bp, Homo sapiens
cctgaaaccaagaggttcagaagaatagagagaagattatcatctcaagagaacacgtctcgtatcatctgggggaaagcagggtggggagaccgtgctcmgtgctgcaagtcaaccggcaatttcaagaatgccgtaaattggattaaggatttcgcatcagaaaataaagctttctgctgatatggggctttttcattt

SEQ ID NO: 13139 - DNA, 201 bp, Homo sapiens
tcttttctacttctttgtgttttctttgatatgttaagacttaaaaaattaagagcgatctagccacccctcaccccacctttttgggaactattgtttgrtttacattcagcaatcctattgataataaaagctactgttttttttttcctcccaaagggtatatttcctgcttcatatattcatcttaaagaagcgata

SEQ ID NO: 13140 - DNA, 201 bp, Homo sapiens
tggggactgtagggatttacctttgtagccctctcgctgcctgcacctccattctccctccagataagggaaccatccacccaaacactctgtgccctggrgctgtgtcgccctcgctgtgctcttggcaagtccctgtgatgcatgattaaagcaactgagagtagatttaatttcttggttggtctttcccttttcaaa

SEQ ID NO: 13141 - DNA, 201 bp, Homo sapiens
ttccagggttcaagtgatcctcccgccttagcctcctaagtagctgggattacaagcatgtgccaccatgcctggataatttttgtatttttagtagtgayggggtttccccatgttagccaggctgatctcaaactcctgacctcaagtgatccacccatctcagcctcccaaagtgctggattacaggaatgagccact

SEQ ID NO: 13142 - DNA, 201 bp, Homo sapiens
tccctggttcaagtgattgtcctgcctcagcctcccaagtagctgggactaaagatgcatgcccagctaatttttgtattttttagtagagacgagttttygccacattggccaggctggtttcgaactcctgacctcagttgatccgcccgcctcagtctcccaaagtgtcaggattacaggcgtgagccaccacacctg

SEQ ID NO: 13143 - DNA, 201 bp, Homo sapiens
ttttagccattctcatggatgtgcagtggtgtgtaggcaggggagctgtgtgtcttcagcttctgtaggagctgccaacttcctttccaacaagacttcasagaaggcttcactgctgtccagagttgttcattctacctttttacacgtccctgtcccccaagcagtgttcatgttgctatgcagcctcagtcatacttt

SEQ ID NO: 13144 - DNA, 201 bp, Homo sapiens
ctgagacaggagaattccttcaacccaggaggcggaggttgcagtgagccgagatcgtgccactgcactccatccagcctgggtgacagaccgagactccwcctcaaaaaaaaaaaaaaaaaaaaaaagaagaggaaagaaagaaagaaatatatgtgatttattgcagtgactctcttctccttgtttccccatttctca

SEQ ID NO: 13145 - DNA, 201 bp, Homo sapiens
taactgttagaaatacatagaaatatgtgtgcagtggctcatgcctgtaatcccagcactttgggaggccgagggagttcgagaccagcctgaccaatatrgtgaaaccctgtctgtactaaaaatacaaaaaaaaatcagccaggcatggtggcatgtgcatgtagccccagctactcaggaggctgagacaggagaatt

SEQ ID NO: 13146 - DNA, 201 bp, Homo sapiens
cgtggccctgggtgagcactgctctgacaaaggtcaggcgggatgggctccctgaagttgcattcatgtcgctcctactccgagggtctcccgtttaggakggaatagtcaaaatctacttagttcatgatttttttttttttttttttataattgagagcctgttttcagttggaacatcatagccgcatcattctctct

SEQ ID NO: 13147 - DNA, 201 bp, Homo sapiens
agccatagatctcatgacatcattggccaggagcagaggtgtggctgagcaggcgcctgagcacagggtgtggaggcggcccgtgtggatgctgctctccrcctcttgactcctctacgtgtagacctgaccttctgggtctcccagcagagcagcacgtcctggctctcaggctgtggattccgtggccctgggtgagca

SEQ ID NO: 13148 - DNA, 201 bp, Homo sapiens
cttttgccttaagaccaaaaaatattggccgggcgcggtgactctcgcctgtaatcccagcactttgggaggccgaggcgggcagatcacctgaggtctgsagtttgagaccagcctggccaacatggggaaaccctgtctctactaaaaatatgaaaaattagccgggtatggtgacgggtgcctgtaatcccagctact

SEQ ID NO: 13149 - DNA, 201 bp, Homo sapiens
ttttgtttttttgtttttttgtttgtttttggtggttccaaacccatcttagaattgttcttttaattttagtgaaaaatgtcattggaattttgaatagracttgcgttggatctgtagataactttgggtaatatggatattatagcaatgttaattcttctaatccatgaacataaggtatcttccatttatttttat

SEQ ID NO: 13150 - DNA, 201 bp, Homo sapiens
ctatcacaagcatttttccatgttactccagcattttcattgccaactttcttattggctgcatgagagtctatccagtgggtataccataacttgtcagyacattgtatcattttcataaatttaggttgctctcaagttgtatctgttgcagataacattgtagtgagtgtcttcatgcatatggtttctatattttgc

SEQ ID NO: 13151 - DNA, 201 bp, Homo sapiens
caagggcacaggagggggtctgcagtaacttcctgaagcaaagcacggaggagagcaggtaacccatgacatgacctggcttgcgagccttgatgttttcygtgggtttcattctttcctttgagatcccaggcaaatgacacaacataggttgtaatggaacccctccttttccttgtttagactcttgaacatctcata

SEQ ID NO: 13152 - DNA, 201 bp, Homo sapiens
atagcctgttaaaatttatacagcaaacgtacccttggtcaagtgattattccaaattgtctgcctttgaaacctttactcttgactcctaaactaatttwgtatcatttatctatataacttttgccttaagaccaaaaaatattggccgggcgcggtgactctcgcctgtaatcccagcactttgggaggccgaggcgg

SEQ ID NO: 13153 - DNA, 201 bp, Homo sapiens
attatgtattagaaatgatcctttgaaaaaataatatttttatacttatatatacatatatatacacatatgtacatatatacacacatatatacatatayacacacatatatacatgtacatatatatacacacacacacacacacacacacacgcagtcgtgtgttgcttaacaattctgccaaatgcatcgttaggca

SEQ ID NO: 13154 - DNA, 201 bp, Homo sapiens
agaatccagtgtaagagacctacaaggaaaggtaatgttctctttgaaatggaaatctgctcagagaggaagtggtcactggagctttaaaaaaacgttaraagtagggaagttctcccttcctagaaaatgtgagccggggctctggcagaggacatacgaaagacttagagcagcagactgagatattccaggaatggg

SEQ ID NO: 13155 - DNA, 201 bp, Homo sapiens
ctgttaagatctcatctaagcaagattaataaaaaataaaaaatcttgactaaacatctgttgcaaagtgactttcaatttggctcttcaccatgtgactrgtgattagagtttttggtttaggttaaggggatttgatttgatttggcatggtccctttttaattttatgtatgaggcaaataactgaaatgtccctgat

SEQ ID NO: 13156 - DNA, 201 bp, Homo sapiens
ttcggaaacggtaacccgacagggtatctttcctcgctctgcggtagcttcagggacctacctttgccccacctgtagccaacagggctgacggtgggctyttattgaacttgttataaattagcaactcagaaacctggggtcctcctcccctaacctcaaatgtcccaaggcagtaggacagccagagccacagagaga

SEQ ID NO: 13157 - DNA, 201 bp, Homo sapiens
catgctctcttgtgcagtgagcaccacccgcagaggcctatatggcaaggtgtgttttccagccaatggagatggacaccgtagcaggaggatctgcagamttcgcctcttcagaacagcgagcaggagtgtgactctgagagcatcagggctccctactagagctctggtgcctgatcggtgttagaaatggcttcacat

SEQ ID NO: 13158 - DNA, 201 bp, Homo sapiens
tgcttctcagcttgtgtgttgccttactcactgaaagagacccactggttgctttgcactaaaacatttctttttatctccgcctgatataatgacaagtrgatctgtttgcaagaggctggcagtgaattctgaaactggtgttgttcctctgcagaaaagcctttcgttgccaggtctgggtcccagtaggccaggcct

SEQ ID NO: 13159 - DNA, 201 bp, Homo sapiens
gccaaggtggaagattgcttgagccccggagtttgagaccagcttgggcaacacagtgagacccgatctttactaaaacagttatcctggtgtgatggtayacctgtagtctcagctgctcaggaggctgaggcaggaggattgcttgaacccgggaggcagaggttgcagtgagctgtgattgcaccactgcacttcagc

SEQ ID NO: 13160 - DNA, 201 bp, Homo sapiens
taatttttttcatatcacggaagttaaagggccagttttatttttatgcatatgttaagccagttatcccagaaccatttattgaaaaggagtcctttccycattgcttttttcttttttttttctcagccttgttgaggatcagatggttgtaggagtgcagctttatttctgagttttccattctattctgctgttcta

SEQ ID NO: 13161 - DNA, 201 bp, Homo sapiens
tatagccgcaaaggtttattttgtagaaaattgtgaaacgtataaggtagagtttggtggagctcccagatacattctcagctcttgcatagcttgtccasaccagtgcagagttcttggtggtcaccattagccaactcaaaagcaaaactacaaataattgtttcacagcgttttgtacctgttgaccaactcatgtgg

SEQ ID NO: 13162 - DNA, 201 bp, Homo sapiens
cactatgttagccaggatggtctcaatcacctgaccttgtgatccactcgcctcggcgtcccaaagtgctggggttacaggtgtgagccactgcacccgayctttttttcacttttaaatcaaaacagatcattcatacaagagaagaaatacatatgtagagatgacaaatcattcagtgggcctctctgtaatgcttcc

SEQ ID NO: 13163 - DNA, 201 bp, Homo sapiens
tcaattaccagtcaccttgatgattctattgttataaattctaacaatattcagaattgtatttttccatggcaaattttagtaggcctataacttaaggktttatgaaattgactaaataaatgcaaggatatgaacaaaaatatttaggaagtactttgattagagatttgtccctgctgaatgcagatttaattagat

SEQ ID NO: 13164 - DNA, 201 bp, Homo sapiens
caccatgcccagctaatttttgtatttttagtagagacagggttttgccatgttggccaggctggtctcaaactcgtgacctcaagtgatctgcccacctyggcctcccaaagtgctgggattaaaggcgtgagccaccgcgcccggcctactgtatattcttatatatacatgtgtataagaatatgcatttacttaata

SEQ ID NO: 13165 - DNA, 201 bp, Homo sapiens
cctgtttccaaataaggtcagattcagaaatatcaggggttaggactttaaatatttctggggacacagtcctacccacaattgtactgatgcccgggagkgatgatggctgcccctttttgtggctgttgacgtaaaccaaaccccattgaaaacaatgactcgacagagtccccgtggtcacgagcttgggattctgct

SEQ ID NO: 13166 - DNA, 201 bp, Homo sapiens
agtgtcaagaggaaaaagaaaacagaacagtgggatcattgcacacttttattgatggagatctgcagcgaggttcccccccgccccgaaacttttatgartattataaggcagtggctgaaattgtgatgttctcagacatctctatagaatatgttcttggagcagaaaggagcctctagggcctctcctctcatttgg

SEQ ID NO: 13167 - DNA, 201 bp, Homo sapiens
acacagtcctacccacaattgtactgatgcccgggagtgatgatggctgcccctttttgtggctgttgacgtaaaccaaaccccattgaaaacaatgactygacagagtccccgtggtcacgagcttgggattctgctcacatttggagtaagcgatgcggcatcctttatttgtccctgccattcttgacacagggagaa

SEQ ID NO: 13168 - DNA, 201 bp, Homo sapiens
ttttcaagtaaaagggaaaatccagacttgcattagcaaaaaaattaaaaaatttaaaaaatgcctgcattttcttatttatttatttattttctgagacrgagtctcgctctgtagcgtaggctggagtgcaggggcacaatctcggctcactgcaagctctgcctcccgggctcactccattctcctgcctcagccccc

SEQ ID NO: 13169 - DNA, 201 bp, Homo sapiens
tcctgggttcaagtgattcttgtgcctcggactcccgagaagctgggattacaggtgcacatcaccacactcaagataatttttgtattttttagtacagwtggggtttcaccatgttggctaggctggtctcaaattcctgacctcaggtgatccatccgcttcggcctcccaaagtgctgggattacaggcatgagcca

SEQ ID NO: 13170 - DNA, 201 bp, Homo sapiens
tctcctgggttcaagtgattcttgtgcctcggactcccgagaagctgggattacaggtgcacatcaccacactcaagataatttttgtattttttagtacmgttggggtttcaccatgttggctaggctggtctcaaattcctgacctcaggtgatccatccgcttcggcctcccaaagtgctgggattacaggcatgagc

SEQ ID NO: 13171 - DNA, 201 bp, Homo sapiens
tgtatgcttttgcattcctgctgattgattcaaggtgcaacgtgcctgcttgtcaggtatgctgttgatcacattatttaagaagaaataaagtcgttccygcagctccacctgcagtgatgggctttaatgttttgtgcttcccgaggaaaacctgccgatgatgtgaagtgacattcaacccgccgagagctgatactg

SEQ ID NO: 13172 - DNA, 201 bp, Homo sapiens
ctcccgggttcaaatgattctcctgcctcagcctcctgagtagctgggattataggcacccaccaccatgcctagctaatttctgtatttttagtagagakggggtttcaccatgttggtcaggctggtctcaaactaccgacctcaaatgatccacccgcctcggcctcccagagtgctgggattacaggcgtgagccac

SEQ ID NO: 13173 - DNA, 201 bp, Homo sapiens
agtagataaagaacatgatggagtactacttagccataaaaaggaatgaattaagggcatttacagcaacctggatggagttggagaccattattctaagygaagtaactcaggaatggaaaaccaaacatggaatctcctcttcatcctttttctgtctgcctttccttgttctcatacttaaagacagcgtgttgggag

SEQ ID NO: 13174 - DNA, 201 bp, Homo sapiens
caaggacgttgagctcctgtgcatgctcctgtagccttgtgtcatctgaagaagcacagaagtggcaggaatggccttttcatagggcatgggatgctgtmactgatgtgcaatctgttatctcaaaggagaccttagcacaagtgggaaaggaaaaactgcccgaccatggagagaacacaagtgggctgagtgtagctg

SEQ ID NO: 13175 - DNA, 201 bp, Homo sapiens
atatatatacacatatgtacatatatacacacatatatacatatatacacacatatatacatgtacatatatatacacacacacacacacacacacacacrcagtcgtgtgttgcttaacaattctgccaaatgcatcgttaggcaatttcatcattgtgcaagcctcatagtgtgtacccttacttaaacctggatggtg

SEQ ID NO: 13176 - DNA, 201 bp, Homo sapiens
tctgtacctgtttatcttgagttcctgctagcaggtaccaataatgatggattgtgaacaaacagctctgccttgtttttttagaccctgaaatagacagrttggctttgataatgctttttgactgatgggcactttttgtaactaaatcccattcaaaggcttaaaatatgccgcccaaggttgatttcaagatatatt

SEQ ID NO: 13177 - DNA, 201 bp, Homo sapiens
atcccagctacttgggaggctctccttaacacatccgatagacaaccatcagatctcctgcgatttcactcacaatcatgataacagcatgggagaaaccscccccccgcccccccccatccagttacctccacccagttccacccttgacacatggggattatggagattacaattggaggtgagatttgggtggggaca

SEQ ID NO: 13178 - DNA, 201 bp, Homo sapiens
ctgcgtgattgacatgccagtgattgacctctttggccagctgatgccgcaggtcacgagccaaaagacatgagactcaagaaaatatttgtattttttcrgtgttattcccataatgtttcattcaaatgtacttctacactgttttattttgaatgattgcattcctgtttgactctttgcacaattcaggcctcggct

SEQ ID NO: 13179 - DNA, 201 bp, Homo sapiens
tgcagcagcacctggatgaccccagcctgcccatcaacccgctctccatgctcctgaacggcatcgtggacccagctgtcatggggggcttcgcaaactaygaaaaggtacgggacccaccagcttgctctgggcaagcagtcctgcccggggacagactgaaaattcccgagagtccccaaagcccagaaacgcccctgg

SEQ ID NO: 13180 - DNA, 201 bp, Homo sapiens
gcttgggattctgctcacatttggagtaagcgatgcggcatcctttatttgtccctgccattcttgacacagggagaaagtctgacgttttcagaatggcrtgtgggctcccaaaggctggttggaaataaggattggaaatgttctgtgaattacacccagtcctgtagtttaggggtccccaaaccccaggtcctcagc

SEQ ID NO: 13181 - DNA, 201 bp, Homo sapiens
aatgacttattgaatgtaggagggtgaactcaatttcaggtttttaattgtttctgtttcaattccatcataattcattgaatatcttccgtgtgctcagraccattgattagcgagtttgcttcctttgagagtcttcagagtcatctacttaaaaatgtagaattggaaaagagtgattatctcaatgctcagataagg

SEQ ID NO: 13182 - DNA, 201 bp, Homo sapiens
ttggagtaagcgatgcggcatcctttatttgtccctgccattcttgacacagggagaaagtctgacgttttcagaatggcatgtgggctcccaaaggctgsttggaaataaggattggaaatgttctgtgaattacacccagtcctgtagtttaggggtccccaaaccccaggtcctcagcctctggtacaggtcgtggcc

SEQ ID NO: 13183 - DNA, 201 bp, Homo sapiens
tacaggtcgtggcctgttaggaaccaggctgcacagcagcaggtgagcaacgggtgagcaagcaaagcttcatctgtgtttacagccgttccccatcgccygcattaccacctgagctccacctcctgccagatcagcagcaccattagattctcacaggagaatgatacctattgtgaactgtgcgtgtgagggatctag

SEQ ID NO: 13184 - DNA, 201 bp, Homo sapiens
caaagcttcatctgtgtttacagccgttccccatcgcccgcattaccacctgagctccacctcctgccagatcagcagcaccattagattctcacaggagmatgatacctattgtgaactgtgcgtgtgagggatctaggtgccgtactcctcatgagaacctaatgcctgatgatctgtcactgtctcccatcttcccct

SEQ ID NO: 13185 - DNA, 201 bp, Homo sapiens
ttcatctgtgtttacagccgttccccatcgcccgcattaccacctgagctccacctcctgccagatcagcagcaccattagattctcacaggagaatgatmcctattgtgaactgtgcgtgtgagggatctaggtgccgtactcctcatgagaacctaatgcctgatgatctgtcactgtctcccatcttcccctgatggg

SEQ ID NO: 13186 - DNA, 201 bp, Homo sapiens
ggtgtggtggcacacacctgtaaccccagctactcgggaggctgaggcaggagaattgcttgaacccgggagatggaggttgcagtgagccgagatcgcascactgcactccagtatgggcaacaagaacgagactgtctcaaaaaaaaaaaaaaaaaaaaaaagtatgccttaaaacttttcatattttacataataatt

SEQ ID NO: 13187 - DNA, 201 bp, Homo sapiens
gtggctcctattggacggtggttcctgttggacggtgctgctctgagtcaaagactttgctcttgttgagcgccaagaacatcgtcagaccagcactgccrcccacatgcggctgggaagcggaagctgcccactgtcctgtggggcctcacaggcagtagaattgcctgcctgcctgttggtatctactccttagactac

SEQ ID NO: 13188 - DNA, 201 bp, Homo sapiens
tcccagctacttgggaagcttaggcaggagaattgcttgatcctggaaggcggaggttgcaatgagccaagattgcgccactgcactccagcctgagtaamagagcgagaccccttctcaaaaaaaaaaaaaaaatgcatttttttgctgcacattgtagatattagcaaaatagtaaggattttagatagttgatacagc

SEQ ID NO: 13189 - DNA, 201 bp, Homo sapiens
aaccgaatccctttgtcacctcgaagaaaccgtttcttattaactgctttacttttgcttgagaaaggcatttctacaacatgtggtgggtgagagagagrccagtactgaatgtaattttccctattttggaattagactttcttgttcgtattgactacatagcgtgtaacaaaaccttatccacagttgtcagctact

SEQ ID NO: 13190 - DNA, 201 bp, Homo sapiens
aagttccagggagcttagaggcactggggttgagtgctttcatttgtcagtggagaagatgagggtctcgaaaacttgagcaacattttttttgttttaayatttttaaaattctattgtaaattgacaaataataattgtgtatgtgtatggtatgcagtcgatgttgtgatacatgcattcattgtggaatgattaaat

SEQ ID NO: 13191 - DNA, 201 bp, Homo sapiens
gtggcgcgcacctgtggtgccagctactcaggaggctgaagtgggaggatttcttgagcccagggggtcggggctgcagtgagccatgatcacacgactgygctccagcctggctgacagagtgagaccgtctgtctcaaaaaccaaaacgaaaagaaaaaaaaacattaacctcgaagggccttggctactaaagaaaac

SEQ ID NO: 13192 - DNA, 201 bp, Homo sapiens
gaccatccctgagtccccagggcctgtgctgacttaagctcctgagagcagaggcagtggctgtggctgccacctctggatctccctctgagggagctgtrccgtggcctgggctccactccatttttttaaatagctttttaagagtggttttaggctcacagcaacatggaacagtgagtacagccaggtcccagacac

SEQ ID NO: 13193 - DNA, 201 bp, Homo sapiens
gagcagaggcagtggctgtggctgccacctctggatctccctctgagggagctgtgccgtggcctgggctccactccatttttttaaatagctttttaagrgtggttttaggctcacagcaacatggaacagtgagtacagccaggtcccagacaccccctgcccacacacatacacaggcacggggctttcagggtggtc

SEQ ID NO: 13194 - DNA, 201 bp, Homo sapiens
agaacttaacgacaagtataataatttaatctctatatgcaatgccatgtgtacatctacataagggaaccctgtgcgttttaccttgcttttgtatcagmgtttttacttgaatctttccaagagaagaatcaccatctgttagtgacgtgttgcaattaaactatgaaatgattttgacaatagtttttctattttgaa

SEQ ID NO: 13195 - DNA, 201 bp, Homo sapiens
tttaaatagctttttaagagtggttttaggctcacagcaacatggaacagtgagtacagccaggtcccagacaccccctgcccacacacatacacaggcayggggctttcagggtggtcatttgttagtgagttgagcacattctggccagcacttgagcaaacagcacacaatcaagaaggtggccgtcacccagacttt

SEQ ID NO: 13196 - DNA, 201 bp, Homo sapiens
ttagagtagtggacttggagaaaagctgccggtagatgttccagggcactgggactgccctgcacacagacctccctctgtatttgagacagcggcttgtycagatagtgcctgggggcctgcctggtggagggcccatggctcttgcttcagcttccccttcctgctgcccggcagacctgtggtgggagtgttggttgc

SEQ ID NO: 13197 - DNA, 201 bp, Homo sapiens
caccccctgcccacacacatacacaggcacggggctttcagggtggtcatttgttagtgagttgagcacattctggccagcacttgagcaaacagcacacratcaagaaggtggccgtcacccagactttccacaaagttccttatttggggcatattttgtttgttaacggatcttgcatcctgactcagactgagcccc

SEQ ID NO: 13198 - DNA, 201 bp, Homo sapiens
gttttctttggagtctgctttgccaggtcgggcaccctggcttccttcacctcctcctcgcctgccttttacgtccttgcacctgtggctctcaccttccrtacagagggctctctctcgccagagctctgtccttaccctcatcccggggtcccagggtaaggggcatgcatggaggtgtcttcagcagcttcacactcc

SEQ ID NO: 13199 - DNA, 201 bp, Homo sapiens
tggatcgagagaaccatatatacaactgcatataaattacctggaattttaaggtggtttgaggtcaagtctgttttcatggtaaggatggccccaccccrgaaggaattgtccgttcccttcctcaatacagtctgccacgccttcttcacctgctcatgccccgtggtcactgtggcagcgtgcacacagcagactcta

SEQ ID NO: 13200 - DNA, 201 bp, Homo sapiens
agggaggaacctaaggtggaaccagaaccaacagcaggacatggtgcatgcactgaggccctattcacatggtggaagggaggtcgttgagctccaggctyctcatagccagtgtgaggagcaccagtgcactcaacccaggatccgtaagatgaaaacagcccagtcgttgttgcagatcctcatactgtgagtggaagg

SEQ ID NO: 13201 - DNA, 201 bp, Homo sapiens
cccacacacatacacaggcacggggctttcagggtggtcatttgttagtgagttgagcacattctggccagcacttgagcaaacagcacacaatcaagaargtggccgtcacccagactttccacaaagttccttatttggggcatattttgtttgttaacggatcttgcatcctgactcagactgagcccctgggagagc

SEQ ID NO: 13202 - DNA, 201 bp, Homo sapiens
ccatgcagctgacgaacgacaagatcaacagcatggtgcagcagcacctggatgaccccagcctgcccatcaacccgctctccatgctcctgaacggcatygtggacccagctgtcatggggggcttcgcaaactacgaaaaggtacgggacccaccagcttgctctgggcaagcagtcctgcccggggacagactgaaaa

SEQ ID NO: 13203 - DNA, 201 bp, Homo sapiens
attcccgagagtccccaaagcccagaaacgcccctggtctcattgagcaatctcagcagtggcccagccaaggccaggcagcagcagccagtggcggcccytgaagcctgcagcaaggtcaaggccggagtcccggcaaggctcccctgggcatccccagacagccaggaagcccccactgacccacccaggctgggctta

SEQ ID NO: 13204 - DNA, 201 bp, Homo sapiens
ggcatcaaacaagtctccttctctctctttctcgctctcagccctcaagtctggatgatagaagaggcagccgcccccggtccatggtgcggtccttcacratgccttcctcatcccgccctctgtctgtggcctctgtctcttccctctcatcggacagcaccccttccagaccaggctccgacgggtgagtcaagctca

SEQ ID NO: 13205 - DNA, 201 bp, Homo sapiens
aaggaaaaaaggaacagcaaacatcaagagatatttgagaaagaatttaaacccaccgacatttccctgcagcagtctgaggctgtgatcctttcggaaayggtaacccgacagggtatctttcctcgctctgcggtagcttcagggacctacctttgccccacctgtagccaacagggctgacggtgggctcttattgaa

SEQ ID NO: 13206 - DNA, 201 bp, Homo sapiens
tgtgttgggattgaaacacagtccttgcatctggtgactgtgtatctgaagtcacccttggcctcccttttaaatcactgctttcattgtaaatgtcttcratggattgtgagtgactttacacgtgtctgtgggctggaaagcaattgctctcctattaagacgtcattgacctttcctttaggtttgccctggagcctc

SEQ ID NO: 13207 - DNA, 201 bp, Homo sapiens
cggccgcacactcaaatggtttattgcatgccaaatctgtgcagatggtcaggagtacctgttggagcctttcgttttgaaattccgtaagagaaaggaayagacagtagtatcccgtattcaatctgatgtgtcctgttcatcatgaaaaattgatttagagcaaacataagaaaaagctgtaacctgcaagccttgttt

SEQ ID NO: 13208 - DNA, 201 bp, Homo sapiens
ataactcggtagcttttggggatgtagctgccatctaggagagtttggcaacacggccgcacactcaaatggtttattgcatgccaaatctgtgcagatgrtcaggagtacctgttggagcctttcgttttgaaattccgtaagagaaaggaacagacagtagtatcccgtattcaatctgatgtgtcctgttcatcatga

SEQ ID NO: 13209 - DNA, 201 bp, Homo sapiens
attaagcaaacttctctgatctgttgctatcattgagtttctaatttggaggaattgttgaagaaaagacctgcatggatgcctcattttaacctcctcaytggcagttgccaagaacagtcagcagcttggcgtgccatgccaggctgctgcaggggcccctcctcccttcctgctgccaggaggccttaccagcttgtg

SEQ ID NO: 13210 - DNA, 201 bp, Homo sapiens
caaacttctctgatctgttgctatcattgagtttctaatttggaggaattgttgaagaaaagacctgcatggatgcctcattttaacctcctcattggcarttgccaagaacagtcagcagcttggcgtgccatgccaggctgctgcaggggcccctcctcccttcctgctgccaggaggccttaccagcttgtgtgtgcc

SEQ ID NO: 13211 - DNA, 201 bp, Homo sapiens
ctgcctaggtattctcctcccctctgctcacacctagcatgtgtgttttggggggtctctggggcataaggttttccagagtttcctcccccggtcccccwttccttttcatgtcttactatctgcccactctaacaggcccaccctaagagccacaccttagcttgatcatttgcaaagaccctatttccagttaaggtc

SEQ ID NO: 13212 - DNA, 201 bp, Homo sapiens
gtgcattaccttacatacttatcatttgtttgtagtgagaacacttaaaatctactctcagcaatttcgagtatacaatacatagctattgtagtcacctkggtgtaggataggaggcctgttgaacttattccttctgtctaacagaaactcggtgtccctttgacccatcatctccccactcccctatgtcccattctt

SEQ ID NO: 13213 - DNA, 201 bp, Homo sapiens
agcttgatcatttgcaaagaccctatttccagttaaggtcatattctaaggtaatgggggtcaggacttcaacataggaatttaggtggaaacgcaactcwgcccataacagaccgtaactgtgctctttctgtccttttgatgtagataagtcccctgcggccccagagaccgaagagccaggtgatgaacgtcattgga

SEQ ID NO: 13214 - DNA, 201 bp, Homo sapiens
ataggaatttaggtggaaacgcaactcagcccataacagaccgtaactgtgctctttctgtccttttgatgtagataagtcccctgcggccccagagaccraagagccaggtgatgaacgtcattggaagcgaaaggcgcttctcggtgtccccctcgtcaccgtcctcccagcaaacaccccctccagttacaccaaggg

SEQ ID NO: 13215 - DNA, 201 bp, Homo sapiens
actgtgctctttctgtccttttgatgtagataagtcccctgcggccccagagaccgaagagccaggtgatgaacgtcattggaagcgaaaggcgcttctcrgtgtccccctcgtcaccgtcctcccagcaaacaccccctccagttacaccaagggccaagctcagcttcagcatgcagtcgagtaagtggaacgctcccc

SEQ ID NO: 13216 - DNA, 201 bp, Homo sapiens
tgcaacaaacaaaaacacaaccataacaaccacaaacttctgtggaagcccagacatggtgagggccggaagctcactcagtgcaggcgtgaacctcagtkcaggcgtggtctcagttgtccagagctactgtagctgtggggactcttaaccttgcagtctcagtactttaatttgtgttagttattttatttatattat

SEQ ID NO: 13217 - DNA, 201 bp, Homo sapiens
aatatttaaaagcaaggaaggctttacaatgttgttagctacaaagcctagcagtgagcaattgcagttaatggcaacagaactgcctagctcacaacccrccaccaaagcaaacacccttcagggcacgcaaacaaacgtgtgcacacccacgtccacacacatactggctgcctccatttgcaacagccggagagacgt

SEQ ID NO: 13218 - DNA, 201 bp, Homo sapiens
agttcttttgctggctgactgaatgggtagcttttagcacctgccacttttctcagcatgcaatctattttttatagacagaaaaaatctctttttctagyttttctggtttgctgctgttgcctcagtgatattgcttgggatgcagaggtttggcaaagaggttggaggagcacccctgcattagtccgtgttcacgct

SEQ ID NO: 13219 - DNA, 201 bp, Homo sapiens
ctcaaaggcagcgtggcagattacgggaatttgatggaaaaccaggacttgctgggctcgccaacacctccacctccccctccacaccagagggtaagtcrgcaatctgaaacacaggctttcattgcttcgcctccacaaagtaggacgagtccctcattccagatactagcaggtttacttcgggctagtgagcacatg

SEQ ID NO: 13220 - DNA, 201 bp, Homo sapiens
tctgaaacacaggctttcattgcttcgcctccacaaagtaggacgagtccctcattccagatactagcaggtttacttcgggctagtgagcacatgaggaraaccatgtatgatgggcccgggtttgattttgcaaaaagatatcgaagcagtaaggactccagtgggtaagatctgtggctctgcgtcattatcaataac

SEQ ID NO: 13221 - DNA, 201 bp, Homo sapiens
ccaaacctgcattttaatgccacatggaccggctgtaatttatggcatctttaagatagatgggtacacatattatgaatatactttccttttgccagacsttgacattctgtagacttttaatggaatattatttgcctctttcatcttactttgacgtatgaggtggatggcttacgtgcagggtaatgtatgaacctt

SEQ ID NO: 13222 - DNA, 201 bp, Homo sapiens
agatcttcaatgtgtgagaacaggggttggagctggccgctggcttcaggtggatctgtgcttcccttgctgggaacgtgttcatttgtggtgggggtgtrttggtgttcttggagcgtacctgtccccccacatatatagtgggagatgtatatggtgtcaagctctatgaggtcttacgtgagctctttatgtcttctt

SEQ ID NO: 13223 - DNA, 201 bp, Homo sapiens
agtgtcatccccatgtgtcataaccatcaagatcttcaatgtgtgagaacaggggttggagctggccgctggcttcaggtggatctgtgcttcccttgctsggaacgtgttcatttgtggtgggggtgtgttggtgttcttggagcgtacctgtccccccacatatatagtgggagatgtatatggtgtcaagctctatga

SEQ ID NO: 13224 - DNA, 201 bp, Homo sapiens
tctacagtccctcaccctagacctatgggacggatcaggcaacttcctgcagatcctaatgttaaagttattagggttgagggtctggggaactggaggtsagtgtcatccccatgtgtcataaccatcaagatcttcaatgtgtgagaacaggggttggagctggccgctggcttcaggtggatctgtgcttcccttgct

SEQ ID NO: 13225 - DNA, 201 bp, Homo sapiens
aactctgaacttagtccatcccccctgccttttaaataaacattatttttagaagagttttaggttcaagcaaaattgaacagaaaatacagacagttccyatatatttctccttccttccccctgcctccccattatcagtatccaccatagattggtacattgattacagttggtgaaccgcattgacacatcgtcgcc

SEQ ID NO: 13226 - DNA, 201 bp, Homo sapiens
acaacacgtgggaattcaagataagatctgggtgtggacatagccaaaccatatcatgtggtcagcagtgcggggctcaacttgggacttggttatggaarggatgctcccctgtgacatgttagtctctggatgtggccttgatagctccactcgcctgacagatgacagcatccagagcctaatttaacccaaaggtga

SEQ ID NO: 13227 - DNA, 201 bp, Homo sapiens
tagagaaagggcatgtcctggtcctggctaccgttgatattctgcttggagcttggatttggggttgtgttttagcttaaagaaaccatatatacctccartgagaaagagacttttgggtgaagagggactggagggaacccatggaacagaacaaaggctgggcttacggtgatagcccgcattcatttagagatggaa

SEQ ID NO: 13228 - DNA, 201 bp, Homo sapiens
gggccactctctgagaggttgcccgcagtcagagccactgctttatactcaaagcacccagggctcttcacctacccctcctggggtcactttctgctctsgagttccctttctgtgcccctagcagccaggcagtgcctgacagatagaaggctgtgggagttatgtgtcaggtggtaaaaatgcactccctttgctggg

SEQ ID NO: 13229 - DNA, 201 bp, Homo sapiens
ggttcccactttttagtctacagtccctcaccctagacctatgggacggatcaggcaacttcctgcagatcctaatgttaaagttattagggttgagggtytggggaactggaggtcagtgtcatccccatgtgtcataaccatcaagatcttcaatgtgtgagaacaggggttggagctggccgctggcttcaggtggat

SEQ ID NO: 13230 - DNA, 201 bp, Homo sapiens
tttagcaggtgaatcttttaaaatagggttgatttctctgttcacaaaattttatagagaacctcacataatgcatgattaacagagacagaacagagttkcttgcttgtgaagatctgattgtcattttctgtttccagtggaccttctggggctcttgaaatggcgctccaacaccagcctgctgcagcagaacttgag

SEQ ID NO: 13231 - DNA, 201 bp, Homo sapiens
tacctgctcaagtccctgctttcaatactcccatagtttggggtatatacccaaatttagaattgctggctcatgtggtattctgtgttttctttttcacraaactgccaaactcttctacggtcacagcaccatttgacattcccaccagcagtaatgcatgattccaacttctctgcacccccaacaagacttgttatt

SEQ ID NO: 13232 - DNA, 201 bp, Homo sapiens
aatatttagcaggtgaatcttttaaaatagggttgatttctctgttcacaaaattttatagagaacctcacataatgcatgattaacagagacagaacagmgtttcttgcttgtgaagatctgattgtcattttctgtttccagtggaccttctggggctcttgaaatggcgctccaacaccagcctgctgcagcagaact

SEQ ID NO: 13233 - DNA, 201 bp, Homo sapiens
cccgccctaaatcagaaatgcttttagtatctagggtggctgtgctttcaccttgcaacagcacctccacacatccctgcctttgcatccagagagagacmcaacacattcgacatcccaccaaaagttgtcccggtctgtctgcgtcatcccccaaggcggaactcaggaggcagaaggctgacagtgagcattttctac

SEQ ID NO: 13234 - DNA, 201 bp, Homo sapiens
atgcacttttaaagcttctacatggaaatcatttcatggtaaatgtcgttgggaataatgaattcaagtgtactaggtgttaagtatgttgctacaaaggratggaatatttagcaggtgaatcttttaaaatagggttgatttctctgttcacaaaattttatagagaacctcacataatgcatgattaacagagacaga

SEQ ID NO: 13235 - DNA, 201 bp, Homo sapiens
atctttcagagtcttcctgcgagcaattaatcagtatgcagatatgctgaacaaaaaatttctggatcaagccaactttgagctacaggtaagagaagagktagacacgacctttgtggagaaatcatgttaaaacaaattgctggtccgagccagtatcttacagtatttctaatccttgaacttaattggtctcccatc

SEQ ID NO: 13236 - DNA, 201 bp, Homo sapiens
taatgaagcttgtgaagttctcccagttgggccattaccaggggcttcctatgttctcagtaggaagaagagtcttgagctcatttcttgcgttttttttmccccctacaattaaaagcccatctcactttaaaacagacaggtctgttttgttcttctctctgtggtccccattcgggatcctgatagctgcctgccaga

SEQ ID NO: 13237 - DNA, 201 bp, Homo sapiens
agttatcaatggtggaaaatatcagaatggggattacctttgaggcatactcgttgcccgggaccacagcaacttcactggtgctggatcattctgtctcytgcactagttgcttatgcagttttccacctatatagaaattcatggagatgcttcctgtctcagtgtgacctcatttgtctgagcatcatcactgtgtca

SEQ ID NO: 13238 - DNA, 201 bp, Homo sapiens
catccttactgtcagaggcaacagtacagccctggggtgtatttcacattataccactagagctgggtgcttaaagggcatcatcaaatccatttttcttwccttgagtggaggtgcctttcatttgtaaatgatggatttgaaaaatggacaagtagtgaaaatgcaggaaaatgattcacatcagtaggtgctccagca

SEQ ID NO: 13239 - DNA, 201 bp, Homo sapiens
attataccactagagctgggtgcttaaagggcatcatcaaatccatttttctttccttgagtggaggtgcctttcatttgtaaatgatggatttgaaaaayggacaagtagtgaaaatgcaggaaaatgattcacatcagtaggtgctccagcagatgtggagtaaaaatcaacatgtcccacaaatgggcaattaaaggt

SEQ ID NO: 13240 - DNA, 201 bp, Homo sapiens
tggcaaggaaagggctcagctcctggtaggtgaccctgtaagccccagcatggttatggatcatggggctgtgaccggagtggtagaatatgctccctggycccctgtacccctggatggatcagctctccccagctgcaaggattgtgtgaggggggcgtgggcacccagcaaatgtctgggtagacatcaggtcaaaag

SEQ ID NO: 13241 - DNA, 201 bp, Homo sapiens
tggggtaccgtgtggactgtggtgctgtgtggactgtgtcatgtggattggggtgccgtgtggattggggtaccgtgtggattgtgccgtgtggattgggktgtcgtgtggattggggtgccatgtggattggggtaccgtgtggattgagccgtgtggattggggtaccgtgtggattgtgccgtgtggattggggtgct

SEQ ID NO: 13242 - DNA, 201 bp, Homo sapiens
ccaaattcatcaggtgggtgacatttcttggctgccgtctttcctctttggttagtgttaggaacttgggatcagaaccactgaagcgtcccattcatgcwgagaggccttggatgaatggctgctggacacgagcaagcagccgagtcaagagctgtcttagacagtgtgatggcagccaggttgggctctgggtcaggg

SEQ ID NO: 13243 - DNA, 201 bp, Homo sapiens
ggagcttatttccagcacattgtgaggcagcaccgtctccatcaacctccccacccttctctgtagcaccagctgggtcaccccgtctagggggtgggagrcttttacagaatgaaggttgcattttccaccctgagatactttgttccccggacccaccttgcagagtcctgctccatcctttgaccgcaacagcaggct

SEQ ID NO: 13244 - DNA, 201 bp, Homo sapiens
ttcaaatgttactttcagaagctgttattttggtctgtttctttcatcctgcatgtgctaatttccttgattaatttggagaacatctgcatataattccktgatcttttcgttggcaaaacctcacagctttgcgcaagacttggagagttcacattccagacagtctgggattgtatctaattgaaatgccaaacctac

SEQ ID NO: 13245 - DNA, 201 bp, Homo sapiens
gatgtgaatgggacgccatgagcttgttctctatggagttgttcccagaccctaacagatcagaaaattgaagcaaaactgagcgatcagcaaaaaggccrccatctttgtagtacgtcatatgtcaggtgacaacatcttagatgccatttgtcatcctcatccttcttaaaggagacaagaagtcgttgccctcaaccc

SEQ ID NO: 13246 - DNA, 201 bp, Homo sapiens
gttgtttttacctgcccagttgctgtggtggaagttgtgctagaaaattcagcctccttggtctatgtctgtgaacttactaaattcttgttgttctagarttctagatttggacctggtggttagagatgaagatgggaatattttggatccagaattaactagcacgattagtctcttcagagctcatgaaatagcttc

SEQ ID NO: 13247 - DNA, 201 bp, Homo sapiens; identical to SEQ ID NO: 2062

SEQ ID NO: 13248 - DNA, 201 bp, Homo sapiens
ttcaagtgagaactacctggttcgctggtccagttcaggattacctaaagacatagacagattacataatttgcgagccgtgtttactgtaagtgcacccmaagatgcttagttgaattggctaccattctaaggactacttttagccatttctgtctgccttcctgcgacactagaacatgggtccctgggatgcctgta

SEQ ID NO: 13249 - DNA, 201 bp, Homo sapiens
tttatagtttggatctgcaaataagttttaaaaaattgtagaacctgttcccatgtatccttcattcagtctctgccctcattattgacattttgtgttaycatgtcacagtggtcacaactaataaatcaatactgaaaatctctttgaatttataacaatgtctgattatttagttttactaatctcaaaatttggaac

SEQ ID NO: 13250 - DNA, 201 bp, Homo sapiens
catgtagtatcaatcatattaaattttgctttaaaatattgaagtcaccccataatgttatgaaatattaaaatcaaatatgtgagacaaaaaaggatctrcttcataaatcatgccagctaatttctggttggggaatgtaggtctccaaccagtggaatcatggtggggaggggttgtggtgcttcacatttatgaaag

SEQ ID NO: 13251 - DNA, 201 bp, Homo sapiens
atttcagatatgtacaaagtgggccaaacagtgtaatgaggcccccatgccccatcatgcagtcttgacaattatcagcttttaactaatctttttttttcaatctgtatcaatcatattttccagcaaatctcaaatatcatattttatctatagctatttcactatgaatttctaatttaaactcttttttaaaaccat

SEQ ID NO: 13252 - DNA, 201 bp, Homo sapiens
ggggagtttttatgacctcacactcccagaatgacggtggtttgcctcaagtatgtagaatttgcctgccttcccaactgagcttcttggatgctatggaygcgttgaacagcatccttcacaagcgttaaaatccgtggtgaacctgtcactgccctcctacgtaaatatctgaccacagagctgctgctttgggaggta

SEQ ID NO: 13253 - DNA, 201 bp, Homo sapiens
ctggtgtcccagggaagaccagctccctgtgagccacggtgccagttcctcaggctcttctgtcagggtctgggctttggtttgctctcccggaggccagkgctgggggttagggtgaggaagtgcctggccctttgcccatctgtctgcttacctattctgcaggtctggagctgctgttagctcagggtgcttttgtgt

SEQ ID NO: 13254 - DNA, 201 bp, Homo sapiens
ttaataagggttatatcattttcatgtatgtactactctgggaatggcccgggtcttgtgagtggtattttttcatcaagtacccagccagcgcagtcacyctgacagtccccccactgagataaggcatggaaaggtaaccctctagcaagtcctcgttgaggggggagcgttcaagtgcacagacgtctaccctgtgct

SEQ ID NO: 13255 - DNA, 201 bp, Homo sapiens
ttgttcgcgtgggtcgcatggagctgagggacaacaacaccaggaaactgacctcggggttgcggcgaccttttggagtggctggtaatctatttctctgwgtttccttgagagtttcagatcttcacagtcactttcaaaagaatcactgttgaatgttgattggacaatgcacagctgtgatttataagcttttctgct

SEQ ID NO: 13256 - DNA, 201 bp, Homo sapiens
gtttccttgagagtttcagatcttcacagtcactttcaaaagaatcactgttgaatgttgattggacaatgcacagctgtgatttataagcttttctgctrgagagaaaaaatatatttattagttattttcattgtggcttcaagttgacctgctaggctcaggatgctctagtcctcaagtttcagatataaatcatat

SEQ ID NO: 13257 - DNA, 201 bp, Homo sapiens
gtgcgtaaacggtggcaacctccgttttaaacaccctcctgagggcaggtggagcgggctcctcggagtttggcctcccccggtcctgcttggccctcccragcagctggtaatcgggctcttcggatggaggccgagtggagttttggagcgcagcttctccatagctgagcggctccgggcttttacagggctctgtgc

SEQ ID NO: 13258 - DNA, 201 bp, Homo sapiens
aggtaaccctctagcaagtcctcgttgaggggggagcgttcaagtgcacagacgtctaccctgtgctatcctgagctgtagtcttctgaaatgatcgtttsgcttcccagccaaggcagggctcccccaaagttcattcccactcttgcagtttcacctcgggatgcttccgcagaatttcagcgcctaagcagacaaggt

SEQ ID NO: 13259 - DNA, 201 bp, Homo sapiens
atatgtctcatcctgagtttccattcaccagtctgtgcttttgttagccttttgtttttatatcctgcaatgacatcctgcattcaacttgcctgtcaccraatgtccccctgctccaccaccagcaccccattctacctgtgctgttttccttctactgagactcacttccacctgtgcccagttccacctgcctttcct

SEQ ID NO: 13260 - DNA, 201 bp, Homo sapiens
gatctgcctgccttggcctcccaaagtgctgggattacagatgtgagccaccgcacccggccaaaaaattatttttagatttgacaaataaaaattgtatrtatttatggtgtgcaacatgatgttttgaagtatgtatacattgtgggatggctaaatcaaactatgtgtgcattaccttacatacttatcatttgtttg

SEQ ID NO: 13261 - DNA, 201 bp, Homo sapiens
ttcttttttttttttttttttttttttgagacgaagtcttgctctgtcgcccaggctggagtgcagtagcatgatctccgctcactgcaacctctgcctcytgcgttcaagcgattctcctgtctcagcctcccgagtagctgggattacaggcgcacgccaccatgcctggctaatttttgtatttttagtagagacagg

SEQ ID NO: 13262 - DNA, 201 bp, Homo sapiens
aagtagtgccttctctgagtagtcatgtcctggcaggtgtggcggcgctcttccgggcctctgttttgaggccactcatcccattcatgagggctccaccrtcatgacctaatcaccttcgaaggcctcatctcctaatgccaacaccttgaaggtgaggatttcaacccgtgaatttgagggagacacaaatattcagag

SEQ ID NO: 13263 - DNA, 201 bp, Homo sapiens
aaagatcccttccactcacatgaggcctgagtgttctttaggatgctcactggtgtggaagtgcctgggaggcccatggagcagccgcaggacccccacamtcttggttatcctagttatggcggttttcactgggctgacttattgcagaaggagctgtacaacttgcaatttgctgcctgcactaattccttcaaagaa

SEQ ID NO: 13264 - DNA, 201 bp, Homo sapiens
tgcctgctccacataagtagtgccttctctgagtagtcatgtcctggcaggtgtggcggcgctcttccgggcctctgttttgaggccactcatcccattcrtgagggctccaccgtcatgacctaatcaccttcgaaggcctcatctcctaatgccaacaccttgaaggtgaggatttcaacccgtgaatttgagggagac

SEQ ID NO: 13265 - DNA, 201 bp, Homo sapiens
caaggcgggtggatgtgtcattctccctctctgatctctgtcctttcatctataaagagaaagctcggaatctgtaattgtagagatagtttccagctctsgtcctctgtttctgtgctctgctgggattgcaacttgaggaatttctggcagatccatttcttcagtccatgttcctcatctgtcctggcttatcagtcc

SEQ ID NO: 13266 - DNA, 201 bp, Homo sapiens
ttccctcacttcctgcaggtctcagccccgaagtcccttcctctgtgacccttgagactgtggtcccaggatgccttgcagtgtgctcaggacttctcccrtgagaacttcgcagttgcatatttctctaagagaccatggagttagtgtttgaccgttggcaatggaagctaaacacctgtcaggggaggtcgtgagggt

SEQ ID NO: 13267 - DNA, 201 bp, Homo sapiens
ttcactgaagctctcaggttctgttggaagcacagacctttccctgttggcacctacatgctggtatccatcctggaactcttattagctgacttgctcggattcacgctttgtgtgtgcagcatagtctaaatggccagcaatcataccatggctatcatagaattctccttggttgttaatgagaatgtgaccacttgc

SEQ ID NO: 13268 - DNA, 201 bp, Homo sapiens
gacccccattctgcttcatgtgttacctgtagctttgggctggtctctaaatctcagctctgcaatggggataacagcacctacttggttattctgtggtratcaaatgagctggtgtattactatagaaagtgtgctgttcatgggaagtgttggataaatgcaagcccaacagacttttctcaaatcctacaaatgctc

SEQ ID NO: 13269 - DNA, 201 bp, Homo sapiens
gagggagaagctattccctgcctctctcctggcttccggtggctgccccggtctttggcattccgtggcttgtggctgttttactccaatccctgccccaycttcctgtggccttcttctttgtgtcttcctatgtgtctgtgtctctcaatctccctctccttataaggacagaggtcactggatctagaggccactcta

SEQ ID NO: 13270 - DNA, 201 bp, Homo sapiens
agcctcccgagtagctgggattacaggcgcacgccaccatgcctggctaatttttgtatttttagtagagacagggtttcaccacgttggccaagctggcyttgaacccctgacctcacgtgctctacccgctttagcctcccgaagtgttgtgattacaggcgtgagccaccgcgtggagccccattcattcttaaagat

SEQ ID NO: 13271 - DNA, 201 bp, Homo sapiens
actcacagatttggtgtctggagagggccctctgcctgctccacataagtagtgccttctctgagtagtcatgtcctggcaggtgtggcggcgctcttccrggcctctgttttgaggccactcatcccattcatgagggctccaccgtcatgacctaatcaccttcgaaggcctcatctcctaatgccaacaccttgaagg

SEQ ID NO: 13272 - DNA, 201 bp, Homo sapiens
tagatcaaggcactcacagatttggtgtctggagagggccctctgcctgctccacataagtagtgccttctctgagtagtcatgtcctggcaggtgtggcrgcgctcttccgggcctctgttttgaggccactcatcccattcatgagggctccaccgtcatgacctaatcaccttcgaaggcctcatctcctaatgccaa

SEQ ID NO: 13273 - DNA, 201 bp, Homo sapiens
gaagtagagccattctgggagatagcagtgcaggggactgtcttcgtcccttcatgctcctataacaaaatgccacagactgggtggtttataaaccacarattcatttctcaccattctggacctgggaattcctagatcaaggcactcacagatttggtgtctggagagggccctctgcctgctccacataagtagtgc

SEQ ID NO: 13274 - DNA, 201 bp, Homo sapiens
tggagagaacacaagtgggctgagtgtagctgcctctccttacctgtggctggtgccatgaaggagtgctgctgtcattggacactgtggggccagcaccrggttttgtgtgtcacttgcattctcccttggtacacagagcccagactggtttcctggtcccttcccagcgagcactgtgatggctttgccattgaggtg

SEQ ID NO: 13275 - DNA, 201 bp, Homo sapiens
ctcacccctcagcctccttcaccacccaagggagaagcactgtgcagggaggcggggaggggtggggagcatcggggaggggtggggaggagcagcatccsggagaggtggggagcatcggggaggggtggggaggggtggggagaagtggggagcatcggggaggggtggggaggggtgggaagcatcggggaggggtga

SEQ ID NO: 13276 - DNA, 201 bp, Homo sapiens
cagatgatggctgggaggaacaggaatttcagagtgtgagaatagcgccagaaggggaagagctcctgatgacatctcgcttttccggggaagtagagccrttctgggagatagcagtgcaggggactgtcttcgtcccttcatgctcctataacaaaatgccacagactgggtggtttataaaccacagattcatttctc

SEQ ID NO: 13277 - DNA, 201 bp, Homo sapiens
gccttcttttggagagctagagaagacttcacagaggtggttacatttcgtgcttcttgaagagtaaaattaagtttgccagatgatggctgggaggaacrggaatttcagagtgtgagaatagcgccagaaggggaagagctcctgatgacatctcgcttttccggggaagtagagccattctgggagatagcagtgcag

SEQ ID NO: 13278 - DNA, 201 bp, Homo sapiens
atggagagaacacaagtgggctgagtgtagctgcctctccttacctgtggctggtgccatgaaggagtgctgctgtcattggacactgtggggccagcacygggttttgtgtgtcacttgcattctcccttggtacacagagcccagactggtttcctggtcccttcccagcgagcactgtgatggctttgccattgaggt

SEQ ID NO: 13279 - DNA, 201 bp, Homo sapiens
gctgggtctccctatcccacaggtgcaggagtgatgccttcttttggagagctagagaagacttcacagaggtggttacatttcgtgcttcttgaagagtraaattaagtttgccagatgatggctgggaggaacaggaatttcagagtgtgagaatagcgccagaaggggaagagctcctgatgacatctcgcttttccg

SEQ ID NO: 13280 - DNA, 201 bp, Homo sapiens
gaaggtaagtaggtcacaccctagcacgtggcagacccatggttcaagccctatccatgtacctccagggtctgtgcttttagcccctactccaggggctracatttggcaccacagagcttctccgcctctttcccacatggtaggaaatgcatatgagacctgggcaacccctgagagaaggtaatttggttatgatca

SEQ ID NO: 13281 - DNA, 201 bp, Homo sapiens
taatttagtgctccccacgtgccagggaccttcctaagtgctgtatagatactcagttgcttaatctgcctcacactctgtgaagcaggcactgcagtcayctgcattttacagtcaaggaaacagggacatgggaaggtaagtaggtcacaccctagcacgtggcagacccatggttcaagccctatccatgtacctcca

SEQ ID NO: 13282 - DNA, 201 bp, Homo sapiens
ctttttttcacttttaaatcaaaacagatcattcatacaagagaagaaatacatatgtagagatgacaaatcattcagtgggcctctctgtaatgcttccygctccagtccctgagtagctccccccgcccagctgtgcacgtcttcttctttgtgatgtggtctctacacagatttgggattcattttccctcgcttctc

SEQ ID NO: 13283 - DNA, 201 bp, Homo sapiens
tcaagtgacccttccgcctcagcttccaaagtagctgggactataggccagcaccaccacagatggctaatttttgtaatttttgtagagatatggtttcrtcatatattagtctattttcacactgctataaagaactacctgagactgggtaatttataaagaaaagaggtttacttgactcacagttccacaggttta

SEQ ID NO: 13284 - DNA, 201 bp, Homo sapiens
agggggaggtctgcccccgtgatttagtcacttcccaccatgccgctcacccgacacgtggggattacaatttgagatgagatttgggtggggacacagarccaaaccatatcactccatgttgcccaggctgagtgctagattcctgtgtgttattttagggcactttatacttttattatttaccagtgtttgagaagt

SEQ ID NO: 13285 - DNA, 201 bp, Homo sapiens
cctgaatattcaaagagatcatatgttcattatgatttgctcctatgcagtaattgatcatcaaagcatgagaaagtccattttcgagtcagtaacaacamtgctcccttagcttatgtgggatcactaacaagcttttccacccaaagcccacagtgtgcccagtgccgtcctgcgccgtgaaataccgagatggagcca

SEQ ID NO: 13286 - DNA, 201 bp, Homo sapiens
tgaaaatgtgatattagcagaacctattcagccagaatttggcctgaatattcaaagagatcatatgttcattatgatttgctcctatgcagtaattgatsatcaaagcatgagaaagtccattttcgagtcagtaacaacaatgctcccttagcttatgtgggatcactaacaagcttttccacccaaagcccacagtgt

SEQ ID NO: 13287 - DNA, 201 bp, Homo sapiens
tctgtaaaacttctccttgcaagacaaagccactgttgattgcaatggaaataaaaattgaggatttttttttttttttttttttttacttctcccaagakgacacattttaagctaaagaaagcagcctccaagaattttatattcctaatattttgggcaagcccgagtttctaggttgtttttacctgcccagttgct

SEQ ID NO: 13288 - DNA, 201 bp, Homo sapiens
ctgggccacatgtgacctgtgggttgcgggttggacaagcttggattagaggacagaagaacttgcagctttcagcttggttggttgcttgggtaagggtrcactcttgtgttctctctctctctttctctctctctctctctgtctgtctcttttctctctctctctctctctgtctctcatctctcactctgaaagaag

SEQ ID NO: 13289 - DNA, 201 bp, Homo sapiens
aaatatctcttaaaaataagaattttttaacacctctatattattactccttagaaaatgttgttttatacatagttcctatagtttgcccaacttagtawctaaacaaggtaaaaatattgcctttggttgttatatctagtaagtttccgataatctttaggttgacacccctactttttttctttttttttttctttt

SEQ ID NO: 13290 - DNA, 201 bp, Homo sapiens
aggaagaaaggaattatgtgtatgtgctttacaaattcacatgtgcttgaatgtatttacccttgatgtgctcattttatttcatttctatgatttttgaygtgtttatttttcccacgtctagaacagaataggtgtgctggcagggatgctgttaggaactgtgatagatgtatttatggttcctgaaggtttacgaat

SEQ ID NO: 13291 - DNA, 201 bp, Homo sapiens
ctgtccaccagtccctgaagttctcagctattctctattgaaccctgttttctttgacacattgatctcaataagcaaacagtaatttagtgctccccacrtgccagggaccttcctaagtgctgtatagatactcagttgcttaatctgcctcacactctgtgaagcaggcactgcagtcacctgcattttacagtcaag

SEQ ID NO: 13292 - DNA, 201 bp, Homo sapiens
acaaatctgcatttgaaatctgtttgctttggaattatggttttgaacgtcctcagagtttgactgaaagggacattgttggccaactttggcttctttgyatggattgtaagcctcatgtagacagtctccctctgtaactaaaaaagtgggagagagtttaaaattgtgaatgattccattttagatgttgtagatttt

SEQ ID NO: 13293 - DNA, 201 bp, Homo sapiens
aacatttttaagtgtccagttcagaggcaataagtacattcacactgttgtacaaccagcaccgccaccatccatctccagagccttgtcatcttgcaaakctccaactctctacccattgaacgacttccccattcctccctccacccacctcctggtcaccaccattctactttgtgtctctatgaatttgcctactct

SEQ ID NO: 13294 - DNA, 201 bp, Homo sapiens
ctggagctctgttgtattttcccttaaaataaccttcccttgacaaagttcacactttgccttgcaccaatgtaaaaaaaaaaaaaaaaaagcgttttacwtcattgtgtaaactaaaaataggagtttggagcaaatttccatttttggtcaaatgtttgcatctcttttccaagtatttggggtgaaattttcacatct

SEQ ID NO: 13295 - DNA, 201 bp, Homo sapiens
gtgacagttggcacttggctggccaggagggctgccaggaaacaactgtgactgaggccccgcctccagcccaaggggaagtcaccttcagaacttgaccrtctcactccctgatccatgcagactgcccgtaaacgcggtagagcttaggtgaacagacctgcttcatcgtccagctaccttatgtcactagacttttaa

SEQ ID NO: 13296 - DNA, 201 bp, Homo sapiens
agttggcacttggctggccaggagggctgccaggaaacaactgtgactgaggccccgcctccagcccaaggggaagtcaccttcagaacttgaccgtctcrctccctgatccatgcagactgcccgtaaacgcggtagagcttaggtgaacagacctgcttcatcgtccagctaccttatgtcactagacttttaaaaaac

SEQ ID NO: 13297 - DNA, 201 bp, Homo sapiens
gacaggtctgttttgttcttctctctgtggtccccattcgggatcctgatagctgcctgccagaagggaagagccatgcagaaagtttctccctagacccrtttttcctccctgattctaggctggtgatcctcattctttttttctttatttttattttattttattattttaagttttagggtacatgtgcacaacgtg

SEQ ID NO: 13298 - DNA, 201 bp, Homo sapiens
agttttcccttcatttttaaatgtactggagtatccttcagttctccttgagtgagaagcaatcgctttgaccattgtcaaccagaaagaatttccccacrgcatttctctctttcccagctgggccataaattgtctcgtgactgaggttgctgtctgctcctgagcaagctggaagcaatgatgagctcagagctgggc

SEQ ID NO: 13299 - DNA, 201 bp, Homo sapiens
ctgttttgcataaaagaagattatccagcagtggggtttgctcttctctttttacatggctgccatagcaagccaacaagaaacctgccgtgtggagtgayggtcaggaaccttgcaagatgccgtcgaggctctgtctacaccaggcaaagaatcttccagattcctgctctctaactcagatgaaagtagttgctgcag

SEQ ID NO: 13300 - DNA, 201 bp, Homo sapiens
ggagtgccagtggatactgcgatagtccttggctactgaggactcagacagccgtagccagccgtctaacaagggacaatggtgtgggctgccatgggtcrtggatgccatcaatagtattggagcccctctggttgtcggctaccctgagaggggtagagtgtcctctgcccagatgataaccaagcagatcattggaaa

SEQ ID NO: 13301 - DNA, 201 bp, Homo sapiens
agattgtttgagcccaggaatttgaggttacagtgagctgtgattataccactgcagtccagtgagacactgcccaccccaccccgataaaaaaaaaaaaagaactgtgattgggagggtttggggccaaggttgcttaaacaaacacagcccacagctctgtgccaattgaggtttgggattcctgcctcacccctagat

SEQ ID NO: 13302 - DNA, 201 bp, Homo sapiens
gttgttggacagtttttaccatttgcacttccagtatgaccactccaggtctctgcattaatttttctttttaaatcctctgttttaatgttttcgggggrgggggggcccacttctatctgaaaatgcccatccagacactgtgggttctgtgccaatgccagggaaggaagctcagggttctgccctgggccctaagac

SEQ ID NO: 13303 - DNA, 201 bp, Homo sapiens
tgttgttggacagtttttaccatttgcacttccagtatgaccactccaggtctctgcattaatttttctttttaaatcctctgttttaatgttttcggggkagggggggcccacttctatctgaaaatgcccatccagacactgtgggttctgtgccaatgccagggaaggaagctcagggttctgccctgggccctaaga

SEQ ID NO: 13304 - DNA, 201 bp, Homo sapiens
ttgtatgtttgttgttgttttttagcaagaatacctgataagtggtgtggtgttcttcccattgcatcacaccagcaagcacatcatgtttttctgtctcytataacgtgaagattgattagtggcatcaggtgctgccagcatttatccagattccttcaatatacagtagtttttcacctaattgttatggcagccaat

SEQ ID NO: 13305 - DNA, 201 bp, Homo sapiens
gctcctctggtgagaccctgggagtggaggcagctgtggggctgacatcgggctctcctctctctttgcaggtggaaatcagccccctggagaatgccatygagaccatgcagctgacgaacgacaagatcaacagcatggtgcagcagcacctggatgaccccagcctgcccatcaacccgctctccatgctcctgaacg

SEQ ID NO: 13306 - DNA, 201 bp, Homo sapiens
aggatggtcttgatctcctgacctcgtgatctgcctgccttagcctcccaaagtgctgggattacaggcatgagccactgcgcctggccttttttttttttgaagtacatgatctcactctgttgtccaagctggagtgcagtgatgtgatcatagctcactgcagcctcgaactcttgggctcaagcaatcctcctgaat

SEQ ID NO: 13307 - DNA, 201 bp, Homo sapiens
gtgcaaggacagtgacatcagtgggcagacaacctctgttatgtccacagccacctaggagtgccagtctagggttgctgacggacagaatcgcccattckctgttcatctctgccctgccccacccccagctcccaggcagtccgctagaggctgtagcaggaagaaagccggacatgaagataccaagggctcttgggc

SEQ ID NO: 13308 - DNA, 201 bp, Homo sapiens
tctggagtccactccctcaccagtggccagtagctgcctgtggaaggcaggagtgagcagcacggtgtctctttctgtccagttaaagcaccgagcaagargcaactgtatctcttgctgcctgctttagtcttttcaaggtctttctttgcaaaactacaaatgtcctggcctaaagaaaaaatgtcatatctctgttac

SEQ ID NO: 13309 - DNA, 201 bp, Homo sapiens
ggagtgcagcggcgcgatctcggctcactgcaagctccgcctcccgggttcacgccattctcctgcctcagcctcccgagtagctgggactacaggcaccygccaccgcacccggctaattttttgtatttttagtagagacggggtttcaccgttttagccgggatggtctccatctcctgacctcgtgatccgcccgcc

SEQ ID NO: 13310 - DNA, 201 bp, Homo sapiens
cagctctgttgggaaaaggtggcagttcagttcccgaggctggtgccctcggcaagaatgggagagcctggtaatttataaaggattatcacatgcaaagkcaatgtttgttttattccatcatctctcattctttcaaagcagtggcgttttcttagtatcgccatgtaatagagttcgagaaaagtgaccttaaaattg

SEQ ID NO: 13311 - DNA, 201 bp, Homo sapiens
gaataaaaggcagttactctttttatatttgagtccacaaagaaacaattgcagctataaatatgcagtgaacaaatacctcttattctctttaagatctwttagccagagctaattccttaattgaatgttgttctaaatttaccaccaaaatgcatgagggcgatctgtgtttgtatgtttcagccaactgcatgacat

SEQ ID NO: 13312 - DNA, 201 bp, Homo sapiens
ccctgtgcctgggagccctgatgtccagcgggaggtgctccccagcccgtggtttcaggaaagtggggcgggacctttgctaagacagtaagcagctgacrgagccttgccccgttgcccggaccccagcttcccacttagtgcctttgcagcaccctccctggcctggctgaaaacagggtcaagctccctctcctaggg

SEQ ID NO: 13313 - DNA, 201 bp, Homo sapiens
agctggagctctgttgtattttcccttaaaataaccttcccttgacaaagttcacactttgccttgcaccaatgtaaaaaaaaaaaaaaaaaagcgttttrcatcattgtgtaaactaaaaataggagtttggagcaaatttccatttttggtcaaatgtttgcatctcttttccaagtatttggggtgaaattttcacat

SEQ ID NO: 13314 - DNA, 201 bp, Homo sapiens
tgcagaccgcttaaaggcttctcactcttgcctgacctttctggaaaggcagagccatacagggcccgtgccctgtgcctgggagccctgatgtccagcgrgaggtgctccccagcccgtggtttcaggaaagtggggcgggacctttgctaagacagtaagcagctgacagagccttgccccgttgcccggaccccagct

SEQ ID NO: 13315 - DNA, 201 bp, Homo sapiens
ggaagatgcagtcagagtgagacagtcagtattagccaacaccagccacctctgaaatcaagaaacagcctggcaggttgacaaatgcgatacataatttrtagcccaagtgatatatgaagccctgtgactattttcagctggagctctgttgtattttcccttaaaataaccttcccttgacaaagttcacactttgcc

SEQ ID NO: 13316 - DNA, 201 bp, Homo sapiens
gacgtcagtctggcaaaaccatgacccggctacagctccactgatccagcctgtctcctcgtggcccatttccatatgcaattaaggaaatcttcattacrtacttactctgtgggaaggatatacaccctagagctcattcactgtttgaaatgtctacagcttcctacgggaaataggggcttccagaatccaggacaa

SEQ ID NO: 13317 - DNA, 201 bp, Homo sapiens
agtgtgaattagatgcagttttgtactttgcaatgtatctccttgctctttaaagagcaccttcccttttctttgacaagcttcagctgtcactgtcttgrattccttctatccacccctctgcccgtctgtgccccagaggtctaggaagacaccagaggctatgcatggtgcctgggccagcttagcagtgtgcctggt

SEQ ID NO: 13318 - DNA, 201 bp, Homo sapiens
ctcccaggacttgttttatggaaattgctgtgttcgcttcagtttttcgttttctgtgttacaacggttttggcatttgttgccttgcatgaatttctccrcatgacgtgacagtctgctgcctgaattcagtatgtccacgtcacctgttcacgtcatctggcctgagtctggctgcactgatgtttctcattagtgtta

SEQ ID NO: 13319 - DNA, 201 bp, Homo sapiens
tagtaattttcttctgagcacacagaattaaagttttattttcacagagctcgctcacttttgttcctaataaatgactggtttcaaaaggcttccataamtacccgttttatccacccttataagcccacagatatgctgcagggttctgctgtgttcatggaaaccataaggcttcatggtatctgcagtatttgccca

SEQ ID NO: 13320 - DNA, 201 bp, Homo sapiens
tcattgcaacgtttgggacatatttatttttctttgtttatctgagattcaaatggaactgggcatcctgtactttatcttgcaaccctacaaaatatcayattatttacacagtttcttgtggtggatgtttagaattttcagcaatgctatggacatctttgggtatgaaattttctattttgaattacttcctttggt

SEQ ID NO: 13321 - DNA, 201 bp, Homo sapiens
tgtgcagagccctccgatgtttttattctgttctgttctgttctattccatcccatccattctatcccttttcacttaataagtaaataaatacaatttcrcattcttcccattctattgatttcgtgctccactgaatgaatcacagctgatgccagcctgtgccacccagcacagaaaatgccacatggctgactttcc

SEQ ID NO: 13322 - DNA, 201 bp, Homo sapiens
catttgtgaattgctttatgtgacatggctgacactctgtcaagcataggtcttgtgcagttgtctctgttcagaagccagtcaccaaaatggtggtcctrtctgccctggcatcttggaaggacagagctgcagtccccagagaggatcctgtgttgtccctcatgtgcagatgaggttctgagattcaggggggttgaa

SEQ ID NO: 13323 - DNA, 201 bp, Homo sapiens
cactgcaccttgggatggaaactgacctacgaccaaatgctacctgttcgagttctgttcattcttaaggcctagtcataaattatttcagatactttccrtaacagttattctatttcatgtctgcttttgctctttgcttaataactaaaacaaataatttccagagttttacctggttgtttataaccaatgtattgc

SEQ ID NO: 13324 - DNA, 201 bp, Homo sapiens
cactgaagctctcaggttctgttggaagcacagacctttccctgttggcacctacatgctggtatccatcctggaactcttattagctgacttgctcggattcacgctttgtgtgtgcagcatagtctaaatggccagcaatcataccatggctatcatagaattctccttggttgttaatgagaatgtgaccacttgctt

SEQ ID NO: 13325 - DNA, 201 bp, Homo sapiens
tcactgaagctctcaggttctgttggaagcacagacctttccctgttggcacctacatgctggtatccatcctggaactcttattagctgacttgctcggattcacgctttgtgtgtgcagcatagtctaaatggccagcaatcataccatggctatcatagaattctccttggttgttaatgagaatgtgaccacttgct

SEQ ID NO: 13326 - DNA, 201 bp, Homo sapiens
atcacgtctccctagcattgtcataaagtaatcctcttatggaaattgcagataccatattctatgtctttatctacctgccatatatgtgtatatatagwttgcctcttactagattaatattttatgtgttgccagacttccctgctccctccaccccttaacaagtaccagagacttccttgcctcggctggaggagc

SEQ ID NO: 13327 - DNA, 201 bp, Homo sapiens
cagaaacaagctcccaagcccacacagcacaagagtcagccaccgaggaggcattttaggtcctgattggagttggtcactgataactgtaacttttattmccacatccttctgcccccatatgctgccctttgtgttgaataaacaacatgaatgtttagaagctggatcaggtgggtttttgaagaaggttattgcctt

SEQ ID NO: 13328 - DNA, 201 bp, Homo sapiens
acacattcagcagaaacaagctcccaagcccacacagcacaagagtcagccaccgaggaggcattttaggtcctgattggagttggtcactgataactgtwacttttattcccacatccttctgcccccatatgctgccctttgtgttgaataaacaacatgaatgtttagaagctggatcaggtgggtttttgaagaagg

SEQ ID NO: 13329 - DNA, 201 bp, Homo sapiens
tacccgtgctcgtctgtgtgtgtacctgtatgtgtgtgcatgtgggtgtgtgtgtgtgtgtacccgtgctcatctgtgtgtgtgcatgtgtgtgtgtgtgkacccgtgctcatctgtgtgtgtacctgcatgtgtgtgcatgtggctgtgtgtgtgtacctgtgtgctgaggtgttggtttcaagtaaagacacttttatt

SEQ ID NO: 13330 - DNA, 201 bp, Homo sapiens
tttactcctgctcaaaactctgagtttactggaataatttttagtattgtttccctcttaacatacctaaaaaccttgttgaaagagatatgtgataaatyatcgtaatattctggaataaattcttgttctccctcacaccttccatttatctttgaaatcttcactttatgttcgatgaaactgagctttggatgcgga

SEQ ID NO: 13331 - DNA, 201 bp, Homo sapiens
ggtgtgtgtgtgtgtacccgtgctcgtctgtgtgtgtacctgtatgtgtgtgcatgtgggtgtgtgtgtgtgtgtacccgtgctcatctgtgtgtgtgcawgtgtgtgtgtgtgtacccgtgctcatctgtgtgtgtacctgcatgtgtgtgcatgtggctgtgtgtgtgtacctgtgtgctgaggtgttggtttcaagta

SEQ ID NO: 13332 - DNA, 201 bp, Homo sapiens
gtgtgtgtgtgtgtgtgcgcgcgcgcatgcatgctgtaaggattgattttgcctggcctgatttgtgtgtgtgtgtgtgtgtgtgtgtgtgtgtgtgtgtrcatgcatgctgtaaggattgattttgcctggcctgatttcttactgtgcatccaaaatgtgtggctctcacttccattgtactctggatgtgtttctgct

SEQ ID NO: 13333 - DNA, 201 bp, Homo sapiens
aggaaaattctacctttgtgtatcatctttatttttttcctgagtttttcttagtgctttctgtaccaaaagtttttaaggcattttgaattatgaacatygtaaaaaggaagtgtagccatgatttactgttgaacatagaatttagctcttgcaatcctcaacacaaattatttagtgacattttaagaacatacctct

SEQ ID NO: 13334 - DNA, 201 bp, Homo sapiens
tttcttccatgaagaagagaaacattttgcattgcctgctggattttgcttccctactcgccttgctccctggagtgagggactgtgattgagcccttctstcttggttacttctaaagtctcgtgtcaaataattagcaagattaccactctggagactaggagaaggatgtaacctacacagcatgagtttttagtgat

SEQ ID NO: 13335 - DNA, 201 bp, Homo sapiens
gcttggagaccagtgattaccggggcttgcaagatgataaaatggaagccaggtgggacgtcagtctggcaaaaccatgacccggctacagctccactgayccagcctgtctcctcgtggcccatttccatatgcaattaaggaaatcttcattacgtacttactctgtgggaaggatatacaccctagagctcattcact

SEQ ID NO: 13336 - DNA, 201 bp, Homo sapiens
gttaagcttggagaccagtgattaccggggcttgcaagatgataaaatggaagccaggtgggacgtcagtctggcaaaaccatgacccggctacagctccmctgatccagcctgtctcctcgtggcccatttccatatgcaattaaggaaatcttcattacgtacttactctgtgggaaggatatacaccctagagctcat

SEQ ID NO: 13337 - DNA, 201 bp, Homo sapiens
atgtatttcattttaggggaaacaacgcaattccagttttacaaatgtattggggtaaggagacttaagacctcagttaagcttggagaccagtgattacyggggcttgcaagatgataaaatggaagccaggtgggacgtcagtctggcaaaaccatgacccggctacagctccactgatccagcctgtctcctcgtggc

SEQ ID NO: 13338 - DNA, 201 bp, Homo sapiens
tgttaaaggaaccagagtttccatcttccgtgctttttagattcagttttggatttttgcttgggagttgaggagtaagtctcctgagagtaaggcgaagktatgacctgagtttcctcaatagggtggagttttcttagaaccggctggagtttgtcttcttgctgcttaaaatccagctccacactagaaaagagagag

SEQ ID NO: 13339 - DNA, 201 bp, Homo sapiens
ctaataatgattttatctgtcattattattacttagtttattttagtaaagtatacaaatttttgaaaagcatgcagatacaaatggcatgtttatttccygggcaagatgattcactctctcaaaaggaacccgaaggatttttgttcacccattgggtgatccaaccccaaaataagttacccaatagcaaataataag

SEQ ID NO: 13340 - DNA, 201 bp, Homo sapiens
cacataaggtggccccagtgctcatcccaggaagaatggcccctgcttgtctcggcaaatgactcccacggaagctgtggagagccacgaaggtggcaggyggcattagaggggctgtaaagggaccgatgcctgagaatttcttctgcaggatgtagaaccgtgtgcatttggatgataatgcagtcagaggagggcttc

SEQ ID NO: 13341 - DNA, 201 bp, Homo sapiens
tccctgaagttgcattcatgtcgctcctactccgagggtctcccgtttaggagggaatagtcaaaatctacttagttcatgatttttttttttttttttttataattgagagcctgttttcagttggaacatcatagccgcatcattctctcttcctacttcactgtcttcctcctgccgccaaccctgcgctacgtaagg

SEQ ID NO: 13342 - DNA, 201 bp, Homo sapiens
ctctcctacagcagctcctgccttcgccccttcgtctttatatgtgtgttccagattttcataaaggtatcaagtcctggtagttgcattaaacaaagcakccatttattgtgtccttgccctcagtttaaaagtaatatgtgatctggttagaaaaatgccaaaaagttaattaagaaaaataagaatcatttatcaccc

SEQ ID NO: 13343 - DNA, 201 bp, Homo sapiens
ctccctgaagttgcattcatgtcgctcctactccgagggtctcccgtttaggagggaatagtcaaaatctacttagttcatgatttttttttttttttttttataattgagagcctgttttcagttggaacatcatagccgcatcattctctcttcctacttcactgtcttcctcctgccgccaaccctgcgctacgtaag

SEQ ID NO: 13344 - DNA, 201 bp, Homo sapiens
gctccctgaagttgcattcatgtcgctcctactccgagggtctcccgtttaggagggaatagtcaaaatctacttagttcatgatttttttttttttttttttataattgagagcctgttttcagttggaacatcatagccgcatcattctctcttcctacttcactgtcttcctcctgccgccaaccctgcgctacgtaa

SEQ ID NO: 13345 - DNA, 201 bp, Homo sapiens
ttcctgttgaaggacgtctgggctatccccagtttgtggctcttacgaataaagctgccaccagccttcgtgcatcagtttttgggtgaacatgagttcgkttctgtggcataaatgccttcctggacaaatgctggcttgttgggtaattgcacatttcgtgacgtaggaaactgccaatctatggctgtaccattttac

SEQ ID NO: 13346 - DNA, 201 bp, Homo sapiens
tgcatttgatgattgtgtctctttaatctttctttttctaaaataaatccatcaccatcacactgttttattttcttttcatagcattgcttttcagtttytttgaagagaccaatccactagcttttgtagactatctcccattctggactttttttgtgctgccttgtaatatgcctttcgactggtttctttatcccc

SEQ ID NO: 13347 - DNA, 201 bp, Homo sapiens
agaaagatctattgagcccagaaattcaagaccagcctgtgccacatagtgagaccccatttctacaaaaaatataaaaaaatagccaggtatgatagctyatgcctgtagtctcagctacttgggaggctgaggcaggaggatcactttagcctaggagtttgaggctgcggtgagctaagattatgccactgcactcca

SEQ ID NO: 13348 - DNA, 201 bp, Homo sapiens
cttgtcacaaattcccactctgtggctttggaaaacacactacattttcctacactctcacacttctgtgaccagaagtgtgtgggtctctcccaccgcawcccattccctgacaccagctggatgtcctacaattcaattcaattctgacaccatctacctggagttagcatcagattctgcaaggaaaagggcttatct

SEQ ID NO: 13349 - DNA, 201 bp, Homo sapiens
acctgcccaaggggctgctggctgccacgtgtccacgtctcagtaacagaagcagagaatgtgccccgattctctgtagttagctagaagggaacaatgasggctttggtacttctagcggagaatgttgtcttgccacttgtcacaaattcccactctgtggctttggaaaacacactacattttcctacactctcacac

SEQ ID NO: 13350 - DNA, 201 bp, Homo sapiens
acactggagatgctgacctgcccaaggggctgctggctgccacgtgtccacgtctcagtaacagaagcagagaatgtgccccgattctctgtagttagctrgaagggaacaatgacggctttggtacttctagcggagaatgttgtcttgccacttgtcacaaattcccactctgtggctttggaaaacacactacatttt

SEQ ID NO: 13351 - DNA, 201 bp, Homo sapiens
gatgtgctcccacttctcacagcagtctcctggaacaaggcctgggcccaggagggcaggtgcaccaggatgtgggctggcttttattgtgtagctttggktaggaccagccatgtccccaaagcgcaacaatttatgtcaactgacattggcgccaacttggccggttttatgtgagtgccatgggcaacaccagcattg

SEQ ID NO: 13352 - DNA, 201 bp, Homo sapiens
cttctacactggagatgctgacctgcccaaggggctgctggctgccacgtgtccacgtctcagtaacagaagcagagaatgtgccccgattctctgtagtyagctagaagggaacaatgacggctttggtacttctagcggagaatgttgtcttgccacttgtcacaaattcccactctgtggctttggaaaacacactac

SEQ ID NO: 13353 - DNA, 201 bp, Homo sapiens
caggagttcgagaccagcctgaccaacatggtaaaacactgtctctactaaaagtacaacattagccgggcgtggtggtgcacgcctgtaatcccagctayttgggaggctgaggcgggagaatcgcttgaacccaggaggcagaggttgcagtgagccaagatcgctccattgcactccagcctggggaacgagagtgaa

SEQ ID NO: 13354 - DNA, 201 bp, Homo sapiens
acctgtaatcccaacactttgggaggctgaggcaggtagatcaaattagttcaggagttcgagaccagcctgaccaacatggtaaaacactgtctctactraaagtacaacattagccgggcgtggtggtgcacgcctgtaatcccagctatttgggaggctgaggcgggagaatcgcttgaacccaggaggcagaggttg

SEQ ID NO: 13355 - DNA, 201 bp, Homo sapiens
tatctgttttagtccaaaatggaaatataatgcagatgtctgcgttctaaaagatcaatgcctagcggtggattggagttggggggccggtcccaatgggkttcctctgggagctgagctgcaagcttggcacagatgtcagtcagcgctggtgtggggggacttgagagacaaggctgcccgcggagcccaggaggagtg

SEQ ID NO: 13356 - DNA, 201 bp, Homo sapiens
aatgtgaacctgtgttcctctttaattcagagccagactcagtgcccacgtacttttactgtggtcagcacttgctcagttttaactaagaaacacacccwgggttctcaaggttatctgacattattaactttcttcaaatgggaacgtcctgaatcatttgatgaaaaatcaaatgttctgctcttaaccatttcctgg

SEQ ID NO: 13357 - DNA, 201 bp, Homo sapiens
gtccaaatgactacagcagtttattaagtgaccgaacgggcagacaagcatgcagggagggccgtcagcatccacagaacttaccgacctgactgagagcrccacgtgcaccaggctcacgtcctgagcgtgtgcccacagcccttggagtgtttacaagaatttccttggttcgatcttacatgtatttcattttagggg

SEQ ID NO: 13358 - DNA, 201 bp, Homo sapiens
ggagacaaattcttgcaagagcagggctggattttcctgtctagaatcttgtatgttaaaaataacaatcttccgtccaaatgactacagcagtttattamgtgaccgaacgggcagacaagcatgcagggagggccgtcagcatccacagaacttaccgacctgactgagagcgccacgtgcaccaggctcacgtcctga

SEQ ID NO: 13359 - DNA, 201 bp, Homo sapiens
ggggcagatcccaccccactctgccacgtgccgcatcacagttgggttttgtcagtgtgctcctttcccaaggctaacactaacttgactttagcacgacrttcactgcaaaggttatggatcagacggagacaaattcttgcaagagcagggctggattttcctgtctagaatcttgtatgttaaaaataacaatcttcc

SEQ ID NO: 13360 - DNA, 201 bp, Homo sapiens
actcttgtccatgtagcctctctcctttggtaaatgttgagatctttagcccttcttcccaacaacaccaagagaaggaatgaaagattttggcaatgggsagtcctcttccgcacctcgagctgtgtctgcggctcccctgcgtgggtagttcatggatgctggagccccactggactgaccagcactggtacaagtgag

SEQ ID NO: 13361 - DNA, 201 bp, Homo sapiens
caaagatcaggtagttgtagatatgcggtgttatttctgagggctctgttctgttccattgatctatatctctgttttggtaccagtaccatgctgttttrgttactgtagccttgtagtgtagtttgaagtcaggtagtgtgatgcctccagctttgttcttttggcttaggattgatttggcgatgcgggctctttttt

SEQ ID NO: 13362 - DNA, 201 bp, Homo sapiens
tgtagccccagcaacttgggaggctgtggtgggaggattgcttgagcctgggagttagaggctgcattgagctgtggttgtgctcctgcaccccagcctgkatgacagagtgagaccctgtctcaaaaataaataaataaataaataaataaataaataaataaataaaaaagagtagagtgctcaattcgtcatcctctc

SEQ ID NO: 13363 - DNA, 201 bp, Homo sapiens
atggtgagactgttttgtagaaaatatttcataatcatctaatatgtatttgtaataatctatgaggataggtagacagtcttgcaaaattcacaattacrctattaataatggattgttttttaaatgtatgatttctcccccctcaggtgatgttcgaaatgatatctatgtaacattagttcaaggagattttgataa

SEQ ID NO: 13364 - DNA, 201 bp, Homo sapiens
agctcagaactctgaggacagagaccatcccaacccttttggattcgaaccacaaagaatctgtagaatcttctacactggagatgctgacctgcccaagrggctgctggctgccacgtgtccacgtctcagtaacagaagcagagaatgtgccccgattctctgtagttagctagaagggaacaatgacggctttggtac

SEQ ID NO: 13365 - DNA, 201 bp, Homo sapiens
agagataatgctgtcagaggacagcagttactagtaagtaacctacatttcccttctactctggctgctccttgctgtctaaatagagaaagtggaattargtttatcatctgtgacctaatactaattcctcttacatcctgcctttgtgcaaagggaaaagggccatttaaaaagtagtggacgaagctttagtattgt

SEQ ID NO: 13366 - DNA, 201 bp, Homo sapiens
gtgagcatatagagcacaagcggaatgactgatccagaagagaaaaacaatagacatgttcagctcagaactctgaggacagagaccatcccaaccctttwggattcgaaccacaaagaatctgtagaatcttctacactggagatgctgacctgcccaaggggctgctggctgccacgtgtccacgtctcagtaacagaa

SEQ ID NO: 13367 - DNA, 201 bp, Homo sapiens
ttcatttacattgaaagtctgctttttagtgtagccaccctcatcaatggtctatcctaggtcttctggagaacttgctgcagcttctccatcagcacttkctgttcaccttgcacttttatgttatggagatggcttctttccttaagaatcaacctctggtagcttcaaacttttcccctgcagcttcctcacctctct

SEQ ID NO: 13368 - DNA, 201 bp, Homo sapiens
tgtagccttgtagtgtagtttgaagtcaggtagtgtgatgcctccagctttgttcttttggcttaggattgatttggcgatgcgggctcttttttggttcyattttcttgagactatttccttttaacaagtactaattcaggttctcaaatttagccctttttggttgagtgagtcattttcatacaaaatcacacttac

SEQ ID NO: 13369 - DNA, 201 bp, Homo sapiens
gggcctctcctctcatttggaccatgttcctttcatatcaaaaaatgtagctcagaggctaggccagggtgaactaaaacaaaatccaggtctcctgacgstacatcagctcccctgcccgtgacaccaaatgaactggtcctgtccttttctctggaaaccaccaagacaaagcttcatgtctccatttagtgatcctca

SEQ ID NO: 13370 - DNA, 201 bp, Homo sapiens
attacttttggtgttttagacatgaagtccttgcccatgcctatgtcctgaatggtaatgcctaggttttcttctagggtttttatggttttaggtctaaygtttaagtctttaatccatcttgaattaatttttgtataaggtgtaaggaagggttccagtttcagctttctacatatggctagccagttttcccagcac

SEQ ID NO: 13371 - DNA, 201 bp, Homo sapiens
acgctggtccctctcccaccctccatagtggcattcacgtcctgccagccagctaggatcatgcggtggcctccctgctgcgattccatccccactgtgcyctgttctcctgcctacccattccctgtagccacagggtgtcaggtcagagcctgactcttgttcctgagcccccctctgggtgccccccatccttcagat

SEQ ID NO: 13372 - DNA, 201 bp, Homo sapiens
attttttcatgtgttttttggctgcataaatgtcttcttttgagaagtgtctgttcatgtccttcgcccactttttgatggggttgtttgtttttttcttktaaatttgtttgagttcattgtagattctggatattagccctttgtcagatgagtaggttgcaaaaattttctcccattttttaggttgccttttcactc

SEQ ID NO: 13373 - DNA, 201 bp, Homo sapiens
tttgctccattaaaactgatttattatctcacagggttggttttagagaaggaagcacattgcacatctccctccctccctgtcttttttaacttggtgamgtaaatgacaacagtcttcagttccctcgagtcatgtggctcaagtgatggatagcactgtccttgttcccaggattgattttaaacattatggccatgc

SEQ ID NO: 13374 - DNA, 201 bp, Homo sapiens
agactccgtctcaaaaaaaaaaaaaaaaaaaaaaaaaaaaaaatgacgtttgtggttttttataccacaaatttagactggaaagtatgtgaacttttttactgttgttaatctgacagaacttttgtaaaatgtgtttctgtttgttaactataccgagtatatgactgtttttcaactctgacaacgattttttttttg

SEQ ID NO: 13375 - DNA, 201 bp, Homo sapiens
tcatataataactatgtatcagtgtacacagagtgcattttcctgttttctttttttgtttgtttgtttttttaaaccatgagatgcaactaaaataccarcttcccagttcagatctggtacataaagtaagccctgtgaatccctcgttctaaagtcctagaacttgcccttcaagggattggttgggtgctgagtgga

SEQ ID NO: 13376 - DNA, 201 bp, Homo sapiens
gacttgattctgcatttcctctcggataatggtaggcaggtcatgtattccaagctcattgagggcagagagtacatgtcttattgtcttttcgtcttctrtgatctttaatggtatcatgtatgcattagcctgttctcgccttactataaagaagtgcctgagactgggtaatttataaagaaaagaggtttaattggt

SEQ ID NO: 13377 - DNA, 201 bp, Homo sapiens
tggcttcccaaggagcaggcccatgacccctttgggccaggtcagaccttaagtatagtgtggaaatgtgggggcaagatttgtcacttgcattcaaactsatgggctccgaggtgcctgccctcactaggactcttctgaatgcagatgaaattctgttggaagcccctgtatgctttattggggtggcaagtggggaga

SEQ ID NO: 13378 - DNA, 201 bp, Homo sapiens
ataaagtcttcagaaatagaagaattactcacctggaaaagtcaggactccaattagtactttgccctttttcagaacaatcacttcataaaagtccccaygtgcaaacatgtaatctgaactattaagtgctgtaattgataaggatccttcaaggtaagtgaaaagcgatgatgccgaatggcatttaaaaattactgt

SEQ ID NO: 13379 - DNA, 201 bp, Homo sapiens
taccagcagccctatgaggcaggcattattggggttacatattcttgaacactggcaggtaacaaggtggtaacaaaggtaagacaataaagccagatcaratgtgttaatgccagctggcacattaatcccagggatccactgggcctaccagaagggaggaacctaaggtggaaccagaaccaacagcaggacatggtg

SEQ ID NO: 13380 - DNA, 201 bp, Homo sapiens
aacaagggtaatgtgaagtaggccttgcaatactgaatagcaaaaccatttgaaagctacaataaagtattaattaaattgaaagtactctgtttctatayaagtgtaagagcaagaaggaatcctttcaaatacaacattaattacatatggcttataggacatggtgattttcagattttcttctttattttaaaatat

SEQ ID NO: 13381 - DNA, 201 bp, Homo sapiens
cataatggttactcctttggctgagcagaatggaaatttcctaagtctaagagtgaagatgctttgtctttagtctaagagcattgggaagccattggggwaatgggttcagtgtgatgtctggaaagcattgatgccttgatgagatttgtcatttgaaaagtgaagcatggggacaagaaaggacaaggatggacctaa

SEQ ID NO: 13382 - DNA, 201 bp, Homo sapiens
caaagaatactggcttcccaaggagcaggcccatgacccctttgggccaggtcagaccttaagtatagtgtggaaatgtgggggcaagatttgtcacttgyattcaaactcatgggctccgaggtgcctgccctcactaggactcttctgaatgcagatgaaattctgttggaagcccctgtatgctttattggggtggca

SEQ ID NO: 13383 - DNA, 201 bp, Homo sapiens
ctggtgagtttacccaatgagccaccaagacctacaccccattggtctgaggatctcctgcccaggaatcccatagctgctacagtgaattagcactgttstaataattgattgggttttttaaatccactgtcccatttgccttgttcttagccttcaatgactcccattagtgacttatttaggtagcctgtgtgaccc

SEQ ID NO: 13384 - DNA, 201 bp, Homo sapiens
cagggatggaaaggtgcagacagaggtatgacacgattttgcctctgaagcagatggatggctgctattagagcagcctgcttattgtataagacatcctrtgaatagtcaaactaaaacatgcagccgggcacagtggcttacacctgtaatcccaacactttgggaggccgaggcaggaggattccttgagcccaggag

SEQ ID NO: 13385 - DNA, 201 bp, Homo sapiens
ataagatacagcaagtatatcatttctacccatctagcatcaatattctaggttaacgcaagtcacatcacgcaaacatgttctgtgatggctttttattyctgctgctgggagaatgagacctttttcatgtttccaagagatgctgtcatatacattatacatacatattaggtatatgtgtgtcatacacacacagag

SEQ ID NO: 13386 - DNA, 201 bp, Homo sapiens
tgtctctgctcctgcctcactttccacctctctgcccagcccccataaatagtatgtgggaagctgggcacagtggctcacacctgtcatctcagcactttgggagccgaggtggatggatcgcttgaggtcaggagttcgagaccagcctggccaaaatggtgaaaccccatctctactaaaaaatacaacaattagctg

SEQ ID NO: 13387 - DNA, 201 bp, Homo sapiens
aaaataaaaaaactagccaggcatggtgatgcacacctgtggtcccaggatactcaggatactgaaacgggaggatcacttgggtcccagggttgaagctrcagtgaactaagatcgtgccactgtactccagcctgggtgagggaatgaaataaataaataaaataaatagaaactaaaacaaaaaatgcaacaggaata

SEQ ID NO: 13388 - DNA, 201 bp, Homo sapiens
ctctaagcccacaccttcgtgattcctcagcgtttatgcacagctgctgcagcggtgcacaattttccatgtgggttctttctgctctgtaacttaaatartccccttatgcttcctctgtaattgtgatgcagtatttattctgtttgggcattggtaattagagcaaattcagagatttcttatcccctgacaggtctc

SEQ ID NO: 13389 - DNA, 201 bp, Homo sapiens
catagagaccacctttctttttggtcgacatttcattcctcctgtgtttttgttttgtgttgtgttgtgttgtgttgtgttgtgttgtgttgtgttgtgttgtggagacaggatcttgctctgccacccaggctggagtgcagtggtatgatcgtggctcactgcggccttgacctcctaggctaaagtgattctcttgtg

SEQ ID NO: 13390 - DNA, 201 bp, Homo sapiens
accctagtggaacagtccggtaagcctcatcagctgctcaaggcaaacacagttgttaggggccaccgccatggctagtgaattatgcagaaaacaaggaygccttgcagaacctcatctcccactagatgcagcattttgtttgatcagcaaagtaccaaaatttaacagctgagccatactaatgaagtatgggactgt

SEQ ID NO: 13391 - DNA, 201 bp, Homo sapiens
actgggagagataaggaattgatgaagtgtcaagaggaaaaagaaaacagaacagtgggatcattgcacacttttattgatggagatctgcagcgaggttyccccccgccccgaaacttttatgagtattataaggcagtggctgaaattgtgatgttctcagacatctctatagaatatgttcttggagcagaaaggagc

SEQ ID NO: 13392 - DNA, 201 bp, Homo sapiens
ccccaggtgagagagcaggtgcctgtcatctctagttaaaaatggacccaccgagtgctgaggtgcggggtgctgacgtggctttctgcaggtgacacagyagtcagcacatgaactggatctggacccgggtgctcattcctcattcagtatccagcacctgaacttcagtggagcacaacacacaactgcagggttgac

SEQ ID NO: 13393 - DNA, 201 bp, Homo sapiens
cctctctgtagccctgtcccagcaacttgtatgcttcctttttcacagagccatcatgcatgatgaagaaaatggaatgcatcagtattttatagacattmttattgtcagaaatacatgcagatttggacagggacaaatacagagatgaacactattattaaggcaggactttttattttttagctttagtgcctttta

SEQ ID NO: 13394 - DNA, 201 bp, Homo sapiens
gtgaatgaatgaatgagtgaatgaatgaggagtctgtgtgagtgcccttttgggtgaactgataacatgcccttttgcttctgaaagggaaaataggactytcacaattttgtgatgcgtctgtctaaatagtattcatattagcccattttaaatttcctcaaacaagtagaaaaaagatcagtcgtcttctgcttccga

SEQ ID NO: 13395 - DNA, 201 bp, Homo sapiens
ctgggcatatttcactgctctcaaactttcgtggcttttggagttcaccggggaatcttgttaaaatccagattttgattcagctggtctggggtgggccycgaggctctgcatttctgagaagctcccaggtgatgtcccagctgctccagggaccatccctgagtccccagggcctgtgctgacttaagctcctgagag

SEQ ID NO: 13396 - DNA, 201 bp, Homo sapiens
ttgctgctgtctcgtgtgacggctgccatgacagctgccttcctgccttctgggcatatttcactgctctcaaactttcgtggcttttggagttcaccggsgaatcttgttaaaatccagattttgattcagctggtctggggtgggcctcgaggctctgcatttctgagaagctcccaggtgatgtcccagctgctccag

SEQ ID NO: 13397 - DNA, 201 bp, Homo sapiens
aacttctccggaccgtgaaccgaaccgtcatttccatgggacgggattctgaactcattgtaagtgcttggtgacatatgtttggatatttaactggggckgacagcatccttctccaactgctgtttgaacatagcttattatactgcaatgtagtgagcagttgagatacagcttggtatataaaatgtcctcattttc

SEQ ID NO: 13398 - DNA, 201 bp, Homo sapiens
cgcggtttcaccgtgttggctgggatggtcttgatctcttgacctcgtgatccaccctcctcagcctcccatagtgctggggttacaggcatgagccaccrcgcccggccagtccatcttttcttatctatatgcccgtcccccagatattttgaggcaaatctctgccatcacagcattccattttttgtcattttaaat

SEQ ID NO: 13399 - DNA, 201 bp, Homo sapiens
atgaatatttgaagtgttggaaacaaaagaacagcatgatttttaatagcaaaataagcagtgaaaccagttctttgggaaatgtcgtgctaatgaaaccrttttttgctccattaaaactgatttattatctcacagggttggttttagagaaggaagcacattgcacatctccctccctccctgtcttttttaacttgg

SEQ ID NO: 13400 - DNA, 201 bp, Homo sapiens
acatagagaccacctttctttttggtcgacatttcattcctcctgtgtttttgttttgtgttgtgttgtgttgtgttgtgttgtgttgtgttgtgttgtgttgtggagacaggatcttgctctgccacccaggctggagtgcagtggtatgatcgtggctcactgcggccttgacctcctaggctaaagtgattctcttgt

SEQ ID NO: 13401 - DNA, 201 bp, Homo sapiens
atattcacagtcaagtgtgaaagtggcttttgggccacccgtgccctgcctgaaagcagagcatcatgtggccacgtgtctgctcggctctgccttactarttgtgtttaacctgagctctgctacagacagactttggtctttgctccatgcgtgcttctggcatgacctaggagttgcttgccagtgatgggcagaggg

SEQ ID NO: 13402 - DNA, 201 bp, Homo sapiens
tgcttagaggggtggaattctttctgagctagcttgtcctggaagtctccgccccaagagtgttcttgatgcgtgtgccttacagccattgggctgggcawcctcacctttccattggctggaaaatgaagaggataaaccccactctcatatgtaggcaaaaggttccttttgataaagtcgtgatttctccatctcaat

SEQ ID NO: 13403 - DNA, 201 bp, Homo sapiens
cactggagaagcgtggcctcagaggcagccacggagccatattaaatgtctttgtgtattatgtgcagaaatcttaatctattaccccctccaaagttagraaaactaattgccatttcactaacaatatgactaaggtcactgagatatttaataaggagactgtgccgtccaaatgccggagctcccatatgagtagcg

SEQ ID NO: 13404 - DNA, 201 bp, Homo sapiens
tttcactatgttagccaggatggtctcaatcacctgaccttgtgatccactcgcctcggcgtcccaaagtgctggggttacaggtgtgagccactgcaccygacctttttttcacttttaaatcaaaacagatcattcatacaagagaagaaatacatatgtagagatgacaaatcattcagtgggcctctctgtaatgct

SEQ ID NO: 13405 - DNA, 201 bp, Homo sapiens
aagggagagaaaaacccagacaatgaatttgcggtaaaaaacaaacaaaccaccaaaccaaacaacaaaaaatatcattccgccaccagtagaactgccaytggagaagcgtggcctcagaggcagccacggagccatattaaatgtctttgtgtattatgtgcagaaatcttaatctattaccccctccaaagttagaaa

SEQ ID NO: 13406 - DNA, 201 bp, Homo sapiens
tctgccttattccagctgatcagtaatattcatcagcatcatttcattcttttttttaagacggagtcttgctctgtcgcccaggctggagtgcagtggcrccatctcagctcactgcaagctccgcctctggggttcacgccattctcctgcctcagcctctcaagtagctgggactacaggcacccgccaccatgcctg

SEQ ID NO: 13407 - DNA, 201 bp, Homo sapiens
agtacagaattaaaaataaaaaaatctctagttatgtttgatgacctctgagttcctggaactgtcagttccatgttttccgtaaacgtttttttttttttcatattattgagtctttggagaattaaacagtcttcgctttaattgcactgcacggtagggctgcggatctccccgtgtccaattcacctaatttgtgtt

SEQ ID NO: 13408 - DNA, 201 bp, Homo sapiens
tcatcaggactgcttagagttgttcaattgtgtagtagacttacagttgttttgctaagtctattaaaatcattggcatcgcttcttttttttttttttttgaagtaggaaaccatttacatattgtagtgcttaagtgcatgtcttcagcatcacaaatcaaaatattggtgaaaacttgcctcaccttacctttggctc

SEQ ID NO: 13409 - DNA, 201 bp, Homo sapiens
agaccttgtgaagatggaggcagagattggagggacccagtctcaagccaaggaatgcctggagccaccagaagcctgcggaggccaggaaggatcccccsctagagctttctaggggaacgttgtcctactcacaccttgatttcagattctggcctctggaactgtgagaagaaacatatctgttgttttaggtttatg

SEQ ID NO: 13410 - DNA, 201 bp, Homo sapiens
aacacaaattacttagcaatgatgtttggagcacagctaattcagaagttgagttgggtctgtcttcatcccatttctctttaccttactttttttccatkgtagggcaaagttctcagaatcacacacatcccattcccctaaagccaggaatcgagatttaaaccctggaaggatcacctgtacatgtaaactccatgt

SEQ ID NO: 13411 - DNA, 201 bp, Homo sapiens
ttgatctctcttgttctttcagttttcttactggatgcaacaaccgtttttttcttctgcattcttacccaggtttgtgcactagctgtctcttctcgatractaagccatcatttatgtcagcatcttgaagggctttttcacttaatagtctcaaagtgacattaattagaggcataaaatgataccaccactattgct

SEQ ID NO: 13412 - DNA, 201 bp, Homo sapiens
caggggcacaatctcggctcactgcaagctctgcctcccgggctcactccattctcctgcctcagccccccaagtagctgggactacaggtgcctgccacyacgcccagctaattttttttatttttagtagagacagggtttcaccgtgttaggcaggatggtctcgatctcctgacctcgtgatccacccacctcggcc

SEQ ID NO: 13413 - DNA, 201 bp, Homo sapiens
atcatttaattctgattatagtaacagttcatagcacactagcgaatcaattcgagtgtattctataaaaatgaacgaggatcctggaattagaggctagytgtggatctctggtactgaatccttgctaataaacagatcagggtggccaggtgtttgtgtaaattacttagtttggactagggttagtaaaattagaat

SEQ ID NO: 13414 - DNA, 201 bp, Homo sapiens
tcacagctcctcaagaatatgaattaaaaccctttggatttttttcttctaattcatacttagaccttccactaggcatagttgacaaaggcactgtttamaagatatgtctcatcctgagtttccattcaccagtctgtgcttttgttagccttttgtttttatatcctgcaatgacatcctgcattcaacttgcctgtc

SEQ ID NO: 13415 - DNA, 201 bp, Homo sapiens
catgattttgataaaaccagctctgctctatcagcaaatgtactatctccaatttagtgggacaggatcatttaattctgattatagtaacagttcatagmacactagcgaatcaattcgagtgtattctataaaaatgaacgaggatcctggaattagaggctagctgtggatctctggtactgaatccttgctaataaa

SEQ ID NO: 13416 - DNA, 201 bp, Homo sapiens
agtctcacaacactgtttccttcataagatcttaaattctcaatggaaagttctcttctcacattcctgggtgactggatggggcatttgtgtgtgcctgktctggttgcagagttcagcagcatgctgtgggcccctccctggaagatgtgttcagtactcagtgcaggggagggcaagtgacccagttgttgatttgct

SEQ ID NO: 13417 - DNA, 201 bp, Homo sapiens
agggcaggcccatggcagagctggtgctgcagtttttgtgacaccactgcaggaatgataaaggaggagggtggctgccggcctcagcctgagagccgcaycatggccacgtcctgggtggcagggactccgaggagcagggcacgggagggctggacggcatctgctctttcatgctgacaccacagggagatctaagtc

SEQ ID NO: 13418 - DNA, 201 bp, Homo sapiens
aaaatccagacttgcattagcaaaaaaattaaaaaatttaaaaaatgcctgcattttcttatttatttatttattttctgagacggagtctcgctctgtascgtaggctggagtgcaggggcacaatctcggctcactgcaagctctgcctcccgggctcactccattctcctgcctcagccccccaagtagctgggacta

SEQ ID NO: 13419 - DNA, 201 bp, Homo sapiens
aaaatattccatatttgcataatgtttcatgatttaatggttgcacaatatttcatcataacacaagttatgattgcttgacttgccaaataaaaatatargacccccagttcagcttgaacttcaggtaaacaacagttttttttttctagtatatgtatctctcatgtaatatttcattgcaacgtttgggacatattt

SEQ ID NO: 13420 - DNA, 201 bp, Homo sapiens
tttacggaccgttggcaaaagagggcatcacgggtagacatttgaaaagaaacaaagaagggcaggcccatggcagagctggtgctgcagtttttgtgacrccactgcaggaatgataaaggaggagggtggctgccggcctcagcctgagagccgcaccatggccacgtcctgggtggcagggactccgaggagcagggc

SEQ ID NO: 13421 - DNA, 201 bp, Homo sapiens
ctttctccagaagatgaattggcatgaaccctaccaggcctgggagggtaggagcttctgtagccttttcaagtaaaagggaaaatccagacttgcattascaaaaaaattaaaaaatttaaaaaatgcctgcattttcttatttatttatttattttctgagacggagtctcgctctgtagcgtaggctggagtgcaggg

SEQ ID NO: 13422 - DNA, 201 bp, Homo sapiens
ttttttgagaccgagtttcgctcttgttgcccaggctggagtgcaatgggcacaatctgggctcaccacaacctccgcctcctgggttcaagcgattctcytgcctcagcctaccgagtagctgggattacaggcatacgccaccactcccggctaattttgtatttttagtagagacggggtttctctatgttggtcagg

SEQ ID NO: 13423 - DNA, 201 bp, Homo sapiens
ctgttaatgattacagatccttcccaatacactttatttatgggaccctctcaatgaggggatctctgctgtctctagcaccggaaagatgctttctccaraagatgaattggcatgaaccctaccaggcctgggagggtaggagcttctgtagccttttcaagtaaaagggaaaatccagacttgcattagcaaaaaaat

SEQ ID NO: 13424 - DNA, 201 bp, Homo sapiens
attatattgtctgttacatcaacatttgacaaaaggattgtctgctacatgccgtgattgtctcagtgggcttgcaaaactcagacgtgacctcatggttmtgtgcagtttgttgatcaagtgaccatattctgctccaaagtgttgccaggcactttctgtgattcatcatatttcagccagaattggaattacagtatg

SEQ ID NO: 13425 - DNA, 201 bp, Homo sapiens
ctaggaacagctggggagtgtttcatgccttcacagtttctcctattttatccagcctttcctctctgacatttttaacatgcagatgtgtattttctggrtattattttgtgtccaggcacagacatgataaccggaatgttaaatttgtggcaggagaaaagctcccatctgcattagcttataaacactctgggggca

SEQ ID NO: 13426 - DNA, 201 bp, Homo sapiens
aggtggagaaagagtacggcgtccgaatcatggtaagagggtagtatgcgtagtgttgcagaagagtgggtgtctgggcatcccactgttgaacagggacragcttccagagcagaggaactcacatgtacacatggtgcccgcttaggaagtgggatgtgagggagctcagcccccttgggcagtcttgtctaccggcaa

SEQ ID NO: 13427 - DNA, 201 bp, Homo sapiens
ctctggtcagttctgtcagacccctgaggccgggcagattttggcctttgtaggggaggttgctaattctcccccctaattaaaaaattaataataatgaycttggggtctttctgtagtatattgttgaaggttgtataaacataaagggttgatgatgagaattttctggaccaggctggagttgccttggctgtttct

SEQ ID NO: 13428 - DNA, 201 bp, Homo sapiens
acatacacatatgctgactccatggcttatgtttgctctaccccacctgtcctgctacaactgggactggcaaagtgcggcctgcaggccaaatcccgccrgggcctggttttgtccagcaaactaagaatggattttacatttttaagcacttgaaaaaaaattgaaagcatataatatttgtgacacatggaaatgatc

SEQ ID NO: 13429 - DNA, 201 bp, Homo sapiens
gcattaaattatttcaagaatcattttggtctttgctctcaagtaaaagtggttttagaaggaaacttctacctggccatcgtgtgacaacactggctgcrtatcaagaaaagtgagactttattttttgcacatgattttatactcatgtatgcttgaaggaatatgcaagcgtcgtgagatctaatccatacagaagtt

SEQ ID NO: 13430 - DNA, 201 bp, Homo sapiens
ttgtgaaaattttcaccttttgagagaggtggaggccagttgctgtgacaatggcccgttttcacatctgtctgatctttggttctgaggtttgccttttyaatagtgtaaagaaacccagtatttggttattctctgggaatttacccagctcacgttttccaagtgccctctgtcactctctgacagggtcctttgttc

SEQ ID NO: 13431 - DNA, 201 bp, Homo sapiens
tcacttttaatgtcactttttataggagtgaattctggatttagagctaagttcatttaaattatttcagttaggttaaacagtgttcacatatatatatwttttttttcgatcacccacagaatattacgtaggtttaggctgaacagctcattctctgaacctaccctggatgtcttgactcactgttgcttggttgcg

SEQ ID NO: 13432 - DNA, 201 bp, Homo sapiens
ccacttgtctgggatcgcatttcatcttaaagcaacccatgaggtggaggaaccatgatcatcatattatataggccatggaatctgcctcgtgggctgtygtagcagagcagtcaacaagttagaagccagagcccttgtgcactcatcggtgcccacaataactcattaggttttttccttttcttcctctcagtccca

SEQ ID NO: 13433 - DNA, 201 bp, Homo sapiens
aggaaccatgatcatcatattatataggccatggaatctgcctcgtgggctgtcgtagcagagcagtcaacaagttagaagccagagcccttgtgcactcwtcggtgcccacaataactcattaggttttttccttttcttcctctcagtcccagtagccgtctaagagcagaagcttctggggcctggccttgcagacac

SEQ ID NO: 13434 - DNA, 201 bp, Homo sapiens
tcaaggacttttcttggggaagcacaccaagtctctcggttgagtttgacacaccaagtctctgggttgagtttgacacaccgagtctctgggttgagtcygaagcagaaacctgactggaggaggcagcatcagaaggttaacggtctggccaactctggctgacatcgaacaaaggtccctttagtcttaatagctaaa

SEQ ID NO: 13435 - DNA, 201 bp, Homo sapiens
atattctcggccaatccggaagggagagaaaaacccagacaatgaatttgcggtaaaaaacaaacaaaccaccaaaccaaacaacaaaaaatatcattccrccaccagtagaactgccactggagaagcgtggcctcagaggcagccacggagccatattaaatgtctttgtgtattatgtgcagaaatcttaatctatta

SEQ ID NO: 13436 - DNA, 201 bp, Homo sapiens
tttttaggttcttattctaaaatctctcttcagtgctctctcattgatttccaaggatttctttataagtggactgagattgagtacaaaatgtaccttcmactcttgaccttcacctgatcccagaccccactttcacctgggtccccaaggctgagcacaggtccctcctatccccaaggaggtgctctgaacccactc

SEQ ID NO: 13437 - DNA, 201 bp, Homo sapiens
gctcaaggacttttcttggggaagcacaccaagtctctcggttgagtttgacacaccaagtctctgggttgagtttgacacaccgagtctctgggttgagwctgaagcagaaacctgactggaggaggcagcatcagaaggttaacggtctggccaactctggctgacatcgaacaaaggtccctttagtcttaatagcta

SEQ ID NO: 13438 - DNA, 201 bp, Homo sapiens
ggtgaacgaggtccagcgatttgaatattctcggccaatccggaagggagagaaaaacccagacaatgaatttgcggtaaaaaacaaacaaaccaccaaamcaaacaacaaaaaatatcattccgccaccagtagaactgccactggagaagcgtggcctcagaggcagccacggagccatattaaatgtctttgtgtatt

SEQ ID NO: 13439 - DNA, 201 bp, Homo sapiens
ttaagtctgtttccttcagcaaaaaatgcatgagtagatctcgtttaatttttttttttttgaggttcaaggggttataatttctttccttttttttttttctttaatttctgggatacatgtgcagaacatacaggtttgttacgtaggtatgcgtgtgccatggtggtctgctgcacctatcaacccatcatctaggtt

SEQ ID NO: 13440 - DNA, 201 bp, Homo sapiens
gtcaaggttagggacattttacaggaggcagtgacatgttctaaggccagaccccgtgtccaaaagcaaattggctatttgccgggttaaatatctaatgrtctgtctgtctctgtacagtttttacagggtgaacgaggtccagcgatttgaatattctcggccaatccggaagggagagaaaaacccagacaatgaatt

SEQ ID NO: 13441 - DNA, 201 bp, Homo sapiens
ggtctcaaactcctgacttcgtgatccacttgccttggcctcccagtgagccactgcacctggcctaccctattccttttgcatttctaaattgtatgctkctttcagggacttttttaaaaatcagaagttggtgccagcccagcgaagtagctcacgcctgtaatcccagcggtttgggaagccaaggcaggaggatcg

SEQ ID NO: 13442 - DNA, 201 bp, Homo sapiens
tggtcactcgcagttcttctagcaagtggaccagtggctgatgtattcggattcatgtagagtgatgtttgagccagttcaaaacagtgaccactcgagtmattcctgaaaggacagatttctgtccttcagagacttattcagtcacttttaatgtcactttttataggagtgaattctggatttagagctaagttcatt

SEQ ID NO: 13443 - DNA, 201 bp, Homo sapiens
atagtaaatctcacccaaaacaaaaattatgcgttccaaaccaaatataattggcttttggattagctactactgggatccttctctccatgatctttcarataggtgccaatagcctatggttagctgtggcagtgagtggtaaaagcagtgtttcctttttaagttaattgaattaacaagacgtcaatatcgcttcga

SEQ ID NO: 13444 - DNA, 201 bp, Homo sapiens
ctgggcctcacctctaaaggctgccctaacttgaaatcattcaaatgggagatttcaattcatgcgattcaaattaaaataacatgtttaagttaggtacrtgtcaattttttatgatttccccattgattgatttttcaattaatggaccagaagtgaactttcactccctttatcatctcttcctgcagacctcagaaa

SEQ ID NO: 13445 - DNA, 201 bp, Homo sapiens
atttttttccttagtcacattgtcaggggctgtcattacctgctcaggttttagtggttctaactgctgcctctgaggtttcttggaaattcagcttgtttccagaatggtggcagtgctagggatgaccaagtgacagggttgggccagggctctccccatgttgaggttggcacagtgtgtgatgtgtttccagccaaa

SEQ ID NO: 13446 - DNA, 201 bp, Homo sapiens
aactgtagtgggggtgccacattcaaagaaaacgtctgggcctcacctctaaaggctgccctaacttgaaatcattcaaatgggagatttcaattcatgcrattcaaattaaaataacatgtttaagttaggtacatgtcaattttttatgatttccccattgattgatttttcaattaatggaccagaagtgaactttca

SEQ ID NO: 13447 - DNA, 201 bp, Homo sapiens
atgaagtgccaccgattaattagtgtgtaattaagtttccagagcagttaggcaagaggaatgctctatacataaagatatgaatgtgtctgagcacaggkactcaaggctgagtgatggatcgggagggaccagtcacttgtaggatgtcagcatgggcgcctagagccccaagggttgtgcggtgtcacacttctctct

SEQ ID NO: 13448 - DNA, 201 bp, Homo sapiens
cacttgatcttgactggccatggatggctgggtcatgaaggctgaggtgcagttggattctggtctatcaggatggttataacaattttttttttttttttacatcttcttgggggcttagtgaatgaaatgtctgtattgggacaaaatgacagtgacatttctaaaagttttgttgtttctcatcaggagaggctggat

SEQ ID NO: 13449 - DNA, 201 bp, Homo sapiens
ggctcccatgccacggtcccctcctttccgtcttctaggattctacagtaagatcttggatagaatgggtggggccagcagggtctgcttgtgagtgaccrgctaccacagtcgctgtgctaaggggagcgtgagagttactttgtccccttttcacttgcctgtggacagcaggtggaggtctagctggatgttttctgg

SEQ ID NO: 13450 - DNA, 201 bp, Homo sapiens
gcagacctgcttttaactgcagactttagtttgataccacatgtgcgtaattgcaagttaatccaagacacacacactcataccaccactatcatcaggccttggtttatgtgcttggatatgccatttaagaaaaataggaaggcttctgctcttatggagattgcatatcagcaaggaggaacagataattaaagcaat

SEQ ID NO: 13451 - DNA, 201 bp, Homo sapiens
tgtctggtctggatgccagactaaatgtcagtagatttcagtaaaggctcagcgttgatgataatgcatgagctcataacattttataaccagtggaaccrtaaaccatttataaacatgaaatcctattgatttagagaaccattaatcctagacaaattttgacattttggaaagacagaaacagccaagctatattat

SEQ ID NO: 13452 - DNA, 201 bp, Homo sapiens
cttgtaaaagcttatctgtctgaaaatctgataagggccatagtgcccaacgctggggaaaatagtgtgttcatggagtcaacaccattgaacggtactcygccattactaaccacagtttctttgggagaagcgtggggagtgttcagtaaagacaacacagaagtaaaattccatcactcaagccatggcgtgcaagca

SEQ ID NO: 13453 - DNA, 201 bp, Homo sapiens
acattctccttgtaaaagcttatctgtctgaaaatctgataagggccatagtgcccaacgctggggaaaatagtgtgttcatggagtcaacaccattgaayggtactccgccattactaaccacagtttctttgggagaagcgtggggagtgttcagtaaagacaacacagaagtaaaattccatcactcaagccatggcg

SEQ ID NO: 13454 - DNA, 201 bp, Homo sapiens
atcctgactttgggggactcctggctgctggccatttggaaaatgagcagtaaacatgtcgtaagtctggagatgaagaggatgctaaatttgaggtgtcrttgtgacactgagatgtggtcacttggcttagcgctatagcacatgaaggcaaatatacatatagtcacattttagagattattcatggtctccgaccac

SEQ ID NO: 13455 - DNA, 201 bp, Homo sapiens
tgaaatgattttgacaatagtttttctattttgaacacactttaatttttagggatgaattaatttatcttcagaagttcctttttgactctgaacatttyaattttatttttttttggtctagactggtgtgaaacagtgacattattttgtgtactaggatgtcctcttgtttagacagatttgtgttactaattagaa

SEQ ID NO: 13456 - DNA, 201 bp, Homo sapiens
ttgaaatttatcattctttcaaatgactctgtttcctttttcatattgttaaaaaagcctgtttccatcggcttgttaattacaggaatataatcctaacrggtaagaggcacctatggttaattttctgcccttagacctgcgtgttttgttaacaagaaagccagaacctactgccagatcacaactcttgatctcttt

SEQ ID NO: 13457 - DNA, 201 bp, Homo sapiens
gacaaaaccgccatcgtcatcatggcccgttctcaatgagctgttgcgtacacctcccagacggggtggccaccaggcagaggggctcctcacttcccagwcggggcggccgggcagaggcgccccccacctcccgaacggggtggctgccgggtggaggggctcctcacttctcagatggggcggcccgtcagagacgct

SEQ ID NO: 13458 - DNA, 201 bp, Homo sapiens
gaatcatacagatttacacacacgtgtacctgcatgggtcctttactctgggggctccagctgaggaatcaggctttttttttttttgagacggagtctcrctctgtcacccaggctggagtgcagtggcgcaatctcggcttactgcaagctccgtctcccaggttcacgccattcttctgcctcagcctcctgagtagc

SEQ ID NO: 13459 - DNA, 201 bp, Homo sapiens
atgatccacccgcctcggcctcccagagtgctgggattacaggcgtgagccaccgagcctgaccccagatattttttcctctattaaaacttgctcatttytttaggtcgtagaaagcttgaaggaaacttactgtttatattcgacgattttgttagcttaggtgtttgtaattgtgttctgtccctctttcctatgccc

SEQ ID NO: 13460 - DNA, 201 bp, Homo sapiens
gcgagactctgtctcagaaaaagaaaaaaaaagagaatgaataatgagcaagaatgataggccatggcagattggcacacacataattttataatttcccytttttttttttcctggagacagagtcttactctgctgcccaggctagagtgcagtggtgtgatctcagctcactgcaacctctgtttccagggttcaagt

SEQ ID NO: 13461 - DNA, 201 bp, Homo sapiens
ttcaattagatttttttttttttttcgagacatagtcctgcgctgttgccgaggctggagtgcaatggcacaatctcagctccctgcaacctccgcctccygggttcaaatgattctcctgcctcagcctcctgagtagctgggattataggcacccaccaccatgcctagctaatttctgtatttttagtagagatgggg

SEQ ID NO: 13462 - DNA, 201 bp, Homo sapiens
tctgcctctgccttcctgtggtgtgtgcagctttgcatctgaatctccctctcctttttctttctttctttctttcttttctttctttctttctttcttcttttttttttttttttttttggagacagggtctcgctctgtcatcccggctaaagtgcagtggcgtgatctcggctcactgcaacttccaccttccaggct

SEQ ID NO: 13463 - DNA, 201 bp, Homo sapiens
tatatgaatttaaattttgctgtctatacataaagttttattggcacatagtcatacccattcactttttgtattgtcagtggctgcttttgcgctgttayaatagcagagtctattagtgaatgcaaaagagaccatatggcctgcaaggcctgacttctttactgtctgatcatttacagaaaaagtgtactgatccct

SEQ ID NO: 13464 - DNA, 201 bp, Homo sapiens
atgctcgtgtctgcctctgccttcctgtggtgtgtgcagctttgcatctgaatctccctctcctttttctttctttctttctttcttttctttctttctttctttcttcttttttttttttttttttttggagacagggtctcgctctgtcatcccggctaaagtgcagtggcgtgatctcggctcactgcaacttccacc

SEQ ID NO: 13465 - DNA, 201 bp, Homo sapiens
tcagcttctgttttccctcgagggttggcggggacagggaagaggcaaaaactcaagttaatttttccacctgccaacatttccctggctgggagaggacrccaaggcgatggcttcaggtcaaggttagggacattttacaggaggcagtgacatgttctaaggccagaccccgtgtccaaaagcaaattggctatttgc

SEQ ID NO: 13466 - DNA, 201 bp, Homo sapiens
cacccttggtgctggaagattgcttcctagtatttaaagaaattattttttaatcaattttaagattattctttcatgcaaagatttgatcgtttaaattycttacagatttcattatcttctgctctggattcttttatgttattggactttgtttcatgtccacagaactctttgttggtttaatggattttcattttt

SEQ ID NO: 13467 - DNA, 201 bp, Homo sapiens
aatcatctgcaaaaaaatgttgtgtttcaaatggacagtgtctgggttttgtatagtcatcataaaaatgtctataattgtactgtttgctaataaacctrcctgctttcagaaaatcatcctaacgtgtgtgtgtgcaccaatggttttataagttcatttttctttggggcagctacagcaattttaggtttgttttca

SEQ ID NO: 13468 - DNA, 201 bp, Homo sapiens
catcatgctcgtgtctgcctctgccttcctgtggtgtgtgcagctttgcatctgaatctccctctcctttttctttctttctttctttcttttctttctttctttctttcttcttttttttttttttttttttggagacagggtctcgctctgtcatcccggctaaagtgcagtggcgtgatctcggctcactgcaacttc

SEQ ID NO: 13469 - DNA, 201 bp, Homo sapiens
ttcactcttactcagcttctgttttccctcgagggttggcggggacagggaagaggcaaaaactcaagttaatttttccacctgccaacatttccctggckgggagaggacaccaaggcgatggcttcaggtcaaggttagggacattttacaggaggcagtgacatgttctaaggccagaccccgtgtccaaaagcaaat

SEQ ID NO: 13470 - DNA, 201 bp, Homo sapiens
tgaatagttttcttggaacacagccacacccctttctgtacacactgtcaatgaccgcttttcggccacaccagtggcattgagtggctgcaacagagacsgtgtggcctgccaaaaagctggaaatatgtactgtctagccctttccaggagaagcttgctaacctttgcccgaagctcagaaagcaaaagaaggtctct

SEQ ID NO: 13471 - DNA, 201 bp, Homo sapiens
ctggatacacacgaggggattggaaattactaattcatgaaaatgaaaatgtgggcttcttttaaggaaaaattccctttgaacattgacagaagtgggcrtagggaaggggaagattttgcctggattctccacttaactcttgtcaccactggagcatcctgactccctagacacaagtgatggaagttattttgtttc

SEQ ID NO: 13472 - DNA, 201 bp, Homo sapiens
ttgtggctacatcatgctcgtgtctgcctctgccttcctgtggtgtgtgcagctttgcatctgaatctccctctcctttttctttctttctttctttcttytctttctttctttctttcttcttttttttttttttttttttggagacagggtctcgctctgtcatcccggctaaagtgcagtggcgtgatctcggctcac

SEQ ID NO: 13473 - DNA, 201 bp, Homo sapiens
gttgaacacaaaagcttttttctctctccttcgcttcacctttcctctgtttttgctcatttcactcttactcagcttctgttttccctcgagggttggcrgggacagggaagaggcaaaaactcaagttaatttttccacctgccaacatttccctggctgggagaggacaccaaggcgatggcttcaggtcaaggttag

SEQ ID NO: 13474 - DNA, 201 bp, Homo sapiens
caaaaaggtcattttatctttactctgatgtagtctgatgctgtagaagcatggagtgaaatacttatttttatattaagtcagacttcaggatttatttyagccttcgtttttgagaagctttctaagccctcagcattaagcagcatttttcctcatcacacacggatctgagcaggtgaccgcggctgggataggtgc

SEQ ID NO: 13475 - DNA, 201 bp, Homo sapiens
tgatgctctttcccatggccactccctggaggcccccacatctggattcagaccccctacccctcgggcctcttgcgcctcctccacctagccccttcctyctttttttccttggcttctcctgtgcacccactttgtttccttccattctgctgttcactccagcctcaatctccactctcagtgacttactgcttcctt

SEQ ID NO: 13476 - DNA, 201 bp, Homo sapiens
taaaaagaactctgaaattaatatactttacttaatgatttattccatgatgttgtcaacaacagtactagaaatgtggcctctttccatcggaataaggyattaactgggaatgtgattatgccctgacagcttccccctattaatgtaaggaatagaaaactggggaacttcacacttaattagataaattgggatatg

SEQ ID NO: 13477 - DNA, 201 bp, Homo sapiens
ggcggctgaggcaggagaattgcttgaacccaggaggcggaggttgcagtgagccgagattgcgccactgcactccagcctggcaacagagtgagaccccrtctaaaaaaaaagaaaaagaaaggaactctttgccttcttagagcaggagggaactgagttcttcatagagaacagatctaaattatagaagccattatt

SEQ ID NO: 13478 - DNA, 201 bp, Homo sapiens
gccattctcctaaatcatcctcccctgctgcttcttcctgtcctggtgcctaagggcacattctctgccccctttccttacagctggccaactcctcgagrcaccaccacagctgcgttcatcccaccccctcgccctgtgcccaccccaatccagagagtagcatgcttacccctaaactcaggactctaggaatctcca

SEQ ID NO: 13479 - DNA, 201 bp, Homo sapiens
aaaatgcagctgtcttgaaaggactctcaaaaaaattctgaataagctataatcatttaatgagtgatgacaacatcaagatgttttcaagaagggtgttygccactgaaaattcgagttgtttagtgggaccttgtaatccccaaccagccacgagccccctctctggagtcaacagagcagtgtgagtgaaatgctacc

SEQ ID NO: 13480 - DNA, 201 bp, Homo sapiens
gtcctctgtgccattgaactcccagagtcctctgcagaggacatgtaataattcttgcctattaatttgtggaccctgtatgtggggctttttttttttttgcctgtttgagacttcctgcctttaggagtagacaatgacctttcatacgtttaatgcttctgttgttctcaagtttgagaatgtggtgtgtcccctggg

SEQ ID NO: 13481 - DNA, 201 bp, Homo sapiens
ttcctgaagggcttgggatgctccagcttggaagaacccctgtgttctaaggaaccctgaggagttcctccggaagaagccttgcatgttctaagaagggrgtgtgacagcgaggacccatgcttggtcttatccagagccacattgatatcaagcatttggcataggggtctaagcactgtccgggaatggaagaggtag

SEQ ID NO: 13482 - DNA, 201 bp, Homo sapiens
tcaccacctccccagagccagctctgtcaagctgacctaaggcactcactgcagctcctcaacaaaaacccatttcttatttcttctgcctcttttgtctstgggtgctccagctgtctgtggtcatcctggctcttccagcactttctatgaatcttttatgatccggatgccccagccattctcctaaatcatcctccc

SEQ ID NO: 13483 - DNA, 201 bp, Homo sapiens
ggtccacttcagaagtcatcgaaaggactgagctgctcctagatccctgtcctgcttagggagacagctgttcagggaaataagcacctttctattttctrtcatgtcgtatccatggtccaactctaggatctccttgctagaagggccagaccacaagctaggtgcccatttcctgaagggcttgggatgctccagctt

SEQ ID NO: 13484 - DNA, 201 bp, Homo sapiens
tttagtcacataatgtgcagcccggaggaagagttccgagttcatgcacctgcgtgaggactcagcgtcctgatgtccttggctcctttgatctctctgcyccaccatccttagtggggtctctttatctcctaatcctaagatggcttctgcccctcccagcatcagctctgcattccaggtggaggagaggggaaggca

SEQ ID NO: 13485 - DNA, 201 bp, Homo sapiens
tcaacagcatggcacagaacatgatcgctctacctgcctttgtcctggtatggacccagcaggagccaggcatggtccacaaactgagtttctttgctggwataacttgtttgttagaagagttgagactgttgaggacacaaagtggtcacaagacaagttgtagcaattgttacaacttagtgaggctccctaagcctc

SEQ ID NO: 13486 - DNA, 201 bp, Homo sapiens
aggaaaaccttgcataggctgaaaagggcaaagtgctcacctttgcttgcattgggaagtaatttcttttaagtgtgcatagagacagactaataaaaaaatctgttgagtgtgtcatgtggcagtcagtctttagaagtgttgttcctttgtcttttaatcattctcagaattagcacaccagttgtgtgatatgtaaaa

SEQ ID NO: 13487 - DNA, 201 bp, Homo sapiens
ggaccccttcctagagataccagcatttagaacagaccagtctaaacaaggtcttctcaagtgaactgaagatactaggcctgcaaacgctcatctgcacytcacttacgatgtggcatttataaatgcattcaccgtaggtgtttgtagattctttttatgttttaagttttaagtttgcagcattgaggcctattttga

SEQ ID NO: 13488 - DNA, 201 bp, Homo sapiens
gctgtatcttggccactcgtggattgcagtgctggattgaggcgtttggggctttgcagtcagttcttacaggcattgacatcatttcaagtccacaaatrttactaccttcccttaggatgaccctgggaaaagactactgcatgcaggaccttggcatagtctgttccatctggggctgagaatgccagaattttctat

SEQ ID NO: 13489 - DNA, 201 bp, Homo sapiens
ccaagagattgtggctgctgttcctcccaggtgcccccgctgcccccagctgcggtgtctccagtcagcctcggaattcccttctgctgtcttctcttctctgtgctactgtgactgtggtttcatgaaccactgggcttgctaggtccccagttcttcgtcttgaaattagggcagaaaagtcttggaaccgtttcctgc

SEQ ID NO: 13490 - DNA, 201 bp, Homo sapiens
cccaagagattgtggctgctgttcctcccaggtgcccccgctgcccccagctgcggtgtctccagtcagcctcggaattcccttctgctgtcttctcttctctgtgctactgtgactgtggtttcatgaaccactgggcttgctaggtccccagttcttcgtcttgaaattagggcagaaaagtcttggaaccgtttcctg

SEQ ID NO: 13491 - DNA, 201 bp, Homo sapiens
ccccaagagattgtggctgctgttcctcccaggtgcccccgctgcccccagctgcggtgtctccagtcagcctcggaattcccttctgctgtcttctcttctctgtgctactgtgactgtggtttcatgaaccactgggcttgctaggtccccagttcttcgtcttgaaattagggcagaaaagtcttggaaccgtttcct

SEQ ID NO: 13492 - DNA, 201 bp, Homo sapiens
atttgctcctggtgacacacaggagaacccttcagccttacagcacagcaattccataatgtagggttatgagggggcttttaaacctcctgagtcaactrtccatatttgagtgagattttctgcctgtcagttgtatcgcacctgacttagcaatggcatagaaagacctgctttagcagatgtgtttgatattaagac

SEQ ID NO: 13493 - DNA, 201 bp, Homo sapiens
cacttttaagtttggattacaacatgtatgaatcaggaaataaaatgtttccatgtaaattggctttatttacagtagacttttccattattacataaacrtaaatttgcctgccttttcttattctccatgataattattcatagtcttgaaacacatttggaacacattaatatggaatgggcactgagcccatggaga

SEQ ID NO: 13494 - DNA, 201 bp, Homo sapiens
cgtgcacattttgcctccgcacctgtccctggatagaggctcggcctgttcccacctcatggtggttgtggttcatgctgctgggaactggggtgtacagrtgcctcttgaagaccctgctgccagtgctccagaagtggaattgctgtttctcgtggtaattatgcttgaattttttgaagaatcatcctgtttttccca

SEQ ID NO: 13495 - DNA, 201 bp, Homo sapiens
cccctagggaacttcacagcagtgcacaagtcctgcctgttcccagcaaagccaagttcatacatgtgagtgtggcctgaatgtttgcattttagaaggcrggaaatgggatttgcacatttgctcctggtgacacacaggagaacccttcagccttacagcacagcaattccataatgtagggttatgagggggctttta

SEQ ID NO: 13496 - DNA, 201 bp, Homo sapiens
tgcatgcattcggtatttgtcctaatgctctccctccatttgccccccactccccagcaggccccggtgtgtgtggttctcctccctgtgtgcatgtattytcattgttcacctcccacttatgagtgagaacatgtggtgtttggtgttctggtcctgtgttagtttgctgagaatgatggcttccagcttcatccatgt

SEQ ID NO: 13497 - DNA, 201 bp, Homo sapiens
tgctgcctgccttcactccccttcccagcggccgtctcccgtcacccccgctccccaggcgcccgccgtgcccagatgtttcagtaccgcctcaccgtccctcagtgaatggccctcagccctggggctgcagccaaatactttttgaaaacatactgccgtggccaaataacatgaaattccccatttctaagtgtcccg

SEQ ID NO: 13498 - DNA, 201 bp, Homo sapiens
tggaggccgtctggtctcctttatagacctgccctgtggggtacaatcccctagggaacttcacagcagtgcacaagtcctgcctgttcccagcaaagccragttcatacatgtgagtgtggcctgaatgtttgcattttagaaggcgggaaatgggatttgcacatttgctcctggtgacacacaggagaacccttcagc

SEQ ID NO: 13499 - DNA, 201 bp, Homo sapiens
gaacccaggaagcggtggttgcagtgagccgagatcatgccattgcactccagcctgggtgacaagagcaagactccattacaaaaataaataaataaaayaaaaataaaaacactggtagaaaacacaactgcatcttaatagtgtaatttttgtggggtagaaataaagctgaatttccccatcctctttccctccttc

SEQ ID NO: 13500 - DNA, 201 bp, Homo sapiens
gcaggagcctattcatttttttcaagaatattttactaatttagacagtccatcaagtttctgatcatggtgccttttcccagggttcactgctgtcctcygcacccccttaccttaagtctgtttccttcagcaaaaaatgcatgagtagatctcgtttaatttttttttttttgaggttcaaggggttataatttcttt

SEQ ID NO: 13501 - DNA, 201 bp, Homo sapiens
ttaaaagcatgtgttacaaattggcttttctaacgttgcccggagtttctgctcttgtgctcgtgctcttcagccgcagtggcgggcatttcattagaacrttctttcccttacacctccccaagagcctactcctttcctgtctccacttgtgcaagaaagagcacaaatgttccttcggaataggctcagccttgccct

SEQ ID NO: 13502 - DNA, 201 bp, Homo sapiens
attggtgtgtccttccccaggggccaacccagaggcacgtccagattatcatggagaaacttctccggaccgtgaaccgaaccgtcatttccatgggacgrgattctgaactcattgtaagtgcttggtgacatatgtttggatatttaactggggctgacagcatccttctccaactgctgtttgaacatagcttattat

SEQ ID NO: 13503 - DNA, 201 bp, Homo sapiens
gcaaaccctactggagtagggggaagatattagggggatttgtttttacaacactttagtgttttgaacccgtgatagagcttatgttttaaaggttgctrtgtcttttggagtagagctgtcaatatgctactgtttatggaatatgaaataatatatatgtccaggtgtattttactcttacaattggagtagagagga

SEQ ID NO: 13504 - DNA, 201 bp, Homo sapiens
tgtttaaacagattttcttttatttttaaggtttgcttaaattaaattactatgattatatatgtaacaaattatcattaatggactataattaataaaawcccctgagtttttttgtgagagcttttgcctttgacaagggccatttttcatctcattaagggttataattgatttactctttacagggtaaatggattc

SEQ ID NO: 13505 - DNA, 201 bp, Homo sapiens
ccaggatttctaagtagataaggcttgtccctggccgtttcctgcgtgaccttgaaaatccctcctagtcaccacgcccatatacctggccacccactccsctgtagccctggctcattctctcagagcctgattagtgatctggaagaaaaagatcggattaaatctgttcttggtgatgctggaaacctcacctcttac

SEQ ID NO: 13506 - DNA, 201 bp, Homo sapiens
gcacaaagttaaaaataaataaataaataaagccaggcatgctgagggagtcgtaaggagaagagcagctcttttcctcccctcaggctctcttcccctargtcagtgctttgcttttgtagctctaccctattcctttttttttttttcttttttcttttgagacagagtcttacactgtcgcccaggctagagtgcagt

SEQ ID NO: 13507 - DNA, 201 bp, Homo sapiens
cattttgacttccaatagataaatagatccatttcacaaagcatgtgcatttgtcaggttgctttttcttggttttgtttttttatttgacttaagatagrtctatagatgagtgtttgccttcgttttctgtgagccagttttcatacctttaaagttgaataagggctgggcatggtggctcacacttgtaatcccagc

SEQ ID NO: 13508 - DNA, 201 bp, Homo sapiens
atcatgatgtctttcctgttggtctattccttaatcaatatgaaaagtttctcttaatcttttggctagtatttgcatggaatacctatttccatcctttyattttcatgctttctgtgtctttatacttaaggtgtgcctcttataatacaacatatagttgtatttttctttcatccagtctgacaagcttcttaattg

SEQ ID NO: 13509 - DNA, 201 bp, Homo sapiens
ctcattttctgatttttaaacatattatttgaatattcttttactattatttttaacaattattctagagatggtaacatccatgttggacttattttagrgtatttcaaatgattactcttaccaatccactgataatgctagatatggccagaaaaatagcacgctggaattgccattttcttctcctctgttttatat

SEQ ID NO: 13510 - DNA, 201 bp, Homo sapiens
caagcatgtgccaccatgcctggataatttttgtatttttagtagtgacggggtttccccatgttagccaggctgatctcaaactcctgacctcaagtgawccacccatctcagcctcccaaagtgctggattacaggaatgagccactgcacccagctggcacacacataattttctaaaccaggggttgacaagctgta

SEQ ID NO: 13511 - DNA, 201 bp, Homo sapiens
tttctgtccaaagaactcacttgtattatttcttttagtgttggccagttatgggactctgtttgtatgaaaatgatttatttcatctttgtgtttgaaakatattttcactcactatagcattctaggttggaagttattttcttcttccatgtattctattctattttgatttccttcatttatagtaagtcattagct

SEQ ID NO: 13512 - DNA, 201 bp, Homo sapiens
gaagttattttcttcttccatgtattctattctattttgatttccttcatttatagtaagtcattagctttcagacttactgttacatctttgaatttaartggtattattttctttcttgctgcttttagtttgtctccttttctgtggttattgacaatcttactatgggttgcataggattgtttttgctttttattt

SEQ ID NO: 13513 - DNA, 201 bp, Homo sapiens
ctcctcaatatgcctgcacattcctagccctcttctgtattctcttcctcagtacttctgtttagttattttctgtggattgtcttccattttactaattmtgcctcttgctgtgtctactctctattttgttaatccatctaataaatttttaattttagagagtatattttgtagttttagaatttccagttgattttt

SEQ ID NO: 13514 - DNA, 201 bp, Homo sapiens
acttggactgtggtctggttttctgctgagtttaataatttttgtttgaagtcaagactgtttgtatgtaaaactgtagaagcttcagatgatgtgatctycttccagagataattcatcctgccttcttctagacaaagtggggctgaccatcttattttaatcagagactgtgctcagtttcgaggctacactggacct

SEQ ID NO: 13515 - DNA, 201 bp, Homo sapiens
tctattggtcatattgctccatgagaattcagcaacaacccctcatgccatttgtattcagatttcctccattctttccaaatttttttgtccttttcackcattgcatttgatgattgtgtctctttaatctttctttttctaaaataaatccatcaccatcacactgttttattttcttttcatagcattgcttttcag

SEQ ID NO: 13516 - DNA, 201 bp, Homo sapiens
tttcgactggtttctttatccccctgtatgttctgcaaaccagaagcttgttctgagattcaagctcaactccttggcaagagtgtttcagcattgctgtygaaagcttcctgctgtgttacttcaggaagtaacacaggaagtgggcttgtcatgctgacccactactggcgatgctgaatttcaccactgggttcaaag

SEQ ID NO: 13517 - DNA, 201 bp, Homo sapiens
cagtctgacaagcttcttaattgagcatttcatccatttatatatagtgtaattaagtaatgttagatttatatattatttttgcattaattttcccttcyccatctgtattattttccccttttcctccttttttgccttcttttataccagttacactttttttaagcatctcattttctgatttttaaacatattatt

SEQ ID NO: 13518 - DNA, 201 bp, Homo sapiens
cttaatcttttggctagtatttgcatggaatacctatttccatcctttcattttcatgctttctgtgtctttatacttaaggtgtgcctcttataatacaacatatagttgtatttttctttcatccagtctgacaagcttcttaattgagcatttcatccatttatatatagtgtaattaagtaatgttagatttatata

SEQ ID NO: 13519 - DNA, 201 bp, Homo sapiens
tataatcatgatgtctttcctgttggtctattccttaatcaatatgaaaagtttctcttaatcttttggctagtatttgcatggaatacctatttccatcctttcattttcatgctttctgtgtctttatacttaaggtgtgcctcttataatacaacatatagttgtatttttctttcatccagtctgacaagcttctta

SEQ ID NO: 13520 - DNA, 201 bp, Homo sapiens
actcctggcctgaagccatcctcctgctgtggcctcccaaagtgccaggattccaggcatgagcccctgtaccccactgattctggggatgttgatactcrtgttccttctctccctccctcttttcctcccttcttccctagcttcttccttctctcctcgcttcgttctttcctctctccttccctccttttttctctc

SEQ ID NO: 13521 - DNA, 201 bp, Homo sapiens
taatcccagctacttgggaggctgaggcagtagaatctcgtgaacttgggagggagaggttgcagtgagccacgatcacgctactgcacgccagcctgagygacagagtgagactctgtctcaaaaataaataaataaaataatgagggataaatttactggtagatgactgaaaattgcaaaatttgctaagagaaatat

SEQ ID NO: 13522 - DNA, 201 bp, Homo sapiens
aggaaggacgtggtgagtgttggctctgtgcgtgacgtcctgccatttgcctgaacctgccatttgccttgcagtacaactttattcagttaaaaatgaamggtcttgattttaaggtctagcctctctttttgtctcggtagagttgcacccttaaattatttttatttatgtatatatggtgattattacaacatttat

SEQ ID NO: 13523 - DNA, 201 bp, Homo sapiens
tcccaactggaagagacaattagggattgcatttcacctttcattgtatttgtatctgtttccctgttgctctgttattttctgaacatccttcctctgtkcttattgaaagaacaaatggaaacccaaacctgctttgcctctgatccttacaccatggcatcccttcattttatagccatgcgtcccagagtggggcct

SEQ ID NO: 13524 - DNA, 201 bp, Homo sapiens
ttcccaactggaagagacaattagggattgcatttcacctttcattgtatttgtatctgtttccctgttgctctgttattttctgaacatccttcctctgygcttattgaaagaacaaatggaaacccaaacctgctttgcctctgatccttacaccatggcatcccttcattttatagccatgcgtcccagagtggggcc

SEQ ID NO: 13525 - DNA, 201 bp, Homo sapiens
tggctttgttctcgggtggctctaacactagggcagtctcctacacgggcagcccatcttggcactgtgctctccctcactgacctcctgtgggattccasacaccacagccttcgaggctgacctggcctctttccagaagatgtgcagctcttagcacgtcatacatttcttctgcctaagtgttgactactggcattg

SEQ ID NO: 13526 - DNA, 201 bp, Homo sapiens
tgtgggcgttcattgggttttcatggcgctcagggtcagacagatggtgtgtcgggagctgtgataccaggagagtttgtaggaatttgctgttgatttasggcatgttgggaacactggtggagatgagcggatgatgggtgaaggtggaaacgctgggatggaggaggttcatgagggcaatgagttctagatgaaagg

SEQ ID NO: 13527 - DNA, 201 bp, Homo sapiens
cacacacacatgcacagatacagatacacagacacacagtgactcacacagacatacgcacagccacaggcatgcgcgcatacccatgctagtagcagaartgaggacagaggctttgatgttctgaggggcagatgaggccctaccaagctgagtggggggaagcaagcaggcagccccccgtgaggcctcagggacaga

SEQ ID NO: 13528 - DNA, 201 bp, Homo sapiens
tttattttttttcccattatgaccctcctaaggagagaagtaaattcactttaattaagaagagaaatttaatgctaaggaataagaatttgtggggtagsgtgtgctttggaggaccacaagcagaataatatctaaaatgttctttaccctcctcccaagaatcaatttcacccccttagtggagatgtttcccccagt

SEQ ID NO: 13529 - DNA, 201 bp, Homo sapiens
cagtgctatgttcctctgattttctggaatcacttatggacacaccctccttccagcctgtactggctggtccgttagaccttttccctctcttgggtccrtcctaagcttgcttcagaagacggcttctaagcttatgtagtcatttttttccttagtcacattgtcaggggctgtcattacctgctcaggttttagtgg

SEQ ID NO: 13530 - DNA, 201 bp, Homo sapiens
aagaagtgaagaaaaatgaacaatcaaggaaaagtcttaatatttttggcttgagccaaaagtgattggtggaaagtttaaagataaagaagcgggcttgygaggtgggagtgttcccgagctctgttttggcctagcgcagtgtttctcaaccctgtttattttttttcccattatgaccctcctaaggagagaagtaaa

SEQ ID NO: 13531 - DNA, 201 bp, Homo sapiens
ccccagccaaagatgaacagacagacacctctttcttctcaccagagtaattctaacaaatgagaccagcacactcaattagctctgagaatagcacagaycacaactgcctacccagcatgacagataaatggtgcggtgagggatgaatttaggccaggacatctgggtaccagagcctacagggccagctctgctgtt

SEQ ID NO: 13532 - DNA, 201 bp, Homo sapiens
ccaccctctcctagtggctctggggaattgcctttctttgggggcctgggatgggttgctgtggaccaggtgacggacggtactgtaaggtgccatagccygtgtgaccctctgcctggaggcatggttgaaatccctggcatgggcagactgacctttggcctttagggaaagagcctcgttgccagcctggtcctcctc

SEQ ID NO: 13533 - DNA, 201 bp, Homo sapiens
ccgctcctccctgacgtcgccaaagttgccagacgcccctcagcgacccggtcgcgccagatgcagttgcataaccttgccccccacctgcgaccgcaccsggtccgctcccggctgcaccggggtgtcccggccccgggagccgccgagtttccggccaagccggtttggggccgagtgtgtgcgcccgaatcggggtcg

SEQ ID NO: 13534 - DNA, 201 bp, Homo sapiens
ggttatttaaaaaagcactccctccaaaagacacaaaaataaaaggagctgttaaagatccgtatgatgaaaaccacaaaacattcctgaaatggcataaraatagacttgaacaaatggagagacagtttgcatgtctaagtgggaaggctgatattgtaagcctcttcaattaatttaaaaattcaatggaattccaat

SEQ ID NO: 13535 - DNA, 201 bp, Homo sapiens
tgtccatgggaaaagtattcaggacatttaggtgtgttgtccataggaagataggagattcctcttccttggctgccagagacagctgttcatgctttaarataggtcattgtagggtatatgtatatgtgtgtgtgtgtgtgtgtgtgtgtgtgtgtgtgtctatctgtccgtctgtctgtccatctgtctgtttttgta

SEQ ID NO: 13536 - DNA, 201 bp, Homo sapiens
atagagagtcctgggccaggtcacagctgcagtgatgtttgttgactccccagcctgtgccctggatccccctatcccaggacatctcaccagcaagtctrcactctccctttgcagcacccatgtgttgttctctgtcagctcccaccctcccacctgcaaccatgccattattgctctcacctttaagaagagttcttt

SEQ ID NO: 13537 - DNA, 201 bp, Homo sapiens
caagaaaccaggtgctaagattaggccacagggaccaaattcacacgattttatgtccgggttacagcctggatgtgggatcccagatctccctggacgayaggaagtgtgcctcctaagcgtaggttctcctgctcactcacaccgtgggtgggctcaggtaagaagctctgggcagagcacggtgaccccagctctagg

SEQ ID NO: 13538 - DNA, 201 bp, Homo sapiens
taggttctcctgctcactcacaccgtgggtgggctcaggtaagaagctctgggcagagcacggtgaccccagctctaggccatcctggctcggtggagtcrggcatgtgtgttccccactgtgaatctcagctcttattgagaaaatgggcacagaaatgtcagcttgctcagctcatagtcttattccaaaatcaagtga

SEQ ID NO: 13539 - DNA, 201 bp, Homo sapiens
gggcaccagagtcttctctaataaggtggcagctggccgcggttgttgatttaccggccaggatcttcgcctcaagaaccacagtgcgctcttctgtaatyagtgctttccttctcacatctcctgacacgaggatgagcagagcaggctcgatgacacagctgctcaactgtaatcctgtatgataattttgcaaattat

SEQ ID NO: 13540 - DNA, 201 bp, Homo sapiens
tgtgagtgcccacttggaaacgcctgccagcaagttgaccctgaggtccgccccccagcccatctccccatctgtcacatgtgagttgcagtggatctgcstgtgggatgacgcccgtgcaccagccaggcaacgtgtgcagaggtgtgaaggaataatgtgcattgttctggacactgcttcctgctcaaggacttttct

SEQ ID NO: 13541 - DNA, 201 bp, Homo sapiens
acataaagttttattggcacatagtcatacccattcactttttgtattgtcagtggctgcttttgcgctgttataatagcagagtctattagtgaatgcaraagagaccatatggcctgcaaggcctgacttctttactgtctgatcatttacagaaaaagtgtactgatcccttgactagactgtcaagaatggaaagtg

SEQ ID NO: 13542 - DNA, 201 bp, Homo sapiens
actttttgtattgtcagtggctgcttttgcgctgttataatagcagagtctattagtgaatgcaaaagagaccatatggcctgcaaggcctgacttctttmctgtctgatcatttacagaaaaagtgtactgatcccttgactagactgtcaagaatggaaagtgcactgttaagaatgggcacatcttattcacagactg

SEQ ID NO: 13543 - DNA, 201 bp, Homo sapiens
tgcttttgcgctgttataatagcagagtctattagtgaatgcaaaagagaccatatggcctgcaaggcctgacttctttactgtctgatcatttacagaaraagtgtactgatcccttgactagactgtcaagaatggaaagtgcactgttaagaatgggcacatcttattcacagactgcaatcaataatcaataatcaa

SEQ ID NO: 13544 - DNA, 201 bp, Homo sapiens
aaaaagctgtaacctgcaagccttgtttgttaaaatcatgttttcctagaagcagaaagggcttgaatgcctattcctaacctttggggatttactctttractattagagagacatgctcagggactgtttcagaatatattcttgaagaagccgtctcagacaggaggtgctcaggtaaacagaaagacaggtctaatt

SEQ ID NO: 13545 - DNA, 201 bp, Homo sapiens
cagaaggctgaggtaggagaatcgcttgaacctgggaggcagaggttgcagtgagcagagatcacagcactgcactccagcctgggcagagcgacactacrtctcaaaaaaaaaaaaaaaaaaaaaaagattttcattgtgatgtattggtaaaataggtactcttagctcatccataattgcagtgaaggttgctcttct

SEQ ID NO: 13546 - DNA, 201 bp, Homo sapiens
acccatgctagtagcagaaatgaggacagaggctttgatgttctgaggggcagatgaggccctaccaagctgagtggggggaagcaagcaggcagcccccygtgaggcctcagggacagagcacccccatgtgctggcttatagtgccagccccttcccatggggggaaaagatgccgtcgtcgtagaagacagctcaggc

SEQ ID NO: 13547 - DNA, 201 bp, Homo sapiens
agaggctgcattgagctgtggttgtgctcctgcaccccagcctgtatgacagagtgagaccctgtctcaaaaataaataaataaataaataaataaataawtaaataaataaaaaagagtagagtgctcaattcgtcatcctctcctgggatgactgctgccatttgtgctttggactaggcattctgctaagtgctttct

SEQ ID NO: 13548 - DNA, 201 bp, Homo sapiens
cccatgctagtagcagaaatgaggacagaggctttgatgttctgaggggcagatgaggccctaccaagctgagtggggggaagcaagcaggcagccccccstgaggcctcagggacagagcacccccatgtgctggcttatagtgccagccccttcccatggggggaaaagatgccgtcgtcgtagaagacagctcaggcc

SEQ ID NO: 13549 - DNA, 201 bp, Homo sapiens
tactgttgctaaaggctttaattcgagtgtgtgtgtgctccggaacatacatctttaggaaagggaggcaggtggaccctaagccatgcagccttgtgcartgcttggtgttagatggtgcgtgtggcccctgtggatggagatctacctctggtatgtaggcaccaactctggatccgtgcaggatggttatcccagaat

SEQ ID NO: 13550 - DNA, 201 bp, Homo sapiens
cttagggaaacgcagtggctgaattattcattgaggttggtattaaacttctctgtcctcagcattatgctagatgctgtgggggatatgaaagaagtacmagatgtgattcctcttctcaattaactgactatataattagaaaggagtcatgaatatgggctgtgagtcccggtaataagggcctggggtgggactcat

SEQ ID NO: 13551 - DNA, 201 bp, Homo sapiens
tgtggcttgtttccttgtactgtcacctcctatttggttgctactcagtatttatacaaaccacagttctttgtcagccttgcagggaggaagatcccgcrcacatcccgcacacacgcccttacacatagaccccaccgggtttactgccctctccccaggatacccctggcatctaggtttagaggctttgaaagtctt

SEQ ID NO: 13552 - DNA, 201 bp, Homo sapiens
aacttgctcatctttccccattcaaagcaatgctctgagctgcggttaggtgatgaggcccatccacagaatccttcttaacccttatgaccctggagaaaggggactgtggaccaggacatccccccggggggtggggtcagtggcaatccctcctttcaccctcaagctccttaagtctcaccagctgcagagtaatcc

SEQ ID NO: 13553 - DNA, 201 bp, Homo sapiens
ttggagaaaagagccgagagcggctggggctttgttttcttttgcggtggcactgtggtacagagggcctgggctccacaggctgcacctgtcctggctgyggagggctgtcctgctggtggccctgcagactggtgctccactgctcgcccaggttgtgtgatgctgcttagctacttgaaactttgatgggttctcgaa

SEQ ID NO: 13554 - DNA, 201 bp, Homo sapiens
cagggtctagtggatgaaaccaacaataaatagcaacaagatcaacaagattctctatcaatctatctctatctctgtctctgtctctgtctctgtctctrtctctatctctgtctctctgtcacacacacacataaacacaacatctggtagtgataagaattatcacgaaaataaatcaggtgagaggaaagagggtga

SEQ ID NO: 13555 - DNA, 201 bp, Homo sapiens
ctttctctaggtttctggtgatccttggtatttcctgacttgcagatgccttgctccagtctctgcccccgtcttcacgcagcactctccctgtgtgtctstctttgtgtctcttctcttcttatgaggttgttaaattcagggccaactctactgtggcgtggcctcaggtcaacttgattatatctgaaaaaagactgt

SEQ ID NO: 13556 - DNA, 201 bp, Homo sapiens
accaacagcatccccattttgcacattagaaaaattaagacctagagagtttaagtaactcttaaacgctctagatacaaagcaaagagccagcagggggkattgcattatttctttatacgtgtgggtaaactgattaaaaggctttccccaaatcccataaagtgacccaggttcctggacttctggtcaagtgtttgt

SEQ ID NO: 13557 - DNA, 201 bp, Homo sapiens
tttgaatgtctttcagcctagctcttggtttcttaatctttttctttctctctgcaaaatgtcatttccatctgtttccattttcattcttttacgtttcytccttcccgagctaataatgactccttgctctttttccattccattcttgccgcccgcctgagtgtgccccaaaagccttctgtttggttttatcatggc

SEQ ID NO: 13558 - DNA, 201 bp, Homo sapiens
tggctgctccaagagatgatgtgttctgtgcctttctctaggtttctggtgatccttggtatttcctgacttgcagatgccttgctccagtctctgccccygtcttcacgcagcactctccctgtgtgtctgtctttgtgtctcttctcttcttatgaggttgttaaattcagggccaactctactgtggcgtggcctcag

SEQ ID NO: 13559 - DNA, 201 bp, Homo sapiens
ggcccttgcagctgaggatgaacagatgttgaattattgctgtctgtaatcattgtggatcacactggggaagggccgtgaaagggtggctggtgtgatcytcacagctgatttgcatggagcctggctacctttatagctctgtgcatggcagaggaaaccaggatagctgtgccagctgattctagcttcctcgtaggt

SEQ ID NO: 13560 - DNA, 201 bp, Homo sapiens
atgatggtgtttgtgccttgatagaatttttaggctgagagatcatggagtttatgccttccttatcagtgaggctgtttagtggtgctggccttggaggstaagtgacttgtccaaggtcacacagcaaatgagcaacaagtcttggttgggtggccttgcacctgcccctcgtcctgtgctccacggttcttctcgtgg

SEQ ID NO: 13561 - DNA, 201 bp, Homo sapiens
attacgctcccgtcttttaacaagctcattctctctaattaataaattacactagggcagagcgatagctcctgtagcattttaattttcaaaatccttgyttttcttgtcagttttaagtactcattatagacaagatgctatcacccaacataccaggacacatctgcataataaatgaagtctccgtggccacagctt

SEQ ID NO: 13562 - DNA, 201 bp, Homo sapiens
ttactctgtcctcattaccagagcattaatcatcctggcttcggcccttgcagctgaggatgaacagatgttgaattattgctgtctgtaatcattgtggwtcacactggggaagggccgtgaaagggtggctggtgtgatcctcacagctgatttgcatggagcctggctacctttatagctctgtgcatggcagaggaa

SEQ ID NO: 13563 - DNA, 201 bp, Homo sapiens
agacatctaataattctgactccgatggtgcgtagaggtgcagtcctgaaggtcccttcactcagctcccagctcccacatctgtgaagtgtggggctaasgagatggctctgcgattccttccagtgtcggcaccgtcttctgtatttctgttgtttgaagacttgaatggagggaggaaagcacgtgaacatgttgaaa

SEQ ID NO: 13564 - DNA, 201 bp, Homo sapiens
ccttgatagaatttttaggctgagagatcatggagtttatgccttccttatcagtgaggctgtttagtggtgctggccttggaggctaagtgacttgtccraggtcacacagcaaatgagcaacaagtcttggttgggtggccttgcacctgcccctcgtcctgtgctccacggttcttctcgtggtcagtatcagtgggc

SEQ ID NO: 13565 - DNA, 201 bp, Homo sapiens
ctgggattacaggcgtgagccaccgcgcccggccggaatagacatctaataattctgactccgatggtgcgtagaggtgcagtcctgaaggtcccttcacycagctcccagctcccacatctgtgaagtgtggggctaaggagatggctctgcgattccttccagtgtcggcaccgtcttctgtatttctgttgtttgaag

SEQ ID NO: 13566 - DNA, 201 bp, Homo sapiens
ggagtttatgccttccttatcagtgaggctgtttagtggtgctggccttggaggctaagtgacttgtccaaggtcacacagcaaatgagcaacaagtcttsgttgggtggccttgcacctgcccctcgtcctgtgctccacggttcttctcgtggtcagtatcagtgggcggcagccgcgcctccttccacacagctactg

SEQ ID NO: 13567 - DNA, 201 bp, Homo sapiens
ttgtggtgagccaagatcgagccattgcaccactctagcctgggcaacaagagcgaaactctgtatcaaaaaaaaaaaaaaaaaaaaaagaaagaaaaaakaatcttaacagtaatggtcagagcattcagaaaaaaaaattcagctgtgtcacggagtcagttggcttggcagctgttacaatatgatacaaaattttgc

SEQ ID NO: 13568 - DNA, 201 bp, Homo sapiens
gaggaatcaggctttttttttttttgagacggagtctcgctctgtcacccaggctggagtgcagtggcgcaatctcggcttactgcaagctccgtctcccrggttcacgccattcttctgcctcagcctcctgagtagctgggactacaggcgcctgccaccgtggccgactaattttgtttttgtatttttagtagagat

SEQ ID NO: 13569 - DNA, 201 bp, Homo sapiens
ggggctccagctgaggaatcaggctttttttttttttgagacggagtctcgctctgtcacccaggctggagtgcagtggcgcaatctcggcttactgcaarctccgtctcccaggttcacgccattcttctgcctcagcctcctgagtagctgggactacaggcgcctgccaccgtggccgactaattttgtttttgtatt

SEQ ID NO: 13570 - DNA, 201 bp, Homo sapiens
ttattctctggtactgctaactttcatgacttgttaggttagaatgattcttgaaaaatttgctttgcgtctgttatgtaaaaatgcctgaatcatacagrtttacacacacgtgtacctgcatgggtcctttactctgggggctccagctgaggaatcaggctttttttttttttgagacggagtctcgctctgtcaccc

SEQ ID NO: 13571 - DNA, 201 bp, Homo sapiens
tgaatttacttcaaatgccatatggagcaagacaaaatacaaataagtgaataaataaacatacaaataaattaaatgtataaagtatacagtgttgtgcwtatatgttcatggagttttaatagtttttctcttctttctgtgtgggacctttatctgtgatcaaattggtggtgccaacagtttatggtatagttggtg

SEQ ID NO: 13572 - DNA, 201 bp, Homo sapiens
aagaggtctgccctgactctggatttaattttaactttggaaagcaacctgttgtgtgcagtaggatgttatgtggtgtctgcagtgcctagacgctaacracatgcatggaaccaagctcccccttgggcccaggagccaagagattgaagaaagggaaatgctttcatgactctccacaagttcctccacgttcccacc

SEQ ID NO: 13573 - DNA, 201 bp, Homo sapiens
tattaaaattttaaccaatgtgacatgtaattcttatagataagccccttcaagaaatcaatgactgacaataacttggtatcttcccagcatctttacastaccctctaggaatctggcctcactcctcgttgagatgaagctctctctggctcctgccgtcagccctcgggcttgctttgtgccgaggtgtcctaggcc

SEQ ID NO: 13574 - DNA, 201 bp, Homo sapiens
aggtgtgaaggaataatgtgcattgttctggacactgcttcctgctcaaggacttttcttggggaagcacaccaagtctctcggttgagtttgacacaccragtctctgggttgagtttgacacaccgagtctctgggttgagtctgaagcagaaacctgactggaggaggcagcatcagaaggttaacggtctggccaac

SEQ ID NO: 13575 - DNA, 201 bp, Homo sapiens
agaaatcaatgactgacaataacttggtatcttcccagcatctttacactaccctctaggaatctggcctcactcctcgttgagatgaagctctctctggytcctgccgtcagccctcgggcttgctttgtgccgaggtgtcctaggccatggggtgctggtggccttgcctcagtcctgagcaaagcatcagttgctttt

SEQ ID NO: 13576 - DNA, 201 bp, Homo sapiens
ttatccacaaagggtacttttgtgtaacaccaggcactcgagtagatctgtggggtcttccctctgtgggtgatgagtctgggtttcagcatcccgcttcyccagaccacatggccactgatccgtggggtgcacagaaggacaggcagtcacatgcctgcttctttgagttctgccacctacgagctgagtaacctgggc

SEQ ID NO: 13577 - DNA, 201 bp, Homo sapiens
cattaagaaaacacgaagctcacaacagaaaataatttctaactattattattctgtggtttctgcttttgatcaagataagaatagccgaagcacccacycaggtcactctcatggaatggggttttctgattaaagattggcaagcaactgacaagcttgtagcacatcctttaagctggcactcgctgtttgagtact

SEQ ID NO: 13578 - DNA, 201 bp, Homo sapiens
gtgaagccaaccatgacaggaaggactacacttgttgagaatcagcaacaggccaggccttctggagagttctcctgcaacaaagagaagagagggaggtsccagagtcgaggaggtgagtaggccaagtttggaagttgctctaacaaaatactacaaacttggtagcttaaaacagtggtttttttcttctctcagagc

SEQ ID NO: 13579 - DNA, 201 bp, Homo sapiens
ctgtgacctttgtgtttcttggtacaggattgttggccaagttaggtaaggagacgagaactccggtgcgttccactccctctgacctgacgaatcagggyctggagcaaaccaaccaatgagatgttggcaccgtcatagaccagcaagcagcttaaagaaatttgggagtattttgagtcagaagggtttcccaagagc

SEQ ID NO: 13580 - DNA, 201 bp, Homo sapiens
aggaagcaaaacaacagcgaagaacgtggaggtcacggtgtctgtgtacgatgaggatgggaaacgattagaggtatttattgtggcgagggctcatctgkagtgtttcagttttacttgccaagtgctcaccttggctctgctacagcatagatgtcgtcagggtggggctttggagtcccgtttcttgggattggcgtt

SEQ ID NO: 13581 - DNA, 201 bp, Homo sapiens
ctaaagttctttataaaataaagaaattgtaatatttgggagattaaatgagtaaaaattaattatatattgaataaaggcatcatgggaatgaattcatytttaaatgaaaaaaggaacaatttcaccatgggttgtttatatgggaaaggttttatgagttcactgatgagaatggacacccattttccggtgagcttc

SEQ ID NO: 13582 - DNA, 201 bp, Homo sapiens
agaacgtggaggtcacggtgtctgtgtacgatgaggatgggaaacgattagaggtatttattgtggcgagggctcatctgtagtgtttcagttttacttgycaagtgctcaccttggctctgctacagcatagatgtcgtcagggtggggctttggagtcccgtttcttgggattggcgttggttcttgtttccttttctc

SEQ ID NO: 13583 - DNA, 201 bp, Homo sapiens
gctgtccctgtgaggtgcctctttgcaccagtgctggaggactgggcttttctgggcccatggggttgtgcctaaggctcagtgtcgccaagagaagcatkatgtctttctctctgggtgaactctgtccagcatcactgcctgcctcgtctccctggaaacataggtgctgcccttgccactggtctttctggttggagt

SEQ ID NO: 13584 - DNA, 201 bp, Homo sapiens
tttggctgggcgcggtggctcacgcctgtaatcccaatgctctggaggccaaggcgggtggatcacctgagatcaggagttcgagatcagcctggccaacmtggcaaaaccctgtctctactaaaaatacaaaaaattagccaggcgtggcatacctctagtcccagctactccggaggctgaggcaggagaatcacttga

SEQ ID NO: 13585 - DNA, 201 bp, Homo sapiens
tgcaccagtgctggaggactgggcttttctgggcccatggggttgtgcctaaggctcagtgtcgccaagagaagcattatgtctttctctctgggtgaacyctgtccagcatcactgcctgcctcgtctccctggaaacataggtgctgcccttgccactggtctttctggttggagtgaagcaaacagtgttcatggctg

SEQ ID NO: 13586 - DNA, 201 bp, Homo sapiens
ccttcacttctttccttccccttctctcgtccccttattctttcctttcttcttccccctttttcccccttgctttctaggctgagagagcactgttgatyctggggtgagctgcccactctttccttacccgcctgggtccctgccggtgctgaggcgggagccctgttcctggtctgagatgtgtgcctgtgagtcgag

SEQ ID NO: 13587 - DNA, 201 bp, Homo sapiens
aacatgaattatgctgcagtaataagggaaattattaaaatgtgtatttaatatgatacaaagcaattacgatggttacaaggattagggataacaaaggrtggcaaaaatggtgtgttgctgtttgtgaattgcctttgacatacggcatgactaaatccacaggccgaagcaaagaagctggaagatgctgccacgtac

SEQ ID NO: 13588 - DNA, 201 bp, Homo sapiens
tatgtttttgaaaagaccatttgttataacactgcaggattttagaaatgacttattgaatgtaggagggtgaactcaatttcaggtttttaattgtttcygtttcaattccatcataattcattgaatatcttccgtgtgctcaggaccattgattagcgagtttgcttcctttgagagtcttcagagtcatctacttaa

SEQ ID NO: 13589 - DNA, 201 bp, Homo sapiens
caccagtgctggaggactgggcttttctgggcccatggggttgtgcctaaggctcagtgtcgccaagagaagcattatgtctttctctctgggtgaactcygtccagcatcactgcctgcctcgtctccctggaaacataggtgctgcccttgccactggtctttctggttggagtgaagcaaacagtgttcatggctgga

SEQ ID NO: 13590 - DNA, 201 bp, Homo sapiens
aagcattatgtctttctctctgggtgaactctgtccagcatcactgcctgcctcgtctccctggaaacataggtgctgcccttgccactggtctttctggytggagtgaagcaaacagtgttcatggctggaggaaggggaggggagggttcccactttttagtctacagtccctcaccctagacctatgggacggatcag

SEQ ID NO: 13591 - DNA, 201 bp, Homo sapiens
ccacactggtgtttcttagaatacatttactctcatctccttttggacgtaaaaataggacgttcatggagacaaatgacagagtctttttaagatagctrttgtctttctcttcccagtactgttttatgtgtggcatgctgtctttacaccaaacaaaaaaaccgagctgccagcctgtggaggtcattgctggggagt

SEQ ID NO: 13592 - DNA, 201 bp, Homo sapiens
ttaaaacaaacccataatataccttcttaatgttttgataaaagcatttttgattaaaaaaaccaaaataaaatctcttgagctttactattgtggaaaayagaaatatatcgaaagggatcttaaacctggagctactctgcagtagttttgttaacttgatagatgttgtgcagaaggaaaaattggggttggggtcaa

SEQ ID NO: 13593 - DNA, 201 bp, Homo sapiens
ctccctggaaacataggtgctgcccttgccactggtctttctggttggagtgaagcaaacagtgttcatggctggaggaaggggaggggagggttcccacyttttagtctacagtccctcaccctagacctatgggacggatcaggcaacttcctgcagatcctaatgttaaagttattagggttgagggtctggggaact

SEQ ID NO: 13594 - DNA, 201 bp, Homo sapiens
aagttgcgtgtttaaaacaaacccataatataccttcttaatgttttgataaaagcatttttgattaaaaaaaccaaaataaaatctcttgagctttactrttgtggaaaatagaaatatatcgaaagggatcttaaacctggagctactctgcagtagttttgttaacttgatagatgttgtgcagaaggaaaaattggg

SEQ ID NO: 13595 - DNA, 201 bp, Homo sapiens
tccccatttctctctcttggagaacatggaaaccgtaggtgcatcctgagtttgttgggcttcataggaggcacgtctttgggcttgtcaaagcaagacarctctgtgtggtccagtccatgtgggactggcctgaatgaggacaccaggcctgcgtcactgcggccatttgctcacagagcattcagccttcctctgccc

SEQ ID NO: 13596 - DNA, 201 bp, Homo sapiens
cagtgtcatccccatgtgtcataaccatcaagatcttcaatgtgtgagaacaggggttggagctggccgctggcttcaggtggatctgtgcttcccttgcygggaacgtgttcatttgtggtgggggtgtgttggtgttcttggagcgtacctgtccccccacatatatagtgggagatgtatatggtgtcaagctctatg

SEQ ID NO: 13597 - DNA, 201 bp, Homo sapiens
gagccaccgagcctgaccccagatattttttcctctattaaaacttgctcatttctttaggtcgtagaaagcttgaaggaaacttactgtttatattcgaygattttgttagcttaggtgtttgtaattgtgttctgtccctctttcctatgccccatttctgtttcattcttgttctctaagccttttatcttagacagc

SEQ ID NO: 13598 - DNA, 201 bp, Homo sapiens
gctggccgctggcttcaggtggatctgtgcttcccttgctgggaacgtgttcatttgtggtgggggtgtgttggtgttcttggagcgtacctgtccccccrcatatatagtgggagatgtatatggtgtcaagctctatgaggtcttacgtgagctctttatgtcttcttttaaagcatgtgattttcccgggtgctggtg

SEQ ID NO: 13599 - DNA, 201 bp, Homo sapiens
tgccatcttatcaaagcagtattatattatagaaggaaaggctttggttgagcatatggctatttctgagttacttagctttatattaactttctcatcascagttggcctacttgcttaggccaattagtccttggccattttgtctatgtgggcatgctaggtcatgtcagggctgattttttcttctcaaaaattttt

SEQ ID NO: 13600 - DNA, 201 bp, Homo sapiens
ttcaggtggatctgtgcttcccttgctgggaacgtgttcatttgtggtgggggtgtgttggtgttcttggagcgtacctgtccccccacatatatagtggragatgtatatggtgtcaagctctatgaggtcttacgtgagctctttatgtcttcttttaaagcatgtgattttcccgggtgctggtgatgaagcgatttc

SEQ ID NO: 13601 - DNA, 201 bp, Homo sapiens
ccccatagtgcatgagaggctgtgttgaacatactggtgacattaatgaccatgtgatgacctatatctcagtattgtaacaacattggatccttttgctrtgtgtctcaaaattatttcccttgtgtttttcctcacagcaaaatgtttactgaattcatcctcaatgttcccatgggcttgctgaccatccagaaactc

SEQ ID NO: 13602 - DNA, 201 bp, Homo sapiens
ccttgggaacttgttagagaaagccaaactttggcttcctccccagaccttctgaattagaaactgcacagtggggcctggtcatttgattttaacaaccyccctccccgtgcaggtgcttccagggctctctcatattttagtagctcaggtcttgaaaaactgagaggaagcagagaaagctgcaactggtgtgggctg

SEQ ID NO: 13603 - DNA, 201 bp, Homo sapiens
agaaaataatttttagaaaaccccacaaacaaactttgagaaagctggtcactgggctttcagaccaaggagtgagattggacaccaaatccttccttttmtctccctaacttgccgcctctcagtggccaggtgtgctgtttgtttcctaatctgttggtatcactgcattctgaaagtgccattgtgagcaaatgggat

SEQ ID NO: 13604 - DNA, 201 bp, Homo sapiens
gagcctcaagcagaagactcagaagttactaagaaaataatttttagaaaaccccacaaacaaactttgagaaagctggtcactgggctttcagaccaagsagtgagattggacaccaaatccttccttttctctccctaacttgccgcctctcagtggccaggtgtgctgtttgtttcctaatctgttggtatcactgca

SEQ ID NO: 13605 - DNA, 201 bp, Homo sapiens
atgactgacaataacttggtatcttcccagcatctttacactaccctctaggaatctggcctcactcctcgttgagatgaagctctctctggctcctgccstcagccctcgggcttgctttgtgccgaggtgtcctaggccatggggtgctggtggccttgcctcagtcctgagcaaagcatcagttgcttttctgcccca

SEQ ID NO: 13606 - DNA, 201 bp, Homo sapiens
agagagaggcaggagacgggggagggctttcacagcaatggcatggaggggggctgttctctgttggaactcagtgagtccaggacttttataggcaccarcgttcatgaaggaggtgatatgagctccacctgccacagttgggctctcagggcagaccccagacctcttctctggacacaggctctctctgaggccatc

SEQ ID NO: 13607 - DNA, 201 bp, Homo sapiens
gtgcacagagctggaaaaactaatagactagatgcatcttactgatcacgttgatgtggaggggcctcatctctctggtccagctggaaatgtgattgctkcctggggtggccatgactaagggattcctgtctcagctgcctctatatggagaactgagctcaactggtaaacgctcagtttccctttcagaaaagaatg

SEQ ID NO: 13608 - DNA, 201 bp, Homo sapiens
aaaagaatgttactctcaagagcagcagtgattcaaatggccttttgactttaaaaaattctccatttaaaaatgtagaagcattttatcctatacaattataaacattattggtagctaataaaaaattttgatgaggcagcagatcattaagaaaatacatatagaccttgcacacttcattttgacttccaatagata

SEQ ID NO: 13609 - DNA, 201 bp, Homo sapiens
tttctaccatcaaagtaatggcatgtttttcattttgaaaaggatgaggtattttccactggattctgaactggggaattttgtgagccattcttgaaacyttgtcattcttcaagggatagagtcaagaagccagggagcctgtcattttcaccgttctggagggaaccccatcattactcccctagcaaggaactttta

SEQ ID NO: 13610 - DNA, 201 bp, Homo sapiens
cacatctgttcccttagcagggagccatgtccagagagtgaggcatgcagggagtggtcatgtggaaggtgcggtcagaccgccaaggtcatgccatcttytgggcactggtagtccctatggagctgctgctggccagtgggaagatttggaggatttgaggatactcttcagagtgtgcttccacagtctaaccctcct

SEQ ID NO: 13611 - DNA, 201 bp, Homo sapiens
ttgtatcatgagattgcagcaattcagtcacatcttcagagtccacttctaattctagttctctgctatttccactacatctgaatttacttcttcctctraagtcttgaaccggtcaaagtcaaccatgaagatcagaatccacttcttccaaactccagttaatgttgatattttgacctcctcccatgaatcatgact

SEQ ID NO: 13612 - DNA, 201 bp, Homo sapiens
ggtcagatccattagagaaatcactatctctggcagctatagccttataaaatatatttcttaaataataagacttgaaagtcaaaattgctcgtgattartggactgtggaatggatgttgtgttagcaggcatgaaaacaacattcacctccttgtacatctccatcagagctctgggttgaccaggtgcattgtcaat

SEQ ID NO: 13613 - DNA, 201 bp, Homo sapiens
ttccagaatgtttgttcaccccaagcagaaactctcaactccctgttcccatcccccatgtatatggaactaggaaaagactccagtggcagctgatgacrcacattcctacaccccggcaagcagagcatccaggacaacctgtcctgtgcccgaggggtggggcacggtcaccctgacctcccctgcttcccctgccca

SEQ ID NO: 13614 - DNA, 201 bp, Homo sapiens
gtgggcaagggagcattagtgcctgagctctgcctcctgtcatatcagtggctgcattagattctaataagagtacgaacgctattgtgaactgtgcatgsgaaggatctaggttgcatgctccttatgagaatctaatgcctgatgatctgaggtggaacagtttcatcccgaaacctgccccaccaccccctggtccat

SEQ ID NO: 13615 - DNA, 201 bp, Homo sapiens
atcctttgaaaaaataatatttttatacttatatatacatatatatacacatatgtacatatatacacacatatatacatatatacacacatatatacatrtacatatatatacacacacacacacacacacacacacgcagtcgtgtgttgcttaacaattctgccaaatgcatcgttaggcaatttcatcattgtgcaa

SEQ ID NO: 13616 - DNA, 201 bp, Homo sapiens
agtgggagatgtatatggtgtcaagctctatgaggtcttacgtgagctctttatgtcttcttttaaagcatgtgattttcccgggtgctggtgatgaagcratttcagagtacaaatctgtgatttactaccaagtaaagcagccacgctggtttgagactgttaaggtattatttacatggtcattttatcacatggcgc

SEQ ID NO: 13617 - DNA, 201 bp, Homo sapiens
ttgtagcttaaagctagaggaacagttttgcagataacgttccaggttgaataataaagtcttcagaaatagaagaattactcacctggaaaagtcaggaytccaattagtactttgccctttttcagaacaatcacttcataaaagtccccatgtgcaaacatgtaatctgaactattaagtgctgtaattgataaggat

SEQ ID NO: 13618 - DNA, 201 bp, Homo sapiens
tgtggaggtcattgctggggagtgggatcctgttctgtagctctgatatggtgccttttcataatgcagcgtgctcacatctccacgatggagtaaacacygtctcaccgccaagagcttgaatatttgaaaaccaggccaggggttggctctggaatacagatgtttgatgtgagaattagggacaatttttgcttagag

SEQ ID NO: 13619 - DNA, 201 bp, Homo sapiens
gagtgtctcccaacaaagtcattcaaggttgctaaggaaccacactggtgtttcttagaatacatttactctcatctccttttggacgtaaaaataggacrttcatggagacaaatgacagagtctttttaagatagctattgtctttctcttcccagtactgttttatgtgtggcatgctgtctttacaccaaacaaaaa

SEQ ID NO: 13620 - DNA, 201 bp, Homo sapiens
cttggctactgaggactcagacagccgtagccagccgtctaacaagggacaatggtgtgggctgccatgggtcatggatgccatcaatagtattggagccyctctggttgtcggctaccctgagaggggtagagtgtcctctgcccagatgataaccaagcagatcattggaaactttgagatttttcctctttctagaaa

SEQ ID NO: 13621 - DNA, 201 bp, Homo sapiens
ttacactagaaaaaatgttgcttatctgaaattccaattttactgagtgtcctggattttgtcttgcaaccctagctgtaaagggaagaaggagctttgtrgggtagagccaagcattggacaaaggcatggatggaggagcgatcggtgtccccagtccagttcagtaatatggagggcggagggtggagattacaagaa

SEQ ID NO: 13622 - DNA, 201 bp, Homo sapiens
tggagaggacagatatccgagctgtatcagagtctgagtgcgaagatgaggcacagcccacttccagggcgaacttgattccaaaagtgctagctgtagtkggaaacaaaaataaagaaggagttctcatgggctgtcagcatcaaaggtgaagtcaggattggagccgccctccctggaaatgggtgggtgtctgcttgt

SEQ ID NO: 13623 - DNA, 201 bp, Homo sapiens
gtaagtttgactctgtcatatgccattcacgttttctcagtaataagttttcaacattagtaaagtatcagtcaagcccaaaattgtcactaagaaagaayctgaaaaggagtagctgcagagtttgtgtcctacagtcatgagtggaatggagcctggtggcacaggatgtcacccatgacatgaaagggggtcggacag

SEQ ID NO: 13624 - DNA, 201 bp, Homo sapiens
agattcattttcttttttgagacaggatcttgctttgttgccggggctggattgccatgctgtgaacacggctcactgcaacctctacttcctgggctcargtgattctcctgcctcagcctcctgaatagctgggactacaggtgcaagccaccaatgcctggctaattttttttgtatatttttgtaaaggtggaattt

SEQ ID NO: 13625 - DNA, 201 bp, Homo sapiens
tatgcagtaattgatcatcaaagcatgagaaagtccattttcgagtcagtaacaacaatgctcccttagcttatgtgggatcactaacaagcttttccacycaaagcccacagtgtgcccagtgccgtcctgcgccgtgaaataccgagatggagccaggcccacctcgaggcgattctagcatcagggctctcatatgag

SEQ ID NO: 13626 - DNA, 201 bp, Homo sapiens
tactctgcttatagatttatttcctaaacaagtgctgttaaatggcctccacttcacaggctccatggaggagcagagctctcctctctctatgccgatgytttcagcatcctcagaatagcagctggaaggcagtaggttttatggggataactgtgcactcaccagtttagatgtgtggttgctaagagtcacggtatt

SEQ ID NO: 13627 - DNA, 201 bp, Homo sapiens
aattttattatgtgtcaggacaacctgtgagaagttagcattgtttgagcattctttgtaggttagagattcattttcttttttgagacaggatcttgctytgttgccggggctggattgccatgctgtgaacacggctcactgcaacctctacttcctgggctcaggtgattctcctgcctcagcctcctgaatagctgg

SEQ ID NO: 13628 - DNA, 201 bp, Homo sapiens
aggcacttaggccacaggtgataagtgttggcttctgttaataataattttattatgtgtcaggacaacctgtgagaagttagcattgtttgagcattctktgtaggttagagattcattttcttttttgagacaggatcttgctttgttgccggggctggattgccatgctgtgaacacggctcactgcaacctctactt

SEQ ID NO: 13629 - DNA, 201 bp, Homo sapiens
tagcacacagtataggcacttaggccacaggtgataagtgttggcttctgttaataataattttattatgtgtcaggacaacctgtgagaagttagcattstttgagcattctttgtaggttagagattcattttcttttttgagacaggatcttgctttgttgccggggctggattgccatgctgtgaacacggctcact

SEQ ID NO: 13630 - DNA, 201 bp, Homo sapiens
agaaatcctatctgcaggaacgttggggatgcagatgaccagtatctagtgctgcgtgactttggattacgagtaagtgggctgaagtgcagcctgttccrtgcttaattatcactgtattgctgtccagagttcttgttaaccttatgaggatgccttcagtttttgtgaatgtaggttttcacttcatttgaggaggtg

SEQ ID NO: 13631 - DNA, 201 bp, Homo sapiens
cctcttgcatatgtcttgttttatttatcactgtgtcgttcacgtgcatctgtgttctaggtaacagtggttggtgcttcttgttactgcgtcgagttccrttgtatgaattcccctcttgaagggacatttgggttgtttctagtgtttggagattacaaataaagctgctagagacgtccacataagggttttgtaacc

SEQ ID NO: 13632 - DNA, 201 bp, Homo sapiens
gatgcagcctcttgcatatgtcttgttttatttatcactgtgtcgttcacgtgcatctgtgttctaggtaacagtggttggtgcttcttgttactgcgtcragttccattgtatgaattcccctcttgaagggacatttgggttgtttctagtgtttggagattacaaataaagctgctagagacgtccacataagggttt

SEQ ID NO: 13633 - DNA, 201 bp, Homo sapiens
cgctggctattaaatgtcacaataaatgttttctgttttttttcaaagcaacactgaggttgtggaagcagaacatttgaaatcagaatgaaattattackatttagtgctcttttgaaaagttgcatcccaaagcagacggttgggatctggtgggccttgaaggacagggcaaacactgaggtgaacaacagcatggat

SEQ ID NO: 13634 - DNA, 201 bp, Homo sapiens
tggtgaaatggtatttatgaacttgctacaggcggttgatgctttgctgggcacagtataaaatgcatgaagccagttcgtgcctcaccctctgggcgttygcaagcgaaacgagagaccgggagactgagcaatcagcctgtgtgaacgctggctattaaatgtcacaataaatgttttctgttttttttcaaagcaaca

SEQ ID NO: 13635 - DNA, 201 bp, Homo sapiens
tcatgacatttttgatgctaggagctcgggaagaccacggcagggaagactttgggagccctcgccccgcttggcggtctgtcggtcccgattcacacagygtccggcagcccaaggggagccagcagcaggtgggccataaaggcctgtcttgtttgtggccgattcaccctggtgaaatggtatttatgaacttgctac

SEQ ID NO: 13636 - DNA, 201 bp, Homo sapiens
aatcatcctcaaaaggcagggcaagtgttttcctctggttggtgatggtgtcctagcatgccctttttccagctggcttcccactgggctcagcccgatgsgtctactgcaatccccctttcctgtgttgccctcggataactccatgtgtaggcctgaatcgtgttcatttccaggaaaagtaaatgatgcatatcttac

SEQ ID NO: 13637 - DNA, 201 bp, Homo sapiens
gatatttttcatgcagggattcccttcatgggtgttttttggcgactgggcaaattgtgtgcttttcattaaaacccgtatacattgtggcctaatgggtktggccaggtggtggaagcttttgctctgcctgctcttgtgtatacagagatttttctgggataagtctatgtttaatgtcccagatttttgaacaccagt

SEQ ID NO: 13638 - DNA, 201 bp, Homo sapiens
gcccagggctgtcactatccatagaacccagtaccagctccaggccagtgtgtcttctgtactaataaggagggtgataataaaaggttaagctactgtcrttttggtagcttctttttccaatccctgcttctacaaccacttgtgactgctttctatgtttttcccagcttggaacaataaaacctgttggtgacagac

SEQ ID NO: 13639 - DNA, 201 bp, Homo sapiens
tacgtattctcttaagtatcgttatagtagccacatttctttaatgattctctttacagaaatgtatattcactgagttgcaaagaaaactaaagaatttrgtttcctgattgtgtagaaatattaataagattggttaattcgggatacattgctggtgttaaaatactgcacatattttattcaaacatttaatttctc

SEQ ID NO: 13640 - DNA, 201 bp, Homo sapiens
gtgagaactacctggttcgctggtccagttcaggattacctaaagacatagacagattacataatttgcgagccgtgtttactgtaagtgcacccaaagaygcttagttgaattggctaccattctaaggactacttttagccatttctgtctgccttcctgcgacactagaacatgggtccctgggatgcctgtatacag

SEQ ID NO: 13641 - DNA, 201 bp, Homo sapiens
cattgtggcttcaagttgacctgctaggctcaggatgctctagtcctcaagtttcagatataaatcatatatttggttttaaagtggatcccatctttccstgggagtgatcctgacccatattctcagtctgtagggaagccagtcagtggaggttttcaggtcttggtgatggacataagaatggatatgtgcaggacg

SEQ ID NO: 13642 - DNA, 201 bp, Homo sapiens
cagcctgaagtcatcgtggccttggcaggaacagagctgtggtgcgggccggagtcaggctgcagtgggagtgaggaggggtcgtgtgggaagtggacgcrggccttgcccacactgtggggtattgtccgatggagcagaggctcgcagggcctggggctgcttttccgggtgagaggctggtgtgggcttcatgataga

SEQ ID NO: 13643 - DNA, 201 bp, Homo sapiens
tgctctggctgcccagtgaggagtgtccttgaggggtcagcgtggaggcagggagggcgggtaggaggctgtggcagcaaagccaatgggaggcagtagcsgtgcggcccaggtgctgtttgttccggggggagttaacagcctgaaccgagggctctgtcgctgcctagaagggggctgtgaggaagagagaacacccgg

SEQ ID NO: 13644 - DNA, 201 bp, Homo sapiens
tctgtggctgaatgcagagagaggaatgcttcttgaaaataaagaggtcacgactatatatgaagtttgcagtcagtttgggagtcatggagggtcgactkcccaatgtcctctgtgaggacagaaggagacaaagcagactgaaatagtctctgtccttacctgtgaggagcttattgtctatggggaatacggacaaat

SEQ ID NO: 13645 - DNA, 201 bp, Homo sapiens
tgggtaatggaaccctcctgccaaggaaagccagagcctgtggtaggaaggaatctgagttccctttgcatcttgtccttgtctggctaatcaaactggayggggaagacaactttttcccttagttaaggaggtgatttctgtggctgaatgcagagagaggaatgcttcttgaaaataaagaggtcacgactatatatg

SEQ ID NO: 13646 - DNA, 201 bp, Homo sapiens
acaatagtgggtaatggaaccctcctgccaaggaaagccagagcctgtggtaggaaggaatctgagttccctttgcatcttgtccttgtctggctaatcaractggatggggaagacaactttttcccttagttaaggaggtgatttctgtggctgaatgcagagagaggaatgcttcttgaaaataaagaggtcacgact

SEQ ID NO: 13647 - DNA, 201 bp, Homo sapiens
cactgttttgcccatgagaagcccgataggaaatgctaccttcccaaattcacatagcgagtgatggaggagcccggacagcaccccagagccctgacctygtctaccatggtgctgccttcctttgatggtgctggttagggtcccccacatgcattcatagatttttatttttggaggtgtctttcggcagataagatt

SEQ ID NO: 13648 - DNA, 201 bp, Homo sapiens
acaaaaataacaaaaggcaaacaaaaacaggaaaaatcttcaatgtcctcaatttctatcaccctgatcttttttgtgatttgggaactgattctactcartatttgccacaatgaagatggcactttacaaatggaagtttgcaccgaatgaagattcaggtttgagagatgtgcacgctgaggaggttttccatgtcaa

SEQ ID NO: 13649 - DNA, 201 bp, Homo sapiens
caattagaaaacttttagcctcttctgccctttcctgtttcttcttttccctctaaagctttggtttcagtgtgttcttgtccttttggttcagttttgayctcagtttccctcccaagagttgtgattgctgaatacgatgagttcctgattgcctggatattaagaggtgaaccaaatcttaagagggacactcagcag

SEQ ID NO: 13650 - DNA, 201 bp, Homo sapiens
ttcctgtgcgtgctggtaccacgcaagcctgggtgacctgtccagcccttacctaccttgcctaactttgtgctttttctctgctggcgtgtctgacatgygccgtgagcctagagagtggaactgacttgaggccacggggctgttaatggccagccaggacttgaggaattcctgcctgcacggggctccttttgctga

SEQ ID NO: 13651 - DNA, 201 bp, Homo sapiens
aggaggctgagacaggagaattgcttgaacctgggaggtggaggttgcagtgagccaagattacaccattacactccagcctgggcaacagagtgagactstatctcagaaaggagaaaaaaaaaattattttatttctttaacctgaagtatttcagcaattagaaaacttttagcctcttctgccctttcctgtttctt

SEQ ID NO: 13652 - DNA, 201 bp, Homo sapiens
cagcccttacctaccttgcctaactttgtgctttttctctgctggcgtgtctgacatgcgccgtgagcctagagagtggaactgacttgaggccacggggytgttaatggccagccaggacttgaggaattcctgcctgcacggggctccttttgctgatagggatgctgatagattgtgggtttggttccatttattcag

SEQ ID NO: 13653 - DNA, 201 bp, Homo sapiens
gaatcattttaatgtgcgttttcttgagaaatatgtaaattaataattgcttcatacattattcaagaaaaacttattttgtatcacccataactcttctmatcttatataaagatatgctaatggatttaattaaaataattatactgaataatgtagcctgaactttattctaaaatagcatctattaatcatcatcat

SEQ ID NO: 13654 - DNA, 201 bp, Homo sapiens
gtttcctgattgtgtagaaatattaataagattggttaattcgggatacattgctggtgttaaaatactgcacatattttattcaaacatttaatttctcrggcattcttctgttatatgttggaaatgaaatggttttagttgcagtggggtgaaatgaaaacaaaatcaagatttctgaaagacaagagggtcagcttt

SEQ ID NO: 13655 - DNA, 201 bp, Homo sapiens
aaatattaataagattggttaattcgggatacattgctggtgttaaaatactgcacatattttattcaaacatttaatttctcaggcattcttctgttatrtgttggaaatgaaatggttttagttgcagtggggtgaaatgaaaacaaaatcaagatttctgaaagacaagagggtcagcttttaaaagatcaccttttt

SEQ ID NO: 13656 - DNA, 201 bp, Homo sapiens
gtaaccatctcgtaaggttaccgtgaaaattcagtgagatgatgctttatcttgagcttgtcatgtaaattgtaaatgctaactaatatgatcatattcaktattattcacatttgaaaaacttttgagaaacatttttctgagttctttaaaaatcatatctggaacaagataggtgaaatgagattaataaagtagttc

SEQ ID NO: 13657 - DNA, 201 bp, Homo sapiens
tggggactcaagtctggaaagaataaaatgtatgtcgaaatggcaaggaaaaaagcatgatcacaagcaccaagatatgatgtttttttcctgtgactcartttcatttctgtagtggtgaaacagctgtcaagactacggcagttaccagcgggaacctggagggaagggtgacttgggagttctcacatggcccttaag

SEQ ID NO: 13658 - DNA, 201 bp, Homo sapiens
cgaaaatatttctgaaagagttacaaaatggggactcaagtctggaaagaataaaatgtatgtcgaaatggcaaggaaaaaagcatgatcacaagcaccamgatatgatgtttttttcctgtgactcaatttcatttctgtagtggtgaaacagctgtcaagactacggcagttaccagcgggaacctggagggaagggtg

SEQ ID NO: 13659 - DNA, 201 bp, Homo sapiens
aaggattagaagatcatggtaaatttaggcaatggagtgtgttgttgattttcaatttgtgacataatgggtttaaaaacattggtagtggccgcctggckgctcacgcctgtaatcccagcactttgggaggccgaggcaagtggatcaccttaggtcaggagttcaagaccagcctggccaacatggtgtaacttcttc

SEQ ID NO: 13660 - DNA, 201 bp, Homo sapiens
aattatcacttagtttacaaaattttccattgtacacaagttttcaggtatcgtatatttttaattaggcagcaaactagtattagtaaacactgtattamtaaaacatctgagtcacaatattttaaaatgcaaatgtgttgctttttagtaacacagcaacttgaagtaactgctaataaataatttacaaacgagact

SEQ ID NO: 13661 - DNA, 201 bp, Homo sapiens
gtctctgatctcatgctgggcatgctgggcgtcctctctcccaaaggaaacggatgaggctcatgctgggcatgctggacatcctctctcccgaaggaggygggcgaggctgttgctgctgctgtggttccacagcactcctttgcgagcaggagtttgtggtttgcttctttaatcttggggctatagcagtttgagatc

SEQ ID NO: 13662 - DNA, 201 bp, Homo sapiens
atagatttcatgttgaaatagtaatattttagatagagtcaatattactacaattaattttactctttaaaaggtagcagctaggaaatgcaacattcacrgatgtggctcctattggacggtggttcctgttggacggtgctgctctgagtcaaagactttgctcttgttgagcgccaagaacatcgtcagaccagcact

SEQ ID NO: 13663 - DNA, 201 bp, Homo sapiens
cagtccccagcctgttgacagcagccacacatgtctccagaactgcggcccacacgcgtgtccgatgcgaagctcacaccattctgacgtccctgggtgtktccgcctcgggtccgctcatgctatgcttctcccttagtggtcggaggatgtgtgtgtggcccacctcacccagcgggacgggtaccaggccaccacgca

SEQ ID NO: 13664 - DNA, 201 bp, Homo sapiens
ggctctgccctggcagtccccagcctgttgacagcagccacacatgtctccagaactgcggcccacacgcgtgtccgatgcgaagctcacaccattctgaygtccctgggtgtgtccgcctcgggtccgctcatgctatgcttctcccttagtggtcggaggatgtgtgtgtggcccacctcacccagcgggacgggtacc

SEQ ID NO: 13665 - DNA, 201 bp, Homo sapiens
ttgaactgatcaagttctccatcatctgaagttgtgctttgaggtcgaccacttccgtatgaggcacgattcgttggcattcttcacctgcagcaaccgcygtgggactaggctggttccccagccccggcggggtgtgagtctgcgacggctgctcactacattcgggggacaggcactgcatcgggggtgagcaggcca

SEQ ID NO: 13666 - DNA, 201 bp, Homo sapiens
tatagaaccttcctgccctaaacctcaggggaaatgtctatcaagcctcatcaacatcaacactccttccttgcccagtgtccaagtttcccagtgcctcrcttgcattagagccctgagccttctaattatgctagccccacttacagaggagcatacagtcacacttcaggtccaggatctcattattcttaggcccca

SEQ ID NO: 13667 - DNA, 201 bp, Homo sapiens
tagctgcatgtgttctgaatctgtgtgatggaactggctacttataaaacagtgttcatcttctctgacagagaagtcatgattacaggcttataccgcgyggatctttgaagagcttcacttataacatgtggaatacaggccacttcttatactaatggctgggaaagttcaaaatcatcatctgcagacgcgaaatgg

SEQ ID NO: 13668 - DNA, 201 bp, Homo sapiens
tcctgcctcagcctcccaagtagctgggactaaagatgcatgcccagctaatttttgtattttttagtagagacgagttttcgccacattggccaggctgstttcgaactcctgacctcagttgatccgcccgcctcagtctcccaaagtgtcaggattacaggcgtgagccaccacacctggccaagttgtcctattctt

SEQ ID NO: 13669 - DNA, 201 bp, Homo sapiens
tgcctcccctgtgtcttttatgcctgtcggtatgtccggacagaggctctgccctggcagtccccagcctgttgacagcagccacacatgtctccagaacygcggcccacacgcgtgtccgatgcgaagctcacaccattctgacgtccctgggtgtgtccgcctcgggtccgctcatgctatgcttctcccttagtggtc

SEQ ID NO: 13670 - DNA, 201 bp, Homo sapiens
gctgttgattaaaatgccaacccacgcagcactgagaccagagccctggggtgccgctcttgggatggccctggatcacctggctcctgatttgtcccggratgttaggaggtgtcatttgcaagctgccagttccgtgctttgcagaacctgctgggtttttcttttgtctgaaccccactgcagctatgcctcccctgt

SEQ ID NO: 13671 - DNA, 201 bp, Homo sapiens
gcccggtcctagctcacgcagtgttgttctgtgtcattattctctaatgtagaatcgcaccatcctgggggtcaggcatcttccgcctcctctttgacctrgtttgtggcacacagcaggtcctcatcaaatagctgctgaattttattgaaccttatacttaatgccactgatgtgttgagcccaagttcaggagctgac

SEQ ID NO: 13672 - DNA, 201 bp, Homo sapiens
tgatgttcctttgtttgtttgtgttctgtgattatagcatttaagccaaaacaatctctgttctctttttgtctccagtgatggatgtaacagatataatmaatggaaaagtagatgatgaagataagcagcatttcattccctttcagccgtaagtatggagcaattcaagtacttagccagatataatgtggaaaacat

SEQ ID NO: 13673 - DNA, 201 bp, Homo sapiens
cttgctctgttgtccaggctagagtgcagtagcccggtcctagctcacgcagtgttgttctgtgtcattattctctaatgtagaatcgcaccatcctgggrgtcaggcatcttccgcctcctctttgacctagtttgtggcacacagcaggtcctcatcaaatagctgctgaattttattgaaccttatacttaatgccac

SEQ ID NO: 13674 - DNA, 201 bp, Homo sapiens
tctgtttttttttcttcttcttcctgtagaagggtcttgctctgttgtccaggctagagtgcagtagcccggtcctagctcacgcagtgttgttctgtgtyattattctctaatgtagaatcgcaccatcctgggggtcaggcatcttccgcctcctctttgacctagtttgtggcacacagcaggtcctcatcaaatagc

SEQ ID NO: 13675 - DNA, 201 bp, Homo sapiens
ggagtctttttcacagtgttctttttcttgttctgtttttttttcttcttcttcctgtagaagggtcttgctctgttgtccaggctagagtgcagtagccyggtcctagctcacgcagtgttgttctgtgtcattattctctaatgtagaatcgcaccatcctgggggtcaggcatcttccgcctcctctttgacctagtt

SEQ ID NO: 13676 - DNA, 201 bp, Homo sapiens
tgaagcagccgagccatcattaagcagatcacctctgaaaatgaaggaaattggatgaaagctctgccccggcagctgagtgctaaattagggagaatcaygggaggccaagggcatggccgggctttgtcgctgccttattatggatttgataagaaacaacttttttgactgtttacattatggaaatgtgataacccg

SEQ ID NO: 13677 - DNA, 201 bp, Homo sapiens
cgggatcctgctgctcaaagtcacagtgatctgtgttgtgttgttttatccatttaagcccattttagaattctatttttctttatttctgaatattgtayctcttttttccaaggtcaacacaagataaagttcattccagaaatggtgggcccaatattagaaatgacattaattcccgagacggagctgcgcaaagcc

SEQ ID NO: 13678 - DNA, 201 bp, Homo sapiens
tggtgggcccaatattagaaatgacattaattcccgagacggagctgcgcaaagccaccatccccatcttctttgatatgatgcagtgtgaattccattcracccgaagcttccaaatggtaaggacgtagatgtgcagcgagtggccgggggacatgagggaggcaaacctgaaaaccttcaaagaaacctgtagacagt

SEQ ID NO: 13679 - DNA, 201 bp, Homo sapiens
tcaaagggagggagtaatttgtaacagaagcagagtatgtagaaactgttctcgtaaaagcgttctctaaattgctttgcttgcagctgtggaggttgccrtaaagaatgatttctcatattggattttcaaagccgcaggagtggccacagagcaggcaacggacagcccaatgatttaagattatttaatgccccagtt

SEQ ID NO: 13680 - DNA, 201 bp, Homo sapiens
gcatgggaaagcggtagggggtgctcttcacagttgtgggggaggcttagcctgaatctcagggcacagctgaagaaggagagcagcctggaaatgcgtcytaaagagccgctcagccacggcagctgtgagctgtggcccatcagtggctggaggtgggaccatttgagcttttcactgagatagagcctgtgtcaagtg

SEQ ID NO: 13681 - DNA, 201 bp, Homo sapiens
aaggatccttcaaggtaagtgaaaagcgatgatgccgaatggcatttaaaaattactgtagcttgctgaattccaagtgtgtgccctctgtctttgctcasatcccaggatcagatgtttactgtgtgttgtggtcccaatttcccaggggatgtttttccatagacacaacagtttagaaaaatcaatgatttgtagaca

SEQ ID NO: 13682 - DNA, 201 bp, Homo sapiens
gacattaccgtgatagtgcggcctgaggagtaagtctagaagcagaattaagacctacagtgattagaaaagacaacacaaaaatattgacagatgttggyttgatgtatttagaaaccctctccaaagtgggggaaaaatagtttggaagtaataggagaattctgtaggttcaattgcaaaatgtacacatcaaattca

SEQ ID NO: 13683 - DNA, 201 bp, Homo sapiens
ggttacaaggattagggataacaaagggtggcaaaaatggtgtgttgctgtttgtgaattgcctttgacatacggcatgactaaatccacaggccgaagcraagaagctggaagatgctgccacgtacttgagtctgccctccacgaaggcagagttggaagaaaagggccactcggccaccggcaagagcatgcagagcc

SEQ ID NO: 13684 - DNA, 201 bp, Homo sapiens
taaacagatcagggtggccaggtgtttgtgtaaattacttagtttggactagggttagtaaaattagaatcagctgtgttgtgatttacttaccactcatycacctttgttggaaatcattaagttcatcagtcagaatttgatcagcagcatacctaggtagctgtagcttcctcattgcctgtgtttgtgacagctaga

SEQ ID NO: 13685 - DNA, 201 bp, Homo sapiens
  misc_feature (1)...(201): n = A,T,C or G, or insertion/deletion polymorphism (see Tables 1-2)
tttcatgtgcatcttggccatttgtgttccttttttgattaaatatctgctcacattttttgccaatttttggtgggttattttcttcttattggtttttnagagtttgtcatatactgcggatggaaaccctttgtcagataggtgtttttaaaaatattttctccagttctgcagtctgtctttttactttctgtatag

SEQ ID NO: 13686 - DNA, 201 bp, Homo sapiens
  misc_feature (1)...(201): n = A,T,C or G, or insertion/deletion polymorphism (see Tables 1-2)
tttttaattttagccattctaataggtatatagttatatttcagtgtggttttaacttgcgtgttcctattgactagtaagatagaccatgctttcatgtncatcttggccatttgtgttccttttttgattaaatatctgctcacattttttgccaatttttggtgggttattttcttcttattggtttttgagagtttg

SEQ ID NO: 13687 - DNA, 201 bp, Homo sapiens
ttgcatttgacaacttttaactgtgtagccagataattagcttgtgaaaaacatactcagttttacaaacaagttgtgattctggaaagtaaaattagtcrttatagtactactttgcggatttacctcccactgcatgctgttaagatctcatctaagcaagattaataaaaaataaaaaatcttgactaaacatctgtt

SEQ ID NO: 13688 - DNA, 201 bp, Homo sapiens
ttgttccatgtggaaaatcacacacattctctagcatattacattgtcattatgtcaacatttttaaattttattgtttaaattgacgaataaaaattatrtatatttatgatgtacgacatgatgttttgatgtatgcttacattgtggaacagctaaattgagctaactaacatgcattctctcacatacttatttttc

SEQ ID NO: 13689 - DNA, 201 bp, Homo sapiens
aatgttcatatgtatctatatattatctatatctgtatatttttatattataatttaaattatttcagtagaaatttgaagtaggagttttagggagaggsaaaaaggagtgcatgcattaaacattcctttagggtcaagacgatggagccattgagtacattttaatgaatgtgaatgttatctgggctgctagaaaag

SEQ ID NO: 13690 - DNA, 201 bp, Homo sapiens
tttaaaaccagataggagaagttgccactctccagcatgttcccttggggatgtgctgttgcagctgtgggctccagtaattttcccagtggtctggggarcttctgtaaatcttactttattggcaatccataaaattgaaatctgccttccgtcttttaaagtgactgtaaataaagctgccaggaaacttgggcattg

SEQ ID NO: 13691 - DNA, 201 bp, Homo sapiens
agcaagcaagcaaaagcaaaagcatattggtctctaccccagtccaggtaaatcagaacttctggaggatggagactgggttccactgtttgttttaaatrcctaatataattttaataatgcacatacgataaagaaccactggccttcttcctttatctttttcaccctttgttgtcttctatttcctgctgtatctcc

SEQ ID NO: 13692 - DNA, 201 bp, Homo sapiens
tttgagaccagtcattcgtacattgacagtctttgcacagtgaataactctggaatttctgcattagagagggggtgctcaaggtcttcccatgctaccayggtttgctaacgtggttaatttctggccgtagtccttacgaactggggctttgagaccacctgcttggatttgagttctggcccttcccctccacttaat

SEQ ID NO: 13693 - DNA, 201 bp, Homo sapiens
gtctgcctttcatttctcaccagccacggttccccttcttgggattgtggcatgtcaggtgtgtacaagatggagctgccccaaatggcgtctaagcatcractcccacattctcatttgagggaatcatttttctgaaaccatgatttgttcctgcgaagttccattacttagggaaacgcagtggctgaattattcatt

SEQ ID NO: 13694 - DNA, 201 bp, Homo sapiens
gagccactgcacccagctggcacacacataattttctaaaccaggggttgacaagctgtaactgatgacccaatccagccctccatctgtagtgtgtatgyatgtgtgtgtcccacaagctaggaatagattttatgtttttaaaggattgaaaaaaggcaagaatactattttataacagatgaaaattatatgaattta

SEQ ID NO: 13695 - DNA, 201 bp, Homo sapiens
cccttgtgctccccagtctgtttcacaagttctggatgattgatcaatgctcgatcaatgcgagctcccttctccatcatgggaagaatgggaagcctgcycctcccctgtggtgcatctggcatccgagctggtgttcatcgcttccctctctgctgggtgaggacctcgtgggtgaggacttccacataaaaatgaggg

SEQ ID NO: 13696 - DNA, 201 bp, Homo sapiens
ttttatctccagaggttgcttttagaggggacacagggacattggcagttctctctcagcagcttttgggcctagatatggttgcagatggtgtatcagarcccactgcaccttgggatggaaactgacctacgaccaaatgctacctgttcgagttctgttcattcttaaggcctagtcataaattatttcagatacttt

SEQ ID NO: 13697 - DNA, 201 bp, Homo sapiens
agtatgagcgccgggaagattttgaggctcggctcttaactcagtttccaaacgccgagaaaatgaagacaacatctccaccaggcgacgatattaaaaaytctcctggccagtgtatcctttaagacaacctcatcaactctgaaaccatggtgatgccattcatttgggtggttgggtgtggtggggggcctctctcat

SEQ ID NO: 13698 - DNA, 201 bp, Homo sapiens
tttatctccagaggttgcttttagaggggacacagggacattggcagttctctctcagcagcttttgggcctagatatggttgcagatggtgtatcagagmccactgcaccttgggatggaaactgacctacgaccaaatgctacctgttcgagttctgttcattcttaaggcctagtcataaattatttcagatactttc

SEQ ID NO: 13699 - DNA, 201 bp, Homo sapiens
tatgtgacatcttccccatcctcatgttttttagcatctgccacctccactgcccagcaaaactccgcctcctccccctccaaagacaactcgcaagcagrcatcggtggactccgggatcgtgcagtgacatcgcaaggctctctggaaagagtgtgctgcccctccccatctccatgccctctccttctgtgtcccctg

SEQ ID NO: 13700 - DNA, 201 bp, Homo sapiens
gttaaaagcaggacaatctggtgccccggagcttgctttctggaagggaagaaaaccctttgtctttggggtctctagcctcgacagggccatgtggctcrgtggccagcaggtcagaggcctctgcctttaattctctttgaattagatctcagagtcttccccagtgctaaccgtggctctgtgctgactcaggctcta

SEQ ID NO: 13701 - DNA, 201 bp, Homo sapiens
tagcatctgccacctccactgcccagcaaaactccgcctcctccccctccaaagacaactcgcaagcagacatcggtggactccgggatcgtgcagtgacrtcgcaaggctctctggaaagagtgtgctgcccctccccatctccatgccctctccttctgtgtcccctgagtctgctgtttacctcattgggcctgtgat

SEQ ID NO: 13702 - DNA, 201 bp, Homo sapiens; identical to SEQ ID NO: 2029

SEQ ID NO: 13703 - DNA, 201 bp, Homo sapiens
tccccagtccagttcagtaatatggagggcggagggtggagattacaagaattacaagcaaagatgggggccgtagaattccatcttctacctttaaagamtttgcccttttttttttccctttaattgatttttccctctgtttttaagttgttctcttttgaatactctgcttatagatttatttcctaaacaagtgct

SEQ ID NO: 13704 - DNA, 201 bp, Homo sapiens
cctagaaacacaaagactgctcaatttcattaaggttggcagtgaataggatatagccccatgctgcttcctcaactgaacagctgtaaaaaggccctcaygccatcagcctgtgctttttcctctttctctctgggatgtgcctgtccatggaacccctgctttgggatatagctgtgatcatctctgctgagatggagt

SEQ ID NO: 13705 - DNA, 201 bp, Homo sapiens
tgtggacattctaggaggtaagagataatgaaaaacttattttttaaataatatttccagttgaaaattcacactcaaatatttaatagaaatcctatctycccccccccgttcctgctggctcccagatttctgttgccattaaaatcccccaccgccttgctggccttgggtagcatctttaatcccttctttctatct

SEQ ID NO: 13706 - DNA, 201 bp, Homo sapiens
ggagaattgcttgaactggggaggtggaggttgcagtgagccaagatcacgccagagtgatggggcgagactccatctcaaaaaaaaaaagaaaagaaaasaaaacaaaacaaaacaaaagtaaggacctgatcgttctgcttgtggagtttccagtttcctactagaaactcttctctgagacatttcattatgtgatct

SEQ ID NO: 13707 - DNA, 201 bp, Homo sapiens
ttatagatagtactatgcttagtcatttaaggatttgcgctgtgaatcgcttcatccaatttcctcctatttcaaagtatttcttgtggacattctaggasgtaagagataatgaaaaacttattttttaaataatatttccagttgaaaattcacactcaaatatttaatagaaatcctatcttcccccccccgttcctg

SEQ ID NO: 13708 - DNA, 201 bp, Homo sapiens
attctttcccaatcaggattccctgagttggtagcaaaatcactggctaggtttgtgttagtagcctcattaaatatttattaagcacctgttatagatastactatgcttagtcatttaaggatttgcgctgtgaatcgcttcatccaatttcctcctatttcaaagtatttcttgtggacattctaggaggtaagagat

SEQ ID NO: 13709 - DNA, 201 bp, Homo sapiens
tatgcagcgctgtcattgatttttaaaatgataaattggtgggtctggcacagagatcaatggagttgaagtcacgacgtcaaattgagatgtgaggttarggctgagagacagacatctccttctctcatgctggcccgatgaactctccagtttttttggtgagctctggtgaaaactctttttaacccagaatgtcag

SEQ ID NO: 13710 - DNA, 201 bp, Homo sapiens
cgttgatgcctgacaccagtccactgtgcacaagaccatgtaagaggagggaagtactgagagtgctccctggggagtcagggtaggctctacctgggagrtgtgcaagagcaggcctgaaggatgctcactttgctttgctttgtgtcggttttctctccttaacacaaatataagtgttctgtggagtaggtccctcta

SEQ ID NO: 13711 - DNA, 201 bp, Homo sapiens
ctgagaatcattttgatttttggactgcttatttcagtgtgtaggagtcttccttgtagatgaatgcctttcacgtacaagtctttctcttatttattgayttatttaaaaatttttccctacagagggagaaacaaaacacaaaaattccctttcctgccacaggggaaaacaactgtggcaaaacagagaagcccccga

SEQ ID NO: 13712 - DNA, 201 bp, Homo sapiens
aagagtccgggtcagcgactgcatcagggtcaattgtgggcagagtacttcgaagcctcttcttcctcaccctcttccagctttctctgatgactgcaagmgtagaggaaagtgaatctctaccttgtgttggtcatcagaagtggcttcagattccttagaggaagagttaaaatgtgcatctggatgaggggtaaagaa

SEQ ID NO: 13713 - DNA, 201 bp, Homo sapiens
tcgatgcagcgcctggctcgggcatgtctcgctgcggaccctggcaagcctggggcggcacggagcactccggacagggcatccgcggccagactcgccgsgctcacgcggaggaagcctcggctccggggacttggcccgctgcgcgcctgctgcccgccccctccaccgctgccggcccggccctgctggcccggccgg

SEQ ID NO: 13714 - DNA, 201 bp, Homo sapiens
gttgtgagttccacacacagatgggattcatgaacctgtgtccctctgaattagcgaatacatttgcctttgaaaagcatggtgcccttgtaacctattarcgagaataaggaattgaaagtgtgggcccacatcagtgccttcccgtttcctcctcactgtgttttcgtttctctgaagcagtcgtgtccagaagaagga

SEQ ID NO: 13715 - DNA, 201 bp, Homo sapiens
aaaagcatggtgcccttgtaacctattagcgagaataaggaattgaaagtgtgggcccacatcagtgccttcccgtttcctcctcactgtgttttcgtttstctgaagcagtcgtgtccagaagaaggactcaggagaagggggaagaattcaaaatctaaccatgtgtctaccatgatagtaataaggacaaagcaacaa

SEQ ID NO: 13716 - DNA, 201 bp, Homo sapiens
gcagactccagagccccacatccccgtctctcacggtctggcccagttgatctctctcacctcattccgaaaactttctagtgacattggtcttcccaccrtttcccaaatcccaaagacacgaggcagatcccacccagtcccccagctttgcattactttgcccttgtgatactgggggacgttcttagaagtcacttc

SEQ ID NO: 13717 - DNA, 201 bp, Homo sapiens
cctcttattctctttaagatctattagccagagctaattccttaattgaatgttgttctaaatttaccaccaaaatgcatgagggcgatctgtgtttgtaygtttcagccaactgcatgacatcagttccatcacaactgcaggaggatggaggaaggctgctgtgcacgattacttgctgttttgtggtcaacctttccc

SEQ ID NO: 13718 - DNA, 201 bp, Homo sapiens
taatgtttgtaaatataaatattaaccataccccgaaagggaaggagttcttttgctggctgactgaatgggtagcttttagcacctgccacttttctcarcatgcaatctattttttatagacagaaaaaatctctttttctagtttttctggtttgctgctgttgcctcagtgatattgcttgggatgcagaggtttgg

SEQ ID NO: 13719 - DNA, 201 bp, Homo sapiens
ccatcagcatgcgctctggacttcggcggtgccacataaggtggccccagtgctcatcccaggaagaatggcccctgcttgtctcggcaaatgactcccayggaagctgtggagagccacgaaggtggcaggcggcattagaggggctgtaaagggaccgatgcctgagaatttcttctgcaggatgtagaaccgtgtgca

SEQ ID NO: 13720 - DNA, 201 bp, Homo sapiens
agccaggcaacgtgtgcagaggtgtgaaggaataatgtgcattgttctggacactgcttcctgctcaaggacttttcttggggaagcacaccaagtctctsggttgagtttgacacaccaagtctctgggttgagtttgacacaccgagtctctgggttgagtctgaagcagaaacctgactggaggaggcagcatcagaa

SEQ ID NO: 13721 - DNA, 201 bp, Homo sapiens
ttggtaccaaacctgccactggcatcaactttgcggattagagtcagccacggggttttacgcctcattgaagagggagggcaggaggaacttcagaagtmatttattgcaggataagcatggtctccagctagaattttcaacaggactgttttcattgatttagtgacaaaatttttccaaggtcatttaagtgagaaa

SEQ ID NO: 13722 - DNA, 201 bp, Homo sapiens
gggatcgtagctgtcttcccccaggtctgtgaactcattgaaggatggaccatgtttaattcatcttttgtctgcagtgcatttagcacagtgctggctcygaacctgctctatttgtttgttgaattacaataaactgatgaactgaaccaaatcccctcacttctaatctcagcaaagtgctgccgccctattttctgt

SEQ ID NO: 13723 - DNA, 201 bp, Homo sapiens
tatagaatttgttatatactatttctatattatatacctacattaaatatatatggatctcatcctaatagtttaaaatatcagtggtttgtagttaactrgcttttcaacactttaaacatagaaatgattcaccgtgactttgtatccttcctttaccactattttacatggtaggtgcattaatcaatgtttatggta

SEQ ID NO: 13724 - DNA, 201 bp, Homo sapiens
gacgctcaggcaactttcctgaccagcatgcggattgaactggggtgaagattaattgaatttgaggccccccaagctgaggttggcacacagatgcagarggtttgtcttccttctggggcactgtccccagggagcaggcttccccatctctttccattctaaccatcacatggcgccatttccatctggctttcttag

SEQ ID NO: 13725 - DNA, 201 bp, Homo sapiens
tttctaaagggacgggcagagaacatcatcatgcaaagtctgtgcgtcttaatagctgactcattgatggaaacatttatatcccacatccactggctctwgtctggcttcttcaaatgcacctgtccctaggaccccttcctagagataccagcatttagaacagaccagtctaaacaaggtcttctcaagtgaactgaa

SEQ ID NO: 13726 - DNA, 201 bp, Homo sapiens
cctcatcagacttgctcccacatgcttgcgtcatggctgggtggccactggagaggttgggtggagatgctggctgtgtacataggaaccagagcccctasagagatgacttgtgtctgagcaccattcttaaagctttccaatacatgggctgtcagtggctgtatgcatcttctctgtttgacttggcttagggatatt

SEQ ID NO: 13727 - DNA, 201 bp, Homo sapiens
gatatgtctcatcctgagtttccattcaccagtctgtgcttttgttagccttttgtttttatatcctgcaatgacatcctgcattcaacttgcctgtcacygaatgtccccctgctccaccaccagcaccccattctacctgtgctgttttccttctactgagactcacttccacctgtgcccagttccacctgcctttcc

SEQ ID NO: 13728 - DNA, 201 bp, Homo sapiens
attctttatattggtcaaatgtgtatacataattactgcagttttcctcttcaattattttctcatgctattaaaatattccatatttgcataatgtttcwtgatttaatggttgcacaatatttcatcataacacaagttatgattgcttgacttgccaaataaaaatataggacccccagttcagcttgaacttcaggt

SEQ ID NO: 13729 - DNA, 201 bp, Homo sapiens
tttttttttttttttttttttttttgagacagaatcctgctctgttgcccatgctggagtgcagtggtgtgatctcagctcactgcaacctctgcctcccrgcttgaagcaattctcctgtctcagcctcccgaattgctgggactacaggcgcatgccaccatgcctggcaaatttttttgtatttttagtagagatggg

SEQ ID NO: 13730 - DNA, 201 bp, Homo sapiens
ctattgaccaactgattccgaagttcatgtggaaaggcaaaagacccagaataatcaacacaatatttatggagaacaaagtcagaggactggcactactygacttcaagtctgctggaaagctccagtagtctaattacagaaacccaactccaattcacattagaaagaaggaaattaattgattcatgtagtttggga

SEQ ID NO: 13731 - DNA, 201 bp, Homo sapiens
cctgcctccctgggccaccagcccggaaccctggtttctagatgtggtcaggagctcccactccatcctgatacccattgagagcatcatctccactaaaygtagcagtgatagttctcatcacacacggaaaccattagctgcttgtgtgtgtcatctggtgtcaccagtgaccggtctaaacgtcagcctgtgcattcc

SEQ ID NO: 13732 - DNA, 201 bp, Homo sapiens
tgaacacagtatccttttcatctccctgggccaggcattactggaaacacggtggatagctatgctgctcggagagggtaattgggtttcgagtgaaaagyggtgtttaaatgcaagacaggcagggtcaaattcatttccctccagggcttttggccttccagaaagcagggtatgacaaattacaatgtgtgaacactg

SEQ ID NO: 13733 - DNA, 201 bp, Homo sapiens
cctttgtaaagcactcttcccttttgctttgaggagcctgtattatatatacataggcttgtaactccatgcgtgatacaatacctggtaccttctgggcrttcagttaatgttgatgtagccaagtcatagagtccatatttgtattttcataagtccagaataacacacttacctatttaaagaattccaactgagtgt

SEQ ID NO: 13734 - DNA, 201 bp, Homo sapiens
aaacacatcaaaccaagaagtgggtgactttctgcagcccctccatgtagacctctctctttagtcagaaaccacttcttactttcataaaagaaagtcakttctcaccatggtctgggactcaaagcacatgacgctccattgagctattattcctgactgtccatatttcagtttctcactggaaactgaattgcccac

SEQ ID NO: 13735 - DNA, 201 bp, Homo sapiens
gcttcttacaaatctatcagcccactcttttcttaaactgtttcacacccaccatatgagtaatgcattctgaaaactgaatttacttcaaatgccatatrgagcaagacaaaatacaaataagtgaataaataaacatacaaataaattaaatgtataaagtatacagtgttgtgcttatatgttcatggagttttaata

SEQ ID NO: 13736 - DNA, 201 bp, Homo sapiens
gttgccctgcgaagtacacagcatcatctaagacatcagaagcataactcggtagcttttggggatgtagctgccatctaggagagtttggcaacacggcygcacactcaaatggtttattgcatgccaaatctgtgcagatggtcaggagtacctgttggagcctttcgttttgaaattccgtaagagaaaggaacagac

SEQ ID NO: 13737 - DNA, 201 bp, Homo sapiens
tgatggatgtaacagatataataaatggaaaagtagatgatgaagataagcagcatttcattccctttcagccgtaagtatggagcaattcaagtacttasccagatataatgtggaaaacataggcttgtaataattatctttataattaaatggataaacataactaaggattgattattttgtaattatgaaaaacct

SEQ ID NO: 13738 - DNA, 201 bp, Homo sapiens
ttctctttttgtctccagtgatggatgtaacagatataataaatggaaaagtagatgatgaagataagcagcatttcattccctttcagccgtaagtatgragcaattcaagtacttagccagatataatgtggaaaacataggcttgtaataattatctttataattaaatggataaacataactaaggattgattattt

SEQ ID NO: 13739 - DNA, 201 bp, Homo sapiens
tctgccatttgagccccaattccatttgggccagcattttctgataacttaatttgtctttcaagcatggaaataatttagacttgactatgagaaaacascttttgctgttgtttgccagaagatattctgatgttcctttgtttgtttgtgttctgtgattatagcatttaagccaaaacaatctctgttctctttttg

SEQ ID NO: 13740 - DNA, 201 bp, Homo sapiens
gatcatgatggtggtgataatgatggggatgacagtgatcgtggtggagaatgtgtgtgacagttgcccctgtgtacagtgcatgatggttttcttacccrtcacctttgtgaacattgctgagagcccactcctggatggagagtggggtcagattagaagtttagaggaacatgcaggcggtaggcgtaactccctctg

SEQ ID NO: 13741 - DNA, 201 bp, Homo sapiens
ttcatcttcaacttagcaatttttaaacaaaaatatggcaacaaaacaaacaggagttgatgctcatagtcagtggacctacttaagtctgtaaccctagwgtaggtattcttaatgagcaccttggtttccttttacaaaacttaaatttgcctctgatagacttacatggttggatttgtgcaaagaaagctaaccccc

SEQ ID NO: 13742 - DNA, 201 bp, Homo sapiens
gtagacagtcttgcaaaattcacaattacgctattaataatggattgttttttaaatgtatgatttctcccccctcaggtgatgttcgaaatgatatctaygtaacattagttcaaggagattttgataaaggaagcaaaacaacagcgaagaacgtggaggtcacggtgtctgtgtacgatgaggatgggaaacgattag

SEQ ID NO: 13743 - DNA, 201 bp, Homo sapiens
ggaaaggtgaaagcagggctttgtctgtccttgcccctagccctggacagagtggccaggatttctaagtagataaggcttgtccctggccgtttcctgcrtgaccttgaaaatccctcctagtcaccacgcccatatacctggccacccactccgctgtagccctggctcattctctcagagcctgattagtgatctgga

SEQ ID NO: 13744 - DNA, 201 bp, Homo sapiens
tttaaattaccctagaagttcccacaaaactggtggctccaaacagcagaaatttgttctctgaaggttttggaggccaaaactctgaaatcaaggaggtrgcaagttggttccctctggtggctccaagggagagcctgtcccgggcctccctccagcttctggtggctcccagcagtccctagccctccttggcttgtg

SEQ ID NO: 13745 - DNA, 201 bp, Homo sapiens
agcaaaacaacagcgaagaacgtggaggtcacggtgtctgtgtacgatgaggatgggaaacgattagaggtatttattgtggcgagggctcatctgtagtrtttcagttttacttgccaagtgctcaccttggctctgctacagcatagatgtcgtcagggtggggctttggagtcccgtttcttgggattggcgttggtt

SEQ ID NO: 13746 - DNA, 201 bp, Homo sapiens
gaccatgctgctcttcttggccctttatcctggaatccgttttcacgttccaggaaaaatctcttctatgagattttgattagaatggctttgaatttatrgattaatttgagaacaactgatccctttatgctaggagtcttcttacttgtaaacgtggtccatttttccatatatttattagattagctttaatacctg

SEQ ID NO: 13747 - DNA, 201 bp, Homo sapiens
aatctgagaaaatatttgcactagcatttgtcaagctgatgagatacgatggtaccaccctgcgagacggagagcacgatcttatcgtctataaggtatcyggttgcattggtgcaatattgctgctatagacagtttcagtcttttctgggctccctgacctggaccaacctttcccatcattgtgaggaagctgctatc

SEQ ID NO: 13748 - DNA, 201 bp, Homo sapiens
caagagcatgcagagccttgggagctgcaccattagcaaggactccttccagatctccacgctcgtgtgctccaccaaactgactcagaacggtgcgttckagaggagaaacacactcaccccaggagctctgccccagtcctgtcttttccatgctccttcctatgtggaggtgtgctccgtaggtgcatgaacgtcacc

SEQ ID NO: 13749 - DNA, 201 bp, Homo sapiens
agatgcatcttcccagagttgccattcagcgctttgtcaccagccttatgaaaaccggaaagagggttggaaaggccccctgggggaagcagtaggccctstccttgctttgaccctctccatttaacactggtggcatttctttgttctgaattcactcatccaaaatttttgtcttgtgtatctagtggctgaaaagga

SEQ ID NO: 13750 - DNA, 201 bp, Homo sapiens
ctcgatctttttgtacaacagtaagcaggcttttatgaactagtagatattaaaaaccacatcagtgccaactaaacaaattatatccaccagatactttkgagccctctggtatgtgccaggcaatattctaggcatggagctctatcagtgggcagggggtacaggtggcagtaatatacagctgaccttatgttctca

SEQ ID NO: 13751 - DNA, 201 bp, Homo sapiens
tcctactttgttttaaaaccaatacttctttttttggtatttgtgttatttagagtctttttcatgtacttttgtctatgactgtgtatttactcctgctsaaaactctgagtttactggaataatttttagtattgtttccctcttaacatacctaaaaaccttgttgaaagagatatgtgataaatcatcgtaatattc

SEQ ID NO: 13752 - DNA, 201 bp, Homo sapiens
agccatgaaagcgctagaatccatcttcaagttcatcgtgcgctccaggatcctgttcaatcagtgcgtacctatcccctccatgcccgggctctcagagkactggcaggagatccttcacttctttccttccccttctctcgtccccttattctttcctttcttcttccccctttttcccccttgctttctaggctgaga

SEQ ID NO: 13753 - DNA, 201 bp, Homo sapiens
gagaggctgacttcgtggaatctttgctgcagctcttcaggtccatcaatgacatgatgagcagcatgtcagaccagaccgtccgggtgaaggtgagtgcyggccactgccaaggcagacttctccttctttttttctttcattatctcttttggaggtaggtattttgattacagttaattaacttgccccaaataccat

SEQ ID NO: 13754 - DNA, 201 bp, Homo sapiens
tcccttgtgtttttcctcacagcaaaatgtttactgaattcatcctcaatgttcccatgggcttgctgaccatccagaaactctactgcttgatcgaaatygtccacagtgacctcttcacacagcatggtgagtggaaccccaagaattattcacttgtcctgttatttattttctgaagacattgaccctctgaattgc

SEQ ID NO: 13755 - DNA, 201 bp, Homo sapiens
tcttgtcaccaaggaggttactgaagcctccagaaggcacactgtctgatccaactcacatgccagaggaacactgaatagtttccttccgatgcattacrttcattagttatagaaggaataaagccatcctatatcttctctgaaaaatgaaggagtgaaaagagcacaatgtaatcctattatggttgcaactcttcc

SEQ ID NO: 13756 - DNA, 201 bp, Homo sapiens
gcacacacccgcctctccgtttaactcacactagtccaggtgctctgcctgctcttacctgcttttcctcttggttgggtaacaagcattcagttgactgyatattctcctccctcagtttcttctgacatcttcgtgagacctgagagcaagctctgccttggcgacaaccagttgtcatttcttagtggcagcctttat

SEQ ID NO: 13757 - DNA, 201 bp, Homo sapiens
tccgaggatgatatcctcacggaagcagagttatttaaccccagttcactgatttctcagagttgtttacaaggcggctttccgtgatgtgtctgcttggrtaaggcattaaattatttcaagaatcattttggtctttgctctcaagtaaaagtggttttagaaggaaacttctacctggccatcgtgtgacaacactgg

SEQ ID NO: 13758 - DNA, 201 bp, Homo sapiens
ataagtcacgtttgctcctcaggatctgtctatgcacgtgccttagggaatagcgagccttccccgctgacagactggctctaagatctgcaccatcttgrcccacttctacctgggccacttctgaacaactcgggcctctgggcagaagccctgctgctagatccagttcactttgtgtctccttgtaagctctcggtc

SEQ ID NO: 13759 - DNA, 201 bp, Homo sapiens
tgttttcaaggaatctgttgtccctgggagtgggtcacaagtgctgcacacacacttggtgtctctgaaggagcctcaccacatattagagatgaggttcytccttgcctcaggaccccatgcctcattggcattgctgcagggagaccccaggggcttgtggcagtcagaggtcagcagaagacacgcagggttgatctg

SEQ ID NO: 13760 - DNA, 201 bp, Homo sapiens
ctaagaacatcggaatattttcaactttaccattggtaaaatagtgcaaaggaagtgaagatcacgtcagcccatggtccatattttattccttgagttarcaaatcaccaacactatttagtttagcgagttactcctttggaatttacagtaaagccatatttaatatatttccatttagcaagtatttgttttaaata

SEQ ID NO: 13761 - DNA, 201 bp, Homo sapiens
aagcttatagcaaacacgagttgcgtcttggtgggtttcacactgactggcaatgctgtgtcctgtgtagactgcagagagatcctgcttcccatgatgascgatcagctcaagtaccatctggagagacaggaggacctggaggcctgctgtcagctgctcagccacatcctggaggtgctgtacaggaaggacgtggtg

SEQ ID NO: 13762 - DNA, 201 bp, Homo sapiens
acaaatggaagattaccattatgcccacttgatcaagacttttgggaaaatgaggactgatgtggtagtaagtgtccctttcaccctgttcacataaccaygttttagggccagcactttagacaaaagcctgatatcaatatattcatttaaaataggattttgcatgagaacttgtctctgattgatttcaaatgcctc

SEQ ID NO: 13763 - DNA, 201 bp, Homo sapiens
tatgcccacttgatcaagacttttgggaaaatgaggactgatgtggtagtaagtgtccctttcaccctgttcacataaccacgttttagggccagcacttyagacaaaagcctgatatcaatatattcatttaaaataggattttgcatgagaacttgtctctgattgatttcaaatgcctcctgggaaggtctgactgaa

SEQ ID NO: 13764 - DNA, 201 bp, Homo sapiens
atgcactgttgcttacatctttgtatgcttttgcattcctgctgattgattcaaggtgcaacgtgcctgcttgtcaggtatgctgttgatcacattatttragaagaaataaagtcgttcccgcagctccacctgcagtgatgggctttaatgttttgtgcttcccgaggaaaacctgccgatgatgtgaagtgacattca

SEQ ID NO: 13765 - DNA, 201 bp, Homo sapiens
tactaactgtttcaactttgtgtttgtttagggtggtaccgaggttacacgttacgaaaaaagtctaagaaggtaagtccttcttcttaaacacagtgcawgtctcttcataaatcacaccttgagaggaaatcaattccatctcatttgtgtctgagggttttacttctatatctctttctctgaatttaaaaaaatata

SEQ ID NO: 13766 - DNA, 201 bp, Homo sapiens
atctccaaagccttaggttcactgaaaaatgctggtgacaaactgacctcactggttctgccaaacagtgagttctacacatcatgaatgtattgtgaggmccctaacatgtctctttgtactaactgtttcaactttgtgtttgtttagggtggtaccgaggttacacgttacgaaaaaagtctaagaaggtaagtcctt

SEQ ID NO: 13767 - DNA, 201 bp, Homo sapiens
tttctctgaatttaaaaaaatatatgggtaggaatgtgaacgagcttggattgttttcttctgaacaatatgtgtacatagaaattgtagcttcatctccrtgagtgaattgctagtttgtgatatagtgttggcctgttgtcttctgttcatgaattttgtgtcctttttaggtctgtgtgtgtcagagaatgatccgag

SEQ ID NO: 13768 - DNA, 201 bp, Homo sapiens
tagaaaaagaacttactcataacatttctcaccgcttttatattttgtttgtgaaaaattacatttgcaaaaagaaaagaaaaaaggatagccatccttcygaaggttttgactacatcttaaaatcctaaattactgatgcaagccaaacacagcttcttcctgttgggagtttctgctgtattcttgttgatgtcagtc

SEQ ID NO: 13769 - DNA, 201 bp, Homo sapiens
ctcataacatttctcaccgcttttatattttgtttgtgaaaaattacatttgcaaaaagaaaagaaaaaaggatagccatccttccgaaggttttgactayatcttaaaatcctaaattactgatgcaagccaaacacagcttcttcctgttgggagtttctgctgtattcttgttgatgtcagtcatataaacaaacttc

SEQ ID NO: 13770 - DNA, 201 bp, Homo sapiens
tttgtttgtgaaaaattacatttgcaaaaagaaaagaaaaaaggatagccatccttccgaaggttttgactacatcttaaaatcctaaattactgatgcargccaaacacagcttcttcctgttgggagtttctgctgtattcttgttgatgtcagtcatataaacaaacttcaaattaaaaaccacaaggaacagctgta

SEQ ID NO: 13771 - DNA, 201 bp, Homo sapiens
gctgtctctatcgtctttccatcatcacctcccacatgaggtgcctttggaaccccacagcaggccattccgttctcccgttggctttgtcaggagagagsgggatgaacagcctgtgccttatcccctccccttgttcctcaccagacacggtgattttgtagtccttacccctttcctcctcatggcaagccccaagaa

SEQ ID NO: 13772 - DNA, 201 bp, Homo sapiens
aaagacaaaaacacagtgaaggggcagagcaggcattagaaccagactctgatacggcagaggttttgaaatcatcagacctgcaatttaaaacagctgtkatgaatatcctaagggctctaatgggaaaagtagataaaacataaaagaaggtgggtaaactacgtagaaactcacagaaatcatcaagaagaaattctg

SEQ ID NO: 13773 - DNA, 201 bp, Homo sapiens
ttaaagattcccatcgtgggagcctgacttttgtgttgttttaactctttcagttttgctgtgtctaaatggaaggaaataccttgtgaaccatcttccayagacaaagtatattttcagactgtgacatttaaaggttaaacattgtttccccaagtgtggccctcgttggtaccaaacggttggtaccttcccggttca

SEQ ID NO: 13774 - DNA, 201 bp, Homo sapiens
atcaaacaccaactccctgcagcccctggcagccaccggtccactttctgggtctaagaatttaatggctctgggaacctcatggaagtggactcataccrcatttgtccttttgtgtctggctttttttcttttttttgagacggagactcgctcagtctcccatgctggagggcagtggcacagtctcggctcacagca

SEQ ID NO: 13775 - DNA, 201 bp, Homo sapiens
aaatgataaatgtctgagagcattgttgagatcctatatcaagctgttcaacaacttagcatctcctcctttttggttttcagctgtggaacaactacttycacctggctgttgctttccttactcaagagtccctgcaactggagaatttttcaagtgccaagagagccaaaatccttaacaagtaagttctcatctagc

SEQ ID NO: 13776 - DNA, 201 bp, Homo sapiens
agaagttgaagctttgacactctctttatttgcctcagtgctagaaggctttaattgcacttaaaaataattccagtccgattttcaaatgccttccggartgattcagcgtttttcttttccctgatttccaggtacggagatatgaggagacagattggctttgaaatcagagacatgtggtacaaccttggtgagtag

SEQ ID NO: 13777 - DNA, 201 bp, Homo sapiens
caaaggcagagggtagccatctatgatgatctctcttgccgatttatgttctattgacactcaagtcataaaatgaaatactcgccatgctgattatttaygcttcctctgtttaattatagtttgaaaatgagatcatcaccaagctggatcatgaagtcgaaggaggcagaggagacgaacagtacaaagtgttatttg

SEQ ID NO: 13778 - DNA, 201 bp, Homo sapiens
aactcttaaatgaggcttcaaaggcagagggtagccatctatgatgatctctcttgccgatttatgttctattgacactcaagtcataaaatgaaatactygccatgctgattatttacgcttcctctgtttaattatagtttgaaaatgagatcatcaccaagctggatcatgaagtcgaaggaggcagaggagacgaac

SEQ ID NO: 13779 - DNA, 201 bp, Homo sapiens
agagacagagagaccgtaattagactacaatgaactttgtaacccagaaataattaaaatgtgttaataatggaaaatagttaaaattgcacctctgttgmgtttctttttctgagtgtgattaacaaggtgtgtataattatttttcagccttctggaacactgcaggaagcacaaatacctcgccaaaacaggagaaac

SEQ ID NO: 13780 - DNA, 201 bp, Homo sapiens
tcaagtctgttttcatggtaaggatggccccaccccagaaggaattgtccgttcccttcctcaatacagtctgccacgccttcttcacctgctcatgcccygtggtcactgtggcagcgtgcacacagcagactctacagttcccataaccaccccacctgttcttgagagcatcgatatctcctcgcctagccatatttt

SEQ ID NO: 13781 - DNA, 201 bp, Homo sapiens
ttaaaagtagaaatcttcttttaaaaaaaatcaatagcccttttatagatgctctaaaaaagcaccaagtatttttataacccttaccagagggaactaastctggaacactgattcggaggtgtttccgtgcccacagagctaatgtattcctttgacatcctgcatttttctgttggcacggaagaattaatcccatgg

SEQ ID NO: 13782 - DNA, 201 bp, Homo sapiens
agaaagatcactgcaagctttcttcccggccacatatccaagctctgcttagtgtctccgagaccttgaagatggggcctgagaggcaggactaacaactytgaggcaatcataacaaaacatgaattgtttggttaaaaggtcaggaaagaaaaaaaaaaaaaagtctctcactgtgctgtcattagaagcaaagaccga

SEQ ID NO: 13783 - DNA, 201 bp, Homo sapiens
aacaaaattatagattccacttgacttccactaaaaggaaacctgctgtcattttaatcagccagtattatatctgatcactgtagttcttctgattaagrtatgcagtaactatttaaaaaaaaaagctgtttcagtttcagaagttttttaaaacctgccaccgaagtgacattggaactccttctttggtttcatcaa

SEQ ID NO: 13784 - DNA, 201 bp, Homo sapiens
atctagaaatcccctaagtatgcatgtattctgagaaagacgacgtccacactagtctcccaaataactcggcttccccacaactagagatgtgagaatarcatctcataaaacttgttgggcctcaatcctcgtttctctgtcgtggagtttccttcttccgttaaagagggggcttaggtaggcagaaccctgcaggag

SEQ ID NO: 13785 - DNA, 201 bp, Homo sapiens
agtatgcatgtattctgagaaagacgacgtccacactagtctcccaaataactcggcttccccacaactagagatgtgagaataacatctcataaaacttsttgggcctcaatcctcgtttctctgtcgtggagtttccttcttccgttaaagagggggcttaggtaggcagaaccctgcaggagaagcagcctgagagaa

SEQ ID NO: 13786 - DNA, 201 bp, Homo sapiens
atctagacagagcaaaaactgagacaaaaaggatactgcctgagagaaggctgcgaggagatgattacccacccttgcacaaagaagtttgttgccttcargtgtaggtcaggcctgggcaggtgcaggggctaggcaggaggcatgggcgtgtgagtagctgggagggctgtattcactgccacccagcaggaccaagcc

SEQ ID NO: 13787 - DNA, 201 bp, Homo sapiens
cctttaggtttgccctggagcctctcctgccaaagaaaatgcactccaggtcccaggacaagctggacaaggatgacctggagaaggagaagaaggacaaraagaaggaaaaaaggaacagcaaacatcaagagatatttgagaaagaatttaaacccaccgacatttccctgcagcagtctgaggctgtgatcctttcgg

SEQ ID NO: 13788 - DNA, 201 bp, Homo sapiens
ctgtttttcccagcaccccaccatgctaccgaaacctcacttgaaattccatattgactttccctcagcagccctttccgcagctcctccagctccaggcrtatcctctgccgcacatcacctaccttgagtgaatgatgcggctccgactgctgcattgaaaaggcctggggtcagaggcggaggttgcagtgagccgag

SEQ ID NO: 13789 - DNA, 201 bp, Homo sapiens
ttaggtttgccctggagcctctcctgccaaagaaaatgcactccaggtcccaggacaagctggacaaggatgacctggagaaggagaagaaggacaagaaraaggaaaaaaggaacagcaaacatcaagagatatttgagaaagaatttaaacccaccgacatttccctgcagcagtctgaggctgtgatcctttcggaaa

SEQ ID NO: 13790 - DNA, 201 bp, Homo sapiens
aggcctggggtcagaggcggaggttgcagtgagccgagatcgcgccattgcactccagcctgggcaacaagagcaaaactccatctcgaaaaaaaatgatraaagaaaagacctggggtctctcggtatcacctcttcctgtctgttttcctctgaagaggagaagcccacctgctgtgcagtgctgaccgtccccctccc

SEQ ID NO: 13791 - DNA, 201 bp, Homo sapiens
aggatttttcatcagatgaatcctaggggaaaactccaaaagagactcatcagtaaaaatgtccatttttctctctttaatataaaagaaaacaaattatytttaagagtctcaacaaggtttgagaaaatatcctgccttaatgattattcctccgtttgaaaacggctattttttccagtttactttaaaaatcaattg

SEQ ID NO: 13792 - DNA, 201 bp, Homo sapiens
ctgacaagagggtccttggccccattgcctctgccctctagtcgtgttctgtgttctgccccaagagattgtggctgctgttcctcccaggtgcccccgcygcccccagctgcggtgtctccagtcagcctcggaattcccttctgctgtcttctcttctctgtgctactgtgactgtggtttcatgaaccactgggcttg

SEQ ID NO: 13793 - DNA, 201 bp, Homo sapiens
tccagtcagcctcggaattcccttctgctgtcttctcttctctgtgctactgtgactgtggtttcatgaaccactgggcttgctaggtccccagttcttcktcttgaaattagggcagaaaagtcttggaaccgtttcctgcatgctgatgctggacctgccccttttttcctcggcatctcttttggtgttttcctgaaa

SEQ ID NO: 13794 - DNA, 201 bp, Homo sapiens
taaagcaacttaaaaactctggtgaaatgccacaagaattgggtgagtgtgaaggggagggaggagagttagaaggggctggtcacgaaggcttgtgggargagaccttggcgatggccccactgtgttggcagcaggtggctgtatcttggccactcgtggattgcagtgctggattgaggcgtttggggctttgcagtc

SEQ ID NO: 13795 - DNA, 201 bp, Homo sapiens
ttcttacaggcattgacatcatttcaagtccacaaatgttactaccttcccttaggatgaccctgggaaaagactactgcatgcaggaccttggcatagtctgttccatctggggctgagaatgccagaattttctatagaaggaaactttgaccatgatccacagtaggaaattgatgcttacttggtatatgtgtgtga

SEQ ID NO: 13796 - DNA, 201 bp, Homo sapiens
aaatgtgttaataatggaaaatagttaaaattgcacctctgttgagtttctttttctgagtgtgattaacaaggtgtgtataattatttttcagccttctrgaacactgcaggaagcacaaatacctcgccaaaacaggagaaacttttgtaaaactcgttgtgcgcttaatggaaaggcttttggattatagaaccatca

SEQ ID NO: 13797 - DNA, 201 bp, Homo sapiens
aactgtgctctttctgtccttttgatgtagataagtcccctgcggccccagagaccgaagagccaggtgatgaacgtcattggaagcgaaaggcgcttctyggtgtccccctcgtcaccgtcctcccagcaaacaccccctccagttacaccaagggccaagctcagcttcagcatgcagtcgagtaagtggaacgctccc

SEQ ID NO: 13798 - DNA, 201 bp, Homo sapiens
gaaaagatttttctccatttcctggttccctcacagtgagaatgagattttttatgaagtcttacatttggtggttattggcccattacctatggaaaccrctgtaaagacctcacagtgctgccatcagcatgcgctctggacttcggcggtgccacataaggtggccccagtgctcatcccaggaagaatggcccctgc

SEQ ID NO: 13799 - DNA, 201 bp, Homo sapiens
tgtttgacacaagatgaagtatcttgaatttttattgtgcatgtgataccttttgtggaacagatttcttaaaacagtattatggtttaacttttcagaayttctacaaagaaattgaaagagaagaaatgtatataaggtatgtatgcatcacgcttgtctgcatgttaattataaataataatatatgttgtatgttta

SEQ ID NO: 13800 - DNA, 201 bp, Homo sapiens
cttaaaacagtattatggtttaacttttcagaatttctacaaagaaattgaaagagaagaaatgtatataaggtatgtatgcatcacgcttgtctgcatgytaattataaataataatatatgttgtatgtttacgtatgctaagaaatgtgttatagccgcaaaggtttattttgtagaaaattgtgaaacgtataaggt

SEQ ID NO: 13801 - DNA, 201 bp, Homo sapiens
aatgtatataaggtatgtatgcatcacgcttgtctgcatgttaattataaataataatatatgttgtatgtttacgtatgctaagaaatgtgttatagccrcaaaggtttattttgtagaaaattgtgaaacgtataaggtagagtttggtggagctcccagatacattctcagctcttgcatagcttgtccacaccagtg

SEQ ID NO: 13802 - DNA, 201 bp, Homo sapiens
aggttcccctgtgaagagggctttctggcaggctggaatggtttgttgcaccacagaaatggaagccggaccttccccggccatttctaactacttgtgaragcaaaaggagattcgggggggtctaacaagaatattgggttgcttggagtattgtttccctaacagcttcgttaattggtcacattttcatctctctat

SEQ ID NO: 13803 - DNA, 201 bp, Homo sapiens
tacttgtgagagcaaaaggagattcgggggggtctaacaagaatattgggttgcttggagtattgtttccctaacagcttcgttaattggtcacattttcwtctctctattttattgcaaaggcaggaatgttccccctagtctccctacactagtaaactgaaaattctaaacttagaattacagccaattcctcttgtt

SEQ ID NO: 13804 - DNA, 201 bp, Homo sapiens; identical to SEQ ID NO: 2030

SEQ ID NO: 13805 - DNA, 201 bp, Homo sapiens
atatgcacctcttcctccaacattgtttttaatcctctctgttaattatgtctgatctggagcccagatgggaagtgcccgtgtcccgtgcatggctgcaygtcctgatagacaggagctaagcagagaccagctgagtgcttccccatcaccaaagccagagggctgtggggctgcagatcatgtgggcctcttttcagc

SEQ ID NO: 13806 - DNA, 201 bp, Homo sapiens
tcacacattcagttaaattttcgttttattctcctgccttccaaaagctttctggactattaaaaatccatctttactttaactacctagtttcatatgcrctttcatcaaatctttattcaaagtagttagtatataaactgtattttataaatggaaaagtctttttcttacttgaaaaccacccttggtgctggaaga

SEQ ID NO: 13807 - DNA, 201 bp, Homo sapiens
tatgcgctttcatcaaatctttattcaaagtagttagtatataaactgtattttataaatggaaaagtctttttcttacttgaaaaccacccttggtgctkgaagattgcttcctagtatttaaagaaattattttttaatcaattttaagattattctttcatgcaaagatttgatcgtttaaattccttacagatttca

SEQ ID NO: 13808 - DNA, 201 bp, Homo sapiens
agctctgtgacctgcacaaggagtgtgataactacaccgaagcggcttacaccttgcttctccatgcaaagcttcttaaggtaatgtcaattaccagtcaycttgatgattctattgttataaattctaacaatattcagaattgtatttttccatggcaaattttagtaggcctataacttaaggttttatgaaattgac

SEQ ID NO: 13809 - DNA, 201 bp, Homo sapiens
accacgcagggacagctgaaggagcagctctaccaggaaatcatccactacttcgacaaaggcaaggtaaaacacaaaaagcaattgtccttgttttcctytttccatgcacctacctgcagtgttgtaaacacgttttttagcgtgtgatttttgcagaaccagaaatttgttacaagttgtatattgaaatgttttatg

SEQ ID NO: 13810 - DNA, 201 bp, Homo sapiens
accgagggaaagagtatgagcgccgggaagattttgaggctcggctcttaactcagtttccaaacgccgagaaaatgaagacaacatctccaccaggcgaygatattaaaaactctcctggccagtgtatcctttaagacaacctcatcaactctgaaaccatggtgatgccattcatttgggtggttgggtgtggtgggg

SEQ ID NO: 13811 - DNA, 201 bp, Homo sapiens
tcaactctgaaaccatggtgatgccattcatttgggtggttgggtgtggtggggggcctctctcatggttgatgtctatgctgccttagtgatccttaacyccctcacctcagatattcagtgcttcacagtgaagcccaaactcgatctgcctcctaagtttcacaggccagtgtcagagcagattgtaaggtaataatc

SEQ ID NO: 13812 - DNA, 201 bp, Homo sapiens
attacaagttgttcttaaatttaatgacattttgtaagaacccgtaaggcatattttaaggccagcatattgcatgtgaactcttcctggccctttctctstggtgttatgaaatgaatgtcacccttttcagggaaaagttttcatttaccgagggaaagagtatgagcgccgggaagattttgaggctcggctcttaac

SEQ ID NO: 13813 - DNA, 201 bp, Homo sapiens
gggcagagctgtccacctgctgacatccttctaacccgtgttgtgtgtgtgtgtttcctttgcagaatatgtggatcgagagaaccatatatacaactgcmtataaattacctggaattttaaggtggtttgaggtcaagtctgttttcatggtaaggatggccccaccccagaaggaattgtccgttcccttcctcaata

SEQ ID NO: 13814 - DNA, 201 bp, Homo sapiens
tcccccttagggcagagctgtccacctgctgacatccttctaacccgtgttgtgtgtgtgtgtttcctttgcagaatatgtggatcgagagaaccatatayacaactgcatataaattacctggaattttaaggtggtttgaggtcaagtctgttttcatggtaaggatggccccaccccagaaggaattgtccgttccct

SEQ ID NO: 13815 - DNA, 201 bp, Homo sapiens
cctgtgctgagcaccacagaccctgtcctgctgaaggacctgactcctttggagttattctataaatcccccttagggcagagctgtccacctgctgacawccttctaacccgtgttgtgtgtgtgtgtttcctttgcagaatatgtggatcgagagaaccatatatacaactgcatataaattacctggaattttaaggt

SEQ ID NO: 13816 - DNA, 201 bp, Homo sapiens
tcaccgaagccttcgtatttccctcagccccatggcagagcttccttataagcttacagtgtggccttcctagcatgcattttcctaataaaggatttttyatcagatgaatcctaggggaaaactccaaaagagactcatcagtaaaaatgtccatttttctctctttaatataaaagaaaacaaattatctttaagagt

SEQ ID NO: 13817 - DNA, 201 bp, Homo sapiens
catagagagtcctgggccaggtcacagctgcagtgatgtttgttgactccccagcctgtgccctggatccccctatcccaggacatctcaccagcaagtcygcactctccctttgcagcacccatgtgttgttctctgtcagctcccaccctcccacctgcaaccatgccattattgctctcacctttaagaagagttctt

SEQ ID NO: 13818 - DNA, 201 bp, Homo sapiens
ctcctgccagatcagcagcaccattagattctcacaggagaatgatacctattgtgaactgtgcgtgtgagggatctaggtgccgtactcctcatgagaayctaatgcctgatgatctgtcactgtctcccatcttcccctgatgggatcatctagttgcaagaaaacaagttcaggctcccactgattctacatgatggt

SEQ ID NO: 13819 - DNA, 201 bp, Homo sapiens
ctgcactctccctttgcagcacccatgtgttgttctctgtcagctcccaccctcccacctgcaaccatgccattattgctctcacctttaagaagagttcyttcttgttccaactcccctgtccagccactgcccatttctcctcctctttctacaacactccgtaaaggatggtctgcacttgctgttcctctcctcctg

SEQ ID NO: 13820 - DNA, 201 bp, Homo sapiens
aatgatctaagtcaatattggtatattttatcaatcagtttaaattttttaagcattttagtatagaaaaatgtcaaagctgagtacagtggctcatgcckaaaatcccagcactttgggaggctgaggcaggtggattgcttgagctctggagttcaagaccagcctaggcaacataacgaaaccccatctctacaaaaa

SEQ ID NO: 13821 - DNA, 201 bp, Homo sapiens
ctaggattataggcatgagccaccatgcccggccctgcaatggccttcttaatgagaacagtggctttcttccaagtgtcccattcagaaatacatgtaaragaaactagagctaggatgaaaatatgactggctggctaaattatcttctcttgaaatcatgctccccttgaagaagccaattgcttctccaggcggtca

SEQ ID NO: 13822 - DNA, 201 bp, Homo sapiens
tcttagagttggatccatttcttccacctcctgataggacttctaggaccagaaacaggatggacatgccaatcttgtgttggagtgacaaatcacaatcrtgtgtggatatgcttgcacactaaccttttggtacatgccttagacactagcctaagattcatttactccatggtataaccacgaatgtgtctttacagc

SEQ ID NO: 13823 - DNA, 201 bp, Homo sapiens
gtgatcctttcggaaacggtaacccgacagggtatctttcctcgctctgcggtagcttcagggacctacctttgccccacctgtagccaacagggctgacrgtgggctcttattgaacttgttataaattagcaactcagaaacctggggtcctcctcccctaacctcaaatgtcccaaggcagtaggacagccagagcca

SEQ ID NO: 13824 - DNA, 201 bp, Homo sapiens
ttattgctctcacctttaagaagagttctttcttgttccaactcccctgtccagccactgcccatttctcctcctctttctacaacactccgtaaaggatrgtctgcacttgctgttcctctcctcctgttgtctctggagtccactccctcaccagtggccagtagctgcctgtggaaggcaggagtgagcagcacggtg

SEQ ID NO: 13825 - DNA, 201 bp, Homo sapiens
gtgatgcttgcaaagggtctccattccttgcagcgtagttgcaggcaacaccaagactagctgggcccttggaatcatccaggcccacctcaccagggccrccagccccacacctggaagggatgctgtcactcagcacgcattgagcaaagaacggactgaacgcagcctcctgctagtcctgggcctccctggctcctg

SEQ ID NO: 13826 - DNA, 201 bp, Homo sapiens
ctgcttttgctctttgcttaataactaaaacaaataatttccagagttttacctggttgtttataaccaatgtattgcacatagcctagatattttaaacygtgtcgtcttattcagattgcctgttttaaattttaattcagagatgaaaaatcaacctactctcaaaggagtggcagtgatgaagagctctcagcagga

SEQ ID NO: 13827 - DNA, 201 bp, Homo sapiens
gcggaggttgcagtgagccgagatcgtgccactgcactccatccagcctgggtgacagaccgagactccacctcaaaaaaaaaaaaaaaaaaaaaaagaaraggaaagaaagaaagaaatatatgtgatttattgcagtgactctcttctccttgtttccccatttctcagccacccttctctgccatgtgacctcagcca

SEQ ID NO: 13828 - DNA, 201 bp, Homo sapiens
ttcttgctgctgtctcgtgtgacggctgccatgacagctgccttcctgccttctgggcatatttcactgctctcaaactttcgtggcttttggagttcacyggggaatcttgttaaaatccagattttgattcagctggtctggggtgggcctcgaggctctgcatttctgagaagctcccaggtgatgtcccagctgctc

SEQ ID NO: 13829 - DNA, 201 bp, Homo sapiens
ctgctgctaggctctgccgctctgttggacttgtttcctacacatgtcctaatatcccagaagatgagcaggagtccttttgttgtcaggaaacagtcctyggtgtccgctaatgccttccccttgccccttgctgactggaactcttctaagctagttacggcccaagtgttaaaatcagcggaactagaatccaaagac

SEQ ID NO: 13830 - DNA, 201 bp, Homo sapiens
gggactcaagtctggaaagaataaaatgtatgtcgaaatggcaaggaaaaaagcatgatcacaagcaccaagatatgatgtttttttcctgtgactcaatktcatttctgtagtggtgaaacagctgtcaagactacggcagttaccagcgggaacctggagggaagggtgacttgggagttctcacatggcccttaagga

SEQ ID NO: 13831 - DNA, 201 bp, Homo sapiens
ccagaagctggacccagtcctggggtatcctgctctgtctcatctgctccacctttaaatctcctggccgtctttcacaaggacttaacagggacttcacrtgacccgtactgctgagctgaccttgaagacgggtcccagtgagtctcgttcattccacagtcgtgggcgtgtgagggcggtgaaacccaggagccggct

SEQ ID NO: 13832 - DNA, 201 bp, Homo sapiens
tcacatgacccgtactgctgagctgaccttgaagacgggtcccagtgagtctcgttcattccacagtcgtgggcgtgtgagggcggtgaaacccaggagcmggctctcatcctggggctgggcctgagggctgatcctcccagaagtgcaccacattgggaatctgtgttcgtctgttttgtgttactgcaaaggaataac

SEQ ID NO: 13833 - DNA, 201 bp, Homo sapiens
cgttcattccacagtcgtgggcgtgtgagggcggtgaaacccaggagccggctctcatcctggggctgggcctgagggctgatcctcccagaagtgcaccrcattgggaatctgtgttcgtctgttttgtgttactgcaaaggaataactgagcctgcgtcatttatgaagaggttgatttggctcatggttctgcaggct

SEQ ID NO: 13834 - DNA, 201 bp, Homo sapiens
ggagttctcatgggctgtcagcatcaaaggtgaagtcaggattggagccgccctccctggaaatgggtgggtgtctgcttgtctcagccctgggcgtcggygggctgtgattagagggttagacatactgcactgcttgtttataacttaaaacccagaaggtacgttttatctatacttcatgccactcagaaagcagtc

SEQ ID NO: 13835 - DNA, 201 bp, Homo sapiens
ttacaagatggattgtgtcataagttcctacgaatgcgtagttatatttcttaaagatgaaatgtagaccacaggctgacagtttttaccttcttttgatyaaaatttttggaatttaaaaatttggaatatttttcagttttcattgggttgatattccaggaaagtctaggtactaatggatggagagggtgatgggca

SEQ ID NO: 13836 - DNA, 201 bp, Homo sapiens
tgtctgctattctggaaagttgagatgcccaccaccccagaggctggctgaagtctccatctcttaagccccaggtagatttctcaagtctcaaaacattrtagctgggtaggggaatgaacagaagcatttttgaatattacttagtgccagacactgtgcaagtctttcatacattttaatttaagctccgttttaaga

SEQ ID NO: 13837 - DNA, 201 bp, Homo sapiens
aatcatttaaataaatgacttactacatcataaggagtaagcaatagcagcgatatagacattatgagagcagcatattaattcaatttacttgaattcartttacccatagagctaactaacggagtgttccaatgattttaccatttgtgagtgaaaatggtgagggtgaggtgttctttctgaagtccccacagcctt

SEQ ID NO: 13838 - DNA, 201 bp, Homo sapiens
atcatcaggactgcttagagttgttcaattgtgtagtagacttacagttgttttgctaagtctattaaaatcattggcatcgcttcttttttttttttttttgaagtaggaaaccatttacatattgtagtgcttaagtgcatgtcttcagcatcacaaatcaaaatattggtgaaaacttgcctcaccttacctttggct

SEQ ID NO: 13839 - DNA, 201 bp, Homo sapiens
cggcagctaccggctccatgtcatggacacacagagtcctaggaagagatagattctgctaaatgctaatgtttgtaaatataaatattaaccataccccraaagggaaggagttcttttgctggctgactgaatgggtagcttttagcacctgccacttttctcagcatgcaatctattttttatagacagaaaaaatct

SEQ ID NO: 13840 - DNA, 201 bp, Homo sapiens
ttctgcagtttggttgatttaggaagaaaatgaactctgacagcttgatcttttcagttcagtggattctaatgtttcaaaacaaaagacctgcactgaarcctctttcctccatgctttggcagagacaccactgtgagctcttcttcatgctcaaacctcggcagctaccggctccatgtcatggacacacagagtcct

SEQ ID NO: 13841 - DNA, 201 bp, Homo sapiens
tgaatgttgttctaaatttaccaccaaaatgcatgagggcgatctgtgtttgtatgtttcagccaactgcatgacatcagttccatcacaactgcaggagratggaggaaggctgctgtgcacgattacttgctgttttgtggtcaacctttcccataagacttcagagaaggtttttacttaatactgtacctgtcaaat

SEQ ID NO: 13842 - DNA, 201 bp, Homo sapiens
atgctgagcacagctgggaataattctgccatggaacaggccattgattttgttcttgaccgcacggatgttgccccgtgtgtccttgctggctatctgcrtgtcttgcaataatactcagccacttttgcatctatattcaggtcacctgcgatgtgctgtccagcccaggctgtgtgaggacagcagtgccagcccctc

SEQ ID NO: 13843 - DNA, 201 bp, Homo sapiens
agttctagaggcgtcggcagggctgattccttcagaggctgtgagggagagtctacacatgcctctctcctcctgtctgggggtttgctgccatctctggygtttcttggctgatagaagcatcaccctgacctctgctttcatcttcacgttgtgccctcccaaatttggacacgtccatgtccagatttccctttttca

SEQ ID NO: 13844 - DNA, 201 bp, Homo sapiens
gttctagaggcgtcggcagggctgattccttcagaggctgtgagggagagtctacacatgcctctctcctcctgtctgggggtttgctgccatctctggtrtttcttggctgatagaagcatcaccctgacctctgctttcatcttcacgttgtgccctcccaaatttggacacgtccatgtccagatttccctttttcat

SEQ ID NO: 13845 - DNA, 201 bp, Homo sapiens
agtggtcaaatctgtacatactgtgtgtgtgtatctcttaggcattcatcccttgccctgtttccctcctgatcagcatgtagctagttacattgtcacasgttagctacagagggagcaattactgggtgtcttatggggtgtttcaggatgctgcctcctgcctaggtattctcctcccctctgctcacacctagcatg

SEQ ID NO: 13846 - DNA, 201 bp, Homo sapiens
gaccatgtgatgacctatatctcagtattgtaacaacattggatccttttgctatgtgtctcaaaattatttcccttgtgtttttcctcacagcaaaatgwttactgaattcatcctcaatgttcccatgggcttgctgaccatccagaaactctactgcttgatcgaaatcgtccacagtgacctcttcacacagcatgg

SEQ ID NO: 13847 - DNA, 201 bp, Homo sapiens
tggccaagcacagtggctcatgcctgtaatcccaacactttggaaagccagagtgggaagatcacttgagggcaggatttcgaagttatggtgaggtattwtcatgtcactgcactccagccagggtgaaaaagtgagaccctgtctctaaataacagtaatcatcatcatcaccttttattcttgggttagtaccacatt

SEQ ID NO: 13848 - DNA, 201 bp, Homo sapiens
tataataatttgtaatatacagcataatatagaatacatagtatatactatactatgtatatatttcacacacacacacacacacacacacacacacacayaaaatagtttcagaataacaataccaattgttactttaaaagtttgttttctccttaggatatatcctgcagacatacacaatcaagtcatgtttctcag

SEQ ID NO: 13849 - DNA, 201 bp, Homo sapiens
ctttctaagaccaagtacaaaaaaacaaatgttcttatgggctgagttgcatccccccaaaattcctatgttgaaatcctaaccttcagtatttcaaaatrtggctatatttggagatagggtctttaaagaggtaattaaggtaaaatgaggtcattagggtgggccctaatcgaatctgactggtgtccttataagaag

SEQ ID NO: 13850 - DNA, 201 bp, Homo sapiens
gtccagtactgagtcctgagccacatgcggccattgggcccacgtgaaccatctttctaagaccaagtacaaaaaaacaaatgttcttatgggctgagttscatccccccaaaattcctatgttgaaatcctaaccttcagtatttcaaaatatggctatatttggagatagggtctttaaagaggtaattaaggtaaaat

SEQ ID NO: 13851 - DNA, 201 bp, Homo sapiens
ggctgaggcctgagtatccccggctgctttggggatgtgccatcatttgagaaataacgtcctcctgcctttcctaaatgcagtggaatgacaaaggccayggctgaaggttgagaagcttgaagttgggagggcccagggcacacctttccacactccattcccagactgtaattatcttgggggaaaaatactttttaa

SEQ ID NO: 13852 - DNA, 201 bp, Homo sapiens
cgaagagccaggtgatgaacgtcattggaagcgaaaggcgcttctcggtgtccccctcgtcaccgtcctcccagcaaacaccccctccagttacaccaagrgccaagctcagcttcagcatgcagtcgagtaagtggaacgctccccacatacgaatcgtgctatagctccgtgacttcccctcactgaaggctctgaggt

SEQ ID NO: 13853 - DNA, 201 bp, Homo sapiens
cttctcggtgtccccctcgtcaccgtcctcccagcaaacaccccctccagttacaccaagggccaagctcagcttcagcatgcagtcgagtaagtggaacrctccccacatacgaatcgtgctatagctccgtgacttcccctcactgaaggctctgaggttagaagcgcttcctccctccccttgcagcagagggtggga

SEQ ID NO: 13854 - DNA, 201 bp, Homo sapiens
gtggaacgctccccacatacgaatcgtgctatagctccgtgacttcccctcactgaaggctctgaggttagaagcgcttcctccctccccttgcagcagasggtgggagtttagataaacacctggctccctgggagtgtcccctgggacaggctgtagagtctggacttccgcaaatcaggccaaaatccagagcccagg

SEQ ID NO: 13855 - DNA, 201 bp, Homo sapiens
gtgttggttggaatggaaaaccaaggctgtggtcttgtgcacccgccccgcgccacatggccgggcctcctccatgggtccagcctcgttcttctctttcrcatctgttagaaacccattgttttggcttttaaagggatctgcagctgggaggcttttgaggttcccctttttgcggtccagagggaacgtctggtaaca

SEQ ID NO: 13856 - DNA, 201 bp, Homo sapiens
tggaacgctccccacatacgaatcgtgctatagctccgtgacttcccctcactgaaggctctgaggttagaagcgcttcctccctccccttgcagcagagkgtgggagtttagataaacacctggctccctgggagtgtcccctgggacaggctgtagagtctggacttccgcaaatcaggccaaaatccagagcccaggt

SEQ ID NO: 13857 - DNA, 201 bp, Homo sapiens
cttccgcaaatcaggccaaaatccagagcccaggtctccagcactggaggggcagaaagtgcagggtctgtcccagggtccatgtggaggggacctgtgargcacgtggaaccaccacactttctatcccaggacgcagagctgcaggaggccgtgggcctgcttgtgtctaggactgtgcgctggagaagcaccttcagg

SEQ ID NO: 13858 - DNA, 201 bp, Homo sapiens
atgtggaggggacctgtgaagcacgtggaaccaccacactttctatcccaggacgcagagctgcaggaggccgtgggcctgcttgtgtctaggactgtgcrctggagaagcaccttcaggcagttggcaacagctaaggggcacagcttatttttctagttttgaccaatgtttaaattaccctagaagttcccacaaaac

SEQ ID NO: 13859 - DNA, 201 bp, Homo sapiens
atgagcaagatgtagggtttggattagaaatgctgtaggagagatttttatttttttttccagaaagcctgagatattagctattgttgcagcaaaacccrtttcaagaccacctgcttaaaaaagcagacttttggagctttgatttgattttctattggagtatcataatttaaacttatgttcagagaccacctgctt

SEQ ID NO: 13860 - DNA, 201 bp, Homo sapiens
cctctcttcttacaaggacatcagtcattggatatagggtccactgcaaatccaggatgatctcaccttgagatccttcactaattacatctgcaaagacsctacatccaaataaggtacattctgaggttctgggtggccctaagaggtctacattttggagagactctactcaacttactctaagtggcagacagcttt

SEQ ID NO: 13861 - DNA, 201 bp, Homo sapiens
ctcttcttacaaggacatcagtcattggatatagggtccactgcaaatccaggatgatctcaccttgagatccttcactaattacatctgcaaagaccctrcatccaaataaggtacattctgaggttctgggtggccctaagaggtctacattttggagagactctactcaacttactctaagtggcagacagcttttca

SEQ ID NO: 13862 - DNA, 201 bp, Homo sapiens
gagaaatcttggcagggagaaggtgctgaggatggggacggcagcagaaccggggagcccactctccttcctgtggcacagagaggggtcccaggcaggaragctctgtgccctgtggcgagggctgtgcaaggcagtgagtgattgtcctctgctcctgattttcctcttgctgaaaggggagcagtcatgattctggag

SEQ ID NO: 13863 - DNA, 201 bp, Homo sapiens
ctttttaaagaggttggccaatatcgccctgtatggcaggcacctgttgtacacctgcttggccctggagaagcttgtctccaaacatccctccaggcagyctcacctggtgctgggagctcctgggtggtgacaggcactcaccttacggagactgcagaggacagccaggtttggctcctgggcacagtcatcctcact

SEQ ID NO: 13864 - DNA, 201 bp, Homo sapiens
cgtggagcagctccctgagcattcaggctccgtggggaagtcgggctgattttaaatagatcccggttttccaggcttggagctgaacggcatgacggggrcggacgtggccgatgtcccaccccctctgcctctcaaaggcagcgtggcagattacgggaatttgatggaaaaccaggacttgctgggctcgccaacacc

SEQ ID NO: 13865 - DNA, 201 bp, Homo sapiens
ctgtctgcaatcccagcacctcgggaggctgaggctggcagatcactcacggtcaggagctggagaccagccgggccaacccggtgaaaccccgtctccaycaaaaaatacgaaaaccagtcaggtgtggcggcgcgcgcctgcaatcccaggcactccgcaggctgaggcaggagaatcaggcagggaggctgcagtgag

SEQ ID NO: 13866 - DNA, 201 bp, Homo sapiens
gtgccctccctgggatgcagggaggccaggagaagcaccttaggagaccccaaatctctcttgccagcacattcaccttcagagagcccagcgcttcaccyggcctttcctgacttcccacagcagttttgctgcctggaacaaggccatttcttcagaggaggtgcagctcctgggcgcttggctcccccgacagcacag

SEQ ID NO: 13867 - DNA, 201 bp, Homo sapiens
ttctgttatggagttttcatttggttatttttgctaattggaaactaaaatttcctattcagtcttttggtcccttaaagactcttggtggttctgtttcygtggatgtgtttctgttgagttttttgggaagaagtcagtcttgttttatgatcacgtcctggtttctggtatgcctggattttcctgaaatgaatgctg

SEQ ID NO: 13868 - DNA, 201 bp, Homo sapiens
acagtgcatcttctgtccctgcccttggtggcccaagcatccttctagggtccttgcaagcagcagggctaggggcagccccacgagggctgcctccccayggctggccctagcaccctcagcaaatccacaggaactcaccaaggtcagagcacagaaccttggcggtgcttctcagcatctggcccagtgtcagcttga

SEQ ID NO: 13869 - DNA, 201 bp, Homo sapiens
actattattattctgtggtttctgcttttgatcaagataagaatagccgaagcacccacccaggtcactctcatggaatggggttttctgattaaagattkgcaagcaactgacaagcttgtagcacatcctttaagctggcactcgctgtttgagtacttgagagttatttgcagacttcctaagtctttcgttttgcta

SEQ ID NO: 13870 - DNA, 201 bp, Homo sapiens
gtttgccctggagcctctcctgccaaagaaaatgcactccaggtcccaggacaagctggacaaggatgacctggagaaggagaagaaggacaagaagaagraaaaaaggaacagcaaacatcaagagatatttgagaaagaatttaaacccaccgacatttccctgcagcagtctgaggctgtgatcctttcggaaacggt

SEQ ID NO: 13871 - DNA, 201 bp, Homo sapiens
cctctagtggtaatatctggcataactgtaatatatcacaaccaagaacttgtgtcactcttttataggtcaagcctcttttctcctcctcgccctacccmgtttctgacaaccactaatgccttctttatctgcgtaactttttcaccgtatgaatgttacataaatgggctcatacagtaggtaaccttttgagactgg

SEQ ID NO: 13872 - DNA, 201 bp, Homo sapiens
ccgccatctcttgtatctttaccatgctttcaacagtagctaccaattattgaacagctggtaggacccagcctctctatagacactgaggcttctaatckccttcttctcaagacctcaataaggaaaatgagttcagagctgttattaacttgaggaaggttgcacagcctataagtgacaggacatgaatcaatatga

SEQ ID NO: 13873 - DNA, 201 bp, Homo sapiens
gtccatccaggttgttgtatatagcaatagtttgttccttttattactgagtagtatcccataatatggatatagcataattattttcaaccatacaaggscatttgggttgtttctagttttgggttattttgaataaagctgctttgaacatttgtgtgcagttttttgtgtgtgcacaaaagtttttatttctctgag

SEQ ID NO: 13874 - DNA, 201 bp, Homo sapiens
gccccccagaccccatggtcctcagaaatgctcctttggtgaatgcagtgtgtgagagagagagagagtgtgtgtgtttgtgtgtgtgtgtgtgtgtgtgygcgcgcgcgcatgcatgctgtaaggattgattttgcctggcctgatttgtgtgtgtgtgtgtgtgtgtgtgtgtgtgtgtgtgtgcatgcatgctgtaag

SEQ ID NO: 13875 - DNA, 201 bp, Homo sapiens
attcagtaaaccatgctccaaacagatgtgctgtcatccaggctctcttcttgcatttatagagcatatgcagagtagatttagcataattcttaagggcrctaggatgttcagaataacaaataagcattggcttcaacttaaagtcgccagctgccttagcccccggctatagagtcagcctgtcctttgaagttttga

SEQ ID NO: 13876 - DNA, 201 bp, Homo sapiens
aggctgaggcctgagtatccccggctgctttggggatgtgccatcatttgagaaataacgtcctcctgcctttcctaaatgcagtggaatgacaaaggccrcggctgaaggttgagaagcttgaagttgggagggcccagggcacacctttccacactccattcccagactgtaattatcttgggggaaaaatacttttta

SEQ ID NO: 13877 - DNA, 201 bp, Homo sapiens
ttaccagcgggaacctggagggaagggtgacttgggagttctcacatggcccttaaggaaatacagatgaggcaaataggagagaggtagaaacaggcagytgccaagataaggtgtaagaaatcaagaaaaagcagcatcttcttgttggagcaagacagagttttccgatacctattttattattaaaatttagaatta

SEQ ID NO: 13878 - DNA, 201 bp, Homo sapiens
tgttttgtgccggacttagaatcacttttgtttaagaaacaaggctgaggcctgagtatccccggctgctttggggatgtgccatcatttgagaaataacrtcctcctgcctttcctaaatgcagtggaatgacaaaggccacggctgaaggttgagaagcttgaagttgggagggcccagggcacacctttccacactcc

SEQ ID NO: 13879 - DNA, 201 bp, Homo sapiens
agtgatttcccgatgcccagcaaggccgaagctctcatttcctttaggagtgttgttttttttttctcaatgaaggatgaattttctaaatccataattayacctgaccatgatggcagcttctctgttaagggcttggaaagtaccttgttaattacttgacttattttgtcaacattttttcatgttctccccacccct

SEQ ID NO: 13880 - DNA, 201 bp, Homo sapiens
caccccagacttcaaggggtggagaagtgcacttaggggcaggtgagtgtgagcggcacccacgtgcaccacacagcttgttagacaggtgagtcgggttmcaatcaagggcaccatccaatctagattaacaaaagttcatctagaaatcccctaagtatgcatgtattctgagaaagacgacgtccacactagtctccc

SEQ ID NO: 13881 - DNA, 201 bp, Homo sapiens
agactgttataaacaaagtcatcgctgccaaagaagtcaaccacaaggggcagggtacgtattttcctattttgtttctatcagcgtgtatttgcatgcgytggggcagtgctgtctgggttggttttagtttgatgttgatcatgatggtggtgataatgatggggatgacagtgatcgtggtggagaatgtgtgtgaca

SEQ ID NO: 13882 - DNA, 201 bp, Homo sapiens
attgttatttttgcttgcttaaaatttaaaaacttaaaaattgttataatttgcatacaacaaaatgctcattttaattttgtttggacggtttttgtatrcccttggaactactgcccaaaacaagacataagacattgccattccccacaaacatccctcttggcctatctgagcccatcccactcccagacaagcagc

SEQ ID NO: 13883 - DNA, 201 bp, Homo sapiens
tgttgatcatgatggtggtgataatgatggggatgacagtgatcgtggtggagaatgtgtgtgacagttgcccctgtgtacagtgcatgatggttttcttrcccgtcacctttgtgaacattgctgagagcccactcctggatggagagtggggtcagattagaagtttagaggaacatgcaggcggtaggcgtaactccc

SEQ ID NO: 13884 - DNA, 201 bp, Homo sapiens
ctatcatttaaaaataacacatgctcaacggataaaaaatagtaaagaaatctcacattactcaaatgttatagtgcagacgataaaagttcccttgtatrtaatgctacatattggagatatctactgtgccagcatttattttctatgtttatattaacattgttattaagattatgactaatatgtctgcatatttta

SEQ ID NO: 13885 - DNA, 201 bp, Homo sapiens
ggcgcttggtggcttgcacctgtggtcccagctactcaagaggctgaggtggggggatcacctgagcctagggaggttgagactgcaaatgagccatgatygtgccattgtactccagcctgggctacagagtcatcctgtcccccccaacggccccctgccccgccacccccccgccccaaaaaaaagaaaaaagtcttg

SEQ ID NO: 13886 - DNA, 201 bp, Homo sapiens
ggtttgccctggagcctctcctgccaaagaaaatgcactccaggtcccaggacaagctggacaaggatgacctggagaaggagaagaaggacaagaagaargaaaaaaggaacagcaaacatcaagagatatttgagaaagaatttaaacccaccgacatttccctgcagcagtctgaggctgtgatcctttcggaaacgg

SEQ ID NO: 13887 - DNA, 201 bp, Homo sapiens
ccagggatgagcccatgagcacctgccacgttcggcattggcccccgtgccctcaccggcccacagcgccacgttcggcattggcccccgtgccctcaccrgcccacagcgtgcaggaggcatgtgtgttggccttcaggcttgtgaaaaagagctttaggtttctcaccaaaacttcatctacctcttcaagtccgatta

SEQ ID NO: 13888 - DNA, 201 bp, Homo sapiens
tgctagatcccatggtaattgcatgtttagttttgtaaacgtctgggaggcaggactttaaggttgctggggcctcagggatgcataggacagctggggcyttgcatcctcgactgcttcagctgaagacacagtctagagtctgtgtactctggcttaggttgagattgggaagacatcccttgttctcacttccagccc

SEQ ID NO: 13889 - DNA, 201 bp, Homo sapiens
ttctgtgccaggcaccactccagagcaggtatctgtggcttgacaaggatgcacagggcagccgatccttggaaagtctgtgtgtccaaagtgcctctggwtatatttcaaggacctgcctgagctgagtcacagttagcctctgacaatatttctaatagaccactctgttgttggacagtttttaccatttgcacttcc

SEQ ID NO: 13890 - DNA, 201 bp, Homo sapiens
tgacaagcatgactgttgtgtccaggggtggtgctcctggagcattaagcaaggcttccagatgttctgtgctgctttcagggcatgaatctgtgcagggkacagacaggagcaaacttcaaatacggcccatcaggagggcgtctttgtagagcaggctgcaggctcgctttgattaattagaggtgtgacttagggaaa

SEQ ID NO: 13891 - DNA, 201 bp, Homo sapiens
tctcactcacatgaaaacacaaagatacatactagaatgtacttggggagtgctttgccttcctgattatgctgaatctttttttttttttttttttttttaactaaacagcatgttttgactcatgatttatctgaaactaaaactaggacattgattttttcccccctaaaaatgacttatatcaaaggagtctgtttt

SEQ ID NO: 13892 - DNA, 201 bp, Homo sapiens
tgtgtgtgtgtgtgtgcgcgcgcgcatgcatgctgtaaggattgattttgcctggcctgatttgtgtgtgtgtgtgtgtgtgtgtgtgtgtgtgtgtgtgyatgcatgctgtaaggattgattttgcctggcctgatttcttactgtgcatccaaaatgtgtggctctcacttccattgtactctggatgtgtttctgcta

SEQ ID NO: 13893 - DNA, 201 bp, Homo sapiens
cactttggaaagccagagtgggaagatcacttgagggcaggatttcgaagttatggtgaggtattatcatgtcactgcactccagccagggtgaaaaagtsagaccctgtctctaaataacagtaatcatcatcatcaccttttattcttgggttagtaccacattgttttaattaccatttctttatggtgtgttttaga

SEQ ID NO: 13894 - DNA, 201 bp, Homo sapiens
ttccttttattactgagtagtatcccataatatggatatagcataattattttcaaccatacaaggccatttgggttgtttctagttttgggttattttgmataaagctgctttgaacatttgtgtgcagttttttgtgtgtgcacaaaagtttttatttctctgagttaaatgcccaggagtgcagttgctagatcccat

SEQ ID NO: 13895 - DNA, 201 bp, Homo sapiens; identical to SEQ ID NO: 2031

SEQ ID NO: 13896 - DNA, 201 bp, Homo sapiens; identical to SEQ ID NO: 2032

SEQ ID NO: 13897 - DNA, 201 bp, Homo sapiens
aaacctaagagggcagtggaggccgtctggtctcctttatagacctgccctgtggggtacaatcccctagggaacttcacagcagtgcacaagtcctgccygttcccagcaaagccaagttcatacatgtgagtgtggcctgaatgtttgcattttagaaggcgggaaatgggatttgcacatttgctcctggtgacacac

SEQ ID NO: 13898 - DNA, 201 bp, Homo sapiens
ttcatctctctattttattgcaaaggcaggaatgttccccctagtctccctacactagtaaactgaaaattctaaacttagaattacagccaattcctctygttacaaatcaactccggggtaacattttattgtctcaatttcttggatacaccattgtgggttactgatgccacatacagttgattaagtaagggataa

SEQ ID NO: 13899 - DNA, 201 bp, Homo sapiens
ttccaaatgctctttctgtcctctttgaagagcaagggaagctaattattttcagcatccaaaaaaagtgacaggagatgttaatccatgtgctgggagcrtgcaaagcctattcctttcccaaagtcagctgacagcaaaaacctaagagggcagtggaggccgtctggtctcctttatagacctgccctgtggggtaca

SEQ ID NO: 13900 - DNA, 201 bp, Homo sapiens
aactacttgtgagagcaaaaggagattcgggggggtctaacaagaatattgggttgcttggagtattgtttccctaacagcttcgttaattggtcacattytcatctctctattttattgcaaaggcaggaatgttccccctagtctccctacactagtaaactgaaaattctaaacttagaattacagccaattcctctt

SEQ ID NO: 13901 - DNA, 201 bp, Homo sapiens
cgacgatattaaaaactctcctggccagtgtatcctttaagacaacctcatcaactctgaaaccatggtgatgccattcatttgggtggttgggtgtggtrgggggcctctctcatggttgatgtctatgctgccttagtgatccttaaccccctcacctcagatattcagtgcttcacagtgaagcccaaactcgatctg

SEQ ID NO: 13902 - DNA, 201 bp, Homo sapiens
agtaattatatggccgcaaaactcctgtagaacattgaaaacatgagattgttgggtggctctgtttttttcataatggtgagacatggtttttttttttwatttttctttaataaacaatataaatcccacgtgccatttctttttctttttttttaatggagactcgttgacggagtgttccacaaggtcattacatcc

SEQ ID NO: 13903 - DNA, 201 bp, Homo sapiens
gggaggcggaggttgcagtgagctgagatcgcaccactgcactccagcctgggcgacacagcgagactccatcccaaacaaaaagaaaagaaaaaaaaaaagaaagtagaatagaggatactaggggcgggagagaggagtggagagttactgtttaatgggtacagaattccgtttggggtgatggaaatgtttcagaaa

SEQ ID NO: 13904 - DNA, 201 bp, Homo sapiens
aagatagatgggtacacatattatgaatatactttccttttgccagaccttgacattctgtagacttttaatggaatattatttgcctctttcatcttacyttgacgtatgaggtggatggcttacgtgcagggtaatgtatgaaccttcccaagctctgtacaaatataacttgtcattcgtagagacgtatgtatttat

SEQ ID NO: 13905 - DNA, 201 bp, Homo sapiens
gctactcagaaggctgaggcaggagaatcacttgaacctgggaggcggaggttgcagtgagctgagatcgcaccactgcactccagcctgggcgacacagygagactccatcccaaacaaaaagaaaagaaaaaaaaaaagaaagtagaatagaggatactaggggcgggagagaggagtggagagttactgtttaatggg

SEQ ID NO: 13906 - DNA, 201 bp, Homo sapiens
aaaatggcagatcctcactactgcctctatcatttaaaaataacacatgctcaacggataaaaaatagtaaagaaatctcacattactcaaatgttatagygcagacgataaaagttcccttgtatgtaatgctacatattggagatatctactgtgccagcatttattttctatgtttatattaacattgttattaagat

SEQ ID NO: 13907 - DNA, 201 bp, Homo sapiens
ttatttaaggatccggtagagggcaattactatttttttttttttttttgccgttgtctgacagtaggtaatacctcttatcatttaagaaaaacaacagagtcttctagatttacctgtgtttgtgacaggaatagggaaatattttacattctagcttcgtgtgcaattgtccagttctcctgatcacagaagaagtct

SEQ ID NO: 13908 - DNA, 201 bp, Homo sapiens
tgagtacagtggctcatgccgaaaatcccagcactttgggaggctgaggcaggtggattgcttgagctctggagttcaagaccagcctaggcaacataacraaaccccatctctacaaaaaaatataaaaattagctgggtgtggtggtgcatgcctgtagtctcagctacctgggaggctgaggtgggaggatcacctga

SEQ ID NO: 13909 - DNA, 201 bp, Homo sapiens
tctcccaaaaagcttttcaggccatgcatggtggctcacacctgtaatccttgcactttgggaggctgaggtgggcggatcatttgaggtcaggagttcartaccagcctggccaacatggtgaaaccccatccctactaaaaaataaaacccaaaaagttagccttgtgtggtggcaggtgcctgtaatcccagctaatc

SEQ ID NO: 13910 - DNA, 201 bp, Homo sapiens
agtggctgaaaaggatcccgaatggctttataggtagtgctgggggcaaagtgggtatttggagtactgcagagatgatagttattccagtgtgtgggggragtccggtgggttcacattgtcacccgaccttctgtgtctatgcagtttcttcaggacacgttggatgccctcttcaacatcatgatggagaactcagag

SEQ ID NO: 13911 - DNA, 201 bp, Homo sapiens
ggaaagagggttggaaaggccccctgggggaagcagtaggccctctccttgctttgaccctctccatttaacactggtggcatttctttgttctgaattcrctcatccaaaatttttgtcttgtgtatctagtggctgaaaaggatcccgaatggctttataggtagtgctgggggcaaagtgggtatttggagtactgca

SEQ ID NO: 13912 - DNA, 201 bp, Homo sapiens
tcaccccagacttcaaggggtggagaagtgcacttaggggcaggtgagtgtgagcggcacccacgtgcaccacacagcttgttagacaggtgagtcgggtwccaatcaagggcaccatccaatctagattaacaaaagttcatctagaaatcccctaagtatgcatgtattctgagaaagacgacgtccacactagtctcc

SEQ ID NO: 13913 - DNA, 201 bp, Homo sapiens
acatctggctcggggtgcaggtaccctggaattttctagctaatgagatgtggacacatgctgtatttcaaggacacttgcttctgtaatatgtcaagaaraagatggaaaagtccatctagagatcttttttttgtttgtttttggcacaatgcatcactagttcactacctagcaagtgggagaagctttagcaacttc

SEQ ID NO: 13914 - DNA, 201 bp, Homo sapiens
ctgcactagagtttgaacctctccgaatctccatggctccaaacagcacaggtgtgtttctcacacatgctccgaatcctccttttggctcggaacccagrtgaacagaggttccgccacagaggaacacagccggagaggacagcaaagagtcccccgccctggggcttctgccccaaaatgacagtgttcatgtcattg

SEQ ID NO: 13915 - DNA, 201 bp, Homo sapiens
tgagctttggttgtgagccaaggtacgagtcctcttaaatttgtgtttagatatataggatgggttggatttttataattctaagtgcttatactgatatrtaaacataatatacattatgtatatattataaataattgtgataaaatatacataacataaaatttcccatcttaaacatttttaagtgtccagttcaga

SEQ ID NO: 13916 - DNA, 201 bp, Homo sapiens
ggggctgaggcgagaagattgtttgagcccaggaatttgaggttacagtgagctgtgattataccactgcagtccagtgagacactgcccaccccaccccrataaaaaaaaaaaaagaactgtgattgggagggtttggggccaaggttgcttaaacaaacacagcccacagctctgtgccaattgaggtttgggattcct

SEQ ID NO: 13917 - DNA, 201 bp, Homo sapiens
taaccaataaagtagctatgatacattaagttccttttgttcttaagagaaggtgatgggtgtaactagagtgttgacaacatgaaaaacctaaaatcagkttggagataaatatttaaatctcctctattggatactgataatgatgctcttaagtaaaaataaatatagcaggggcctattaggggagacaggctctgg

SEQ ID NO: 13918 - DNA, 201 bp, Homo sapiens
gccctgggcttccttcacctgatgcagttatttcttgttaaagattcactgtaaaatgccaaataaacttaataactaactaataaccatctttgtcagtygaggacacttacattttatgaattttggggaaaatataggaagatacctgaggaaatagaattttcaatatcataggtctagcttttgatattacagaat

SEQ ID NO: 13919 - DNA, 201 bp, Homo sapiens
ctcaaaattcccgaacatcttctccctcagcacaacaagcagagaacaagaacaggattggaagtgtctgttctgaagcaggtgtattcaagcactcaagsctgcgtgttttcctgggatgaccacatatgtgcatagccacatgcacacacacagccccgcccccagagctgagcagcagctttgctttgttcctttgga

SEQ ID NO: 13920 - DNA, 201 bp, Homo sapiens
ggcaccttagggctgagctggagggcactgggctgggactcggccaggccaggccctgtggggccctcagagaaagagggtggaggtccctgagagacacrcactggagccaggaggacagtggtcagtcccctacctcctgcactgaaggtgtcattaaccatggcaagtgtgcaaatgaagcctgtgagggtggcctgg

SEQ ID NO: 13921 - DNA, 201 bp, Homo sapiens
gggagggggggcccacttctatctgaaaatgcccatccagacactgtgggttctgtgccaatgccagggaaggaagctcagggttctgccctgggccctargaccttagtgactcaggcagccctgctactggttgggagcgctctccactggccacctctgctgcaaagctcttttctcttgcttcatgagaagtggaag

SEQ ID NO: 13922 - DNA, 201 bp, Homo sapiens
gcattcctgctgattgattcaaggtgcaacgtgcctgcttgtcaggtatgctgttgatcacattatttaagaagaaataaagtcgttcccgcagctccacstgcagtgatgggctttaatgttttgtgcttcccgaggaaaacctgccgatgatgtgaagtgacattcaacccgccgagagctgatactggcagacaaatt

SEQ ID NO: 13923 - DNA, 201 bp, Homo sapiens
ccagtgttttttttttgtttgtttgtttttttttgagatggagtttcggccttgttgcccagactgtagtgcaatggcatgatcttggcccattgcaatcyccgtctcctgggttcaagtgattctcctgcttcagcctcccgaatagctgggattataggcatgcaccaccatgcctggctaattttgtatttttagtag

SEQ ID NO: 13924 - DNA, 201 bp, Homo sapiens
gggggggcccacttctatctgaaaatgcccatccagacactgtgggttctgtgccaatgccagggaaggaagctcagggttctgccctgggccctaagacyttagtgactcaggcagccctgctactggttgggagcgctctccactggccacctctgctgcaaagctcttttctcttgcttcatgagaagtggaagagtg

SEQ ID NO: 13925 - DNA, 201 bp, Homo sapiens
tggcaaagtaagttgtggggtcaggacagcatggctatgcctgctgtccaggacaccggacaaggggccctctcagcagggtgcacgtggctggccacaccagtgcatcacaatctccccaaggctgtccctccatcagtgcaaggacagtgacatcagtgggcagacaacctctgttatgtccacagccacctaggagtg

SEQ ID NO: 13926 - DNA, 201 bp, Homo sapiens
gatgggagagagggaaaaattagtgcccacgtgcagggggcctgcccccaggaccatggcaccagtggcaacctgtggatggccaagtcaggaggactgcktgttttctttcctgttctacctccgtccagagaagcacctctgcatcccaattaagggtgcatagttgaatattctttgtgcaggttgaaatcatggtta

SEQ ID NO: 13927 - DNA, 201 bp, Homo sapiens
agtgttttttttttgtttgtttgtttttttttgagatggagtttcggccttgttgcccagactgtagtgcaatggcatgatcttggcccattgcaatcccygtctcctgggttcaagtgattctcctgcttcagcctcccgaatagctgggattataggcatgcaccaccatgcctggctaattttgtatttttagtagag

SEQ ID NO: 13928 - DNA, 201 bp, Homo sapiens
cttcattgtaaaaagcctgatgagaacagacaggatgtggcctctgccaaaaccaccatccacttccccacccaactctctgcctccagtatgccctgagracccgcctagtcatctgatctgcctccatcatgcaggcgtactgagctccttcactcctcaggtgaagccacccggagcacaccgcggatatgcagcttg

SEQ ID NO: 13929 - DNA, 201 bp, Homo sapiens
ggacagtttcatttacatgaaccagagttgggctgcagatttattgacagtattgaaatgtcagggccaaggcaactggcaatataaaaacatctgattgaaatctgtacgtttttgttcatgtgtctcagtgccttttgttttcacctggcaagaactcactgagggggtggcacttgccatttagttttcaatgagtcc

SEQ ID NO: 13930 - DNA, 201 bp, Homo sapiens
tggggccccaccttagctcaagctctcttaaattccttatggcagaatgaaaacaacttcattagggcctacctgagaagaaaacaaaaacaagaaaaagygtggacatcattatccacttgtcctggctgccttgcccccttctaaccatttcatgcccattctagtgtgggcttctgagtgctcatttggtttttcata

SEQ ID NO: 13931 - DNA, 201 bp, Homo sapiens
tggacagtttcatttacatgaaccagagttgggctgcagatttattgacagtattgaaatgtcagggccaaggcaactggcaatataaaaacatctgattgaaatctgtacgtttttgttcatgtgtctcagtgccttttgttttcacctggcaagaactcactgagggggtggcacttgccatttagttttcaatgagtc

SEQ ID NO: 13932 - DNA, 201 bp, Homo sapiens
tttacagaggactgtgtcacactcaggcagaaatgacctcaacaagacagcctcgtggaaggaagaacacttacctacttaactcccctccccgccccggrctgcctagtctagcctagccgtctataacaaccccagtggactgacattccatcttggaatttatggaggtgacaaaagtgtcatttgagatggaccaaa

SEQ ID NO: 13933 - DNA, 201 bp, Homo sapiens
ctgggtgtggtggcgcatgcctgtaatcccagctactcgagaggctgaggcaggagaatcgcttgaacgcaggaggcggaggttgtggtgagccaagatcragccattgcaccactctagcctgggcaacaagagcgaaactctgtatcaaaaaaaaaaaaaaaaaaaaaagaaagaaaaaagaatcttaacagtaatggt

SEQ ID NO: 13934 - DNA, 201 bp, Homo sapiens
ttggacagtttcatttacatgaaccagagttgggctgcagatttattgacagtattgaaatgtcagggccaaggcaactggcaatataaaaacatctgattgaaatctgtacgtttttgttcatgtgtctcagtgccttttgttttcacctggcaagaactcactgagggggtggcacttgccatttagttttcaatgagt

SEQ ID NO: 13935 - DNA, 201 bp, Homo sapiens
cctgctggagaggagcctccaagaactgactagctgtcccttttgctttgtttttctctaaaaattggtctcactgttttttgtgctcatgttgatatttrtagaccttacaaggaataaatatctttgactatatgtacatttcccccttgttttcatgttcaaaaggatcacttcagaatgcaaagtaactgacatttt

SEQ ID NO: 13936 - DNA, 201 bp, Homo sapiens
attggacagtttcatttacatgaaccagagttgggctgcagatttattgacagtattgaaatgtcagggccaaggcaactggcaatataaaaacatctgattgaaatctgtacgtttttgttcatgtgtctcagtgccttttgttttcacctggcaagaactcactgagggggtggcacttgccatttagttttcaatgag

SEQ ID NO: 13937 - DNA, 201 bp, Homo sapiens
cgaaactctgtatcaaaaaaaaaaaaaaaaaaaaaagaaagaaaaaagaatcttaacagtaatggtcagagcattcagaaaaaaaaattcagctgtgtcayggagtcagttggcttggcagctgttacaatatgatacaaaattttgcagaggcattttgtctttggaaaaatcatataggggactaggtgtacagtattt

SEQ ID NO: 13938 - DNA, 201 bp, Homo sapiens
taatttttatcagcgtctgatatttataaggccaagtccatatggaaattctcaatttagaggtatttaaatcatgtgtgcttgtcacttacagcaagatkgctaaagaaatttaattcaacttctccccgagaaaatccccggactggttatggaaaggtttttatatttctaggaacataggggttagggtggaaatta

SEQ ID NO: 13939 - DNA, 201 bp, Homo sapiens
actgaaatttgttccatcacattttgttaaattaattgtcaactaaagctgtagccctgtgctagacagtaagatatcacagaaggaaaacatgattcccrtctttcagggtgtgtgtctctttggcattgggaactgagacatattcatatttgggacaataaatgacaaagagagttggctacaggcttgtgtgccgca

SEQ ID NO: 13940 - DNA, 201 bp, Homo sapiens
tattgagttcctgctgtatacacaacaagctgctggggtttctcctcttgcagagcttaggtttgagttgaggtttgagattagtttgcaagaaccagctrgggcgtggcagcctgtgagtatcacatgaattaggcagaggtatgatgtgagcggagggtgctggtggaatgggggtggctgtgggcacaggtgtgtcct

SEQ ID NO: 13941 - DNA, 201 bp, Homo sapiens
tgtggcccaagacaattcttcttcttctaatgtggctcagggaagccaaaagattgggcacccctgggaaaaagcaaggtgcagtccgggctggccaagcrctttgtacttttcatctcctgttcacctccagggtgttgtgcccggacaggagctggtgtggtctgaccatgacacaacctccactgtccccctgtgaca

SEQ ID NO: 13942 - DNA, 201 bp, Homo sapiens
gttagtagcgcagtgctgagtgcttcttaaacagtattaacttacatgcttgatgaccatgtgttcttgattaacaaagccaacgcaagtacaaaaaaaaataaaaattacaagttgttcttaaatttaatgacattttgtaagaacccgtaaggcatattttaaggccagcatattgcatgtgaactcttcctggccctt

SEQ ID NO: 13943 - DNA, 201 bp, Homo sapiens
ctgagaccctccgagactttctgaccgtagtgcccaatattactttgaggtcgtgtgagttgttgagaaaaacatcctctctttgggtaccactttgggtraggttttcatccaatttagaacctccagtgagtgttcagtcctcttcagcatggcttagaacaagcttgtccacccgcggcccacgggccacatgcagcc

SEQ ID NO: 13944 - DNA, 201 bp, Homo sapiens
acctttgtcttctttgggcttacttttattttgttattcaaagtattaaaatgcagctctgattgtagaataacttttactctcatcaaaaaaaaaaaaaagcagatggtttctttacgtcgtggctatgacaagagtactttgggagcatttaagtaaaacagtgttcttaagtttattgggtggctctgaagtgagtga

SEQ ID NO: 13945 - DNA, 201 bp, Homo sapiens
caggggtagcagggagggatgagagatatatatttataggaaatctgatagaagataccaccatgcaacctgagggtgagtctgagaagatatttactcatgacttgtatttcttttaaaaacaattacttttgatatgtatctaaagtatcttctctgtcatttaggataaaaacagattaggcttttactcaggaatga

SEQ ID NO: 13946 - DNA, 201 bp, Homo sapiens
tgagctctgtgaagatagaacctcacgcgtcaattccccaccatgcatctaatgctcggaacagtgcctggcacacagcacatgctcattacattatggaygtgtgtggaaagaatgaacaaatgaatgaaaagtcagcatttaacagtgcttcctgacagatgagaaatgctcatgtatggcaggacaggtggccttcaa

SEQ ID NO: 13947 - DNA, 201 bp, Homo sapiens
ttcatttctcttagactggctttgttctcgggtggctctaacactagggcagtctcctacacgggcagcccatcttggcactgtgctctccctcactgacmtcctgtgggattccagacaccacagccttcgaggctgacctggcctctttccagaagatgtgcagctcttagcacgtcatacatttcttctgcctaagtg

SEQ ID NO: 13948 - DNA, 201 bp, Homo sapiens
tgttttagcaccttagaatattgaaaacataaaccaaaccctcatggcacgagcatgggaagcccttgtgatgaaaatcagctcaatgagaggggaaatgmgggaagcatttttagcagaaagtgatgacagcttggagcatcccaaagctatgcattattcagacgtgtcggagcgagagtgcccgatttcaccacccat

SEQ ID NO: 13949 - DNA, 201 bp, Homo sapiens
gtgactgaggttgctgtctgctcctgagcaagctggaagcaatgatgagctcagagctgggctttattaaatcctaggaagacacataaaaattgttagcrgttgatttcgcaggaaacacctagcaaacttgtcggggtttatattacaaagcccagggcctgcagttagcagatcatcttttttgaaaagcatttgggt

SEQ ID NO: 13950 - DNA, 201 bp, Homo sapiens
tattcttcagttgaagtctttgtggttaatgttgatagtttgtaggcacaatcactattctatgcatagggacagcttttcctaactctggaaaagagggkgtgtgtgtgtgtgtgtgtgtgtgtgtgtgtgtgtgtgtgtgtgtgtattgtcaaaaaccaatggaagagaaacacttcaaaatgggtgagaacagagaac

SEQ ID NO: 13951 - DNA, 201 bp, Homo sapiens
gatgggggtgggggccggagctgaggctgcggagcagtcggggaacctcttccatcattgacaagtgagcccaaaccatgccattccaggagtgttacccyagccgcttgttatgaagccctctgttacttgggatgatctgagtggccttccacgcacttcagaaaataaattccttttttatggtgagcgaaattctaa

SEQ ID NO: 13952 - DNA, 201 bp, Homo sapiens
cagcttcctttgaacaaccagctttcgtgtgaactatcaaaccagacctcactcattgccacagggaaggcaccaagttattcataaggtatccactcccrtgacccaaacacctcccactatgccccatctccagcattgggggtcacatttcaacatgagatttggaggggacaaaacgtccaaaccatatcgccccct

SEQ ID NO: 13953 - DNA, 201 bp, Homo sapiens
ttgaactcctgacctcaagtgatctacccacctcggcatcccaaagtgatgggatcacaggggtgagccacctcgcctggccggtcctcattcttaatcarcttttagttcaactcttggagtcatgcttttaagaagaatgcataggaggcaaccttgccagttacctgggagtgccagtggatactgcgatagtccttg

SEQ ID NO: 13954 - DNA, 201 bp, Homo sapiens
atattttagtggaaatgctgtgtaatcacgaccaactctagcttatcaaaaaaccagaatgaagatttcatttcttcttacaatgtatttaaattcagtcrtagctgtgctgttttgacaatgctttgtgttaaccaagtgaaaagttgaagacaaattccagtctacataaacttttttaaagatttttttcctgatggt

SEQ ID NO: 13955 - DNA, 201 bp, Homo sapiens
caagcaggcagccccccgtgaggcctcagggacagagcacccccatgtgctggcttatagtgccagccccttcccatggggggaaaagatgccgtcgtcgtagaagacagctcaggccgagcccctgcctgccccgcctttgacttgttggaatgtgtggcttgtttccttgtactgtcacctcctatttggttgctactc

SEQ ID NO: 13956 - DNA, 201 bp, Homo sapiens
gcaagcaggcagccccccgtgaggcctcagggacagagcacccccatgtgctggcttatagtgccagccccttcccatggggggaaaagatgccgtcgtcgtagaagacagctcaggccgagcccctgcctgccccgcctttgacttgttggaatgtgtggcttgtttccttgtactgtcacctcctatttggttgctact

SEQ ID NO: 13957 - DNA, 201 bp, Homo sapiens
agcaagcaggcagccccccgtgaggcctcagggacagagcacccccatgtgctggcttatagtgccagccccttcccatggggggaaaagatgccgtcgtcgtagaagacagctcaggccgagcccctgcctgccccgcctttgacttgttggaatgtgtggcttgtttccttgtactgtcacctcctatttggttgctac

SEQ ID NO: 13958 - DNA, 201 bp, Homo sapiens
caaagggaacaagtgatgggatttctcacctgggatctgaccttgggattggaaagtttggtgtcgatgggttaacataatacctttccagcaacctgtcrgcaactccagctgcaccagaccgtgtggtccacggagccaggcagacttgcagctctcaggcccagctggccaggagctgagttttccttgattgtagtg

SEQ ID NO: 13959 - DNA, 201 bp, Homo sapiens
atataggaatgggcagccagaggacagggcgtgaggtgcgggattgaatcaagcagggctgctcccgtcagggacagccggaggtgccggcaccgctgtcrgttacctcccagtgctgctcagaaggcaggctgctggagaacaggcctgtgactgtctcagttccttccacgcagggcagggcgctgagctgagggtgat

SEQ ID NO: 13960 - DNA, 201 bp, Homo sapiens
tttcttcctgtgttttttggctggttgattattcatggaaccatttaatttgccaggatgtattgagcacaaccaggaaggcaaaggtgataagccatgtygtcttgggtagtgggatccgacggtaaatattttgagccgtggactcaaggcgggtggatgtgtcattctccctctctgatctctgtcctttcatctata

SEQ ID NO: 13961 - DNA, 201 bp, Homo sapiens
aatgccatttccaggatagcggatataggaatgggcagccagaggacagggcgtgaggtgcgggattgaatcaagcagggctgctcccgtcagggacagcyggaggtgccggcaccgctgtcggttacctcccagtgctgctcagaaggcaggctgctggagaacaggcctgtgactgtctcagttccttccacgcagggc

SEQ ID NO: 13962 - DNA, 201 bp, Homo sapiens
tatgtgatctgagcatgagttacacgggcagcaactcctatgtgatctgagcatgagttacacgggcggtgtctcctatgtgatctgagcatgagttacaygggcagtgtgtcctttgtgatctgagcatgagttacacgggcagcgtctcctatgtgatctgagcatgagttacacgggcagcgactcctatgtgatctc

SEQ ID NO: 13963 - DNA, 201 bp, Homo sapiens
aatggaaatctgagcaaaggagaatgccatttccaggatagcggatataggaatgggcagccagaggacagggcgtgaggtgcgggattgaatcaagcagkgctgctcccgtcagggacagccggaggtgccggcaccgctgtcggttacctcccagtgctgctcagaaggcaggctgctggagaacaggcctgtgactgt

SEQ ID NO: 13964 - DNA, 201 bp, Homo sapiens
ggcaactcctatgtgatctgagcatgagttacacgggcggtgtctcctatgtgatctgagcatgagttacacgggcagtgtctcctatgtgatctgagcatgagttacatgggcagcgactcctatgtgatctgagcatgagttacaagggcagtgtctcctatgtgatctgagcatgagttacacgggcagcaactccta

SEQ ID NO: 13965 - DNA, 201 bp, Homo sapiens
aggtgacattttggcagaaacttgaatgaagcgagtgagccccacatgcagatacctgggggatgaactttctcgccaaaggcagcacaatttcacattgrggtcgttagtccattggtaattcacatgatggatattgcaaggcaggaattgattttagttttctgtattgacccgcagtttccttggtggaatggtctg

SEQ ID NO: 13966 - DNA, 201 bp, Homo sapiens
gaacttcgcagttgcatatttctctaagagaccatggagttagtgtttgaccgttggcaatggaagctaaacacctgtcaggggaggtcgtgagggtctgycctatgtctccagtaggtgcagtgcccagtatttgcctggcacatagtaggtgctcagtagctacttttgaataaattagagggactcactagatagcaa

SEQ ID NO: 13967 - DNA, 201 bp, Homo sapiens
cctgaaaacgtgggtggtctgtgttcataacagcgccacacgtgggactaggcagtggtgttctccacacacggtaccattcttctcacatgtagtcactygagggactattgtgtacgtagtccaggagggtagagtagaaagcctttgcaagcagttaggttccagggatttttttttttttaaatcttgattttgctt

SEQ ID NO: 13968 - DNA, 201 bp, Homo sapiens
cccattactgcctaagaagaagagaattggggctattaaacttgcaggtttgcaggtatcccagccagcactcttgagaggcagtgtccatagaaatagcrgtgatgatcaccaggctctccagtacggattcctaggacggggcagcagagccatgcactccccagtgcactggctggtactggggccctcaatgcccct

SEQ ID NO: 13969 - DNA, 201 bp, Homo sapiens
gcgactcctatgtgatctgagcatgagttacacgggcagcgactcctatgtgatctgagcatcagttacacgggcggtgtctcctatgtgatctgagcatsagttacacgggcagcgactcctatgtgatctgagcatgagttacacgggcagcgtctcctgtgatctgagcatcagttacacgggcagcgactcctatgt

SEQ ID NO: 13970 - DNA, 201 bp, Homo sapiens
ctcagagctgggctttattaaatcctaggaagacacataaaaattgttagcagttgatttcgcaggaaacacctagcaaacttgtcggggtttatattacraagcccagggcctgcagttagcagatcatcttttttgaaaagcatttgggtacctttgtcagagcttttctgcattttgacgtaggaggatacctgaggg

SEQ ID NO: 13971 - DNA, 201 bp, Homo sapiens
gaatgaagcgagtgagccccacatgcagatacctgggggatgaactttctcgccaaaggcagcacaatttcacattggggtcgttagtccattggtaattyacatgatggatattgcaaggcaggaattgattttagttttctgtattgacccgcagtttccttggtggaatggtctgccccttcccagcctctgtcgttt

SEQ ID NO: 13972 - DNA, 201 bp, Homo sapiens
atggaaattttatggaaaagtgtagttaaataaattatccatagttttacatagccagggtagtacctcatgtttattctgatatgtttgtttccaaattwttttttctgtgtgtggcatatgatttttaaatacaatatcccgtcctaccatgtatttgtttatttaactgattgattttttaatgtctttttagtccct

SEQ ID NO: 13973 - DNA, 201 bp, Homo sapiens
tcaaagtaataagaatttcaatgattcttcaactcatttatcctgcagaacactttatatttccctatgttatctccctgccctttttagtaatcattttytttctatttggacagattaaattaatattttacccttgtcaagcagttttattgaaagcttaaaacctctgcataattccacaaacttcctcatttattg

SEQ ID NO: 13974 - DNA, 201 bp, Homo sapiens
agcaccgagcaagaggcaactgtatctcttgctgcctgctttagtcttttcaaggtctttctttgcaaaactacaaatgtcctggcctaaagaaaaaatgycatatctctgttacaaaaaaaaaaaaaaaaaaatcttcatttttttatctagggcattacaagctcagtgagtagttttctgttttgactaataaggact

SEQ ID NO: 13975 - DNA, 201 bp, Homo sapiens
tgaagcgagtgagccccacatgcagatacctgggggatgaactttctcgccaaaggcagcacaatttcacattggggtcgttagtccattggtaattcacrtgatggatattgcaaggcaggaattgattttagttttctgtattgacccgcagtttccttggtggaatggtctgccccttcccagcctctgtcgtttact

SEQ ID NO: 13976 - DNA, 201 bp, Homo sapiens
ctgccttctgggcatatttcactgctctcaaactttcgtggcttttggagttcaccggggaatcttgttaaaatccagattttgattcagctggtctggggtgggcctcgaggctctgcatttctgagaagctcccaggtgatgtcccagctgctccagggaccatccctgagtccccagggcctgtgctgacttaagctc

SEQ ID NO: 13977 - DNA, 201 bp, Homo sapiens
ttaatttgagaacaactgatccctttatgctaggagtcttcttacttgtaaacgtggtccatttttccatatatttattagattagctttaatacctgttygtataattttgtaattgttttcataaaggtagcctttgtagcttcttataatgttattttgtcatgataattgaaagcaatcatcaatttttttgttttt

SEQ ID NO: 13978 - DNA, 201 bp, Homo sapiens
ggaagagaaggtgctgttaaccctccagcagtgcacacatggcccccacaccacaaagaaatagcccagaatccctgtcgtgtccaggttgagaaagccckccttagaaaaaatgaattcaagtgatgaaatggaatgggcagctaaagcaaaacagactcaaggaatgtcctcagatgtccctgtgttttggtggagaca

SEQ ID NO: 13979 - DNA, 201 bp, Homo sapiens
tccccattctcagctactctctgagataattactagttatctttatttttaaaagctggtttggatgttactttctagccctactcgtgttgtgggataagcaccccctgctgactcccacaccccaaagctcagccctaatgtggcagatcactcatccatcagctggtgccgtgcccttgtgtggggttcggccgatgc

SEQ ID NO: 13980 - DNA, 201 bp, Homo sapiens
ttctcaactgagatctgcaggaggcattgtgggttctcctgactgggggaagagaaggtgctgttaaccctccagcagtgcacacatggcccccacaccasaaagaaatagcccagaatccctgtcgtgtccaggttgagaaagccctccttagaaaaaatgaattcaagtgatgaaatggaatgggcagctaaagcaaaa

SEQ ID NO: 13981 - DNA, 201 bp, Homo sapiens
tgggccacactttagcatttcagtaggtgccatgtgttgcagtgctcatggtgcaggaagccatcatctcataattgggtcatgttccgaaagcatgctcrgaagtcattacttaacttgctcatctttccccattcaaagcaatgctctgagctgcggttaggtgatgaggcccatccacagaatccttcttaaccctta

SEQ ID NO: 13982 - DNA, 201 bp, Homo sapiens
gaggggcaaaacgaatgtgttcggttcagaacagtggttctcaactgagatctgcaggaggcattgtgggttctcctgactgggggaagagaaggtgctgytaaccctccagcagtgcacacatggcccccacaccacaaagaaatagcccagaatccctgtcgtgtccaggttgagaaagccctccttagaaaaaatgaa

SEQ ID NO: 13983 - DNA, 201 bp, Homo sapiens
ttttttttttttagcaaaggtagccaaatatcttttcctacattgtgatagttcaccaaaaaaatcatatggaggggcaaaacgaatgtgttcggttcagwacagtggttctcaactgagatctgcaggaggcattgtgggttctcctgactgggggaagagaaggtgctgttaaccctccagcagtgcacacatggcccc

SEQ ID NO: 13984 - DNA, 201 bp, Homo sapiens
gcaaactgtggcccctggcgtggttgtgtaaataaagttttgttgacaggcaggccatgctcattcatttctgtattatctgtggctgcttttgtgctgtygtggcagcgcgtgctagtttccacagagaccatatgtcctgcaagcctaaaatacttacctggtcctttgcagcagaggtcccagccctcaggcagtgga

SEQ ID NO: 13985 - DNA, 201 bp, Homo sapiens
ggacaggtggccttcaataaatgataaatcaaaaaacagagtcttttttttttttttagcaaaggtagccaaatatcttttcctacattgtgatagttcaycaaaaaaatcatatggaggggcaaaacgaatgtgttcggttcagaacagtggttctcaactgagatctgcaggaggcattgtgggttctcctgactgggg

SEQ ID NO: 13986 - DNA, 201 bp, Homo sapiens
gtgaacatctccatgaagctatcccctggcaccatcattggtgcaggtccaagactgaccagcccctctctgctggcaaatcccagctgcacgtcactcaragccagtggtcagcaaactgtggcccctggcgtggttgtgtaaataaagttttgttgacaggcaggccatgctcattcatttctgtattatctgtggctg

SEQ ID NO: 13987 - DNA, 201 bp, Homo sapiens
gccattgcacctaattatgattcaggagattaaataaatgagaaatatccactcatttggcaatccctgaccatggcctcatttttctaagacagttctcrgttgtcttttcatttcctaccttgagtgttgagtgagcttggggctaccagggatgtgtgctttttgggatagccacttgttttgttcaggttagctcag

SEQ ID NO: 13988 - DNA, 201 bp, Homo sapiens
tgtgtttctttaatgagttccccagtaggctctgagctctgtgaagatagaacctcacgcgtcaattccccaccatgcatctaatgctcggaacagtgccyggcacacagcacatgctcattacattatggacgtgtgtggaaagaatgaacaaatgaatgaaaagtcagcatttaacagtgcttcctgacagatgagaaa

SEQ ID NO: 13989 - DNA, 201 bp, Homo sapiens
gagaaaaatgtcagcccttttcctgaagtttcttttgtccacttgtgactttcaattaaattttaaaacctccagagtaggaggaatcccccacagagacmataagttagctgattaattgaaaacgtggaagctatttttatgattaccacataccttgtattttatttttactgaaaacacataagtgaggtcaggtgt

SEQ ID NO: 13990 - DNA, 201 bp, Homo sapiens
gaagggccagaccacaagctaggtgcccatttcctgaagggcttgggatgctccagcttggaagaacccctgtgttctaaggaaccctgaggagttcctcmggaagaagccttgcatgttctaagaagggggtgtgacagcgaggacccatgcttggtcttatccagagccacattgatatcaagcatttggcataggggt

SEQ ID NO: 13991 - DNA, 201 bp, Homo sapiens
tttatgcatatttgatttggagttggtgaatcaactcgaaaacctcaaaagggggctgtgagaacactgggctttttagggataggtttccacgttcaccratttcatctgaatggactgttgatgcttggtgctgtggccatgcccttggctcctgcatttaggagcagtgaatgtggcgtccatctgcagacgtggctc

SEQ ID NO: 13992 - DNA, 201 bp, Homo sapiens
ctcctgtgatacgcgctgctgttgcttctttcaaatgatcagatttacattcttttaatgggtcctttaaaaatgtaatcgagtgagaaggacttctaaasatttttctttggcctggatacacacgaggggattggaaattactaattcatgaaaatgaaaatgtgggcttcttttaaggaaaaattccctttgaacatt

SEQ ID NO: 13993 - DNA, 201 bp, Homo sapiens
cgggaggccaagggcatggccgggctttgtcgctgccttattatggatttgataagaaacaacttttttgactgtttacattatggaaatgtgataacccrtttgtattacttaaactgtgcattttgtaagtgttgtcaaagggagggagtaatttgtaacagaagcagagtatgtagaaactgttctcgtaaaagcgtt

SEQ ID NO: 13994 - DNA, 201 bp, Homo sapiens
tacattaaatatatatggatctcatcctaatagtttaaaatatcagtggtttgtagttaactagcttttcaacactttaaacatagaaatgattcaccgtractttgtatccttcctttaccactattttacatggtaggtgcattaatcaatgtttatggtatcactgtagggcttcaaataccagaataaatggctaat

SEQ ID NO: 13995 - DNA, 201 bp, Homo sapiens
caggaagaatggcccctgcttgtctcggcaaatgactcccacggaagctgtggagagccacgaaggtggcaggcggcattagaggggctgtaaagggaccratgcctgagaatttcttctgcaggatgtagaaccgtgtgcatttggatgataatgcagtcagaggagggcttcctgtgattacggtggaataactctcag

SEQ ID NO: 13996 - DNA, 201 bp, Homo sapiens
gccttggacacgttggtccttgcttcactgaaagcccctcttaacgccgatgctcttatcctcttcttattatgctgacctactgctcaggcatgtcaccrtctcctctgtcctgtgtccgctactctgagggtgctgtcctagccttctcctatttctttgttgcccctccctgattgacatggcctctgttgcgtttcc

SEQ ID NO: 13997 - DNA, 201 bp, Homo sapiens
acttgcaggtttgcaggtatcccagccagcactcttgagaggcagtgtccatagaaatagcggtgatgatcaccaggctctccagtacggattcctaggasggggcagcagagccatgcactccccagtgcactggctggtactggggccctcaatgcccctctgggggctgcaaacacaagagatctgggctcccaggcc

SEQ ID NO: 13998 - DNA, 201 bp, Homo sapiens
ttctcgtgcctcagcctcccgagtagctgggattacaggcatgcgccaccacacctggctaatttttttgcatgtattttggtagatacagggtttcaccwtgttggccaggctggtattgaactcctgacctcagatgatccacctgcctcggccctccaaagtgctgggattacaggcgtgagccgccgcgcccggcca

SEQ ID NO: 13999 - DNA, 201 bp, Homo sapiens
aggagtttacattttgtctaattgtgatgtatgtttcctagaggtcataaaactgatgtataagatcattaaaaggacatttctagaacaggaacccattaggcaggaatggcaaatgaataaccaggtgtgaacttggaagaaggaacattaaaatgttttctttttttgtctctgctacatcttcacactcagttaaat

SEQ ID NO: 14000 - DNA, 201 bp, Homo sapiens
acccgggagatggaggttgcagtgagccgagatcgcaccactgcactccagtatgggcaacaagaacgagactgtctcaaaaaaaaaaaaaaaaaaaaaaagtatgccttaaaacttttcatattttacataataattagtaatacatacttcacttgggccttgtagatctgtaaaacttctccttgcaagacaaagcca

SEQ ID NO: 14001 - DNA, 201 bp, Homo sapiens
agcactcttgagaggcagtgtccatagaaatagcggtgatgatcaccaggctctccagtacggattcctaggacggggcagcagagccatgcactccccastgcactggctggtactggggccctcaatgcccctctgggggctgcaaacacaagagatctgggctcccaggccctatgcacttctgcagggcacaggctg

SEQ ID NO: 14002 - DNA, 201 bp, Homo sapiens
gacatcagttggcctttgttctgcctgcattgaggccaaaaaggtgtgatctatggagcagcctgcaaattgcctgtatctttgtggactttttcctttgyaagtgtgttgcctgtttgcttctaagacatcggcagactgcaatacaagccaaatgagttgccgtcttttctacttctttgtgttttctttgatatgtta

SEQ ID NO: 14003 - DNA, 201 bp, Homo sapiens
gccagctatgtgtttgggttgatggatgtatatgtgattgcatatatatgtgaatgtgtgtgtgtgtgtacatatgtagtatgccttaggtggggtgcagwggctcacgcctgtaatcccagcactttgggaggctgaggtgggcagatcacctgaggtcaggagttgagaccagcctggctaacatggcaaaacctcatc

SEQ ID NO: 14004 - DNA, 201 bp, Homo sapiens
tcaggcccaagcctgactattttgctgttggctactacggacaagggttccccacattcctgcgggtaaagtttggttctgcctaatctgagccatgattkttcccccagcagaaaatccccttcccgttctgaggaagggtggggagtttgcatccgcgtgggatcgtgcaactctctacactgccatagctcggtggtt

SEQ ID NO: 14005 - DNA, 201 bp, Homo sapiens
tcctgggctcaaggtattctcctccctcagcctcccaagtagctgggactacaggtgcacaccaccatgcctaactaatttgtaaaaaaaatttcggcagwgaaagggtctcaccatcttgccctggctgttggtgagctcctaggctcctaggctgaagtgatcctctcaccttggcttcccgaagtgccggttgcaggt

SEQ ID NO: 14006 - DNA, 201 bp, Homo sapiens
caacactgagcactgagtgagcaagactctgtctgcaatcccagcacctcgggaggctgaggctggcagatcactcacggtcaggagctggagaccagccrggccaacccggtgaaaccccgtctccatcaaaaaatacgaaaaccagtcaggtgtggcggcgcgcgcctgcaatcccaggcactccgcaggctgaggcag

SEQ ID NO: 14007 - DNA, 201 bp, Homo sapiens
aaaatacaacaaagtagccgggcgtggtagcacacgcctgtagtcctggctacttgggaggctgaggctggagaatcgcttgaacccaggaggtggaagtwgcagtgagctgagatcgcgccaatgcactccagcctgggcaacagagtgagagtccgtctcaaaaaacaaaaaaacctgaccccttctatgagagaggga

SEQ ID NO: 14008 - DNA, 201 bp, Homo sapiens
gcctccccagccgttttctctccctaattctggagcctggcctgcctgtcctcccgagagccccacctgactttctttgctttgctttgcctctgtggctsagcttgtttcatccgttcctccttgccattttgaaggcagtgccagcactggagaaccctatcagtgcttgcaaccccaccacgaggccggcagccggga

SEQ ID NO: 14009 - DNA, 201 bp, Homo sapiens
ctcggcactttgggaggccaaggcaggtggctgggaggtggaggttgtagcgagccgagatcatgccactgcactccagcctgggcaacactgagcactgrgtgagcaagactctgtctgcaatcccagcacctcgggaggctgaggctggcagatcactcacggtcaggagctggagaccagccgggccaacccggtgaa

SEQ ID NO: 14010 - DNA, 201 bp, Homo sapiens
ggtatttgtgttatttagagtctttttcatgtacttttgtctatgactgtgtatttactcctgctcaaaactctgagtttactggaataatttttagtatygtttccctcttaacatacctaaaaaccttgttgaaagagatatgtgataaatcatcgtaatattctggaataaattcttgttctccctcacaccttccat

SEQ ID NO: 14011 - DNA, 201 bp, Homo sapiens
tctcaccccagtctaattttgcatattttttttagctctttacctttattatagcctttgtaaagcattccatttagttttccaaaactggttctttttcrtggcactaataattcattttctcatgtcacatttatttgaattacgtaattatagtagcaaggagaattggtattaagtaagttttaggtgaaacccatc

SEQ ID NO: 14012 - DNA, 201 bp, Homo sapiens
tcccagacggggtggccaccaggcagaggggctcctcacttcccagacggggcggccgggcagaggcgccccccacctcccgaacggggtggctgccgggyggaggggctcctcacttctcagatggggcggcccgtcagagacgctcctcacctcccagacggggtggcggcggggcagagacactcctcagttcccaga

SEQ ID NO: 14013 - DNA, 201 bp, Homo sapiens
cctcttccgcacctcgagctgtgtctgcggctcccctgcgtgggtagttcatggatgctggagccccactggactgaccagcactggtacaagtgagaatkaagggaggcatcggctttgggggctgctcttccataaaaccagcatgactgggctcctttttgtccaccctatggagctgctgcaggctcctcactggca

SEQ ID NO: 14014 - DNA, 201 bp, Homo sapiens
gtatacatttgccatggaggtttgctgtacctatcaacccatcatctaggttttaagccccacatgcattagctatttgtcctaatgctctccctcccctkgctgccaaccccctgacaggccctggtacgcgttgttctcctccctgtgcccatgtgttctcattgttcaactcccacttatgagtgagaacatggagtg

SEQ ID NO: 14015 - DNA, 201 bp, Homo sapiens
acaaaaccgccatcgtcatcatggcccgttctcaatgagctgttgcgtacacctcccagacggggtggccaccaggcagaggggctcctcacttcccagamggggcggccgggcagaggcgccccccacctcccgaacggggtggctgccgggtggaggggctcctcacttctcagatggggcggcccgtcagagacgctc

SEQ ID NO: 14016 - DNA, 201 bp, Homo sapiens
aatggcagatcctcactactgcctctatcatttaaaaataacacatgctcaacggataaaaaatagtaaagaaatctcacattactcaaatgttatagtgyagacgataaaagttcccttgtatgtaatgctacatattggagatatctactgtgccagcatttattttctatgtttatattaacattgttattaagatta

SEQ ID NO: 14017 - DNA, 201 bp, Homo sapiens
tttaacagtgcttcctgacagatgagaaatgctcatgtatggcaggacaggtggccttcaataaatgataaatcaaaaaacagagtcttttttttttttttagcaaaggtagccaaatatcttttcctacattgtgatagttcaccaaaaaaatcatatggaggggcaaaacgaatgtgttcggttcagaacagtggttct

SEQ ID NO: 14018 - DNA, 201 bp, Homo sapiens
aataaaaactgtggtaaaaatcatcttacaattttgttggatttgaggaatcagagagaatattccccaaaatatgtactgtttatttatttatttatttwtttttagtatttattgatcattcttgggtgtttctccgagagggggatttggcagggtcataggacaatagtggagggaaggtcagcagataaacatgtg

SEQ ID NO: 14019 - DNA, 201 bp, Homo sapiens
cttgtatgtaatgctacatattggagatatctactgtgccagcatttattttctatgtttatattaacattgttattaagattatgactaatatgtctgcrtattttacaaaacagcattgttatttttgcttgcttaaaatttaaaaacttaaaaattgttataatttgcatacaacaaaatgctcattttaattttgtt

SEQ ID NO: 14020 - DNA, 201 bp, Homo sapiens
atttaacagtgcttcctgacagatgagaaatgctcatgtatggcaggacaggtggccttcaataaatgataaatcaaaaaacagagtcttttttttttttttagcaaaggtagccaaatatcttttcctacattgtgatagttcaccaaaaaaatcatatggaggggcaaaacgaatgtgttcggttcagaacagtggttc

SEQ ID NO: 14021 - DNA, 201 bp, Homo sapiens
aaaccatgcccacaccgtcactgaccctgcctgtaccagcacgttcctaggggccggttcagggataggataaggagtagtatttgggagggaggagcttrctttgttagtgagacatattacaaaaataactaatgagaccttaaaatgctttttacattttctccagatgtctttctgttggtcttgaggcaccctgct

SEQ ID NO: 14022 - DNA, 201 bp, Homo sapiens
tccactaaaaggaaacctgctgtcattttaatcagccagtattatatctgatcactgtagttcttctgattaagatatgcagtaactatttaaaaaaaaaagctgtttcagtttcagaagttttttaaaacctgccaccgaagtgacattggaactccttctttggtttcatcaagattcctaactcatttcagaacctgt

SEQ ID NO: 14023 - DNA, 201 bp, Homo sapiens
ttgaactcgggaggcggaggttgcagtgagcctagatcacaccactgcactccagcctgggcaacagaggtagactctgtctcaaaaaaaaaaaaaaaaaagaagaaagaaaatgaaaaagtaagagacgcagcagtcactctgcttggccacctaagtccccaggacatctcctgcaaggatgtctgcatgtatgttgga

SEQ ID NO: 14024 - DNA, 201 bp, Homo sapiens
gtcttggaccatatctctagaaaaatgtacatacacaatacacaaacacaggcacacagacccccccaacacagacacacacacacacacacacacacacagacagacacagacacacacacacagacacacacacacacacagttctacacatgatttcaggttggggaggtctcccaccctgtcctcatagatgcattg

SEQ ID NO: 14025 - DNA, 201 bp, Homo sapiens
ctcctaaatcatcctcccctgctgcttcttcctgtcctggtgcctaagggcacattctctgccccctttccttacagctggccaactcctcgagacaccaycacagctgcgttcatcccaccccctcgccctgtgcccaccccaatccagagagtagcatgcttacccctaaactcaggactctaggaatctccatttgtt

SEQ ID NO: 14026 - DNA, 201 bp, Homo sapiens
tactttgtggtagaggaccacgcgtgcatggtggactcaaggaatgtctccctgcagtgccctgggcatactccttcctgtctcagcttaaatgtcacctsttctccagccacggaaacatcctcttttctcctttatggcacccactatcatttgcaatgatagatttgcttgtgtgtttctttaatgagttccccagta

SEQ ID NO: 14027 - DNA, 201 bp, Homo sapiens
tcacttgaattagctttttctaagccaggctttctcaatctgggcatgattggcattctgggctacctgttactttgtggtagaggaccacgcgtgcatgrtggactcaaggaatgtctccctgcagtgccctgggcatactccttcctgtctcagcttaaatgtcacctgttctccagccacggaaacatcctcttttct

SEQ ID NO: 14028 - DNA, 201 bp, Homo sapiens
tccatgtgttgaatgggctctcttggtggcgggatggggtggcatggagttatcctttcatgggccatgtcctccttgtggcctgggactctctgtccagygctgcagtgagtgccttaggtcagcttgacagcactcgctctggggaggtggcgatgaagctccacaaaaggctccaggctgaaggtccctgatgctagt

SEQ ID NO: 14029 - DNA, 201 bp, Homo sapiens
tgagtgtctttgccaaggctgtcacactccaaatttatgacagcacatctcagtttcccaggatgtatacaacctactttctacatagtttttttttttttattttaattttactttttgtaaatgggtgcaggtttgggaacatattggcaggatgatagcaccgactctgccaagaaaatagaaatggaaatcagatct

SEQ ID NO: 14030 - DNA, 201 bp, Homo sapiens
gcctgagtgtctttgccaaggctgtcacactccaaatttatgacagcacatctcagtttcccaggatgtatacaacctactttctacatagtttttttttwtttattttaattttactttttgtaaatgggtgcaggtttgggaacatattggcaggatgatagcaccgactctgccaagaaaatagaaatggaaatcaga

SEQ ID NO: 14031 - DNA, 201 bp, Homo sapiens
caagcagcccctcaggatggctaaggatagcaccacggggtggcctccttcctgccatggtgccaggtgcctgagtgtctttgccaaggctgtcacactccaaatttatgacagcacatctcagtttcccaggatgtatacaacctactttctacatagtttttttttttttattttaattttactttttgtaaatgggtg

SEQ ID NO: 14032 - DNA, 201 bp, Homo sapiens
caagaggttaagtttgatggcaaagtccagctcagtgcagagagaccatccacaaagacctccccacctggtccctaggctgttttcagttttggcgggggtgggtgggttgtttttgtttttgtttttttgtaattatagaagtctgcagtgttctaagaggataggtttcacaatgggaccaaaatatccccatctgac

SEQ ID NO: 14033 - DNA, 201 bp, Homo sapiens
tggggctccaaggagctgccattccctggatgggagctctgcagcccagcttctcctgacctttagggagcgaggtgtgcagggccccagggatgagcccrtgagcacctgccacgttcggcattggcccccgtgccctcaccggcccacagcgccacgttcggcattggcccccgtgccctcaccggcccacagcgtgca

SEQ ID NO: 14034 - DNA, 201 bp, Homo sapiens
ggggagaagccgggacagcttgagcaacttccagtgtaaatgggcttcattcactgtgagttattttgaatgccctcttggccctgtagggagttgcagayggtaatgtatgcatgtacatagaggcaaaacctcatagatcctgttttgtttttgttgaaacactaggtttttgttgaaaattagaggtcacaatgtgac

SEQ ID NO: 14035 - DNA, 201 bp, Homo sapiens
ttacaggctaactgagggtgggtttatgagcagcattattctgcaggaacacagaactgtacagacaaggcggaccacagagtggggcctgaagcagcaayctgtcagcctccccttgctgcaaacacctgctctgccccactggatcccaggtacactcgtggccatgtgtgtgggtgggcttgaacattgccactcccc

SEQ ID NO: 14036 - DNA, 201 bp, Homo sapiens
gagagtgacttagttcactacaacattttaccaaaagatattgaagcaatgttttttccaaaatatggcataacacagaattcttggatttgctgaaatcmtacagatttttctgtgttcgtttgtttgccatattcatgcaggtgatttgcaggtgtgcaacctggagtccagctgtcttgctcttcatgctgggcactg

SEQ ID NO: 14037 - DNA, 201 bp, Homo sapiens
gcatttcaaacctgcaggtgtgtccagcctcactcagtcattatccttcctgtggcttcatgattctccagtgggtttgctgagattgagggttgtctccrcctgtggacatggacaagactgggactggttttttgtttttctcccccatctgggtggacacctattgctatcatggaaagaaacccaggagggtgtacc

SEQ ID NO: 14038 - DNA, 201 bp, Homo sapiens
agggatgtgggccctaggaatcctggcaccacgtgtctgtaaacaactttcctgtagttataagtgtgcagttgattggggtggtgctgagcaggcccagyggaagttgcgcatttcaaacctgcaggtgtgtccagcctcactcagtcattatccttcctgtggcttcatgattctccagtgggtttgctgagattgagg

SEQ ID NO: 14039 - DNA, 201 bp, Homo sapiens
ataactcattcataactcatcaacacagtagcgctgggtagggcatagctatttttccatctaagatctccactggtagatgaataaatccaagctttacwgagattataaatttgtaaggggcctcctaggcagtagcagaaaagggatgtgggccctaggaatcctggcaccacgtgtctgtaaacaactttcctgtag

SEQ ID NO: 14040 - DNA, 201 bp, Homo sapiens
tttatcccaacacttgctaactccacgttagggctcttagtggctaattgtctctaagcttgatttccagactggtttatcctaacacttgctaactccgmgttggggctcctagtggctaatcggctccaagctttggagggagcattttaaggtcttttcaatcaacacattttattttctgatgacctagaaacaggt

SEQ ID NO: 14041 - DNA, 201 bp, Homo sapiens
agtgggaggattgcttgagctcaggagattgagaccagcctctgctggtcataatgagtgagatctatccctaaaaaaatagtgtgtatctgcagatgaarctctgaatttaggaaagctgcagttgaaacctttagtaataagagattaagatcatggactaatatgcccctcccccatcacattcctacataggacaca

SEQ ID NO: 14042 - DNA, 201 bp, Homo sapiens
ctggctaatccctactaaaagagttttgctgtgttctaataaaactttatttaaaccacctcacaccgattaggatggctacatcagaaaaaaaaaaaaasagggaaataacaagtgttgatgagggtgtggagaaattggaacccttgtgtactgttgctgggaatgtaaaatggcacagccactatggaaaatagtagg

SEQ ID NO: 14043 - DNA, 201 bp, Homo sapiens
cttcatggaacctaattatggctcttctgtttcattctacgatgttaagattttgaagtaacctctattctaagctgtggttgggctgtccacgttacccratatgttttaatatctaattatgtttgacccgatgtgttttaatatctaattatgtttgacggatggttcattttacttttgtgtcctaaatttacctct

SEQ ID NO: 14044 - DNA, 201 bp, Homo sapiens
ggtcttggaccatatctctagaaaaatgtacatacacaatacacaaacacaggcacacagacccccccaacacagacacacacacacacacacacacacacagacagacacagacacacacacacagacacacacacacacacagttctacacatgatttcaggttggggaggtctcccaccctgtcctcatagatgcatt

SEQ ID NO: 14045 - DNA, 201 bp, Homo sapiens
ttatttactataatctcatatttcaaagtatcttttattctccttacgattcatttatttaatgttttaatactttataatacttaagtatcatcataaayatttaatacttaatatttaatgatgtgtgtgacatttctccttaatacatcatccaaccaatgttaacaatgttgaggacagtatccttttatgatttat

SEQ ID NO: 14046 - DNA, 201 bp, Homo sapiens
gtctccagtgagggcttcacacttcctttataacatgcagcattttaggttggtgactggtgtgcactgggccaagggtccactctgtctctgtccttacmcccgggcttgaggactagcccctgccaaatgtcttacgggctcatcccagtgggcttgttgagtgggctgctgagtttgcaatgcctgtccctcctctat

SEQ ID NO: 14047 - DNA, 201 bp, Homo sapiens
gaaggtcttggaccatatctctagaaaaatgtacatacacaatacacaaacacaggcacacagacccccccaacacagacacacacacacacacacacacrcacagacagacacagacacacacacacagacacacacacacacacagttctacacatgatttcaggttggggaggtctcccaccctgtcctcatagatgc

SEQ ID NO: 14048 - DNA, 201 bp, Homo sapiens
ttcacttaacagtttcttatctgtttgcagaaccacatggaagtaatgataaagtcttgtttcagatatataaggccaacatactaaaaatctgagcataytcaaatatgcttctgcatcttgaagaataaggttgtctatatgctagtaacatttatctgaaaaacatgccacatagaaatacctttatggggacttggc

SEQ ID NO: 14049 - DNA, 201 bp, Homo sapiens
cacccatatgcgatgcaatcactctcaatagccctgacacacacaagcagggacaatgtcctaagcatctttacatcccaggacaagctcacgagtaggcmtgcaatgacggaatggaagagtgggtaaatggacaatagatatcactgcttggtaccttccactacaagcactggacttttagggaacagcatttaagcc

SEQ ID NO: 14050 - DNA, 201 bp, Homo sapiens
gtttgaggagctgtttgagaatgtgatgaaggtcttggaccatatctctagaaaaatgtacatacacaatacacaaacacaggcacacagacccccccaayacagacacacacacacacacacacacacacagacagacacagacacacacacacagacacacacacacacacagttctacacatgatttcaggttgggga

SEQ ID NO: 14051 - DNA, 201 bp, Homo sapiens
gatggttttagttaatttgctggttgatatttggcccataaatatttactttttagtcccaagtcagctcttataaccaaactcttaaggcttctatgaayaaattgtacgtaaacaactgctgaccttgtgtatagcggtcttgacagcccaggagtctgtgaacatttgtactagtttaaaactgaccccaggccaggc

SEQ ID NO: 14052 - DNA, 201 bp, Homo sapiens
tacctggagaccagtagtggctccagcagtgggttctgggcaagctgtggctgcgcagtgcctgccggcctccagatgagcatcccattcatgctggggaraagccgggacagcttgagcaacttccagtgtaaatgggcttcattcactgtgagttattttgaatgccctcttggccctgtagggagttgcagacggtaa

SEQ ID NO: 14053 - DNA, 201 bp, Homo sapiens
ggggtttgaggagctgtttgagaatgtgatgaaggtcttggaccatatctctagaaaaatgtacatacacaatacacaaacacaggcacacagacccccccaacacagacacacacacacacacacacacacacagacagacacagacacacacacacagacacacacacacacacagttctacacatgatttcaggttgg

SEQ ID NO: 14054 - DNA, 201 bp, Homo sapiens
tgcatagcttgtccacaccagtgcagagttcttggtggtcaccattagccaactcaaaagcaaaactacaaataattgtttcacagcgttttgtacctgtygaccaactcatgtggcccttttgcaaaaagataagcacataaattttaatgtttcacagtaagttatatgatccagtgagaaatccagttataactttac

SEQ ID NO: 14055 - DNA, 201 bp, Homo sapiens
ttaagcaggccctggattaaggtccagaggttttacaggttgataaagctgagcccctgtcctcaagggcttatattctctgaggaggaatgacaaagggkcatgctagtttcagtaccttaccaaaagttttgaggcagcaggatcctgggtctttgtgggagcacagaggaggagagtgggcggcagctaggaaggctt

SEQ ID NO: 14056 - DNA, 201 bp, Homo sapiens
tgaattatagaatcccaagacctaccccttaaggctctgatttgtgatatctgggatgctggctggaaatctccagtgttttttttttgtttgtttgtttktttttgagatggagtttcggccttgttgcccagactgtagtgcaatggcatgatcttggcccattgcaatccccgtctcctgggttcaagtgattctcct

SEQ ID NO: 14057 - DNA, 201 bp, Homo sapiens
ccaccagccccactcctatggcccacctagaagcaactcagctcaagaggacagctctgaccccctgtgatttcatcagcagcaagcatccattacctggycgccaccaccccttctcccaaactgcctttgaaaagcccctcccctaggaacctttggggagattgatttgagtaatgacaccgtctcccacgtggcggt

SEQ ID NO: 14058 - DNA, 201 bp, Homo sapiens
catggaaaccaaattccgtataatatgttttagtttatgctgaaagcaccttttaattcaacattaactaaatctcatgatctagtgcttatacctcatgmgtatttgaagagatagccattctctaccatctccacaatgctgttttataacaaaatctttctgattgggtttttccccgtatagcaagataacagggag

SEQ ID NO: 14059 - DNA, 201 bp, Homo sapiens
aatgcttcttcttccctatagctgagctgagagcgaggccgaggagttcaggttctcagtgtgctgagaagggtccagggtgcagggtgttctgaagaccrtatgtaggttgtaggattcagatctttaggctcagactaattccggaggagctttagacttgcccatctctgatccagatgcaggaagctcacgagcagg

SEQ ID NO: 14060 - DNA, 201 bp, Homo sapiens
aaaagaaagaattaggagttggtgaagctgtcatttaaaaagaagcattcgtgttttgttgttgttgctgctgctgttgctgttgctgttgttgttgctgctgctgctgctgctgttgttgttaaagggagcaggtagaaatgaagatctattgtgagtcctcgcaggcatgggtcctattctggctgagcccctgaccat

SEQ ID NO: 14061 - DNA, 201 bp, Homo sapiens
gcttgatcctggaaggcggaggttgcaatgagccaagattgcgccactgcactccagcctgagtaacagagcgagaccccttctcaaaaaaaaaaaaaaaatgcatttttttgctgcacattgtagatattagcaaaatagtaaggattttagatagttgatacagccttagagcagtggacaagagaaggcagcgtggat

SEQ ID NO: 14062 - DNA, 201 bp, Homo sapiens
gaaaagaaagaattaggagttggtgaagctgtcatttaaaaagaagcattcgtgttttgttgttgttgctgctgctgttgctgttgctgttgttgttgctgctgctgctgctgctgttgttgttaaagggagcaggtagaaatgaagatctattgtgagtcctcgcaggcatgggtcctattctggctgagcccctgacca

SEQ ID NO: 14063 - DNA, 201 bp, Homo sapiens
aggaaaagaaagaattaggagttggtgaagctgtcatttaaaaagaagcattcgtgttttgttgttgttgctgctgctgttgctgttgctgttgttgttgctgctgctgctgctgctgttgttgttaaagggagcaggtagaaatgaagatctattgtgagtcctcgcaggcatgggtcctattctggctgagcccctgac

SEQ ID NO: 14064 - DNA, 201 bp, Homo sapiens
tatttaaggatccggtagagggcaattactatttttttttttttttttgccgttgtctgacagtaggtaatacctcttatcatttaagaaaaacaacagagtcttctagatttacctgtgtttgtgacaggaatagggaaatattttacattctagcttcgtgtgcaattgtccagttctcctgatcacagaagaagtctt

SEQ ID NO: 14065 - DNA, 201 bp, Homo sapiens
agaatctacctctcagccctgcactttctcagtcgtcagtttcttaaaaggtttttgttcagccttcacattattttagcatgacatacatagtttttttkttttttttttaatttgagacaagtctcactctgtcacccaggctggagtgcagtggcgcaatcctggctcactgcaagctccgcctcccaggttcgcacc

SEQ ID NO: 14066 - DNA, 201 bp, Homo sapiens
tgcaggatcgggcagtgggtgttgatgtcaccttttaaacagtaataggtgcttatttaaggatccggtagagggcaattactatttttttttttttttttgccgttgtctgacagtaggtaatacctcttatcatttaagaaaaacaacagagtcttctagatttacctgtgtttgtgacaggaatagggaaatatttta

SEQ ID NO: 14067 - DNA, 201 bp, Homo sapiens
cagaaatttgttacaagttgtatattgaaatgttttatgcatgttccttcagcttgcacttaaaagtagaaatcttcttttaaaaaaaatcaatagccctkttatagatgctctaaaaaagcaccaagtatttttataacccttaccagagggaactaagtctggaacactgattcggaggtgtttccgtgcccacagagc

SEQ ID NO: 14068 - DNA, 201 bp, Homo sapiens
ggcatcatgggaatgaattcatctttaaatgaaaaaaggaacaatttcaccatgggttgtttatatgggaaaggttttatgagttcactgatgagaatggrcacccattttccggtgagcttcagttttaacaataatacctgaatcagcctttttattatgtcttatgcttaatcaaatatttaattaataaaacgtgac

SEQ ID NO: 14069 - DNA, 201 bp, Homo sapiens
gaggttctggtagaatttaaaaaatattaaagattcattaatcatgccttatagattttgaagctgtgttattgggggcatacagatttataatcatgatrtctttcctgttggtctattccttaatcaatatgaaaagtttctcttaatcttttggctagtatttgcatggaatacctatttccatcctttcattttcat

SEQ ID NO: 14070 - DNA, 201 bp, Homo sapiens
gaaatttgttacaagttgtatattgaaatgttttatgcatgttccttcagcttgcacttaaaagtagaaatcttcttttaaaaaaaatcaatagccctttwatagatgctctaaaaaagcaccaagtatttttataacccttaccagagggaactaagtctggaacactgattcggaggtgtttccgtgcccacagagcta

SEQ ID NO: 14071 - DNA, 201 bp, Homo sapiens
cctggtgccaaaaaggttggggaccgctgctgtagtggaacaggatatatttttgttctctggaatgagaagctttgaggattagggccaattactataaytgtactaggttagccaggagaatcctgtttctcagcaaactggtaaagaaatggagcaaatgcagccatcccttcccggcagtggcttcttggctccagg

SEQ ID NO: 14072 - DNA, 201 bp, Homo sapiens
cagcctcccaaagtgctggattacaggaatgagccactgcacccagctggcacacacataattttctaaaccaggggttgacaagctgtaactgatgacccaatccagccctccatctgtagtgtgtatgcatgtgtgtgtcccacaagctaggaatagattttatgtttttaaaggattgaaaaaaggcaagaatactat

SEQ ID NO: 14073 - DNA, 201 bp, Homo sapiens
attttgaaaataagcattaggcatttatgactaaaatcactttggtagcttatgtagttgtaagtagataagctattggatgatcacttgtcatgtgcagygtttgagcatacaaccgcatacaacatatgtatgtattatgagtacatacatatttataagaaataccataaaagattatctatgtttttatttactata

SEQ ID NO: 14074 - DNA, 201 bp, Homo sapiens
actgaagtgggagggcctgcctggtaatgttgcatgctgacatttagggacactccagagcaggcgccactgccactcctagccaggaaccctaccccccmtccagagcacacaccacccgtcagcagaagccacagggcgcagaggctgagttcctttgtggcagagtagaattctcttgggagaggaaaagacctagga

SEQ ID NO: 14075 - DNA, 201 bp, Homo sapiens
gtccctggtgccaaaaaggttggggaccgctgctgtagtggaacaggatatatttttgttctctggaatgagaagctttgaggattagggccaattactawaattgtactaggttagccaggagaatcctgtttctcagcaaactggtaaagaaatggagcaaatgcagccatcccttcccggcagtggcttcttggctcc

SEQ ID NO: 14076 - DNA, 201 bp, Homo sapiens
tccagggttcaagtgatcctcccgccttagcctcctaagtagctgggattacaagcatgtgccaccatgcctggataatttttgtatttttagtagtgacrgggtttccccatgttagccaggctgatctcaaactcctgacctcaagtgatccacccatctcagcctcccaaagtgctggattacaggaatgagccactg

SEQ ID NO: 14077 - DNA, 201 bp, Homo sapiens
tagccttatcccctccatttctcatgacccattctagaaggacccatttagggaagcttcaatttcccctggggtgtggggaaagtgagacaaggggtggragtagaacctcagtgggttgtgcttcctgtgttgatgctttcctgcacaccctgctggacaggtacagggctactgcagaattcctcgtgggttcccaca

SEQ ID NO: 14078 - DNA, 201 bp, Homo sapiens
taatgcccgtgaatcatcctgaaaccatcccccaccccggtccatggaaaaattttcctccctgaaaccagtccctggtgccaaaaaggttggggaccgcygctgtagtggaacaggatatatttttgttctctggaatgagaagctttgaggattagggccaattactataattgtactaggttagccaggagaatcctg

SEQ ID NO: 14079 - DNA, 201 bp, Homo sapiens
tcactgcaacctctgtttccagggttcaagtgatcctcccgccttagcctcctaagtagctgggattacaagcatgtgccaccatgcctggataatttttrtatttttagtagtgacggggtttccccatgttagccaggctgatctcaaactcctgacctcaagtgatccacccatctcagcctcccaaagtgctggatt

SEQ ID NO: 14080 - DNA, 201 bp, Homo sapiens
aatgatgtcaacacactgcacactcattgaatgttggttgagtgttgcacttggcagtgctcttcatggttttgaatcttcttgtcattttagccttatcmcctccatttctcatgacccattctagaaggacccatttagggaagcttcaatttcccctggggtgtggggaaagtgagacaaggggtggaagtagaacct

SEQ ID NO: 14081 - DNA, 201 bp, Homo sapiens
tattttaatctctgcaatacagattatattttcaattaagaagcttaacttgcatgtgttcggcgggcgggagcttcccagagcacttctcgcatgtgtttatgggtaataaatcacttagcattaagaaggtagacgatcattagcccatgatcactcagttgcctcctgttaatagcaaagtcaatgcacaccatcact

SEQ ID NO: 14082 - DNA, 201 bp, Homo sapiens
ccccaccatttgtcttgtcaaatgctgtatactctgaatctgtctattcatttcctcatgatggaacatttttggcaaaaaaagtaactacttaagtgatsctgtgtgcttagcattctacctaaaggcccatactataattaggaagaatctatagggtgttgttttcagattgagtgagtgtcttcgtccccaaagacc

SEQ ID NO: 14083 - DNA, 201 bp, Homo sapiens
ttatgtatgaggcaaataactgaaatgtccctgattgtcataagtgaaaaaatatcattaaaatatttgaattttgttcaaggagattaatctctataaaycaatgttttgtattccctaattagaattatggtagtcaccagtatgatcaatgctaagtgtttatttggtaattaggaagtgcaagctctaaattttgat

SEQ ID NO: 14084 - DNA, 201 bp, Homo sapiens
tgaatccaatatattttaatctctgcaatacagattatattttcaattaagaagcttaacttgcatgtgttcggcgggcgggagcttcccagagcacttcycgcatgtgtttatgggtaataaatcacttagcattaagaaggtagacgatcattagcccatgatcactcagttgcctcctgttaatagcaaagtcaatgc

SEQ ID NO: 14085 - DNA, 201 bp, Homo sapiens
tcatattctagtgaggagagacataaacaatttatgcaatttgtgtcaacctgattggtgcatggagaaggcagaaaaggagggaaggaagtgagccaggyggtcagctggcagagaagcgttccgtagagggtacaggtagagtacaatcctgaagggtgcagaccttttagttctgcatcttggtggtcatatgtattg

SEQ ID NO: 14086 - DNA, 201 bp, Homo sapiens
ctgtttccctattttgactattgtgaataacgctacagtgtacatgggagtgcaaatatgtcttcaacatattgatttcatttcctttgggtatattctcrgaagtgggattgcagcatcatttgatgattttagttttaatttttcgaggaccctccattgtgctttccgtaatggctgtttacaaatttacactcccat

SEQ ID NO: 14087 - DNA, 201 bp, Homo sapiens
tggtaaccacaattctactttctgcttctatgagttcgacttgtagagtccacttagaagtgagatcatgctgtgtttgtctttctgtgccttacttattycccttaaaataatgccctccaggtccatctatgttgttccaaatgatggtatttccaccttttttaaggctgaacagtactccactgtgtttttagatca

SEQ ID NO: 14088 - DNA, 201 bp, Homo sapiens
cagccttcactcactcttcatctccccatgaggctaatgaaatctgttctactgcagttatcaatggtgtcctcatcaataagcccacattaccgccctcyccagtctcagacactgttgatggcgcccttgctgttaagtgctcttgtccagtagcttccatgaccccgcgtcttgcgctgtttccctctggcatgtctc

SEQ ID NO: 14089 - DNA, 201 bp, Homo sapiens
acaaaaaattagccgggcgtggtggtgcgcacctgtaatcccaggctgaggcaggagaatcgcttgaacccaccaggcagaggttgcagtgagccgagatygcatcactgcactccagcctgggtgacagagcaagactccatctcaaaacaaaacaaaaccaaccaaccaaacaaacctcacaaaactactgtctgcagt

SEQ ID NO: 14090 - DNA, 201 bp, Homo sapiens
acagggaaataacaagtgttgatgagggtgtggagaaattggaacccttgtgtactgttgctgggaatgtaaaatggcacagccactatggaaaatagtargatggttcctctaaaactttaaaatagaattaccagatgatctggcaattccacttctgggtatcatcaactgaagaatcataaggtacataaatttgga

SEQ ID NO: 14091 - DNA, 201 bp, Homo sapiens
aataagcccacattaccgccctccccagtctcagacactgttgatggcgcccttgctgttaagtgctcttgtccagtagcttccatgaccccgcgtcttgygctgtttccctctggcatgtctcattccttctctccctctcgctctatctctctccctctcctctcctcccctcccctccccgtcctccccctctctctc

SEQ ID NO: 14092 - DNA, 201 bp, Homo sapiens
ctatcctcccctcccctctcctctcttccctcccttcctcccttctttccttcctctatcctcccttctctcgctctctctctagctcatttttttttttyttctgcccggaagaaatactggcattctccaaggctcttttctcagccttcttttttaggttcttattctaaaatctctcttcagtgctctctcattgat

SEQ ID NO: 14093 - DNA, 201 bp, Homo sapiens
cagccatttctgcactgataacctagaggctgtttccaggtgtttacaatcacaggctgtgctaccgtgagggctgtgatacatgtgtctcttagtacacrcattgctatggaaaaggttgatctctaggccaaatgatatgacattttaagtttgatggaaaatgatcaatttccttcctaacatgattttagcaatttg

SEQ ID NO: 14094 - DNA, 201 bp, Homo sapiens
gtgagggagactttgcttctgtgtttccaacgtggctggaagtggaggctccagggctttgcctcactcatacagttttatttttaaattgaaaagtggayttgtttaacatcctccaagaagcaaactcataaagctcgggctttcctaaaatgcattgccaaaatcataattggtagaaagttagcaagaaagaaggat

SEQ ID NO: 14095 - DNA, 201 bp, Homo sapiens
aaatagcggtgatgatcaccaggctctccagtacggattcctaggacggggcagcagagccatgcactccccagtgcactggctggtactggggccctcartgcccctctgggggctgcaaacacaagagatctgggctcccaggccctatgcacttctgcagggcacaggctgcttcttgcattcttaagtccccatgga

SEQ ID NO: 14096 - DNA, 201 bp, Homo sapiens
tgctttcaggatatgctgcctaatgctggttcctgttagacaggttcgcctgagggctgagggatttcatctagaactacagcccctcgaggggactccargaactcttggctctttggctcccatctggctcccagcttgctcgtatttgtttgatccgggcctgtgtgtgttacatttttataggatctccctccgatg

SEQ ID NO: 14097 - DNA, 201 bp, Homo sapiens
ggacccttaaaaaggtaattaaggttaaagaagatcattaagatatggcctcatcccatctgactggtgtctttatagcaagaagagactaggacacagayacacacagaggagaggccatttgaggacacggggggaagatgaccctctaccagccaaggagagaggcctcagaatgaaaccaacacatctcacaccttg

SEQ ID NO: 14098 - DNA, 201 bp, Homo sapiens
atctacagtgaacattaattttctgggctagtcattctttctagattctgatgaaaatatttcagtctttgtaaagactctttagcataaaatgaatttcygttccttgacaactaactttttggttttaatctgaatctaatcagagaaatgcatttggagaagtattaatagttttgactttggggagtgtggtgactt

SEQ ID NO: 14099 - DNA, 201 bp, Homo sapiens
aatagttaatgatttcctgtggcccctgggcctgtggagactgcatttttgttctttgcttcataagaggaatgcgtgtgtggtggtggttttttttttttgagatggaggctcgctctgtcgcccgggctggagtatggtggtgcaatttcagctcactgcaacctctgcctcctgggttcaagggattctcctgcctca

SEQ ID NO: 14100 - DNA, 201 bp, Homo sapiens
ccaccagcattgtaacacacagtagcagtggtgtgttcagaaagcacttggactccaagatcaaggtttctgccactcacatgggcagacagatatctagraacaaccatgactgtaataacagcagctggtcaccacggagcaggggagtgcctgcaggggaaggagcagcccctgggaaaagcaaatccgctcctcctg

SEQ ID NO: 14101 - DNA, 201 bp, Homo sapiens
aacacctgctctgccccactggatcccaggtacactcgtggccatgtgtgtgggtgggcttgaacattgccactccccctccaagaacaaacaccccctcyccaacactaagaaaaatatcagcatggaacataaacgttcccctcagataatcaaataattcaccccaaactgtccactgtgccgtcactggctaaagcg

SEQ ID NO: 14102 - DNA, 201 bp, Homo sapiens
aagccaaaatcacctttgcaaaaaaaattaacagtgaggaaatgatggcagtaaaagagatctgatctaaatcctcacccacctcccacccccagtcatgsctctcctgtaatcattcctgggctttggctaagccaactttgggagacctctagtttaaggtttaaatgataataggccttccctaaaactcagctgcct

SEQ ID NO: 14103 - DNA, 201 bp, Homo sapiens
tggattcgagtgcacattcacccattgataatactgagcaggcaattcaccaaaaccaccttgtgctgcaccctcttgaatagcaacttaatacatgtccrggagccgcctcatatagttgggttagttgagataatgaacttggccagctttgaaacaggaagtttttgaaacttgccggtgtgcctgcatgttctgtgt

SEQ ID NO: 14104 - DNA, 201 bp, Homo sapiens
ttagctcaaaacctccaagtggaatcattttaatgtgcgttttcttgagaaatatgtaaattaataattgcttcatacattattcaagaaaaacttatttygtatcacccataactcttctaatcttatataaagatatgctaatggatttaattaaaataattatactgaataatgtagcctgaactttattctaaaata

SEQ ID NO: 14105 - DNA, 201 bp, Homo sapiens
tcacacacaccatagagatgcctccttgagtgtcttcaaagtgctgtggatttcctttcttcagccgcctccgaccatcacgtccagccatctgtcctgtytgatcaagtccgcagagtgggtcgaggggcaccaattggcagaactggtcttggtgcattttcccctatcaagtttatctgtttttccggaggctgtttg

SEQ ID NO: 14106 - DNA, 201 bp, Homo sapiens
tgccgtcactggctaaagcgagctgacttttctgtatacacgccatatcattttcctggattatttcccaaaacttgacagaccttaggaaagctatttttgagactttgctgacagtttttctggacccacagtatgtatttcagacatttcagtaataactctgtgacctcattatatgcgtatttttgtatgatcctg

SEQ ID NO: 14107 - DNA, 201 bp, Homo sapiens
aaatacataagatgtaggcagtcctaatttaataagatataagggattgaagcaattgttgccatcgtctttctttttgttctggactgctgtcacacacrccatagagatgcctccttgagtgtcttcaaagtgctgtggatttcctttcttcagccgcctccgaccatcacgtccagccatctgtcctgtttgatcaag

SEQ ID NO: 14108 - DNA, 201 bp, Homo sapiens
ctgtaataacagcagctggtcaccacggagcaggggagtgcctgcaggggaaggagcagcccctgggaaaagcaaatccgctcctcctggcccagggcctgaaacctgggaggctcctcgtcatagggtgggctaagccagctctttcttcctaatgtcagtgaggttatgcacttggcatggcggagagctgccccctcc

SEQ ID NO: 14109 - DNA, 201 bp, Homo sapiens
caaacaaaaaatcccacatcttaataactgttacaatgtcaatgtcgattaaatttcaacttgaattttggaggggacagatatttaaatgatattacacrggttaggtcttgaaatttttttggcagggtcacaattccatgcactgcatatgggagtggaaggggtatgcctgcgggtggggagccaggggcttgagct

SEQ ID NO: 14110 - DNA, 201 bp, Homo sapiens
actgtaataacagcagctggtcaccacggagcaggggagtgcctgcaggggaaggagcagcccctgggaaaagcaaatccgctcctcctggcccagggcctgaaacctgggaggctcctcgtcatagggtgggctaagccagctctttcttcctaatgtcagtgaggttatgcacttggcatggcggagagctgccccctc

SEQ ID NO: 14111 - DNA, 201 bp, Homo sapiens
aattttctcccattctgtaggttgcctgttcactctgatgatagtttcttttgctgtgcagaagctctttagtttaattaaatcccggttgtcaattttttgcttttgttgcagttgcttttggcattttgatcatgaagtctttgcccatgcctgtgtcctgagtggtatagcctaggttttcttctagggtttttatca

SEQ ID NO: 14112 - DNA, 201 bp, Homo sapiens
tattacaaagcccagggcctgcagttagcagatcatcttttttgaaaagcatttgggtacctttgtcagagcttttctgcattttgacgtaggaggatacytgagggccatggttgtgagaaaggagagaacccacccaggtgtcctggggattgttttattcataaagtaattcggatgatctcgaggtggtccagggag

SEQ ID NO: 14113 - DNA, 201 bp, Homo sapiens
agtggctcacacctgtaatcccagcactctgggaggcttaggcgggtggatcacctgaggtcaggagttcgtgagcagcctggccaacatggtgaaacccygtctttactaaaaaatacaaaaaattagccgggcgtggtggtgcgcacctgtaatcccaggctgaggcaggagaatcgcttgaacccaccaggcagaggt

SEQ ID NO: 14114 - DNA, 201 bp, Homo sapiens
gactttttaataatcgcccttctgactggcgtgagatgctgtctcgttgtggttttgatttgcatttctctaatgatcagtgatgttgagcttttttttttcacatttgttggcaccatgaatgccttcttttgagaaatgtctgttcatatcctttgcccactttttgatggggttgttcatttttttcttgtaaatttg

SEQ ID NO: 14115 - DNA, 201 bp, Homo sapiens
tcctgtgcaccgactgcatgctctatagacccctgccctgtgggggcccattcatgcttacagggtacatcctctgggagaaagcatgacaagttggtacyggggaacctgagggccgggatgaatttcaggataaaaagagcagacttagggatgctgccatagtatatcgtctagatttgtactgccctattgaaattc

SEQ ID NO: 14116 - DNA, 201 bp, Homo sapiens
tgactttttaataatcgcccttctgactggcgtgagatgctgtctcgttgtggttttgatttgcatttctctaatgatcagtgatgttgagcttttttttttcacatttgttggcaccatgaatgccttcttttgagaaatgtctgttcatatcctttgcccactttttgatggggttgttcatttttttcttgtaaattt

SEQ ID NO: 14117 - DNA, 201 bp, Homo sapiens
ccttataattgctatttgttaaaaatcaaaacgattttccatcctggtaaaatggtaaaaatatcagtagtttgcagacagtaaatatctgtctttaatamttcaaaaacaagccatatttgcctcctgcctgttttccttatgagggaattatgctgtggggtggtagagtgagaagggttaaatcactggggacccacc

SEQ ID NO: 14118 - DNA, 201 bp, Homo sapiens
gactaagtcgtaagacctaggatggtgaagagtctcagagtgaccaaaaacacacagaccctgttctcagggaagctcctgtgcaccgactgcatgctctrtagacccctgccctgtgggggcccattcatgcttacagggtacatcctctgggagaaagcatgacaagttggtaccggggaacctgagggccgggatgaa

SEQ ID NO: 14119 - DNA, 201 bp, Homo sapiens
ctgctgcgattccatccccactgtgctctgttctcctgcctacccattccctgtagccacagggtgtcaggtcagagcctgactcttgttcctgagccccmctctgggtgccccccatccttcagatagaccacagtccctgccaccccagcctccgcactgtcttaccacagcgtctgggggctccacctcccctgggtg

SEQ ID NO: 14120 - DNA, 201 bp, Homo sapiens
cggttataaaggaaggcttgtgcatagttagtggggaagccacagggatgtgcaacttttccctacagccctgaggttccaggcactaagaacttggcacrtctttccatgctggctgaaatcaaaatgaaaccttctttgacttttgccccttctgctggggcattgacattggggtttgacactggctcagacagtcaa

SEQ ID NO: 14121 - DNA, 201 bp, Homo sapiens
cacaatcactattctatgcatagggacagcttttcctaactctggaaaagagggtgtgtgtgtgtgtgtgtgtgtgtgtgtgtgtgtgtgtgtgtgtgtgtattgtcaaaaaccaatggaagagaaacacttcaaaatgggtgagaacagagaacagcatgaaatatggacagcagacagccctgtatgcaatgaaaatgc

SEQ ID NO: 14122 - DNA, 201 bp, Homo sapiens
gtgctatctttcacgttttcagatctctgagatcttcactggggatcaaggtccaaggaatcaaagctcatgctgtgtttgctcctgagcaggagagagcrttgtttagagggagggagaaggggaatgcttgaggtcagaatcacaggacagcaaatccgtcttgagatttcagaaatcaccataaatctgtgtcccttc

SEQ ID NO: 14123 - DNA, 201 bp, Homo sapiens
caggtgcccgccaccgcacctggctaattttttttgcatttttagtagagacggggtttcaccatgttagccaggatggtctcgatctcctgacctcgcgwtccgcccgacttggcctcccaaagtgctgggattacaggcgtgagccactgcgcccagcctgaacgtctatttttaattcttttgggtatacatcgagga

SEQ ID NO: 14124 - DNA, 201 bp, Homo sapiens
gcacaatcactattctatgcatagggacagcttttcctaactctggaaaagagggtgtgtgtgtgtgtgtgtgtgtgtgtgtgtgtgtgtgtgtgtgtgtgtattgtcaaaaaccaatggaagagaaacacttcaaaatgggtgagaacagagaacagcatgaaatatggacagcagacagccctgtatgcaatgaaaatg

SEQ ID NO: 14125 - DNA, 201 bp, Homo sapiens
accacctgagctccacctcctgccagatcagcagcaccattagattctcacaggagaatgatacctattgtgaactgtgcgtgtgagggatctaggtgccrtactcctcatgagaacctaatgcctgatgatctgtcactgtctcccatcttcccctgatgggatcatctagttgcaagaaaacaagttcaggctcccact

SEQ ID NO: 14126 - DNA, 201 bp, Homo sapiens
tgctccagaacttttcatcgtggcccctttagggccatggcagcacaaatacacttagtaggtgaggccatgaggacacctaccaccattaaggatgcctrtggggagtagggagatggaggataggctggtaagaccctgccagtgcgggcctgcctcagtgccttggaacgaggtattcccagtgcctctgagctgcat

SEQ ID NO: 14127 - DNA, 201 bp, Homo sapiens
ttatttatcccttagacaatagatggataacttggtcgatagcatctagatttaaaaaggccacgcaaagggcaatggtacctctcaggggctgtgcagamggtgggagagtgctcagaggcgtcagaaaggcccaggcccatagcagcccagtcttgagcctagtagacctgccagccccaagtcggacaggatggagcc

SEQ ID NO: 14128 - DNA, 201 bp, Homo sapiens
attcttcagttgaagtctttgtggttaatgttgatagtttgtaggcacaatcactattctatgcatagggacagcttttcctaactctggaaaagagggtgtgtgtgtgtgtgtgtgtgtgtgtgtgtgtgtgtgtgtgtgtgtgtattgtcaaaaaccaatggaagagaaacacttcaaaatgggtgagaacagagaaca

SEQ ID NO: 14129 - DNA, 201 bp, Homo sapiens
taaaagaaggtgggtaaactacgtagaaactcacagaaatcatcaagaagaaattctggaaatctaaaacactgtaacagtgtgaagaatgcctctgatgrtctcatcaatcaactggacacagaatctgtggacttgaaaaatctgaatgtttgcagatgcatcatgtgtcttaggctactgtagaaattactggtctct

SEQ ID NO: 14130 - DNA, 201 bp, Homo sapiens
ccctaccctatctacaggtatttcttggcggtcagtgaaggatcaaacaagaacagggttgggtaatgctgtcagcaggcccactacatcccatgccaggygctcatggcgtcctgtctctgctcctgcctcactttccacctctctgcccagcccccataaatagtatgtgggaagctgggcacagtggctcacacctgt

SEQ ID NO: 14131 - DNA, 201 bp, Homo sapiens
agttctccttgagtgagaagcaatcgctttgaccattgtcaaccagaaagaatttccccacagcatttctctctttcccagctgggccataaattgtctcrtgactgaggttgctgtctgctcctgagcaagctggaagcaatgatgagctcagagctgggctttattaaatcctaggaagacacataaaaattgttagca

SEQ ID NO: 14132 - DNA, 201 bp, Homo sapiens
ggacaggatcaggggaaaggatgctgagctgtgcttgtgggtgagaaatgagttaattaagccctttctgccatgataactctggtgtttgttttctgctrtttaggctatcaaagttagttagtgactcacagcaaaaagaagatactgatattttcttgggttttgtttataatcatgttttgagcttatatagacatg

SEQ ID NO: 14133 - DNA, 201 bp, Homo sapiens
aggtgacagtgaggctcagggtggagcttggttacttgtctcagcatcaagggacaggatcaggggaaaggatgctgagctgtgcttgtgggtgagaaatragttaattaagccctttctgccatgataactctggtgtttgttttctgctatttaggctatcaaagttagttagtgactcacagcaaaaagaagatactg

SEQ ID NO: 14134 - DNA, 201 bp, Homo sapiens
cccactccccatggctgtggatggctccccaaccttctgcatgaggtagacacccagttacctctgcagcgtccttcccttcagccaaacccctccccccsccgcccctgctaaatttactttgtcaccctttctagaccaggtcagttccagacatgacctggatgctccttctccttaaagagtgaatgagcaagaggc

SEQ ID NO: 14135 - DNA, 201 bp, Homo sapiens
atattatggcagggtgtttgacagagactctttagcttaatgaaattctatcagggagatgcagttttaatagcgtcgttcattgctttttgtccctgtastctttaaaggctcacatgtggggaggacagtggctgcatctgagctgccagcagcagtgcaggagttcagatgtgaaatttcactcatgccagcatttcc

SEQ ID NO: 14136 - DNA, 201 bp, Homo sapiens
ttcataaaatagatggtaccctgagagtgtttattaaaggaaaggaaggataaatgcttgtctctttcattttaattatctatttgctaaatagtgaattkgttccctggcatcctccaaggatgaccagtaaatttttttctttaataccttcatgaattttcatgtgtctaagtccgttgtagttatgattctttttgc

SEQ ID NO: 14137 - DNA, 201 bp, Homo sapiens
gaaagcagagctttatttctcataaagggttgcagcctgcaggccagccattccgcagaccaggaagcgtagcctccagcttctgccaagagcaagcactyccagggaggaggaatgagacaggaatttatgctgagtgggttggctaagtatacataatcaataagctatagaagaagtcatgaatattaatgaaggaga

SEQ ID NO: 14138 - DNA, 201 bp, Homo sapiens
tgagaacatactgtgtagaaagcatgctgtagaggatagcgtgtgcttccccttgtgctccccagtctgtttcacaagttctggatgattgatcaatgctygatcaatgcgagctcccttctccatcatgggaagaatgggaagcctgcccctcccctgtggtgcatctggcatccgagctggtgttcatcgcttccctct

SEQ ID NO: 14139 - DNA, 201 bp, Homo sapiens
agccaccctgcagttggtagcctctcagcaggagggcatgcagtgtcaaactggcaagctgtcacgtggaaactgcaaagagggagggggagtccacttayggctcagacaagtggctaaaggtgatataggaatgagttgtctgcttcttgttttctagagccagtttctgcttcctccttaggagagaattctggttaa

SEQ ID NO: 14140 - DNA, 201 bp, Homo sapiens
gtatattttctgtgtttttcagatttataagatgtagtatgttacaatgaaaaatgcagtgagtggtagcattaagggtcagcctctgtatgtggaggcaygctgccttggctgagtggtctgcatgagtctcactgccaagttaccttccttgcttcatagatgttgaggatgtggtctctcattctaacttgtcaccca

SEQ ID NO: 14141 - DNA, 201 bp, Homo sapiens
gcctgagtgttctttaggatgctcactggtgtggaagtgcctgggaggcccatggagcagccgcaggacccccacactcttggttatcctagttatggcgrttttcactgggctgacttattgcagaaggagctgtacaacttgcaatttgctgcctgcactaattccttcaaagaacaagaatcttccaaatgattagct

SEQ ID NO: 14142 - DNA, 201 bp, Homo sapiens
tttttttttttgagacgaagtcttgctctgtcgcccaggctggagtgcagtagcatgatctccgctcactgcaacctctgcctcctgcgttcaagcgattytcctgtctcagcctcccgagtagctgggattacaggcgcacgccaccatgcctggctaatttttgtatttttagtagagacagggtttcaccacgttggc

SEQ ID NO: 14143 - DNA, 201 bp, Homo sapiens
tttttttttttttttttgccgttgtctgacagtaggtaatacctcttatcatttaagaaaaacaacagagtcttctagatttacctgtgtttgtgacaggratagggaaatattttacattctagcttcgtgtgcaattgtccagttctcctgatcacagaagaagtcttattaatgcagagaggttgaagctctgacatc

SEQ ID NO: 14144 - DNA, 201 bp, Homo sapiens
tccaaataccttttccacatagctgggttggggtctctctctgtcgcccaggctgcagtggcgcaatctcggctcactgcaacctccgccctcctgggttsaagtgattctcctgcctcagcctaccgagtagctgggattacaggtgcctgcccccatgccgggccaatttttatatttttagtagagacggggtttcac

SEQ ID NO: 14145 - DNA, 201 bp, Homo sapiens
atcttgtccaaactgcagggagcactccctctgcgtggggctgtgtgcggaagagcagtcaggggagtccctgggaagcgcgatgagcggtgatgactggygacgtcaaggccttctcctcgaggctcaggatgggtgcgggactcggggtgttttccacctgtgggtgctcaggctctgattgcgtttcccgcttgtttg

SEQ ID NO: 14146 - DNA, 201 bp, Homo sapiens
ataccttttccacatagctgggttggggtctctctctgtcgcccaggctgcagtggcgcaatctcggctcactgcaacctccgccctcctgggttgaagtkattctcctgcctcagcctaccgagtagctgggattacaggtgcctgcccccatgccgggccaatttttatatttttagtagagacggggtttcaccatgt

SEQ ID NO: 14147 - DNA, 201 bp, Homo sapiens
tctcacctttaagtagaaatgtacataaggacacaactagatattgatttgctaagttcagtgatattcaaagtgaaaatgatacatatacttctggattrttttcgttgcaaaatttgttcattctttccctattcggtgtgcattgagtgcctgctaagggctgggcagagtgctagaagacgggaactgtgtgagcca

SEQ ID NO: 14148 - DNA, 201 bp, Homo sapiens
tcatcctacaagcatgtgtccgggcctcaaggccactctgatgactgctttccctccctgagcctcctgcagtgagagtgaagctcacgaatgctttgggygtggcatggcagtgtggtctcattgtgtaaggtgttttgattatgtgtggacttttgcgccaggactattttaaatgctggggatgtcgtgctgaataag

SEQ ID NO: 14149 - DNA, 201 bp, Homo sapiens
tttcatataaatggcactatagaatatgtggctttttttggtatatggcttcttttacttagtatattctcagggttcatccatgtgttggcaccccattmctgttcatggctcggtagtattccattgtatggacagaccacaggtgtttatccatttatctctggatgcacacctggcttacttcaccttttggctgta

SEQ ID NO: 14150 - DNA, 201 bp, Homo sapiens
tggaactgttatattggtgaatacgatttactagacggaacaaggaaaacctgaattccatcccctgtgggccatggaaagcccatattcacagtcaagtrtgaaagtggcttttgggccacccgtgccctgcctgaaagcagagcatcatgtggccacgtgtctgctcggctctgccttactaattgtgtttaacctgag

SEQ ID NO: 14151 - DNA, 201 bp, Homo sapiens
cacccggtgactattccaagaagtgtcattttccagtggagaatgggactttttttttttcctgttaataatttatttcttaattgcggtaaaatacatawaacataaagttaatccttttaaccatcttaacacgaacaattcagtggcatggggtacatttacagtacatcaccactaggtagttctagatcatttccg

SEQ ID NO: 14152 - DNA, 201 bp, Homo sapiens
gtggatcagtcacatggtctgctgcagtgtgagtgacagacggtgacttgctatcagtatgcaaaggtcacccggtgactattccaagaagtgtcattttycagtggagaatgggactttttttttttcctgttaataatttatttcttaattgcggtaaaatacatataacataaagttaatccttttaaccatcttaac

SEQ ID NO: 14153 - DNA, 201 bp, Homo sapiens
cactgatagtggcttgcatttggcaagacatggctgttcctgggtaccaggcagtggcaccggaactcattaagaaggtgactaatttcagggccgtgttracatagactgaggctccatcatggttcccaggtgtttgtcggtcgccgctggagaccattgtgtggatcagtcacatggtctgctgcagtgtgagtgaca

SEQ ID NO: 14154 - DNA, 201 bp, Homo sapiens
gaaaacggaggattctgacccccacacctaagataataggaaagagcctccctcccccaggagagggggctgcccctgcccactgcccctggccaagtccrggcttcaggctggctctgcctttccaggccatggatgatgtttgaatgaggccctgggcagggcgtggagatggagtgagccctcgagtcctgggtggtg

SEQ ID NO: 14155 - DNA, 201 bp, Homo sapiens
gggtgtgatttatgaggtaaagaagagtacacagtgcatggtgtgttgttatggcaaccctaggaaactaacatcaagatcttaactcaagatattgatcytcatgtatgttaacgtgagagacatgtgtgtcttgtgtggagggcctctccaggtgagagggtggctgtgctttcactcatggtcagctccagtctgctc

SEQ ID NO: 14156 - DNA, 201 bp, Homo sapiens
gctgaattatttaattctctctgatgatcgtctcaattcattttccaataaatgtaattattttcttgccagcgttcgtatttaattgctaagttttctcygatttgctctaaatcatcttttacaaatgcgtagtgaaaggcagcaggttttctcttctgatggtggcaattataaatgtaattttatttaacttgataa

SEQ ID NO: 14157 - DNA, 201 bp, Homo sapiens
caaaggcatggatggaggagcgatcggtgtccccagtccagttcagtaatatggagggcggagggtggagattacaagaattacaagcaaagatgggggcygtagaattccatcttctacctttaaagaatttgcccttttttttttccctttaattgatttttccctctgtttttaagttgttctcttttgaatactctg

SEQ ID NO: 14158 - DNA, 201 bp, Homo sapiens
cttaaagatgctctgccttgatgcactttccctcagtcttaccagcagccctatgaggcaggcattattggggttacatattcttgaacactggcaggtarcaaggtggtaacaaaggtaagacaataaagccagatcaaatgtgttaatgccagctggcacattaatcccagggatccactgggcctaccagaagggagg

SEQ ID NO: 14159 - DNA, 201 bp, Homo sapiens
cttgaaacctccatgctagtttggcatgattttagaagttacctggcagaatgaatacaaaagaagcaaagaaatttaacatgaacttggcattttcttgytggcatgaacataattattggatgtcattataaataaaccttttaaaagtcactttaaaaatagaataattggctacattgcagagatcatgaaagatca

SEQ ID NO: 14160 - DNA, 201 bp, Homo sapiens
ttcaatattgtgaagaacattcacatttgtgcatgactaaattccagaactctttttatgttataagactaaaactctctacccattaaataacaacaccscatttctccctcctctcagcacctgtagaaccaccattctacttcctgtctctatgagtttggttactctaggttattgggccaattttgacagcctttc

SEQ ID NO: 14161 - DNA, 201 bp, Homo sapiens
gacacaccccccgccccttacagtcctgttctgtgctgctgttggatgaaactgctctgcaggtcttaggaaccagccctggaaaccccacctcccatccscccacccccggtgcaggaagggaacttagtcttcattatgtgaccacccacttatgtagacttcccacatttccccccaaattagtccccaggagctgag

SEQ ID NO: 14162 - DNA, 201 bp, Homo sapiens
attttaagtgtacagttcaatattgtgaagaacattcacatttgtgcatgactaaattccagaactctttttatgttataagactaaaactctctacccaytaaataacaacaccccatttctccctcctctcagcacctgtagaaccaccattctacttcctgtctctatgagtttggttactctaggttattgggccaa

SEQ ID NO: 14163 - DNA, 201 bp, Homo sapiens
tttccccatcatacctgtgattatcaaccttttctcactctgccaaccaaaaatgttcccttggaatgacttctgactgtttgtgctgaaatgaagcagtrgtttttcaaagctcacacatgaccgtatggactctgcacagttggtgccatattaaaatacaatgtctcttacctttttttccctccactttctgttgtt

SEQ ID NO: 14164 - DNA, 201 bp, Homo sapiens
cacagatttgggattcattttccctcgcttctctttttagttttaccacatattaatgtatccttaaacaatatgttcttaagccttgcttccttttgccrtttatagaagcagagtcaaacaatatatatttttccatgacatgcttttagctttcagcactgtggttttgcagtctctccaggttgatgggtgcagctg

SEQ ID NO: 14165 - DNA, 201 bp, Homo sapiens
ccctattcacatggtggaagggaggtcgttgagctccaggcttctcatagccagtgtgaggagcaccagtgcactcaacccaggatccgtaagatgaaaayagcccagtcgttgttgcagatcctcatactgtgagtggaaggaaatttctccctgcagactttatagggatgacaccgtagcatgtaatgaaccgcattt

SEQ ID NO: 14166 - DNA, 201 bp, Homo sapiens
ggctgagcaaagtgcttgtggttcctttcagccaattgtgctgaggcaaaggcgggccacttaaattgcagtttctctgatgtatcttctaaaagccaaasgtcgttatccacaaagggtacttttgtgtaacaccaggcactcgagtagatctgtggggtcttccctctgtgggtgatgagtctgggtttcagcatcccg

SEQ ID NO: 14167 - DNA, 201 bp, Homo sapiens
ttctggaaattcaacccgtgccttctggattcttctttgccctcggcgtttctctctcctacctgacaagagggtccttggccccattgcctctgccctckagtcgtgttctgtgttctgccccaagagattgtggctgctgttcctcccaggtgcccccgctgcccccagctgcggtgtctccagtcagcctcggaattc

SEQ ID NO: 14168 - DNA, 201 bp, Homo sapiens
aggcactcgagtagatctgtggggtcttccctctgtgggtgatgagtctgggtttcagcatcccgcttctccagaccacatggccactgatccgtggggtrcacagaaggacaggcagtcacatgcctgcttctttgagttctgccacctacgagctgagtaacctgggcaagtggtgaacctcatggattctttgttgcc

SEQ ID NO: 14169 - DNA, 201 bp, Homo sapiens
tgtggcggctgaggtctcatccagcacccagtcacgcctctcttgggggagagccccaccgttgggagctgagcaaaggcaatatttcggttttttttttwaaagatactgtgagttggtcatcactagacttgggtgtaagttaactgttatctcaccactttgctaccaggttataatcaaagaaagtcttagatcaaa

SEQ ID NO: 14170 - DNA, 201 bp, Homo sapiens
gcaggaaaatgattcacatcagtaggtgctccagcagatgtggagtaaaaatcaacatgtcccacaaatgggcaattaaaggttacacatagaatttatgraaagaactttggagtgtcccagggattgcaaaggtggttataaatgcatgtgctcacctcttcctgttagcacacacacctaaatacgcagaatctctca

SEQ ID NO: 14171 - DNA, 201 bp, Homo sapiens
caggcgtgagccacggcgcccggcccggattcagtttttaagtcttctctggggtccctttggccaagaaggagtctgttcagtccattgggaaacttagrattttatttttatttctcaatatttatccaaaataattgaacataaggacttgaagagagatctgtacactgatgttcatagcaacatttttcacagttg

SEQ ID NO: 14172 - DNA, 201 bp, Homo sapiens
atgactggcgacgtcaaggccttctcctcgaggctcaggatgggtgcgggactcggggtgttttccacctgtgggtgctcaggctctgattgcgtttcccrcttgtttgctgccttcctgcacatggtcctgtgttccagggctgggcactggggatgtggcaagggagtcccatggtcagctggtgagatgagtcccatg

SEQ ID NO: 14173 - DNA, 201 bp, Homo sapiens
atgaattaacatgtctgttccctcacatacttctcatttcttggtggtgttgaacaacgttccgaaggtcaggtagctccacgtttaaatggacatgaagycattgatagatagatagacatacttgaattaagactttaattgtacaaatgtgtgtatgtgtaggctacaattaaactcatatttgacactgtcaagaat

SEQ ID NO: 14174 - DNA, 201 bp, Homo sapiens
aactgttatctcaccactttgctaccaggttataatcaaagaaagtcttagatcaaagtcagccacacacacagacatttatgaaaaatagttttgcacartcagtgcatactgtctgttcttaggcttcataaaacccccttccctgtcatttgaggtgctctgcctgagccttgataaatgattcatcagaagcaaatg

SEQ ID NO: 14175 - DNA, 201 bp, Homo sapiens
tttcaagcacacattttgaaaggttacacattgcctcatggctgtatgataacttacttaaccagttttccatttgagggcacatagctggtttctagttktcagttttcatgaacagtgcttggctgacctctctgtctatggcaaaggccttgctccatctggtttgctctgaggcatccagattttcaaatgctctaa

SEQ ID NO: 14176 - DNA, 201 bp, Homo sapiens
atctcaaaacaaaacaaaaccaaccaaccaaacaaacctcacaaaactactgtctgcagttttcaagtgtgcagtatattgctattaactgaagtcaccgygatgtagacttcttgaacttattctgcctgtctaaatgaaattttgttttctttgaccatcgtctccccggtccccccgctctccagtccttggtaacca

SEQ ID NO: 14177 - DNA, 201 bp, Homo sapiens
agacggaacaaggaaaacctgaattccatcccctgtgggccatggaaagcccatattcacagtcaagtgtgaaagtggcttttgggccacccgtgccctgyctgaaagcagagcatcatgtggccacgtgtctgctcggctctgccttactaattgtgtttaacctgagctctgctacagacagactttggtctttgctcc

SEQ ID NO: 14178 - DNA, 201 bp, Homo sapiens
ctggggaaggcaggtgggggctgtaaacccaacagcagtgtgaggaatgggctcaaggcggatggagtgagcagaggtgtcccagggacagtggcgagccygaaactagacatggggagagaagagacagagacaagaataacaatggtagtaaggtggcagatcctcagtttaaaatctggccacgatgccattcactta

SEQ ID NO: 14179 - DNA, 201 bp, Homo sapiens
actggcaggtcagtggtgaacaaaggactggagaggaagtgggtccttagccaggcacccacagtcagtttgacatgggagctgcaggactggaaacttcwtagaatctagtgtgcacatgagtcacctggaggtcttgttaaaatgtgattccgactctgtagggagggggcctcaagatgtttcattataatcaactcc

SEQ ID NO: 14180 - DNA, 201 bp, Homo sapiens
gagaggaagtgggtccttagccaggcacccacagtcagtttgacatgggagctgcaggactggaaacttcttagaatctagtgtgcacatgagtcacctgraggtcttgttaaaatgtgattccgactctgtagggagggggcctcaagatgtttcattataatcaactcccagctgatgctaaggttgtgggtccctggc

SEQ ID NO: 14181 - DNA, 201 bp, Homo sapiens
tctcttcaggagttcgtgactcggtgcggggatgcaagagggattcagtgagggagacacaccccccgccccttacagtcctgttctgtgctgctgttggrtgaaactgctctgcaggtcttaggaaccagccctggaaaccccacctcccatccccccacccccggtgcaggaagggaacttagtcttcattatgtgacc

SEQ ID NO: 14182 - DNA, 201 bp, Homo sapiens
tttcattcaacaaatgttttccagcaccaactgaaggccagatgctatgggaggtgctggaaaggtattagagcctcatctcttcaggagttcgtgactcsgtgcggggatgcaagagggattcagtgagggagacacaccccccgccccttacagtcctgttctgtgctgctgttggatgaaactgctctgcaggtctta

SEQ ID NO: 14183 - DNA, 201 bp, Homo sapiens
tccgaaaactttctagtgacattggtcttcccaccgtttcccaaatcccaaagacacgaggcagatcccacccagtcccccagctttgcattactttgccsttgtgatactgggggacgttcttagaagtcacttctttccacatatatggtttttgtttcccagtcaaggtcccaaggtaggaagtttctggccatgtga

SEQ ID NO: 14184 - DNA, 201 bp, Homo sapiens
tacaacagtaagcaggcttttatgaactagtagatattaaaaaccacatcagtgccaactaaacaaattatatccaccagatacttttgagccctctggtrtgtgccaggcaatattctaggcatggagctctatcagtgggcagggggtacaggtggcagtaatatacagctgaccttatgttctcatcatggcaaagag

SEQ ID NO: 14185 - DNA, 201 bp, Homo sapiens
cctctgtaataatggagaagccttgggcctggaatttggaggggaagaaagggaggttaagaatccttatctttttgctttcttcattatgtggcttcctygatctttttgtacaacagtaagcaggcttttatgaactagtagatattaaaaaccacatcagtgccaactaaacaaattatatccaccagatacttttga

SEQ ID NO: 14186 - DNA, 201 bp, Homo sapiens
atacctttctaacgggtttacatgagggaatggagctcaaacttcacaggatattctatgcagagtaggtcttaccctagggatgctcctgctgctctcaytccacctgtcctccacccaccaaggcacagagactccagcaaatgtgaggaagagggtggggattggttgatgggcagagctggctctgtgaaagggggt

SEQ ID NO: 14187 - DNA, 201 bp, Homo sapiens
ttgattgtttcctatgtcacttgtcaagtggaacacaacacaagtgaatgtctgcacaaaatgtactttgctatacctttctaacgggtttacatgagggratggagctcaaacttcacaggatattctatgcagagtaggtcttaccctagggatgctcctgctgctctcactccacctgtcctccacccaccaaggcac

SEQ ID NO: 14188 - DNA, 201 bp, Homo sapiens
ggcctaagttggattttcataaaataaagcaaaatctgaggtcaccctgtgtgggaaaacctcatccgagactggagattgaaaataggagcaagggccaraagtagccgcctggagagcagagctaaggactgggtggtgcctgtgtgtcctttgggcacctggtgactttcaggacatcatagacgcaagggtgagggc

SEQ ID NO: 14189 - DNA, 201 bp, Homo sapiens
tcgtggctgtcctcagggtgtctgagcgcttctttggtagtctgcaggggaaaataccaacactggtaatgccccattcagatgcagtattctgtccaacraggcacaattgcctgcctgggaataggaggctgagataccattgattgtttcctatgtcacttgtcaagtggaacacaacacaagtgaatgtctgcacaa

SEQ ID NO: 14190 - DNA, 201 bp, Homo sapiens
gaagttggggggtgattaggaattgtctccagaaataccagataaacagttcaaattttagtgaagcaaaagataggcatattttggccttgtttaacttrtacctgaatgtaccaataacacttttggaagacttggacgtactcttcctcttttcccaggaaaatgggagagtattcattcctgtacatattgagaaca

SEQ ID NO: 14191 - DNA, 201 bp, Homo sapiens
tgtgttcaagagttctgtagttaccacgttatagtaatctctgaccttatttttgttaagcaaagacatctggttcaaagaccctctctcaccagcaagcrgttctcattcaatctaagcatgttgaaaaaggccctttccctaaatgggcttgggagcaatactggggtcgtggctgtcctcagggtgtctgagcgcttc

SEQ ID NO: 14192 - DNA, 201 bp, Homo sapiens
ttttgagttttttcttggcagtggaggtgtaatctctcccaaaacctgcctgcacttcacagagaataggaccgcaattgccagaagaaactgaacctttrtgggggaaaaagaaaaatacagccttccctcattctccagtcttaattgagctaactcaatttatgccaaccagttcttgctggtcatagttctagagct

SEQ ID NO: 14193 - DNA, 201 bp, Homo sapiens
ccctcctcacactcccttggctcccttcttgtctctgtacacagccccaagcacaaaacgactgctcattttcctggccatgctgtgctttgctgtctccrtgtctttgtgagcagggatctttctccttggaaggcctgttctcttcctgtcttccaggacatctgcctgtcagcagtcagccttctatatccactgcag

SEQ ID NO: 14194 - DNA, 201 bp, Homo sapiens
ctgagctgtagtcttctgaaatgatcgtttcgcttcccagccaaggcagggctcccccaaagttcattcccactcttgcagtttcacctcgggatgcttcygcagaatttcagcgcctaagcagacaaggtcaaagtaaaccgcttcgctgcttctggcgcaggggcccagagcgcgtgcagctccccagcacagaccaac

SEQ ID NO: 14195 - DNA, 201 bp, Homo sapiens
tgtctttaaggaaaagtctttcatttagctaaagaaattaaactgaattgtttagtcttttaaacaaaatgatgaatttagtgaagaaaacaaaactctcmatggctaatgtaatttatgcaaaatcatgcaattagtgatagctgtgctagactttttcttttccttaaccaaatgcgcctctaataaaaccatcgtgag

SEQ ID NO: 14196 - DNA, 201 bp, Homo sapiens
gcagcaggggaggtcagtggccccgtcctgggcagcacatacatagcacatctccagcactgcagaaagctctgctggattatgttgttttgtagtcccayccagtgaggagagtttataaagggaacacagtgctgcagaatctggaagtttccttagcaaacaaggggaacagtatcatggaacatgggcagatattga

SEQ ID NO: 14197 - DNA, 201 bp, Homo sapiens
cacttggtcttgtaacaccttacacattgccttggccactgctgcaacagctcagtacatatccacaaatcagaagtcctctctgaacaaagccatctgcrtatccatctaccttccctatgcttgccccatttaaaaatcccaggttttatatctttgctgcattttttaaggatgctaaaatcacttactacaaaaata

SEQ ID NO: 14198 - DNA, 201 bp, Homo sapiens
catctgtcacaggctcctggttcatgggccctgaaaacgtgggtggtctgtgttcataacagcgccacacgtgggactaggcagtggtgttctccacacayggtaccattcttctcacatgtagtcacttgagggactattgtgtacgtagtccaggagggtagagtagaaagcctttgcaagcagttaggttccagggat

SEQ ID NO: 14199 - DNA, 201 bp, Homo sapiens
tggggccaaccctgccagtgagcctgggcactctgtctgaggctccagtgtccagccacctgctaacttctgtcattcagcctcaccctgggtgtttttgscacatggacaaatgtgatagacacaataaataaagtagatatatattcagaataaatattatatagcaagactaaaatataaatagcaagtgcaaaacaa

SEQ ID NO: 14200 - DNA, 201 bp, Homo sapiens
tactcaactttcttcttgggtactcccaagatatggtagtggcaaaataaattgagtttaattaaaaaatctcaatagcttggaataacaacgttttagakcatggcacctttcctaaactcagttgtctaatctgctctagaggatgaatcactggctttcagagggaaaaaaacaatagagggtctggggcatacccag

SEQ ID NO: 14201 - DNA, 201 bp, Homo sapiens
tgacttgctaggaattatcagaaggtttgttcttatattactcaactttcttcttgggtactcccaagatatggtagtggcaaaataaattgagtttaatwaaaaaatctcaatagcttggaataacaacgttttagagcatggcacctttcctaaactcagttgtctaatctgctctagaggatgaatcactggctttca

SEQ ID NO: 14202 - DNA, 201 bp, Homo sapiens
agtcacttgagggactattgtgtacgtagtccaggagggtagagtagaaagcctttgcaagcagttaggttccagggatttttttttttttaaatcttgaytttgcttttccctttagatcaacctgccccttgacctatgctatgttcagaattaattgaaattggaggaatggccataaacattctttgggattaaatg

SEQ ID NO: 14203 - DNA, 201 bp, Homo sapiens
tcccgtttttcacccagggtggcaggggagaatgacttccttcagactgttataaacaaagtcatcgctgccaaagaagtcaaccacaaggggcagggtaygtattttcctattttgtttctatcagcgtgtatttgcatgcgttggggcagtgctgtctgggttggttttagtttgatgttgatcatgatggtggtgata

SEQ ID NO: 14204 - DNA, 201 bp, Homo sapiens
tcatctaccccagggcctgtgccttccttcttcctcctggtggcatttccatgttgggggcccctgcttgtccctggggtgcaggaattcttaagcacctytggcattttgctcctgccttcttgcctggagtttcactgctgtctgcaggcctttgagaacagaggcagggaggtgccagaagcccttgagagtgtggtg

SEQ ID NO: 14205 - DNA, 201 bp, Homo sapiens
tttgccatttttctggtttttttctaggtcaggtctcacacatgacttgctgggtagattcccgtgtgttttagttgtggctgctctggtgggggagcctktttctcaacatgttggttctccctggctttcgtcctgtttcatgaggatggccccttggactctcaccgtgagcccgcacaccttacaagccacgtgctt

SEQ ID NO: 14206 - DNA, 201 bp, Homo sapiens
gagaatgacttccttcagactgttataaacaaagtcatcgctgccaaagaagtcaaccacaaggggcagggtacgtattttcctattttgtttctatcagygtgtatttgcatgcgttggggcagtgctgtctgggttggttttagtttgatgttgatcatgatggtggtgataatgatggggatgacagtgatcgtggtg

SEQ ID NO: 14207 - DNA, 201 bp, Homo sapiens
ggtcacttgtctagtgaaatgcacattctgggcagtggtacatgtgctcctgtctgggtgccatccccgatacctctttggggaccgctttctattggtgsttcttccttcttcaaactctccctcccatgatctggaatttcatatcttaaaaagaaaggaaaaagaaaaaaaatatttttaaaaaaaaaaggaaagaaa

SEQ ID NO: 14208 - DNA, 201 bp, Homo sapiens
gtggctgctctggtgggggagcctgtttctcaacatgttggttctccctggctttcgtcctgtttcatgaggatggccccttggactctcaccgtgagccygcacaccttacaagccacgtgcttcagggcccacatcgagcgtcgccccttggcaggtgtgacacacatatttattgttgtttgaggagggtttagcagg

SEQ ID NO: 14209 - DNA, 201 bp, Homo sapiens
tatcttaaaaagaaaggaaaaagaaaaaaaatatttttaaaaaaaaaaggaaagaaaagaaacaccaagaagcagtcctaccctgagtaatacatctgtcyctgtctatgtggcctctccctctggtcttcgtctcccattcatcttcacccttctgcctcccagcatcggccctctccctgagcgcccccgccccctctg

SEQ ID NO: 14210 - DNA, 201 bp, Homo sapiens
gcctcccagcatcggccctctccctgagcgcccccgccccctctgcccccgtctcccaccaggagccctgtggctgcatgggcaccatctgtcccagtttyccatttcccctgttatctctgaggtctctgtccccttgtgagctctcaaagtgggcctttctcctgcctcttcggggctcttctttccttccccactctg

SEQ ID NO: 14211 - DNA, 201 bp, Homo sapiens
cttgtttttctcaggtttgtcaaagatcaggtagttgtagatatgcggtgttatttctgagggctctgttctgttccattgatctatatctctgttttggwaccagtaccatgctgttttggttactgtagccttgtagtgtagtttgaagtcaggtagtgtgatgcctccagctttgttcttttggcttaggattgattt

SEQ ID NO: 14212 - DNA, 201 bp, Homo sapiens
ggtggcattaatacagtcacgttgttgtgcggccagcaccaccatctaccttcagaactttttcatcttgcaaaactgagattctgcatccattaaacackaactccccattctccctcctgccagccccagcagccaccgttctactttgtgtctctatgaatctgactgttgtagggaccttgtattagtggaattgta

SEQ ID NO: 14213 - DNA, 201 bp, Homo sapiens
gggttgcagaggcttatgtgggaggatcaagagtgacagcaactgtctggctggaggggaaggagacagaacctgtccctgggccttcgtctcctttcccygtgccccacacctagccctggggagcccgattccctcctcacactcccttggctcccttcttgtctctgtacacagccccaagcacaaaacgactgctca

SEQ ID NO: 14214 - DNA, 201 bp, Homo sapiens
tactgtcatgagaacagcatgggaaaaacccatccccatgattcagttacctcccaccgagtccctcccacaatacatggggatgatgggagctacaattmaagatgcaatttgggtggggagacagcccaaaccatatcagggttgcagaggcttatgtgggaggatcaagagtgacagcaactgtctggctggagggga

SEQ ID NO: 14215 - DNA, 201 bp, Homo sapiens
taatttcctttgaaaaatttcctttgaaaatgagtagcatttcatcttttggaaatttatcattcttcagacttttcactgacctgtcccctcccatagcygaccccctcctgtaccccagggtttgattgatatttgcttttgtattgtaattactatttaatatccagccctcctgaggtttgcttcactgcagtcaca

SEQ ID NO: 14216 - DNA, 201 bp, Homo sapiens
ggtctcatttatatcctccttattcataatttggggtaattagcatagtggttgggctgccattcacctcttacagctaggaaaatgaggctttgcgagasgaatgcaaaaatataaacaggattaagtcattgatggcatgctcatacttcctaggagaattaagtcttttcaggtaccacagtatgtatgagtccttct

SEQ ID NO: 14217 - DNA, 201 bp, Homo sapiens
ggaaaataatccattaagtgtgaatcagtgtgaattttaaaactattattaagatcagattggttcctcgttatgagcaccataattttagtatttgttcrtgcatactgtgttatgccatgttctgtaaccttaaatccttaatgtccaaacaaataatatctatatgctaattagtgtcaaaaatcacaggtcagccaa

SEQ ID NO: 14218 - DNA, 201 bp, Homo sapiens
ttggggattggaagccaagcagacccagcaaagggaaggtgaccagtggactccacctgctcagcaaacactgacctggcttttcctttctgggaagttcygcaggccagctggcatcctccccgatggcatttcctggagtcctcacctgaactcttgggaattgccgcctagagaccaccatgcaaagcaggatgttga

SEQ ID NO: 14219 - DNA, 201 bp, Homo sapiens
ttgcagtttgaccctgtgatgggatttgtgggggaagatgcaggcagctgccagtctgaccgagacacctcccagggcccagcagtctccgcatatagtargatagctaggcaagcagtcagaggagtgccacaagggattgtatgaaattatgggttttcctagtggctttctcactgttcagacaccttggagtcaaag

SEQ ID NO: 14220 - DNA, 201 bp, Homo sapiens
acggtggttccataagggggaagaagagacaacttcacagccaccatctaaaagtaagtgacatgactagccctctattaaaatgacctctatgtctcagrccagcctggtcttgtcaccttgctggcctccactgctgttcactggatgaaagagtgaaggaatcaaattcttcatacattatgctatgaacaactaaca

SEQ ID NO: 14221 - DNA, 201 bp, Homo sapiens
ttacgtcaaaacattttaaagtttaaaataccgactggttttatcagaacatcagaggtcactttgattaaatccagtctcccaaagatgtatttgccccytttagtttcttatgaacactgtagctaatgtaagacttctttggagccttcctcaaaatctgtttgctcaagaggggctccccatacctcattttggagt

SEQ ID NO: 14222 - DNA, 201 bp, Homo sapiens
tcgagcagataaatgtggagagccctccgaggaggaacggaaagaaatctatttgcgtgagccgttatggattccgggggagagttggccgtgctcctggrtgggaaccgtgaaggagaagtcgtcgaggggtggtcgcttctcatgggttaacatcagctctaaaaggaacgtgggtttccctgcatctacaaaggccat

SEQ ID NO: 14223 - DNA, 201 bp, Homo sapiens
ggatgcaggagcttagggaggtggagaggggagccctgacctttcgtgaggatgcagcttctcctcgggctgctttggccattttgaacagactaagaggrcaggaaggcaaataatcccagaatggcaggactcacgtcctgctaccaaaccctgatgccctcctcgtgccacctgggaccaacccccgtgggatatctg

SEQ ID NO: 14224 - DNA, 201 bp, Homo sapiens
gcccattgcttctttgggttccaggtacagaatggaaaacacactgtctatgatgtaaagccttgtacagtcctgaataccaatattatttcaattatttrttataagcaagtcagcatttacttttccaaatgtcacatgaaatttcctttctcttcctaatacgattcctaagaggcctgtggcctcttctcttcctga

SEQ ID NO: 14225 - DNA, 201 bp, Homo sapiens
taaaaccccacctttaggtcatttgtttttaaagatgctgctgcacagtttaaacttcaaaacatgaagtgcaagatggtcttatcaacgcaataaagtaytggccgtgaagttagtatcattctttctgcagccccactggacacatagggcagcccgtggggaagggcatctgtctcctaatcatatacagtcaggact

SEQ ID NO: 14226 - DNA, 201 bp, Homo sapiens
atcagtaaatcactggtctcccccaccccacgcctgatgagtgttgcttttggatctgtactgatggaaatgggatgaaaatggagatgtaaacccaagaytgaacaaggccttttggaaatgttatatggtgttagattacctatgaatctactgttaagatttttgtacatttggctggcagttctttttgcttaagag

SEQ ID NO: 14227 - DNA, 201 bp, Homo sapiens
gggtcaatgtttgaccttttaatttttttgcaggaatgtggactactgatcagtaaatcactggtctcccccaccccacgcctgatgagtgttgcttttgsatctgtactgatggaaatgggatgaaaatggagatgtaaacccaagactgaacaaggccttttggaaatgttatatggtgttagattacctatgaatcta

SEQ ID NO: 14228 - DNA, 201 bp, Homo sapiens
gtatgtggctatcgagcatttgaaatgtgactgctgtgactgtgaagtttcaattgtcattgagtttgaatttcaatagccacgtgcagctagtggccacygtattggatagagcagctccagagtttcagggacagtcttgtgtggcagcctgtgtgccgggcatataggggatgcattcatcacattggacgcccacaa

SEQ ID NO: 14229 - DNA, 201 bp, Homo sapiens
gtagctgcactgtcttatgtatgtggctatcgagcatttgaaatgtgactgctgtgactgtgaagtttcaattgtcattgagtttgaatttcaatagccaygtgcagctagtggccactgtattggatagagcagctccagagtttcagggacagtcttgtgtggcagcctgtgtgccgggcatataggggatgcattcat

SEQ ID NO: 14230 - DNA, 201 bp, Homo sapiens
tgagcttggagcaaaagacaccccatgttaaaggcaggactggacttggtttgcattggggtcacgagacccatctccaacttagtagattctgtcagtawttttatgctgaaggcttccaacaagtgctgccaacggcttgctcaattcattccccccccagtctaatcccccaaatcagtcgtcaccatgccctattcg

SEQ ID NO: 14231 - DNA, 201 bp, Homo sapiens
aaaactaggacattgattttttcccccctaaaaatgacttatatcaaaggagtctgttttccctgacacttcccagtcttatttgaggataccctattggracaatcagggcaggatatctgcttggaggtaatggtcactacaatggaagtcatttagagttgaagatgcagtctgtctttctggcaaggccatgggaat

SEQ ID NO: 14232 - DNA, 201 bp, Homo sapiens
gcctcggcctcccaaagtgctgggattacagacgtgagccaccgcacctggcctgggccttcctattttgagggaatcatcccagaatgagaagaactctstgtagctgggatgtgagaagcatgtgcagagcttgagtgggtcagtacatgctaggccgatcccactgtgagcatttcacctctgctgggggacatgggc

SEQ ID NO: 14233 - DNA, 201 bp, Homo sapiens
tggtctcccttttttagacttagtgggaatctcactcacatgaaaacacaaagatacatactagaatgtacttggggagtgctttgccttcctgattatgstgaatctttttttttttttttttttttttaactaaacagcatgttttgactcatgatttatctgaaactaaaactaggacattgattttttcccccctaa

SEQ ID NO: 14234 - DNA, 201 bp, Homo sapiens
cctgagtgtctttgccaaggctgtcacactccaaatttatgacagcacatctcagtttcccaggatgtatacaacctactttctacatagttttttttttwttattttaattttactttttgtaaatgggtgcaggtttgggaacatattggcaggatgatagcaccgactctgccaagaaaatagaaatggaaatcagat

SEQ ID NO: 14235 - DNA, 201 bp, Homo sapiens
aggtaaaatctaatccacacctgaagcaggcctctggaaggcataaccactagtatcagaataagaaaaacccagaaatgatgagatggggctataagtartttgtcaaaggtcatcttttattgttttgagggagccctgataaagaatgaaaatgaatttcaagtgtgtatatgtatgtatatatgcataggtatatac

SEQ ID NO: 14236 - DNA, 201 bp, Homo sapiens
ttacattcactctgggcggccattaaaaggataattatagagattatttagtatcatagaaaaacacgaaataatgttaagtgaaacaaagcagtctacarattatactggaaaaaaatgaacaaaaacggtcatcgttgtggtattaagatagcacattcggagagatttatttttccttctgttttccaatttggggag

SEQ ID NO: 14237 - DNA, 201 bp, Homo sapiens
caccttgcaacagcacctccacacatccctgcctttgcatccagagagagacccaacacattcgacatcccaccaaaagttgtcccggtctgtctgcgtcrtcccccaaggcggaactcaggaggcagaaggctgacagtgagcattttctactgctggccctgagtaaaccgcggctagccccggggaagctgccatctg

SEQ ID NO: 14238 - DNA, 201 bp, Homo sapiens
gattttgggattttttgcaacttgctcagagtgaggaggctagtgggccacacccattgaaacagctgaatccgtttgaatcacatgccctaacccactayccctgctcaaggaactctgtaacttgaagtgatccatgataaacttgaaaacatcaaacaactgaaactcatctgagcaatgcccttgtcttgttcccac

SEQ ID NO: 14239 - DNA, 201 bp, Homo sapiens
gcagttgtgttttctagatttgatcctcatcatatccttacaaggcagccactattgataccctcatactgcagattgagaaaccgaggcacacgattttsggattttttgcaacttgctcagagtgaggaggctagtgggccacacccattgaaacagctgaatccgtttgaatcacatgccctaacccactacccctgc

SEQ ID NO: 14240 - DNA, 201 bp, Homo sapiens
catctaacctacttgcagaattcatcccactgaaatgctcgtaacaggatatgtcctttattcagcgccaactgtgtgctggttataagtgggagctttgyagatactgtatttcagtgtctaccacccctagttgatttcagacaaaattgaagctcacagaggttaacctgtctcagccataaacattctctgccgaag

SEQ ID NO: 14241 - DNA, 201 bp, Homo sapiens
gtctcatttaacatgtcaggataattttcaacaagcctagttatttctacttagtgttctaatcatagaccttaatggactttgctacaaaggagccgacrtaacgagccggcctccccaggcctgccagtcccagttcatctggggcttgctgtgtgtcagcactgtgcatggcctgtgctggggaacagttgcttggaa

SEQ ID NO: 14242 - DNA, 201 bp, Homo sapiens
tgatggcaaagtccagctcagtgcagagagaccatccacaaagacctccccacctggtccctaggctgttttcagttttggcgggggtgggtgggttgttyttgtttttgtttttttgtaattatagaagtctgcagtgttctaagaggataggtttcacaatgggaccaaaatatccccatctgaccaaacactgggttc

SEQ ID NO: 14243 - DNA, 201 bp, Homo sapiens
acataactttatagtgttccttctaatccttaaggggatctaagaggctgataagtgcccagaaggaagaattatcaataagtttattagtcttccaactytgatgattgagacttttatttgttttaagcaagatctcttatgctcaccaggacatgaaacagtggagaaatggtggtgtgctctgaatatgggctctta

SEQ ID NO: 14244 - DNA, 201 bp, Homo sapiens
accacaacctccacctcccaggttcaactgattctcctgcctcagcctcccaagtagctgggattacaagcgtgtgccaccatgcccggctagttttgtayttttagtagagatgggggtttctccatgttggtcaggctggtctcgaactcccgacctcaggtgatccggcctcctcagcctcccaaagtgctgagatta

SEQ ID NO: 14245 - DNA, 201 bp, Homo sapiens
tgagaaaactgagacctacaactttcttcttctaaaggccgttgtcttttaaaccgcatatatgtagtccataaacccttgaaatatgggtttattgaaasaagaaatgtttgatctctttacatttgttttccttgtctagtgtatgtgtgatttgggggtaaagagtcctaaattatggaaatctatactattcttaag

SEQ ID NO: 14246 - DNA, 201 bp, Homo sapiens
gtgcttacacatgctctgtaccgccttaaattctgtgcatatatttacttctttgatcttctgagcactcctataagatagatactcttgaaattcacatyttatccatgaggaaactgaggcagagagaggttagagtctgagtaaatggcagacccgggatttgaatatgtgcaccgtgacctctgagcccacacgcta

SEQ ID NO: 14247 - DNA, 201 bp, Homo sapiens
tctaacccatgaatcaagatctaaaattgcaggactcatcctggaaggttccaggtcagtgtaatccaagactattagtgcaacacagaatttcagcttcyggagataattccttttgctatgcactattctgatgtcatttcacatgtggttgactttattgcttaattcttcaattcgaaaggagcttctgatgaaagc

SEQ ID NO: 14248 - DNA, 201 bp, Homo sapiens
aggatcacctgtacatgtaaactccatgtggtctcatttaacatgtcaggataattttcaacaagcctagttatttctacttagtgttctaatcatagacyttaatggactttgctacaaaggagccgacataacgagccggcctccccaggcctgccagtcccagttcatctggggcttgctgtgtgtcagcactgtgca

SEQ ID NO: 14249 - DNA, 201 bp, Homo sapiens
gaccgtcacgtgttaacatcctgcagtgggaatgatgttcctctgtttgcaagtcagaaaaaaaggccagtgctgctggaatagatgcagcaggtgagagwggggagagatgaggacatgtgtataaaatgagaggccctttgggcattattttaaattgaatgggaagccactatagtttttcttataggtggttgaatg

SEQ ID NO: 14250 - DNA, 201 bp, Homo sapiens
tttacaaaagaaagagtttattggacttacagttctatgtggcttgggaggcctcaccatcatggcagaaggtgaagggcatgtctcacacggtggcagamaagagaagagagcttgtgcatggaaactcttctttttaaaaccctcagatcttgtgagacattcactatcaagaggaacagcacgaaagacctgccccca

SEQ ID NO: 14251 - DNA, 201 bp, Homo sapiens
tgcctcttacaacactctaaggtgggggtggtttcagtaaggtaggctttctcaacctcagcactattgacatttgggactggatagctcttggttgtggrggttgccctgtgcaggcagcataggatgtcagcagcattcctggcctctacctgctgcataaccggcagcagctcctcagttgtggcaactgaaaacgtc

SEQ ID NO: 14252 - DNA, 201 bp, Homo sapiens
ctcccagtgttggtgtgaaggctacaaagccaccctgcctccctgggccaccagcccggaaccctggtttctagatgtggtcaggagctcccactccatcstgatacccattgagagcatcatctccactaaatgtagcagtgatagttctcatcacacacggaaaccattagctgcttgtgtgtgtcatctggtgtcacc

SEQ ID NO: 14253 - DNA, 201 bp, Homo sapiens
tatttctatattatatacctacattaaatatatatggatctcatcctaatagtttaaaatatcagtggtttgtagttaactagcttttcaacactttaaayatagaaatgattcaccgtgactttgtatccttcctttaccactattttacatggtaggtgcattaatcaatgtttatggtatcactgtagggcttcaaat

SEQ ID NO: 14254 - DNA, 201 bp, Homo sapiens
tgactttattgcttaattcttcaattcgaaaggagcttctgatgaaagctcttggctctattgggattgttgaacagctcactggggagttagagctatcrgggttccttcttggcagcagataacccctgtcttcttccgggcaggagctttgaatggactgaagcggcaccttctatcattgtaaataaacctctccaa

SEQ ID NO: 14255 - DNA, 201 bp, Homo sapiens
accacgatcatacctgtgaattgccatgcactccagcctgggcaacatggcaagaccccctttcaaaaaaaaagagaagaaagaaagaattatagtcacgyactgcataaccacagactacatgctgtatttttactgtaacttttctttgtttagatacacaaatactcaccattgtgttacatttgcctgtggtattta

SEQ ID NO: 14256 - DNA, 201 bp, Homo sapiens
tcaccattgtgttacatttgcctgtggtatttattgtagtcacatggtacattacaaacatgttgtacgggtttgtagactagtaacagtaggctataccrtatggccgatgtgtgtagtaggctgtagtatctcagtttgtgtaagttcactcagcagcgttcacacgacgacaaaatcacccagtgacatatttctcag

SEQ ID NO: 14257 - DNA, 201 bp, Homo sapiens
tctttaatctttctttttctaaaataaatccatcaccatcacactgttttattttcttttcatagcattgcttttcagtttttttgaagagaccaatccaytagcttttgtagactatctcccattctggactttttttgtgctgccttgtaatatgcctttcgactggtttctttatccccctgtatgttctgcaaacca

SEQ ID NO: 14258 - DNA, 201 bp, Homo sapiens
gttacatttgcctgtggtatttattgtagtcacatggtacattacaaacatgttgtacgggtttgtagactagtaacagtaggctataccgtatggccgakgtgtgtagtaggctgtagtatctcagtttgtgtaagttcactcagcagcgttcacacgacgacaaaatcacccagtgacatatttctcagaacatatccc

SEQ ID NO: 14259 - DNA, 201 bp, Homo sapiens
gggatccggatcccaggcctggctctcccccttgcatgggaggtgaattcaggcaagtcctttctgggccttggtttatggatgtgaccctggccacctckccaggcaatagaagaaccaggaccccaaatatttgttgttctcttctgaacacatctccgtgtgcatatctgaggggcactggaaatccagcatgtccag

SEQ ID NO: 14260 - DNA, 201 bp, Homo sapiens
aacaatttatgtcaactgacattggcgccaacttggccggttttatgtgagtgccatgggcaacaccagcattgtccagaggaaactaaaagttgggatcyggatcccaggcctggctctcccccttgcatgggaggtgaattcaggcaagtcctttctgggccttggtttatggatgtgaccctggccacctctccaggc

SEQ ID NO: 14261 - DNA, 201 bp, Homo sapiens
tctcctggaacaaggcctgggcccaggagggcaggtgcaccaggatgtgggctggcttttattgtgtagctttgggtaggaccagccatgtccccaaagcrcaacaatttatgtcaactgacattggcgccaacttggccggttttatgtgagtgccatgggcaacaccagcattgtccagaggaaactaaaagttgggat

SEQ ID NO: 14262 - DNA, 201 bp, Homo sapiens
gttgtttggcccccgaagaatgtttacacgacatactcttcatttttttttcaaggcccgatctggttactgatcactaggtccttgtagaatcaaaacayttagaactaaaacagatttgctgttgagtcaggaggaaaatacatggcaagaagcagctccaatctgacaaaagcaggtgagatccttttaccaaggtta

SEQ ID NO: 14263 - DNA, 201 bp, Homo sapiens
gggtacatgggaaatgctgccaactgcctaagttgtttccaaggtagcaaggttttcccatactttgagcccctccccatttatcttctgctggagggtcrgagattgaaggagcagatgcaggactacaggacttctgcttcttggaagtgagttgcacacttgtagagtgactggtgggcacccttcattgtatctggg

SEQ ID NO: 14264 - DNA, 201 bp, Homo sapiens
ggagaggctggatagcaaacaggtgaaggtagcgcagtcctccaggtggggtggatggtgaacgttaccaccaggtaaccaaagatggttgatagcatccyccagccaaagatgaacagacagacacctctttcttctcaccagagtaattctaacaaatgagaccagcacactcaattagctctgagaatagcacagacc

SEQ ID NO: 14265 - DNA, 201 bp, Homo sapiens
tcaagtagcactttttacatttgagtttatattaattacaattaaataacattaaaaattcctttcctccatggcactaattagatttcacatgctcagargtttccatgttgggtatcacagctctgaggtattagttttcttttgtgtccttttagttgaacagctgactttgtataatactataccttctgttaacca

SEQ ID NO: 14266 - DNA, 201 bp, Homo sapiens; identical to SEQ ID NO: 2108

SEQ ID NO: 14267 - DNA, 201 bp, Homo sapiens; identical to SEQ ID NO: 2109

SEQ ID NO: 14268 - DNA, 201 bp, Homo sapiens; identical to SEQ ID NO: 2110

SEQ ID NO: 14269 - DNA, 201 bp, Homo sapiens
acctgcccgcgcggcgccggactcgcggctccgcctttcggggaggtctccgtggccgcccaggcgccacagcggggagccgcggtcgacccctccgggakgggggccagggcagcctccgcggctatcccgggagtcctgctccgacaccacctccacaggggaagccgctcggagagacgcagggacccaggcaaggga

SEQ ID NO: 14270 - DNA, 201 bp, Homo sapiens; identical to SEQ ID NO: 2112

SEQ ID NO: 14271 - DNA, 201 bp, Homo sapiens; identical to SEQ ID NO: 2113

SEQ ID NO: 14272 - DNA, 201 bp, Homo sapiens
agtctagtatgtcagatagctaaaaccatattttatcatagtttttctttttttggtgtgtgagatttgaaataaataagaatgttaattgttttcctaastctggtaggataaaggatcatagacttaattttccaaaacataagcttcattatattacttattctacgttatctatcaggatttaaaataaaaagtcat

SEQ ID NO: 14273 - DNA, 201 bp, Homo sapiens
agatgtgtagtaactaaaaaataataataataataataataataataataattactaagtggctctttctttcttgggatctgtgtagggccaaggcctartgagtcagattctgatgatctggatgatgaagactttgaatgtttagatagtgatgatgacttggactttgaaacacacgaacctggcgaagaggcttcc

SEQ ID NO: 14274 - DNA, 201 bp, Homo sapiens
aggtgcagtggcgcgatcctggcttactgcaagctccacctcctgggttcacgccattcatctgcctcagcctcctgagtacctgggacaacaggtacccrccaccacgcccagctaatttttttttttttttttttttttagtagagacggggtttcactgtgttagccaggatggtctcgatctcctgacctcgtgatc

SEQ ID NO: 14275 - DNA, 201 bp, Homo sapiens
tccctaatacctataccaaaataaattccaattggatcaaatatttgaacataaaaattgaaactatacaatttgaaaaaaaaccaagaaccttttataayttgaataggaaaggcctttctatgcatgacttgaaaccagaagctataaagggaagactgatgaatttgattatgcaaaaattaagcatttctgcacggg

SEQ ID NO: 14276 - DNA, 201 bp, Homo sapiens
tttttctgactgcaagaaatcccttgtgactgcctcaccactctgggccagtttccttgaaagtctgaaaaagaatgattactttaaggtaggacttgcartatatttgcttttaagtattcaatccagggaaaatcaagccagcgacttaaagtcctatagtccatatttaaatgtatgacataattatggaagctagac

SEQ ID NO: 14277 - DNA, 201 bp, Homo sapiens
aactcgtcatttatattagatatatctcctaatgctgtccctcccccctccccccaccccacaacaggccccggtgtgtgatgttcgccttcctgtgtccrtgtgttctcattgttcaattccccacctatgagtgagaacatgcggtgtttggttttttgtccttgcaatagtttgctgagagtgatggtttccagcttc

SEQ ID NO: 14278 - DNA, 201 bp, Homo sapiens
ggtagtgtcttccaagaggtatagaaaggttcaaacttggaaccttcactttgaataatctttttaaaggaaatatccaagaagtggaaaagtcccgaagmatatgatgatgataaagatggcacagcaatacgaaaagtactaatgatattatagtatatatatggtatttttttttttttgagatggagttttgctctt

SEQ ID NO: 14279 - DNA, 201 bp, Homo sapiens
caagactccgtctcaaaaaaaaaacaaaacaaaaaaaactgttacttgtgtatcaaatatatcattattagtgttgatgctcttgaacctgatgaaagatmtaaatttatatttggtattctctctttaagaaagcagggataagggaagatatgttcttgtttattttttaagctttagttcttaaaagaacaggcttta

SEQ ID NO: 14280 - DNA, 201 bp, Homo sapiens
ggtgtatatgtgccacattttcttaatccagtctatcattgttggacatttgggttggttccaagtctttgctattgtgaatagtgccacagtgaacataygtgtgcatgtgtctttatagcagcatgatttataatcctttgggcatatacccagtaatgggatggctgggtcaaatggtatttctagttctagatccct

SEQ ID NO: 14281 - DNA, 201 bp, Homo sapiens
ggatttttaaaacttaaactacaacttttcttgctgtgcctccttagaaattctatctttggtagctttcctaagaatggcaccactttagaaaagtttcraagagttgtatttagaataaattaattgtctttgtcctttaatattgcagagaaccttctgaggctccaatcacttttgatgcagattcttttcttaatt

SEQ ID NO: 14282 - DNA, 201 bp, Homo sapiens; identical to SEQ ID NO: 2120

SEQ ID NO: 14283 - DNA, 201 bp, Homo sapiens
ggtctcggactcctgacctcaggtgatccatccgccttggcctcccaaagtgctgggattacaggcgtgagccaccgtgcccagctattactgttgttgttattgttgttgtatagggtcttgctttgtcacgcaagccagtgttgtggtaggatcatagctcactgcagcctcgatctcctaggctcaagtgatcctcct

SEQ ID NO: 14284 - DNA, 201 bp, Homo sapiens
gtctcggactcctgacctcaggtgatccatccgccttggcctcccaaagtgctgggattacaggcgtgagccaccgtgcccagctattactgttgttgttattgttgttgtatagggtcttgctttgtcacgcaagccagtgttgtggtaggatcatagctcactgcagcctcgatctcctaggctcaagtgatcctcctg

SEQ ID NO: 14285 - DNA, 201 bp, Homo sapiens
cattctaattattttgagatgtgtagtaactaaaaaataataataataataataataataataataattactaagtggctctttctttcttgggatctgtrtagggccaaggcctaatgagtcagattctgatgatctggatgatgaagactttgaatgtttagatagtgatgatgacttggactttgaaacacacgaacc

SEQ ID NO: 14286 - DNA, 201 bp, Homo sapiens
aagcaagtattttttctgaatgtgctgtgattatattcaatgcttgtggaattgttgggggtgtggtgggtaaccaagattctgctccagattttcttggwgcagggataatacacaattccccatggcagaaaaatacctgcaaacggtacatttcaattttcacagtgggcactggcaaactgcaggtacatatgaatg

SEQ ID NO: 14287 - DNA, 201 bp, Homo sapiens
tcttttcttaattattttgataagattttaggtaagtagtggtgtgatgttgactttcattttgaaactgttagtagtatggctgttgctagagcattggkttatgagatatctcagaagccaaaatgtttgctttctcttcctggtttgagttgctttcaaccatgaattactacccatgaataattttgtagaggctgc

SEQ ID NO: 14288 - DNA, 201 bp, Homo sapiens
ctcaccagatcagctggaccagctgctgcaggaagctgttggcaaaaaagaatccgagtctgtttccaaggaggagaaggagcagaactatgacttaactsaagtctcagagagcatgaaagctttcatatccaaagtctcaacccacaagggagcagagctgcctcggtaatttgtgttaaagtataaatatataaatag

SEQ ID NO: 14289 - DNA, 201 bp, Homo sapiens
tttgcctactgcgtatatgcaatgacactgttttccttggtatgttcccagctatgccctgcaatgtttgggttctcaggacctgctcctctgctaggcaygatggctttggcttgccagctggcctttgaagtttaagcagcagacatatacccttaagtagtctggtggggaactggtcacattacagttctatcattt

SEQ ID NO: 14290 - DNA, 201 bp, Homo sapiens
tttcttctttttcagatgaccagtggttagatctctcaccagatcagctggaccagctgctgcaggaagctgttggcaaaaaagaatccgagtctgtttcyaaggaggagaaggagcagaactatgacttaactgaagtctcagagagcatgaaagctttcatatccaaagtctcaacccacaagggagcagagctgcctc

SEQ ID NO: 14291 - DNA, 201 bp, Homo sapiens
taactgtacattgattttcgtgtgttgaaccatccttgcatcccaggaataaatctcgcttggtcgtggtgaataatctatttaatgtgttgttgaattcwgattgctgatattttgttaaggatttctgcattgatactcatcagggatattgatctacagctttctcatattgtctttgtctggctttggtattagggt

SEQ ID NO: 14292 - DNA, 201 bp, Homo sapiens
gcagtattatgctttcttctttttcagatgaccagtggttagatctctcaccagatcagctggaccagctgctgcaggaagctgttggcaaaaaagaatcygagtctgtttccaaggaggagaaggagcagaactatgacttaactgaagtctcagagagcatgaaagctttcatatccaaagtctcaacccacaagggag

SEQ ID NO: 14293 - DNA, 201 bp, Homo sapiens
ttttaaatatacaaaatactatacaggctgggcgcagtggctcacacctgtaatgccagcattttgggaggccaaggcgggtggatcacgaggtcaggagytcaagaccagcctggccaatatggtgaaaccctgtctctactaaaaattcaaaaattagctgggcgtgttggcacgcccctgtaatcccagctgctcggg

SEQ ID NO: 14294 - DNA, 201 bp, Homo sapiens
aaagaaagataatggaaggcttcagggaggaggtatttgagttaagtcttaaagaatgaggattttttttctttttatggagtctcttttttttttgagamggagtcttgctctgtgcccaggttggaggtgcagtggcgcgatcctggcttactgcaagctccacctcctgggttcacgccattcatctgcctcagcctc

SEQ ID NO: 14295 - DNA, 201 bp, Homo sapiens
ctggcttactgcaagctccacctcctgggttcacgccattcatctgcctcagcctcctgagtacctgggacaacaggtacccaccaccacgcccagctaatttttttttttttttttttttttagtagagacggggtttcactgtgttagccaggatggtctcgatctcctgacctcgtgatccgcccgccttggcctccc

SEQ ID NO: 14296 - DNA, 201 bp, Homo sapiens
tgggttcacgccattcatctgcctcagcctcctgagtacctgggacaacaggtacccaccaccacgcccagctaatttttttttttttttttttttttagkagagacggggtttcactgtgttagccaggatggtctcgatctcctgacctcgtgatccgcccgccttggcctcccaaagtgctgggattacaggcgtgag

SEQ ID NO: 14297 - DNA, 201 bp, Homo sapiens
tgctgcaggaagctgttggcaaaaaagaatccgagtctgtttccaaggaggagaaggagcagaactatgacttaactgaagtctcagagagcatgaaagcyttcatatccaaagtctcaacccacaagggagcagagctgcctcggtaatttgtgttaaagtataaatatataaatagctagaacccaaatgttgaagtca

SEQ ID NO: 14298 - DNA, 201 bp, Homo sapiens
tttagatagtgatgatgacttggactttgaaacacacgaacctggcgaagaggcttccctgaaaggaacacttgataatctcaagtcatacatggcccagatggaccaggaactagcacacacctgcatcagcaaaagtttcaccactaggaaccaagtggtatgtgtgtttttaacctctttctctttctgagtctagta

SEQ ID NO: 14299 - DNA, 201 bp, Homo sapiens
aattgtgcaaccatccctaccatctaattctagaatattagaaaccccatactcactaatagtctctcattcccttctactcccagcccctagaaaccacwagtctactttctgtctctatggatttgcctattttggatatttcatacctgatactgtacttaattgttttaattaattaattggtttgatatttaatat

SEQ ID NO: 14300 - DNA, 201 bp, Homo sapiens
ttccctctatgaataaggaacctgtatcccagactaccgataacaattcagatgaggaagattctggtacgggagaatctgttatggcaccagtagatgtwgacctgaacctggtttcaaatatattggaatcctatagctcccaagctggactggcaggacctgcttccaatcttttacaaagcatgggagtgcagctgc

SEQ ID NO: 14301 - DNA, 201 bp, Homo sapiens
aaaacaaacaaaaatcaaagaaagactgaactacacgaaaccaaaaggttccttaattagcaatgaaagtgatatttttcttaccctctgatgcgcctatrcacagcagctcgtatagattctgaagcaagtattttttctgaatgtgctgtgattatattcaatgcttgtggaattgttgggggtgtggtgggtaaccaa

SEQ ID NO: 14302 - DNA, 201 bp, Homo sapiens; identical to SEQ ID NO: 2115

SEQ ID NO: 14303 - DNA, 201 bp, Homo sapiens
tgggagaccgagatgggtgaatcacctgaggtcaggagtttgagaccaacctggccaacatggtgaaaccccatctctactacaaatacaaaaaattagcyggatgaggtggtgggcacctgtaatcccagctactcaaattaaaaataaataaatagccaggcacagtggctaatgcctgtaatcccagctacttgctga

SEQ ID NO: 14304 - DNA, 201 bp, Homo sapiens; identical to SEQ ID NO: 2116

SEQ ID NO: 14305 - DNA, 201 bp, Homo sapiens
tcacagcacattcagaaaaaatacttgcttcagaatctatacgagctgctgtgaataggcgcatcagagggtaagaaaaatatcactttcattgctaattmaggaaccttttggtttcgtgtagttcagtctttctttgatttttgtttgttttccttaaagctctgttggagttgatcagtctttctttgactataaaat

SEQ ID NO: 14306 - DNA, 201 bp, Homo sapiens
  misc_feature (1)...(201): n = A,T,C or G, or insertion/deletion polymorphism (see Tables 1-2)
gacacagtggagtactgcctgttcctgataccagatgagtcaagggactcagataaacataaagagattcttcagaagtacattgagagaataatcactcngtttgcacctatgctggtcccctacatctggcagaatcagcctttcaatcttaaatataaacctgggaaaggtaaggctcttttacttgtttggattagt

SEQ ID NO: 14307 - DNA, 201 bp, Homo sapiens
aatctcagctactttggaggctgaggcaaggagaatcgcttgaacccgggaggcggaggttgcagtgagctgagatcacgccactgcactccagcctgggygacagtaggaaactccatctcaaaaaaaaaaaaaaaaaaaaaagtagaaacctaatggagcacaaacaaggtgctcaggttttttctgttgttctgggtc

SEQ ID NO: 14308 - DNA, 201 bp, Homo sapiens
aaactcctgacctccagtgatctgcctgtctcggcctcccaaagtgataggattacatgcatgaaccactgtgcccggcctaactaaattttagaaaacartgttcatagaaccatctaaaagagttcagatgttacttctgcattgttctatgtggtttatattttggaactttaaacatagttttcaaagaagaatgga

SEQ ID NO: 14309 - DNA, 201 bp, Homo sapiens
accatttgtagaagggatttttgtgaagtagactgactgtgtgtattagtctttttctgtgggtaacattctaattattttgagatgtgtagtaactaaawaataataataataataataataataataataattactaagtggctctttctttcttgggatctgtgtagggccaaggcctaatgagtcagattctgatga

SEQ ID NO: 14310 - DNA, 201 bp, Homo sapiens; identical to SEQ ID NO: 2119

SEQ ID NO: 14311 - DNA, 201 bp, Homo sapiens
agctttcctaagaatggcaccactttagaaaagtttcaaagagttgtatttagaataaattaattgtctttgtcctttaatattgcagagaaccttctgargctccaatcacttttgatgcagattcttttcttaattattttgataagattttaggtaagtagtggtgtgatgttgactttcattttgaaactgttagta

SEQ ID NO: 14312 - DNA, 201 bp, Homo sapiens
ccatgcaacctaatgatacattagcccataattttcttttccctctatgaataaggaacctgtatcccagactaccgataacaattcagatgaggaagatkctggtacgggagaatctgttatggcaccagtagatgtagacctgaacctggtttcaaatatattggaatcctatagctcccaagctggactggcaggacc

SEQ ID NO: 14313 - DNA, 201 bp, Homo sapiens
taatacctcacaaacagaggcagccaaaacaaaaatggacaaatgggagcacatcaagttaaaaagcttctgcacagcaaaggaaacaatcaacaaagtgragagagaacccacagaatgggagaaaatatttgcaaactacccatctgacaagggattaataaccaaaatatataaggagttcaaacaactctctaggaa

SEQ ID NO: 14314 - DNA, 201 bp, Homo sapiens
gatcatttggttgtcttgttttaccctgagctcctcaggagtaggcttcttcttcaggattgcaacccctgctccccagtacttagagcaatcagtcaatkaatgtgtattcagttgaatgattatgtgcattttatttgcagtaacaaatttatctggttacatggttgcttttctcttgtttttaggaggtgttcctgc

SEQ ID NO: 14315 - DNA, 201 bp, Homo sapiens
gtgcagtcactatggagaacagttttggagattcctcaagaaactaaaaatagagctactatatgatccagcagtcccactgttgggtatttacccaaaaraaaggaaatcagtatatcaaagagatatctgcactcccatgtttatcgcagcactattctcagtagccaagatttggaagcaacctaagtgtccatcaac

SEQ ID NO: 14316 - DNA, 201 bp, Homo sapiens
ctgcacactcctgttctagagttcattatcttgttttgagatcatttggttgtcttgttttaccctgagctcctcaggagtaggcttcttcttcaggattrcaacccctgctccccagtacttagagcaatcagtcaatgaatgtgtattcagttgaatgattatgtgcattttatttgcagtaacaaatttatctggtta

SEQ ID NO: 14317 - DNA, 201 bp, Homo sapiens
agagttcagatgttacttctgcattgttctatgtggtttatattttggaactttaaacatagttttcaaagaagaatggaagaaaccatgaagcttgctamgatggaagacacagtggagtactgcctgttcctgataccagatgagtcaagggactcagataaacataaagagattcttcagaagtacattgagagaata

SEQ ID NO: 14318 - DNA, 201 bp, Homo sapiens
acgcttttccacaacattaaatgcacacatatctgccagcattaccatttgtagaagggatttttgtgaagtagactgactgtgtgtattagtctttttcygtgggtaacattctaattattttgagatgtgtagtaactaaaaaataataataataataataataataataataattactaagtggctctttctttcttg

SEQ ID NO: 14319 - DNA, 201 bp, Homo sapiens
ctatctttggtagctttcctaagaatggcaccactttagaaaagtttcaaagagttgtatttagaataaattaattgtctttgtcctttaatattgcagaraaccttctgaggctccaatcacttttgatgcagattcttttcttaattattttgataagattttaggtaagtagtggtgtgatgttgactttcattttga

SEQ ID NO: 14320 - DNA, 201 bp, Homo sapiens
tggtctcggactcctgacctcaggtgatccatccgccttggcctcccaaagtgctgggattacaggcgtgagccaccgtgcccagctattactgttgttgttattgttgttgtatagggtcttgctttgtcacgcaagccagtgttgtggtaggatcatagctcactgcagcctcgatctcctaggctcaagtgatcctcc

SEQ ID NO: 14321 - DNA, 201 bp, Homo sapiens
tggcaagtagatgagtttattaggacttacagacaagacactcctgggcagcatcaggacagctctagaaatccaccccacctcccatatttaagttgctwgtaagctaattttttggctctttgcctactgcgtatatgcaatgacactgttttccttggtatgttcccagctatgccctgcaatgtttgggttctcagg

SEQ ID NO: 14322 - DNA, 201 bp, Homo sapiens
gagcctagactggggaaagagcactagactccaagtcaagcccctgctgcttggtcgcttctttttctgtactctgggttttctcatatgtacagtgaggyattagcctgagtgatcatagagtcccttccagttctgacaccaaattctgcatgatgacgtgtgtttggcgttatggggtggatgggtaaaattactgtc

SEQ ID NO: 14323 - DNA, 201 bp, Homo sapiens
actttagttactacactatgccataatgtatctaagtatctatactaaatagtttcaggcatctggctttaatcatggttccttttgctgttactcaggaytccttattttggtgatgtgtttggtaggctgccttgtttcatatagccattttggtgaggatctgagtggctctgcccagcttataaagataaataattg

SEQ ID NO: 14324 - DNA, 201 bp, Homo sapiens
cttgggaataagtttatatttttcataaaattcaaaaagtgttataattgtccaaatgcccatgtatccagtcatctagttctagagtgtggctcaatggraaaaaagtaatgtgttataataagatacgggaaaaaaggaacttagtaacaaaaattctacctatctcatctaggctcatggatttgagatcttatgctc

SEQ ID NO: 14325 - DNA, 201 bp, Homo sapiens
tagacagaacctccagactgggcagaggttctactcacaaaaataaggaatgagggcaatcttttcttctctcttttttttttttgtttgagacagagtcytgctctatcgcccaggctggagtgcagtggtgcaatcttggctcactgcgacctccgcctcccaggttcaagttagtctcctgcctcagcctccggagta

SEQ ID NO: 14326 - DNA, 201 bp, Homo sapiens
tttgaattaatatgtggtgggttctgacattattcttccataagaccatgtgggtttccatggtggctatcaataaaactccttaggaaaacttggacttygcatttgcttctggtattatagagggaagaaaggctgaaattgtgggtcatccatgtgcctgggctggaataggttcatgctctctaggaggtatagagt

SEQ ID NO: 14327 - DNA, 201 bp, Homo sapiens
atagtccttgttttttaaaagtcaaataacatagagaatgtgaaaatccctcttcattctcagcaaactaacacaggaacagaaaaccaaacatcgcatgytctcactcataagtggaagttgaacaacgagaatacatggacacagggaggggaacaacacacacccaggcctgtcacggggtagggggcaaggggaggg

SEQ ID NO: 14328 - DNA, 201 bp, Homo sapiens
accaaagtgatgtctgagctcttcttacatactccatcagacactggagtctcctttcaggccatcagcagcatggcggacttctgggatgtgagtataaratcttttctacccctcccctctctttctcaatggcctgaggccacaggtcagacaacggatcagaccttatgctgggaaatcaaatcagtcagggatcag

SEQ ID NO: 14329 - DNA, 201 bp, Homo sapiens
catatttctcttattactgaaaacgggtaagataaatatcactgaattctttccccagtaaggaatattaataattaacagccctgggaaaagaatgcatwcccggggggggggcctctaaaatggctgctctgggggtgtctgccttatgcagctgcagataacagatgaaacacgccctggccacctgcagtgccccca

SEQ ID NO: 14330 - DNA, 201 bp, Homo sapiens
aacagctccctaagtgagagggacatgttcccctctctcagcccttgggaaaccctgtctctcacatctcctctcctcctcacctgtcatctgagccctgygttttttttttttagtgtactatattctgctcctctcttgtcttttgtctttatgacctgttctgtggaaacccatgccttttgtcttctattcaaatat

SEQ ID NO: 14331 - DNA, 201 bp, Homo sapiens
aagcatgggtgtgggtacagtagccagattcagccaaggatgaaggtgatgggcaaggaagggcaggggtggaaaggggctaaagtccagagacagatggrtggggatgactgggaggaacactgccactgagcatcccaggcatctctcccatgccccttaggactttggggaacaaccctgactgagaacacagctgag

SEQ ID NO: 14332 - DNA, 201 bp, Homo sapiens
aaggggtaagggaagtctcctttattttatttttttattttatttattattattattttttgagatggaattttactcttgttggccaggctggagtgcartggcacgatctcggctcactgcaacctccgcctcctgagttcaagtgattctcctgcctcagcctcccaagtagctgggattacaggcatgtgccaccat

SEQ ID NO: 14333 - DNA, 201 bp, Homo sapiens
gcaccaccaccctgaccctattgtctccagagtctgggagggaaggggaatagcaagaactaggacctgagccttggtcctgagatcccagtagagtaggwgatagaacaggagctgatggcttcccagagttatctcctcccctctaacctctgacttcctgagcaggtggccctcaacactgagattgagaaactaggc

SEQ ID NO: 14334 - DNA, 201 bp, Homo sapiens
accatacccagctaattttgtatttttagtacagatggggtttctccatattggtcaggctggtctcgaactcctgacctcaggtgatccacccacctcgkcctcccaaagtgctggaattacaggcgtgagcccactcataagggctacatactcactatctaatcccctgccaaaggccccacctcctaatactatcac

SEQ ID NO: 14335 - DNA, 201 bp, Homo sapiens
caaattctacttttaaaatgtttgatgtgggccgggcgcggtggctcatgcctgtaatcccagcactttgggaggccgaggcgggcggatcacctgaggtygggggttcgagaccaatatggagaaaccccgtctctactaaaaatataaaattagccgggcgtcgtgctgcatgcctgtaatcccagctactcgggaggc

SEQ ID NO: 14336 - DNA, 201 bp, Homo sapiens
agtacagatggggtttctccatattggtcaggctggtctcgaactcctgacctcaggtgatccacccacctcgtcctcccaaagtgctggaattacaggcrtgagcccactcataagggctacatactcactatctaatcccctgccaaaggccccacctcctaatactatcacattgggggttacaattttaacggatga

SEQ ID NO: 14337 - DNA, 201 bp, Homo sapiens
tttgaggatttcaccaacaccttaagggagtgagcaaccagagacccagccttctctaataacagtctcttaagtcctcaaccctcaaccatacttcattkgcttataagcctttggttttagtttaggggcctctgatcttgacttgcaggcttcagatctttgcccgtaggtctccgctcctgaccttcagaactgtgc

SEQ ID NO: 14338 - DNA, 201 bp, Homo sapiens
gctctagctatagacacaaactgagaaattttgatctctaagttgagagaagcaagtgaaaagataggagggcgactgtgggaagatagagtcaaagaacygtaaataataataaaattggaccaaacagatgctattaaacttgtaggtaatgacagcaactttgtatttggtttattacttctttcaaaagttgcacaa

SEQ ID NO: 14339 - DNA, 201 bp, Homo sapiens
ttgccaaaatctgagtcacaggcttcgttcagtaattacagagtccttgagcagacaggggtttagagctcatctaattttaggatgcagaatacgtggartcctttctctgtgatccttcccatggtgctctgtcaggtggccaaccagcccaacctggggagtgtcagcggggctgtcactgtttcatgaggcaaccca

SEQ ID NO: 14340 - DNA, 201 bp, Homo sapiens
catggctcctggttcccgtctcttgtgcatgagacccttccctaaactcctaccctgtggtgggggtggagaggagaggaagtgggaggagccgtcccaghgaaggctccactggaggtcatctccccctccccctataggctggtggtggagtttccagctacaggaggtgccatcccatcctggcaaatccgcacagtc

SEQ ID NO: 14341 - DNA, 201 bp, Homo sapiens
ctaatttcccaagaagaaactggccatgtgtcataggttctctagaaccagaatcttctgaacctaagccctaaaaagcttaataatgctcatagacttcrttactgaagcagatgtgagtgaatctagttctctcagttgtagtctctgtagacacactgatatgaaatgcacggtttcaacaaccttcagtgtataccc

SEQ ID NO: 14342 - DNA, 201 bp, Homo sapiens
ctcctggttcccgtctcttgtgcatgagacccttccctaaactcctaccctgtggtgggggtggagaggagaggaagtgggaggagccgtcccagcgaagrctccactggaggtcatctccccctccccctataggctggtggtggagtttccagctacaggaggtgccatcccatcctggcaaatccgcacagtcaagct

SEQ ID NO: 14343 - DNA, 201 bp, Homo sapiens
agcttggggacatggagaaaggtactggacacaagataatcaggagatgccacttgattaccacagttgcaatttcttgagcaagtttaaacatcataagratgcagagaactttttgagaacatttctcaagccgtgttgcataagctgtgctcctggggccaatacgggttgatccacacacttggggaatgcttaacc

SEQ ID NO: 14344 - DNA, 201 bp, Homo sapiens
gtttaaacatcataagaatgcagagaactttttgagaacatttctcaagccgtgttgcataagctgtgctcctggggccaatacgggttgatccacacacwtggggaatgcttaaccctaagcaggagaaagcaatcggattttgcccaggtaggtgaccaaaggtgaataaagcagtccactggtggccttgaacaatca

SEQ ID NO: 14345 - DNA, 201 bp, Homo sapiens
tggtggcatatgcctgtaatcccagctacttgggaggctgaggcaggagaatcacttgaatccaggaggcggagtgttgcgggaagtcagggaccccgaayggagggacctgctgaagccgtgacagaagaacataaattgtgaagatttcatggacatttatcacttccccaatcaatacccttataatttcctatgcct

SEQ ID NO: 14346 - DNA, 201 bp, Homo sapiens
accccgaatggagggacctgctgaagccgtgacagaagaacataaattgtgaagatttcatggacatttatcacttccccaatcaatacccttataatttyctatgcctgtctttactttaatctcttaatcccgtcatctttgtaaactgaggatgtatgttgcctcaggaccctgtgatgattgcgttaactgcacaaa

SEQ ID NO: 14347 - DNA, 201 bp, Homo sapiens
ctttgaaaactatgaaataaggtacacaggtaggggattataaggatattgacaattatgttattgggtggtggcagcaggattgctgagattttaagttyagacagaacctccagactgggcagaggttctactcacaaaaataaggaatgagggcaatcttttcttctctcttttttttttttgtttgagacagagtct

SEQ ID NO: 14348 - DNA, 201 bp, Homo sapiens
ttaacaaaagatcaaagttaatctcactagtaatgagatgaacaggcaatgtgtagttcctgatatcatgcactgagaaagacacagtatcacttctatgrtatccctcccaaaaatgcataaccgaatttaaaaataagaaaacattagactaacttaaattgaaggacaatctgttaaataaatgacttatacttttag

SEQ ID NO: 14349 - DNA, 201 bp, Homo sapiens
ctcttcttacatactccatcagacactggagtctcctttcaggccatcagcagcatggcggacttctgggatgtgagtataagatcttttctacccctccyctctctttctcaatggcctgaggccacaggtcagacaacggatcagaccttatgctgggaaatcaaatcagtcagggatcagactgagtcaaagggccag

SEQ ID NO: 14350 - DNA, 201 bp, Homo sapiens
caggtgcgtgccaccatgcccagctaatttttgtatcattctcccttcttcaatatgtgtctcattttctttgtctggcttggcaactcctgtggcctccrtaggcccttggcatggacttttcaatgcttttcccttttccttcttcatcccttggttcaacatggtccttccagatattcaagtacatcagcttcaaca

SEQ ID NO: 14351 - DNA, 201 bp, Homo sapiens
gagaatcgcttaaacccaggagcagaggttgcagtgagccaagatcgtgccactacactccagcctgggggacagagcaagactctgtctctctgtctccaaaaaaaaaaaagagtggaaaaccactcccttctgtttggaaagatagtttggtgggcttcacgtagttattatactatatccgatgcatgtttctttaga

SEQ ID NO: 14352 - DNA, 201 bp, Homo sapiens
gacaacctttcaactgtttgaatgaatatagcttgcccttggtcatctgttctctaggttaaataacttctattttatcatggtacttttcttaaactagtcattcataatactatggttttcagagatggtattatgtagggattgaaggcatgggctccaaatttgcacaggtttgggtcaaacactgtgcactgccat

SEQ ID NO: 14353 - DNA, 201 bp, Homo sapiens
acaacctttcaactgtttgaatgaatatagcttgcccttggtcatctgttctctaggttaaataacttctattttatcatggtacttttcttaaactagtcattcataatactatggttttcagagatggtattatgtagggattgaaggcatgggctccaaatttgcacaggtttgggtcaaacactgtgcactgccatt

SEQ ID NO: 14354 - DNA, 201 bp, Homo sapiens
ggggacatagagagcctgcagggtggagttttggtcctagtatgtccctcactcaggattgataagtttctcaaatcaaggatggagagtgagtggggggrccgatgtctggatcttctgagagatggttaatgtagtacagccagcatggtcagtttgcaggtttgcagagtataagggaacctgcagactccctcagta

SEQ ID NO: 14355 - DNA, 201 bp, Homo sapiens
caacctttcaactgtttgaatgaatatagcttgcccttggtcatctgttctctaggttaaataacttctattttatcatggtacttttcttaaactagtcattcataatactatggttttcagagatggtattatgtagggattgaaggcatgggctccaaatttgcacaggtttgggtcaaacactgtgcactgccattc

SEQ ID NO: 14356 - DNA, 201 bp, Homo sapiens
aacctttcaactgtttgaatgaatatagcttgcccttggtcatctgttctctaggttaaataacttctattttatcatggtacttttcttaaactagtcattcataatactatggttttcagagatggtattatgtagggattgaaggcatgggctccaaatttgcacaggtttgggtcaaacactgtgcactgccattca

SEQ ID NO: 14357 - DNA, 201 bp, Homo sapiens
ttcaactgtttgaatgaatatagcttgcccttggtcatctgttctctaggttaaataacttctattttatcatggtacttttcttaaactagtcattcatratactatggttttcagagatggtattatgtagggattgaaggcatgggctccaaatttgcacaggtttgggtcaaacactgtgcactgccattcaccatc

SEQ ID NO: 14358 - DNA, 201 bp, Homo sapiens
acatagagaatgtgaaaatccctcttcattctcagcaaactaacacaggaacagaaaaccaaacatcgcatgttctcactcataagtggaagttgaacaaygagaatacatggacacagggaggggaacaacacacacccaggcctgtcacggggtagggggcaaggggagggagaggattaggacaaatatctaatgcgt

SEQ ID NO: 14359 - DNA, 201 bp, Homo sapiens
ggacgctgagagtctgcaccatctccagcacggggcctctccagccccaacccaagaagcctgaagatgaaccccaggagacggcatacaggacccaggtrtccagctgctgcctccatatctgtcaaggcatcagaggtaccagatagggggacagttctcctgggatattagaatcaggaggagtcaccaaaagctttt

SEQ ID NO: 14360 - DNA, 201 bp, Homo sapiens
ctactcaactacttattgagttgcctaaaaggtattatattcccagttttacagatgagaaagctgagactcagagcccaagtctatactgtaagtggcaragctgggatttgaacctagatctgtctggctgcagtgctcatgctcattctgctacatcaagttcattctgggacacgtcttcctcaatagaacttttta

SEQ ID NO: 14361 - DNA, 201 bp, Homo sapiens
ttcaagtacatcagcttcaacaaaaccatgacccagctctcctccacgctggcccgctgtgccaaggacatcctgggcttcgccgtcatgttcttcattgktttcttcgcctatgcccaactcggctacctgcttttcgggacccaagtggaaaactttagcactttcatcaagtgcatgtgtgtgtcctgtccccttcac

SEQ ID NO: 14362 - DNA, 201 bp, Homo sapiens
tctgaagaagaggtgacctttcggtgtcactttggggtgtatgaattgcccatggtagtgctgcatgacccagaacacagaggccagctgagcggtctacyggttgtgggagcctggcatggtcatcacctggggatccagagaggtatgtgggagctggtttgagggaggacatggatgtgatgatgccctagactaccc

SEQ ID NO: 14363 - DNA, 201 bp, Homo sapiens
tgtcgacctcagggagctgatgggaagagcaagcatgggtgtgggtacagtagccagattcagccaaggatgaaggtgatgggcaaggaagggcaggggtkgaaaggggctaaagtccagagacagatgggtggggatgactgggaggaacactgccactgagcatcccaggcatctctcccatgccccttaggactttgg

SEQ ID NO: 14364 - DNA, 201 bp, Homo sapiens
tgttggtatatattgtgttcctggtggacatctgtctacgtgagtagcatctgtgtttgtgtacatctgtctgtgagaaacatctatgtgtgcactatatrtataaacattcctgtgggcaacatctgtggagcgagcatctatctgtgtaagcaggctatatccgggaactttagataacaatattccaatcccatctat

SEQ ID NO: 14365 - DNA, 201 bp, Homo sapiens
ggactggaccgctaggcgcaggactgcagggccggccgggtgggcggggcacacccagtgcgcatgcgcagcaccccggcccggaaacagcgcggggtccrctatggcggcggcagccgagggcgtactggcgacccggagtgatgagcccgcccgaggtacccggaatggatggggaggaagcgtccggtggggggcctg

SEQ ID NO: 14366 - DNA, 201 bp, Homo sapiens
acatggcgaaaccctgtctctactaaaaatacaaaaattagctgggtggcaggtgcctgtaatcccagctactcaggaggctgaggcaggagaatcgcttraacccaggagcagaggttgcagtgagccaagatcgtgccactacactccagcctgggggacagagcaagactctgtctctctgtctccaaaaaaaaaaaa

SEQ ID NO: 14367 - DNA, 201 bp, Homo sapiens
ccaagtcctgtggaattgcactcttaataaagaccctgaaatccttagactacctgaaaatgtgccatttaactgccttgggccttgagaattaaagtccrcacccacaaagtgccggccccacaagaactttttatgaaagagaattaggaggccttcacattctgatgattcctacgacatctagtaagataatactaa

SEQ ID NO: 14368 - DNA, 201 bp, Homo sapiens
tttctccaagggcaaaaagaatgctttaggtattacaatggcttttgggccactgaagagtcacggtacataagcaaatgtagagtctgtctgcagtatcrgaattgggagtgattaggaagaaaatgtctaaagagacttttggggagacggataatgcaaaaaaggttaagaaacactgaaccagatccacttaatttg

SEQ ID NO: 14369 - DNA, 201 bp, Homo sapiens
tccccaatgccttctcttgggctttggaacacttaagatgctccccagtcatcctaccaagttccatttgaaactgagatagtgaacaagtcagcaaggawggcttttttcccacctgtcttacctaccctgactctcccttggggcctcatcttggaacttcccttgagatccccttgccttctctgacacccccatgac

SEQ ID NO: 14370 - DNA, 201 bp, Homo sapiens
ttccaaagtgctaggattacaggcgtgagccactgtgcctggcctctcagtagttttcatatttccttccttccttccttccttccttccttccttccttscttccttccctccctccctccctccctgcctgcctgcctgcctgcctgccttcttgcttgcttgctttccttctttctttctttccttccttcctccctc

SEQ ID NO: 14371 - DNA, 201 bp, Homo sapiens
ttgggggttacaattttaacggatgaatttgggagggacgcaaacagtctatagcagtctgagttctctggaatcagatagagagaaaagaaaagtggtayacaaactatttcttcaaatgatttgtccctttcttcttccaacagaaggaacaagctatttggaagcacccgcagccagccccagctgtgaccccagacc

SEQ ID NO: 14372 - DNA, 201 bp, Homo sapiens
acaaaaaatttttttaatgattttataatttttatattgttttactattattatagtataagaatatccatgagaatgaaaagaaagaaaatccagctatkaaaccactggtttttaaaaagtcagtttttccttcaagtttttacacttagtgttttcaaaataattttcattttatggatacaatcattgtatggatac

SEQ ID NO: 14373 - DNA, 201 bp, Homo sapiens
cctgaacctggtgagcaggagtcaggagaggaagaagaaactgaactgaactgagtgttttcctgggggtaagattgctagactttggagaaccttctttwccagaagcaaaacttttgccagagtcaagcaaaagagtgaggaagtccataactgagaggtcacagccacagctgggcagaaatcatttcatcatcctct

SEQ ID NO: 14374 - DNA, 201 bp, Homo sapiens
cctccccaggcgtggtgagtggcccttcacctggtcctcctagttcctcacagctgaactctgccatcttttccactcagtgggtggggcaagaacatttytgaaagacctatgttttcaggctcctggggaaacatgttcatagcggttagtgtatcagcagagatgggtcatggagataaggcctggaagttgcttgcc

SEQ ID NO: 14375 - DNA, 201 bp, Homo sapiens
aggtttcaccatgttggccaggctggtctcgaactcctgaccttgagccatccacctgcctcagcctcccaaagtgctgggattgcaggagtgaactgccrtgcctggcttttttttttttttttttttttaatggtcccagtatgtccctcaatcagttgcccagactggagtgcagtggtgcaatctcagctcactgca

SEQ ID NO: 14376 - DNA, 201 bp, Homo sapiens
tttatttcctggccaaaaaaacctgagcaacaaaataaataataaattataacccatagggaagaaaagctgccaagaatccataggttctaattgatatrtgtgtgtgtgtgtgtgtgtgtgtgtatgcgtgtgtgtgtgtgtgtatgcatgaatacatgaattaggaataagggaaagctcttctgaagagaatgtcaa

SEQ ID NO: 14377 - DNA, 201 bp, Homo sapiens
ttttccagaataatcatcatcagtctgtttgtttttccttcaacagcaactcataaaagcttttggctctgaatctaatttcccaagaagaaactggccaygtgtcataggttctctagaaccagaatcttctgaacctaagccctaaaaagcttaataatgctcatagacttcgttactgaagcagatgtgagtgaatct

SEQ ID NO: 14378 - DNA, 201 bp, Homo sapiens
gtacagtgcttggagtataataggctttcaataaatattagttgccattccctgtcaagatataaattaggaaaatattgaaatacatctcagccagcctyagtggctcacgcctgtaatcccaaaactttgggaggctgaggcaggtggatcacctgaggtggggaattcaagaccagcctgggcaacatggtgaaaccc

SEQ ID NO: 14379 - DNA, 201 bp, Homo sapiens
acccttccctaaactcctaccctgtggtgggggtggagaggagaggaagtgggaggagccgtcccagcgaaggctccactggaggtcatctccccctcccmctataggctggtggtggagtttccagctacaggaggtgccatcccatcctggcaaatccgcacagtcaagctgatccgctatgtcagcaactgggacttc

SEQ ID NO: 14380 - DNA, 201 bp, Homo sapiens
ccttccctaaactcctaccctgtggtgggggtggagaggagaggaagtgggaggagccgtcccagcgaaggctccactggaggtcatctccccctcccccyataggctggtggtggagtttccagctacaggaggtgccatcccatcctggcaaatccgcacagtcaagctgatccgctatgtcagcaactgggacttctt

SEQ ID NO: 14381 - DNA, 201 bp, Homo sapiens
tcctctcctcctcacctgtcatctgagccctgtgttttttttttttagtgtactatattctgctcctctcttgtcttttgtctttatgacctgttctgtgraaacccatgccttttgtcttctattcaaatattctgccccttcatcttcatctccctcctattaacaagacacattcaattcctgaccaaagcttggaag

SEQ ID NO: 14382 - DNA, 201 bp, Homo sapiens
ctcctgagttcaagtgattctcctgcctcagcctcctgagtagctgggactacaggcacccaccaccacgcctggctaatttttgtattttttgtggagayggggtttcaccatgttggccagggtggtctcgaactcccaacctcaggtgatctgcctacctcagcctctcaaagggctaggattacatgcatgagccac

SEQ ID NO: 14383 - DNA, 201 bp, Homo sapiens
gaattaaagtccgcacccacaaagtgccggccccacaagaactttttatgaaagagaattaggaggccttcacattctgatgattcctacgacatctagtmagataatactaatactagtttcctagcccctgcctctacctgcctcttcctttcagacatattttcaggcgacatggagccttggaatggcctcaggagg

SEQ ID NO: 14384 - DNA, 201 bp, Homo sapiens
taatttttgtattttttgtggagacggggtttcaccatgttggccagggtggtctcgaactcccaacctcaggtgatctgcctacctcagcctctcaaagkgctaggattacatgcatgagccaccgcccctgacttttttttttttttttttttttgagacgaagtctcactctgttgtctggctggagtacaatggcac

SEQ ID NO: 14385 - DNA, 201 bp, Homo sapiens
cgcacccacaaagtgccggccccacaagaactttttatgaaagagaattaggaggccttcacattctgatgattcctacgacatctagtaagataatactmatactagtttcctagcccctgcctctacctgcctcttcctttcagacatattttcaggcgacatggagccttggaatggcctcaggagggccacttcggt

SEQ ID NO: 14386 - DNA, 201 bp, Homo sapiens
tgtgcttaaataatctaagcaccctgccctgtgtctatcagattggggtgaacgtgtggtgaggggtctctctgtgattaggaaagtgggatggggggtgyttgttaggctctgggtaaagcccagacctggtctctcagtttcactcagttccggataatcctcggggactttgactacaatgctatcgacaatgccaac

SEQ ID NO: 14387 - DNA, 201 bp, Homo sapiens
gcatgtgtgtgtcctgtccccttcactcctccctggcccctcaccctccagctccacgggtgtatgtatccttggggaagatgggtacgtgcgtgtctgcrtgtctgtgttcaaagcatctgtgtgagggtctccagaagccctggtgtgtgtgcttaaataatctaagcaccctgccctgtgtctatcagattggggtga

SEQ ID NO: 14388 - DNA, 201 bp, Homo sapiens
acttgaaccccagaggtggaggttgcagtgagccgagatcacgccactgtactcagcctgggcgacagagtgagattccatctaaaaaaaaaaaaaagatagagagagagaaaaaaagaaaagaaaaacaggctgggtgcggtggctcacgcctgtaatcccagcactttgggaggccaaggtgggtggatcacgaggtta

SEQ ID NO: 14389 - DNA, 201 bp, Homo sapiens
tcagctcactgcaacctccacctcccgagctcaaactatcctcccactttagcttcctgagtagataggaccactggtatggtcaggagccaccacacccygctaatttttgtatcttttgtagagacagtgttttgctatgttgcccaggctggtctctaactcctggactcaagcaatctgcctgccttggcctcccaa

SEQ ID NO: 14390 - DNA, 201 bp, Homo sapiens
cttgaaccccagaggtggaggttgcagtgagccgagatcacgccactgtactcagcctgggcgacagagtgagattccatctaaaaaaaaaaaaaagatagagagagagaaaaaaagaaaagaaaaacaggctgggtgcggtggctcacgcctgtaatcccagcactttgggaggccaaggtgggtggatcacgaggttag

SEQ ID NO: 14391 - DNA, 201 bp, Homo sapiens
gctctgtgtcctggtctgttcctgactgattgaggtgcctgtgcccttgtgtgcctttaaatttatccttggaagcctggcatactatgggtggggctggrggccagggatgagtgagcagcctgtgagaacttgtgcctatttcctttccctttcagggctacaacaagaccctactaagactgcgtctgaggaaggaga

SEQ ID NO: 14392 - DNA, 201 bp, Homo sapiens
ttgaaccccagaggtggaggttgcagtgagccgagatcacgccactgtactcagcctgggcgacagagtgagattccatctaaaaaaaaaaaaaagatagagagagagaaaaaaagaaaagaaaaacaggctgggtgcggtggctcacgcctgtaatcccagcactttgggaggccaaggtgggtggatcacgaggttagt

SEQ ID NO: 14393 - DNA, 201 bp, Homo sapiens
ttaggaaacaatgtaataattccctaatcattgaatacacaccccactcccacaaaactctgatttttgttctatgcttccccacaaacactcatctattyctttagccattcactccctgattcccagtcaaacatattaatacacattgaacaaatacattgtgagcaccagctgcagatcaggcactgagtaatagac

SEQ ID NO: 14394 - DNA, 201 bp, Homo sapiens
gcaggactgcagggccggccgggtgggcggggcacacccagtgcgcatgcgcagcaccccggcccggaaacagcgcggggtccgctatggcggcggcagcsgagggcgtactggcgacccggagtgatgagcccgcccgaggtacccggaatggatggggaggaagcgtccggtggggggcctggggctccgtctcgggtg

SEQ ID NO: 14395 - DNA, 201 bp, Homo sapiens
tgaaccccagaggtggaggttgcagtgagccgagatcacgccactgtactcagcctgggcgacagagtgagattccatctaaaaaaaaaaaaaagatagagagagagaaaaaaagaaaagaaaaacaggctgggtgcggtggctcacgcctgtaatcccagcactttgggaggccaaggtgggtggatcacgaggttagta

SEQ ID NO: 14396 - DNA, 201 bp, Homo sapiens
gaactgagtgttttcctgggggtaagattgctagactttggagaaccttctttaccagaagcaaaacttttgccagagtcaagcaaaagagtgaggaagtmcataactgagaggtcacagccacagctgggcagaaatcatttcatcatcctcttctcagactgggacacgcagagcatgaaatcactgagctcacggcca

SEQ ID NO: 14397 - DNA, 201 bp, Homo sapiens
aatagcaaagtcagtacagcatccagcacctggaaacttcagcctataacttggaaacatacagacaaaaaatttttttaatgattttataatttttatattgttttactattattatagtataagaatatccatgagaatgaaaagaaagaaaatccagctattaaaccactggtttttaaaaagtcagtttttccttca

SEQ ID NO: 14398 - DNA, 201 bp, Homo sapiens
ttgagtttcagttctgtcatttatagctggattatctcggtaacctctttcatagtttcctcttctgcaaaatgtggataatattcactctcccttctcaratggttgttagtatcaaacagaataataaatgatacattatatatgtatatatcacatatctcatacacacacacacacacacacacacacacacacaca

SEQ ID NO: 14399 - DNA, 201 bp, Homo sapiens
atagcaaagtcagtacagcatccagcacctggaaacttcagcctataacttggaaacatacagacaaaaaatttttttaatgattttataatttttatattgttttactattattatagtataagaatatccatgagaatgaaaagaaagaaaatccagctattaaaccactggtttttaaaaagtcagtttttccttcaa

SEQ ID NO: 14400 - DNA, 201 bp, Homo sapiens
ccaagtagctgggactacaggcatgtagcaccacactcgcttaatttttgtttttttgtaaagacagggtctcgttatgttgcccaggctggtcttgaactcctgaatgtaagtgatcctcctgcattggcctcccaaagtgctgggattataggcatgagccactgtgctcggccaaatttttggggggtttgtttgaaa

SEQ ID NO: 14401 - DNA, 201 bp, Homo sapiens
cctaaaaagcttaataatgctcatagacttcgttactgaagcagatgtgagtgaatctagttctctcagttgtagtctctgtagacacactgatatgaaaygcacggtttcaacaaccttcagtgtataccctgaggatctaacccttccctcatttccaggttcctactttcctctgcctactctctgtcttaagacaca

SEQ ID NO: 14402 - DNA, 201 bp, Homo sapiens
tagcaccacactcgcttaatttttgtttttttgtaaagacagggtctcgttatgttgcccaggctggtcttgaactcctgaatgtaagtgatcctcctgcmttggcctcccaaagtgctgggattataggcatgagccactgtgctcggccaaatttttggggggtttgtttgaaaaaatatagtattttttaaaaaataa

SEQ ID NO: 14403 - DNA, 201 bp, Homo sapiens
ggatggaggaggtagcgccagccaactaaggcctcaggctatgaatatgcaagagttttgccatagtcagagtctcaaggggcaagtaagaggaaaaaggygtaaaccagcatttcttctcattctattacaacataattctaccccctttcccctacaaagaaaatcagactggtaatatatttattaaatttttaccta

SEQ ID NO: 14404 - DNA, 201 bp, Homo sapiens
gccaaacctggaacaattctttagtttttctttgccttttatttcctggccaaaaaaacctgagcaacaaaataaataataaattataacccatagggaaraaaagctgccaagaatccataggttctaattgatatgtgtgtgtgtgtgtgtgtgtgtgtgtatgcgtgtgtgtgtgtgtgtatgcatgaatacatgaat

SEQ ID NO: 14405 - DNA, 201 bp, Homo sapiens
tgtgtgtgcgtgtgtgcctgcacacacatgtataaatgtgtgtgtatataatatacatttttcatggtattttagagatgttgctttacccagaaataaamcttgaagagcctgaggacttaatgataggcatgtttttagaatatcatcatcagttgacttgctcagcaagccccttttaatattggataagaatgtatt

SEQ ID NO: 14406 - DNA, 201 bp, Homo sapiens
gatgtctgagctcttcttacatactccatcagacactggagtctcctttcaggccatcagcagcatggcggacttctgggatgtgagtataagatcttttstacccctcccctctctttctcaatggcctgaggccacaggtcagacaacggatcagaccttatgctgggaaatcaaatcagtcagggatcagactgagtc

SEQ ID NO: 14407 - DNA, 201 bp, Homo sapiens
aaattaggtatttagtagtacagtgcttggagtataataggctttcaataaatattagttgccattccctgtcaagatataaattaggaaaatattgaaawacatctcagccagcctcagtggctcacgcctgtaatcccaaaactttgggaggctgaggcaggtggatcacctgaggtggggaattcaagaccagcctgg

SEQ ID NO: 14408 - DNA, 201 bp, Homo sapiens
actggttccagttccctacagccctttacaatctatacattaatatttaccattgtccccaatgccttctcttgggctttggaacacttaagatgctcccyagtcatcctaccaagttccatttgaaactgagatagtgaacaagtcagcaaggatggcttttttcccacctgtcttacctaccctgactctcccttgggg

SEQ ID NO: 14409 - DNA, 201 bp, Homo sapiens; identical to SEQ ID NO: 2150

SEQ ID NO: 14410 - DNA, 201 bp, Homo sapiens
tgctgagccccaccctgcatctggccttttgagccaatgtttctgtgtgtggtgggcatcatgcttaggcttgtgaatcagtgtttctgtgtgttgccacrtagctctgtgaaataacgtcttccactgggccttttactccctgtgtacttagctctgtgtgttaattaaaaaaaaaaaagttaacaaacaggataaaga

SEQ ID NO: 14411 - DNA, 201 bp, Homo sapiens
gttctgacattattcttccataagaccatgtgggtttccatggtggctatcaataaaactccttaggaaaacttggactttgcatttgcttctggtattayagagggaagaaaggctgaaattgtgggtcatccatgtgcctgggctggaataggttcatgctctctaggaggtatagagtaggtgcagtgatgtgaagga

SEQ ID NO: 14412 - DNA, 201 bp, Homo sapiens
catttttcttattaccggtgtttatgcatacattcttacctagttgtattatattgtatactttcatcatttataacatttcatcatatttctaagtagtyttttttttttgagacagagtctggttctttcacccaggctggagtgcagtgtcctgcctcagcctcccgtgtacctgggattacaggcgcccaccaccat

SEQ ID NO: 14413 - DNA, 201 bp, Homo sapiens
tgagctcttcttacatactccatcagacactggagtctcctttcaggccatcagcagcatggcggacttctgggatgtgagtataagatcttttctacccytcccctctctttctcaatggcctgaggccacaggtcagacaacggatcagaccttatgctgggaaatcaaatcagtcagggatcagactgagtcaaaggg

SEQ ID NO: 14414 - DNA, 201 bp, Homo sapiens
tgtcagcaactgggacttctttatcgttggctgtgaggtcatcttctgcgtcttcatcttctactatgtggtggaagagatcctggagctccacattcacyggcttcgctacctcagcagcatctggaacatactggacctggtggtcatcttggtgagggacagatatctaggacttgggacattctggggtgaggaggg

SEQ ID NO: 14415 - DNA, 201 bp, Homo sapiens
cagtcaagctgatccgctatgtcagcaactgggacttctttatcgttggctgtgaggtcatcttctgcgtcttcatcttctactatgtggtggaagagatmctggagctccacattcaccggcttcgctacctcagcagcatctggaacatactggacctggtggtcatcttggtgagggacagatatctaggacttggga

SEQ ID NO: 14416 - DNA, 201 bp, Homo sapiens; identical to SEQ ID NO: 2157

SEQ ID NO: 14417 - DNA, 201 bp, Homo sapiens
tagggaaaaatgaccaactgcccaagaatcactgataattccctcagaggacttgccttctcttgggaattttcagacttggattcttggctgtccctacwgtgcctgctccatccctatccagtgtggaccaaaaaaagtcaaaggcagggtgacagcagcctagaaagtgccaagaacactggtagtgtccctcctctg

SEQ ID NO: 14418 - DNA, 201 bp, Homo sapiens
tggaccaaaaaaagtcaaaggcagggtgacagcagcctagaaagtgccaagaacactggtagtgtccctcctctgctaaaatgagttggcctctagtaaayacctcatccatcaagccttctaggatcttgtgttttctttgagaggtgactcctccagaggttggtccagcaccaccaccctgaccctattgtctccaga

SEQ ID NO: 14419 - DNA, 201 bp, Homo sapiens
ccagcaccaccaccctgaccctattgtctccagagtctgggagggaaggggaatagcaagaactaggacctgagccttggtcctgagatcccagtagagtrggtgatagaacaggagctgatggcttcccagagttatctcctcccctctaacctctgacttcctgagcaggtggccctcaacactgagattgagaaacta

SEQ ID NO: 14420 - DNA, 201 bp, Homo sapiens
atagaacaggagctgatggcttcccagagttatctcctcccctctaacctctgacttcctgagcaggtggccctcaacactgagattgagaaactaggccdatctattgtgagcagcccacaaggcaaatcgggtccagaggctgccagagcaggaggctgggtttcaggagaagaattctacatgtacgtgcagccaaga

SEQ ID NO: 14421 - DNA, 201 bp, Homo sapiens
aaaaattatggtccaggattagctttcaatttttttctttttttgcttcagaacatttatatcaagtcaaatttctttagtctcatttaacctggaacaattttttttttttttgggggacagagtctcactttgtcacccagtggtatgatcttggctcattgcaacctctgcctcctgggcttaagtgatcctcctgcc

SEQ ID NO: 14422 - DNA, 201 bp, Homo sapiens
aaaattatggtccaggattagctttcaatttttttctttttttgcttcagaacatttatatcaagtcaaatttctttagtctcatttaacctggaacaattttttttttttttgggggacagagtctcactttgtcacccagtggtatgatcttggctcattgcaacctctgcctcctgggcttaagtgatcctcctgcct

SEQ ID NO: 14423 - DNA, 201 bp, Homo sapiens
caggattagctttcaatttttttctttttttgcttcagaacatttatatcaagtcaaatttctttagtctcatttaacctggaacaatttttttttttttkgggggacagagtctcactttgtcacccagtggtatgatcttggctcattgcaacctctgcctcctgggcttaagtgatcctcctgcctcagcctcccaag

SEQ ID NO: 14424 - DNA, 201 bp, Homo sapiens
aagaacctacgttgaattatcgggggcaggttcccccgatagcggagtttttggtgagccaagatcgtgccattgcactccatcctgggcaacaacagtgaaaaaaaaaatcaccatttgacaatgttagtaataatcaggcaaaaaatacacagtttgaaaggggtctccccacaaaaacacgtattaattacaaaaaga

SEQ ID NO: 14425 - DNA, 201 bp, Homo sapiens
tgtgaaaaaggtagaaaccaagagagtaggcggtatctagatgtcttcctacttcccagtgaatcctattcttatcctttgtgcatcccaagatttgttgytagcacccatgggtttctcgttttcccccacagaggttccctataaaagagaagaggaagccttagaggagaggagactctcccgtggtgagattccaac

SEQ ID NO: 14426 - DNA, 201 bp, Homo sapiens
ctccctacagccctactggcacatgggactggatggatgtgttagggtgcatgagggagatcaagttcttcagggtaaagtccaggtcttttttttttaayttaacttgcacacaatgtgtgcacagggagaatcacagggtgattgctcctaggtcttttttgatctgggaacactgagtcgctctctcaggagatgact

SEQ ID NO: 14427 - DNA, 201 bp, Homo sapiens
aatcctattcttatcctttgtgcatcccaagatttgttgctagcacccatgggtttctcgttttcccccacagaggttccctataaaagagaagaggaaghcttagaggagaggagactctcccgtggtgagattccaacgttgcagaggagttaagtgtgaggcactcccggagcaaagtctatgaaggatcttctgcaa

SEQ ID NO: 14428 - DNA, 201 bp, Homo sapiens
cctggaggaagagagggtgagctgggctgatgggtggagaggcagtgtaaggaaatagctcaccctctccttcccccaacatacctagaacacaaacccacctgaaaactctcccatagatagtaaagaactctctagaatagtagttcccaaactgctgcacattagaataccctggggggcctttaaaaatcttcatac

SEQ ID NO: 14429 - DNA, 201 bp, Homo sapiens
catgctcattctgctacatcaagttcattctgggacacgtcttcctcaatagaactttttaaggatagaaaccatgacactgctggtcatggtggctcacrcctatgattccaacactttgggaggctaacagcggaggtcagcttgagttcaggagttcaggaccagcctgggcaacatagtgagaccttgtctctacac

SEQ ID NO: 14430 - DNA, 201 bp, Homo sapiens
cctgattcatagagagctgtcttcttgctgtgccctttcatggtggaaggggtaagggaagtctcctttattttatttttttattttatttattattattwttttttgagatggaattttactcttgttggccaggctggagtgcaatggcacgatctcggctcactgcaacctccgcctcctgagttcaagtgattctcc

SEQ ID NO: 14431 - DNA, 201 bp, Homo sapiens
gattcatagagagctgtcttcttgctgtgccctttcatggtggaaggggtaagggaagtctcctttattttatttttttattttatttattattattattwtttgagatggaattttactcttgttggccaggctggagtgcaatggcacgatctcggctcactgcaacctccgcctcctgagttcaagtgattctcctgc

SEQ ID NO: 14432 - DNA, 201 bp, Homo sapiens
tccccttacataactaccagtggttcacatggacagtgaactcagtgattttcccctggagtgggaagcaggtgtcctaagtgttctgtgtagtttgtaartcatcttgagatccctgggaagttctgagagccctctggaagcttttttctctttctactctctattttggaatcaccaaaatagatactgggaaaccca

SEQ ID NO: 14433 - DNA, 201 bp, Homo sapiens
ggtgatccacccacctcgtcctcccaaagtgctggaattacaggcgtgagcccactcataagggctacatactcactatctaatcccctgccaaaggcccmacctcctaatactatcacattgggggttacaattttaacggatgaatttgggagggacgcaaacagtctatagcagtctgagttctctggaatcagatag

SEQ ID NO: 14434 - DNA, 201 bp, Homo sapiens
ggagttcgagactagcctggtcaacatggtgaagccccatctctattaaaaatacaaaaattagccaggtgtagtggtgcatgcctgtaatcctagctacytgggaggctgaagcaggagaattgcttgaacctaggaggcagaggttgcagtgagccgagatggtgtcattgcactccagccagggcaacaagagagaga

SEQ ID NO: 14435 - DNA, 201 bp, Homo sapiens
ctgcgtcttcatcttctactatgtggtggaagagatcctggagctccacattcaccggcttcgctacctcagcagcatctggaacatactggacctggtgrtcatcttggtgagggacagatatctaggacttgggacattctggggtgaggagggagttccaccctaataggggctccaggttcttccttttggagccct

SEQ ID NO: 14436 - DNA, 201 bp, Homo sapiens
atgtagttatcatccagtctccaaagatttcctggaatgagcccatttctgccttaaaatggtagtgacgtactggcatttgacatactgagtcaaatcckgactcattccccactctggtctagtgtcaccttatgaaatacaaagggcaattccactcttttactgtatcttacagaaaggagctgggaaggccagccc

SEQ ID NO: 14437 - DNA, 201 bp, Homo sapiens
gtggctcatgcctgtaatcccagcactttgggaggccaaggtgggtggatcacctgaggtcaggagttcgagactagcctggtcaacatggtgaagccccrtctctattaaaaatacaaaaattagccaggtgtagtggtgcatgcctgtaatcctagctacctgggaggctgaagcaggagaattgcttgaacctaggag

SEQ ID NO: 14438 - DNA, 201 bp, Homo sapiens
ggcccatttcataattgaaagtactagtggtgaagaaggactgccttttatgtagctaaagtttctcccctataactttttatttttattttttgaggcartgtctcactctgttgcccaggctggaatgcaatgtcacgatcactgcttactgcaacctcaacctccagggctcaagcgatcctcccaccttagcctccc

SEQ ID NO: 14439 - DNA, 201 bp, Homo sapiens
aagttctgagagccctctggaagcttttttctctttctactctctattttggaatcaccaaaatagatactgggaaacccactgccttcttgacatttctrttgaagacaagtaggactgattgcttgtctgattgcaacaggtcaaggcagcagttctcaaagtgtggtcccatgaccacgagtatcactttggaactta

SEQ ID NO: 14440 - DNA, 201 bp, Homo sapiens
gacaagtaggactgattgcttgtctgattgcaacaggtcaaggcagcagttctcaaagtgtggtcccatgaccacgagtatcactttggaacttattagaratgcaaattgttgagccccacctaaacctatagcaatccatgttttttaggggttggtttgtttttgtttttgttttttgagatgatcttggctcactgc

SEQ ID NO: 14441 - DNA, 201 bp, Homo sapiens
attgcttgaacccaggaggtggaggttgcagtgagccgagatcgtgccattgcactgcagcctggacaacaagagtgaaactccgtctcaaaaaaaaaaamaaaaaaacagtttgatgtaattatggacttaaagaaaatttgcaagaaaaagacaaagaattcttgatacactgcatatatttcactcagttttcccata

SEQ ID NO: 14442 - DNA, 201 bp, Homo sapiens
aaaaagacaaagaattcttgatacactgcatatatttcactcagttttcccatatatgaacatgttaccatgcttgcttctcctttctcattctctctttycccatcctccacacacatgtgcgtgtgcacacacacaaacacacacgcacacacaagtttgagagtaaattatagacataatgcccttttgttcctaaat

SEQ ID NO: 14443 - DNA, 201 bp, Homo sapiens
catggtcatcacctggggatccagagaggtatgtgggagctggtttgagggaggacatggatgtgatgatgccctagactaccccacctggaacaggtgcytcctttccatgccttcattctctacaagccagggccttcacccctgtcgacctcagggagctgatgggaagagcaagcatgggtgtgggtacagtagcca

SEQ ID NO: 14444 - DNA, 201 bp, Homo sapiens
tgagcggtctaccggttgtgggagcctggcatggtcatcacctggggatccagagaggtatgtgggagctggtttgagggaggacatggatgtgatgatgycctagactaccccacctggaacaggtgcctcctttccatgccttcattctctacaagccagggccttcacccctgtcgacctcagggagctgatgggaag

SEQ ID NO: 14445 - DNA, 201 bp, Homo sapiens
gtagtcttttttttttgagacagagtctggttctttcacccaggctggagtgcagtgtcctgcctcagcctcccgtgtacctgggattacaggcgcccacsaccatgcccggctagtttttgtatttttagtagagacggggtttcaccgtgttgcccaggctggtctggaactcctgacctcaagtgatcggcccacctc

SEQ ID NO: 14446 - DNA, 201 bp, Homo sapiens
tgagacagagtctggttctttcacccaggctggagtgcagtgtcctgcctcagcctcccgtgtacctgggattacaggcgcccaccaccatgcccggctartttttgtatttttagtagagacggggtttcaccgtgttgcccaggctggtctggaactcctgacctcaagtgatcggcccacctcggcctcccaaaatgt

SEQ ID NO: 14447 - DNA, 201 bp, Homo sapiens
gggattacaggcatgtgccaccacgcctggttaatttttttgtatttttagtagagatgaggtttcaccatattggccaggctggtctcaaactcctgacrttgtgatccacccacctcgacctcccaaagtgctgggattacaggcgtgagccactgtgcctgtgtcgggtgttgctatattttctaggctgatcttcaa

SEQ ID NO: 14448 - DNA, 201 bp, Homo sapiens
tttagtagagatgaggtttcactgtgttaaccaggatggtctcgagctcctgaccttgtgatccgctcgccttggcctcccaaagtgctgggattacaggygtaagccaccgcacctggccatagcatgctaaatattatacataaaccagtaacatagttgtttattatcattatcaaatattgtatactgtacataact

SEQ ID NO: 14449 - DNA, 201 bp, Homo sapiens
cgttattggctggagggcgctgacgtctgattgttgcgcggtcgcatttttccggggaacgcggattcgcattcccaattttaggtggcagtcgcaacccrtactattcggacagatggcacagaaaccgctgcgcctgtgagtgaccgtgaatggaagcctctctccctgtgtctctttcgtgtgtgtaggtgacgacac

SEQ ID NO: 14450 - DNA, 201 bp, Homo sapiens
acaaggatgtggaggaattggaatcctcacacattgctggtgagagtgtaaaatggtgcagccgctttggaaaactgtttagcagttcttgaaaggttaartgtaagagtcagcagcatggtaacggcaattttattcctgtcccaagataagggaaaacatatgtccacacaaaaacttgtacacagatgatcataatag

SEQ ID NO: 14451 - DNA, 201 bp, Homo sapiens
ctgagccacctgtttggcttccactgcttctgtgaactccttcccgaaggtcagatgtgtcaaggacacgtcatccaggatgagcccaaaggtggctgctygctctgtaaggtcgttgctcatctgcctggagaccagctctctttaggtgattagttctccagcatcaaagtgagccaccactgacttgaggatctcagt

SEQ ID NO: 14452 - DNA, 201 bp, Homo sapiens
cacctgtttggcttccactgcttctgtgaactccttcccgaaggtcagatgtgtcaaggacacgtcatccaggatgagcccaaaggtggctgcttgctctrtaaggtcgttgctcatctgcctggagaccagctctctttaggtgattagttctccagcatcaaagtgagccaccactgacttgaggatctcagtagtgat

SEQ ID NO: 14453 - DNA, 201 bp, Homo sapiens
ttatactttcgtcaaaaggtgtgcacattataaaatttggcaagcattgttaaattcatctaaaaactttgttccaatttatacccctaccccagcagtgkttttttttttccccctccatatttctcactggatcaagtcaaagtttttgtttgtttgtttaagatggagtctctgtctattgcccaggctggagtgtag

SEQ ID NO: 14454 - DNA, 201 bp, Homo sapiens
gtggctgaggcaggagaatcgcttgaacccgggaggcggaggttgctgtgagccgagatcgcgccactgcactccagcctgggcgacagaacgagactctcaaaacaaaacaaaacaaaacaaaacaaacaaaaaacaatacaaataatggccgggcgcggtggctcacgcctgtaatcctagcactttgggaggctgagg

SEQ ID NO: 14455 - DNA, 201 bp, Homo sapiens
ctccatgttggtcgggctggtctctatctcctgacctcaggtgattcgcccgcctcagcctcccaaagtgctgggattgcaggcatgagccgccacccccrgcccacgtcaaagttttattaaagtttttgccaatgtgataaatgatatataattgttacttagttgcatttccctaatcagtagtaagtttaaacatct

SEQ ID NO: 14456 - DNA, 201 bp, Homo sapiens
tggctgaggcaggagaatcgcttgaacccgggaggcggaggttgctgtgagccgagatcgcgccactgcactccagcctgggcgacagaacgagactctcaaaacaaaacaaaacaaaacaaaacaaacaaaaaacaatacaaataatggccgggcgcggtggctcacgcctgtaatcctagcactttgggaggctgaggc

SEQ ID NO: 14457 - DNA, 201 bp, Homo sapiens
ggctgaggcaggagaatcgcttgaacccgggaggcggaggttgctgtgagccgagatcgcgccactgcactccagcctgggcgacagaacgagactctcaaaacaaaacaaaacaaaacaaaacaaacaaaaaacaatacaaataatggccgggcgcggtggctcacgcctgtaatcctagcactttgggaggctgaggcg

SEQ ID NO: 14458 - DNA, 201 bp, Homo sapiens
cccctaatgtcattatgttctttttctctaaagtatctttacgcgttcagtattgttcccatgaagctaatggatgcagcagaactggtaaaacagcctcyggatgtcactgaaaacccttacagaaaatctgggcaggaagcatccataggaaagcaaattcttgcccctgtggtatgttctgattgagggttggcattt

SEQ ID NO: 14459 - DNA, 201 bp, Homo sapiens
ttagtcgagacggggtttcaccatattggccaggctggtctcgaactcctgaccttgtgatctgcctgccttggcctcccgaaggtattacaggcatgagycacccacgcctggcaagatctggtttttgacatgttgagcctaaggtttttgacatgttgagctatcaaggcattccaaaaatgttattaaataggcaat

SEQ ID NO: 14460 - DNA, 201 bp, Homo sapiens
tatagtttagtacataagacaagtttaatcgttagaatctaaatcttttttttccccttgggaaatcatgatgatgtttagaaaatcttagtagatttcarctaagcttagtgttttttattgtagtttggggttaacagtttgatacattaggtctttctttgtccaaactggattcagacgtttggggttacagtttta

SEQ ID NO: 14461 - DNA, 201 bp, Homo sapiens
tgaggagcacaggctcagcccattgtggcagtgttgtataccagtcttttcaggatataaaaatcagacaaagctgagttctgtggggtgattatatgctstagtgcttggaccatagtaacacctggctttcttttacatgaagctcagcctccaggaccctgctggttttgccttgctagccctgaagtggaaaaacat

SEQ ID NO: 14462 - DNA, 201 bp, Homo sapiens
ctgttggaaatcccagagcactctgacatcaagcaggtgaaacaggggatggtgatattcagggaagagtaaatatctgttttttttgttgttgtttgttstttgtttgtttgtttgagacagagtcttgctctgttgcctaggttggagtgcagtggcatgatcttggctcactgcaacctccgccttccgggttcaagt

SEQ ID NO: 14463 - DNA, 201 bp, Homo sapiens; identical to SEQ ID NO: 2169

SEQ ID NO: 14464 - DNA, 201 bp, Homo sapiens
ctgcactccagcctgggcgacagaacgagactctcaaaacaaaacaaaacaaaacaaaacaaacaaaaaacaatacaaataatggccgggcgcggtggctsacgcctgtaatcctagcactttgggaggctgaggcgggcggatcacttgcggtcaggagttcgagaccagcctggccaacgtggtgacaccccgtctcta

SEQ ID NO: 14465 - DNA, 201 bp, Homo sapiens
gctgaggcaggagaatcgcttgaacccgggaggcggaggttgctgtgagccgagatcgcgccactgcactccagcctgggcgacagaacgagactctcaaaacaaaacaaaacaaaacaaaacaaacaaaaaacaatacaaataatggccgggcgcggtggctcacgcctgtaatcctagcactttgggaggctgaggcgg

SEQ ID NO: 14466 - DNA, 201 bp, Homo sapiens
ctgaggcaggagaatcgcttgaacccgggaggcggaggttgctgtgagccgagatcgcgccactgcactccagcctgggcgacagaacgagactctcaaaacaaaacaaaacaaaacaaaacaaacaaaaaacaatacaaataatggccgggcgcggtggctcacgcctgtaatcctagcactttgggaggctgaggcggg

SEQ ID NO: 14467 - DNA, 201 bp, Homo sapiens
gcacaaggatatagcaaagctagggaagatcgagagaagggctgctaaagtgatgaaggaagagagaaagacacatatgatgctctgtaaggaaggatgakaaaatgaggcccctttgttttgcggggagctaaaaattgattttgatcaaggcttataaataaccatacagtatatttatggaggagaaaagtatagttc

SEQ ID NO: 14468 - DNA, 201 bp, Homo sapiens
taatcctagcactttgggaggctgaggcgggcggatcacttgcggtcaggagttcgagaccagcctggccaacgtggtgacaccccgtctctactaatacaaaaaaaaaaaattagccaggcgtggtggcgcgtgcctgtaatcccagctacttgggaggctgaggcaggagaatcgcttgaacccggaggcggaggttgc

SEQ ID NO: 14469 - DNA, 201 bp, Homo sapiens
gggttatgttctgagaaatgagttggtaggcgatttcgtcattgtgcgaacatctttgagtgtacttccagagacctagatggtatggcttcctgtacacytaggctaaatggtatagctgtacgtcaagttactgtactgaatactgtaggcaattgtaacacaatggtaagcatttttgtatttaaatatagaaagggt

SEQ ID NO: 14470 - DNA, 201 bp, Homo sapiens
gaagcaggtggaccacctgagcctggggaggtcgatgctgcagtgagctgtgatcgtgctgctgatctccaggctgggtgacagattgaaaccctgtctcaaaaaaaaaaaaaaaaaattgcaatagtggtaacttttgggaagaaaatattcgtgaatctgggagagtgcataagaggggtatttggcttaatgatagga

SEQ ID NO: 14471 - DNA, 201 bp, Homo sapiens
tgtacgtcaagttactgtactgaatactgtaggcaattgtaacacaatggtaagcatttttgtatttaaatatagaaagggtacagtgaaaacacctggcygggtgtggtggcttatgcctgtaatcccaacactttgggaggccgaggtgggtggatcacctgaggtcagaagttcaagaccagcctggccaacatggtg

SEQ ID NO: 14472 - DNA, 201 bp, Homo sapiens
aagcaggtggaccacctgagcctggggaggtcgatgctgcagtgagctgtgatcgtgctgctgatctccaggctgggtgacagattgaaaccctgtctcaaaaaaaaaaaaaaaaaattgcaatagtggtaacttttgggaagaaaatattcgtgaatctgggagagtgcataagaggggtatttggcttaatgataggag

SEQ ID NO: 14473 - DNA, 201 bp, Homo sapiens
ttcagtagtaataacatgcatgaagctgtcatctcctatgataacagtgccctctggaatacttcctgaaggacctgcctgaggcttttttacagtcaactttttttttttttttttgaatacgtaggagtgtactctaaacagtaaagagcataccatactgaatatatttttttttttttgagatggagtcttgctctg

SEQ ID NO: 14474 - DNA, 201 bp, Homo sapiens
tctaaaggttagttgaataacatttaatcttctgcttttggccattccaggaagaatcagcctgtcagtttttctttgatttaaatgaaaagcagggaagraagcgttcatccacaggtagagatagcaaatcttctcctcatccaaagcagcctcgcaaacctcgtaagtacctttattccagaggtttcttctatgaac

SEQ ID NO: 14475 - DNA, 201 bp, Homo sapiens
tctcctatgataacagtgccctctggaatacttcctgaaggacctgcctgaggcttttttacagtcaactttttttttttttttttgaatacgtaggagtrtactctaaacagtaaagagcataccatactgaatatatttttttttttttgagatggagtcttgctctgttgcccaggctggagtgcagtgccgcgatct

SEQ ID NO: 14476 - DNA, 201 bp, Homo sapiens
tttatagcttcagattcagaaactagagccttatgaaatttttttttttttttttttgagatggagtctcgctctgttgcccaggttggagtgcaatggcrtgatctcagttcactgcaacctctgcctcccgggttcaagtgattctcctgcctaagcttcccaagtagctgggattacaggcacctgccatcacatctg

SEQ ID NO: 14477 - DNA, 201 bp, Homo sapiens
aggacctgcctgaggcttttttacagtcaactttttttttttttttttgaatacgtaggagtgtactctaaacagtaaagagcataccatactgaatatatttttttttttttgagatggagtcttgctctgttgcccaggctggagtgcagtgccgcgatctcagctcactgcaagctctgcctcgtgggttcatgctat

SEQ ID NO: 14478 - DNA, 201 bp, Homo sapiens
tctgcccgcctcagcctcccaaagtgctgggattacaggcgtgagccaccacccccggcctatgaatttttatctggaattatgtaatgctggaagctgaktcacactaactgatcacatcaaagataaaatttcagttttgcttagtagtggagggtgtagcttactaatgacaggaatacccatattcacactcctggt

SEQ ID NO: 14479 - DNA, 201 bp, Homo sapiens
gggtgaggtggggtggagtggagtggaggttgcagtgagccaaggtcgtgccactgcactttagcctgggtgacagagtgagaccctgtctcagaaaaagaaaaaaaaaaagtttggcgaggtgtacaataaaagcacgccagaaagagacactcacaaaacaataaaattttaatatttcaagatgagttaaaagacatt

SEQ ID NO: 14480 - DNA, 201 bp, Homo sapiens
tggtaggtgtccagtacctgtttatcaaatgaatgactgaagccctgtactaagataggaggagtcgtactaagataggaggagtcaaaataagaaggatagaatgaatgtgaaagatgtttggaaaaagggattgatgggacttggtgactggatgggggatttttgacttttgttgaccatgtcagccatagacatgtc

SEQ ID NO: 14481 - DNA, 201 bp, Homo sapiens
aatgtgtgtgtctcatgggaaagtcattctatttcacatttccccagatacttttgcttgggtagggctggattagacattaaataataccagtgtttgastctgatttccctgggttttctgtagaccattgttctttttcattcatttagaatgaagaaaacttaatttttaacactatagtcaccagtgactagaatt

SEQ ID NO: 14482 - DNA, 201 bp, Homo sapiens
atttaagtgagcaagaagagaataccccccttaccataatcccacagcctaatgcagaatcataggtaatacaggtttttctgttaaatctccatatactyattctagaagaatgtcttgttctctaaaaatatactgcgaaaacagaagttttgggaacaagccactcaaaacttacacagttcttaagaatcggaatac

SEQ ID NO: 14483 - DNA, 201 bp, Homo sapiens
atggactaagacaattccttaagtgtgtagtgcttctgaagacaggtgccttcatccatttctcattgatttgttctacttttggtttctggggttgatcstttcaacttatcctaacaatctgaggaccgttttttgtgtcttccttcctgtagactgactagagtctcaatttcatcttacactttaaggagttacact

SEQ ID NO: 14484 - DNA, 201 bp, Homo sapiens
ttctcatctaggcctgaaactagaggggaaaaaggtcttgtttgtggcccaacccaacatcccaagtaggccacatgagtatttcagcctagagtctacaytgtccttaggtagaaacctcttacaaacctgtaatgacctttgggtgtctgtggaagagtttgggatctcctccctgcaattattctttttgattgcctt

SEQ ID NO: 14485 - DNA, 201 bp, Homo sapiens
aactattcacaaaaattgcaagtacaggattagagatggtgcagaggagctctttagtttagacatcattacctaaagaatgcacatcataatagagaagytgatgtttatggcagtgaccttctgacaaaaatagctagacgactcaggcttctagagtaaccttttaaacaaatacaatataaagtggttattatacaa

SEQ ID NO: 14486 - DNA, 201 bp, Homo sapiens; identical to SEQ ID NO: 2179

SEQ ID NO: 14487 - DNA, 201 bp, Homo sapiens
tcttgaactcctgacctcgcgatccatttgccttggcctcccaaagtgctgggattacagtcatgagccaacgcacccggtctggataattgttttctaamgtatctatatttgcctgtactggtactcattgggcccttctgtgctcactcatggcatcttcccatcagagaatatctgagtggtagaccattcttgcat

SEQ ID NO: 14488 - DNA, 201 bp, Homo sapiens; identical to SEQ ID NO: 2181

SEQ ID NO: 14489 - DNA, 201 bp, Homo sapiens; identical to SEQ ID NO: 2180

SEQ ID NO: 14490 - DNA, 201 bp, Homo sapiens
cttttctgcctctttggatgcatctgagtttgaggttttactttccttctaccccattaggttgtatgtttgcttttgttttgtagaatttagtcagcagsttaaggcttaggaacattagatgctaatcatgccatcttagctttttttgtgagcccaaggagtatattcgggggtgggggtgggaatgaaagttactgg

SEQ ID NO: 14491 - DNA, 201 bp, Homo sapiens
ggattagtttatgctatttttctctcccacacaatttgtatagtaagttaggctttgaattgccttctgtttgggaagcttcaataggttcaagatcacaygcaggagataagagatttggaatgtgtgacatagctcagtgctgctctaggcctcagtgagaagtgacttttcttttccattcatctttctattgtccag

SEQ ID NO: 14492 - DNA, 201 bp, Homo sapiens
aggagtgtactctaaacagtaaagagcataccatactgaatatatttttttttttttgagatggagtcttgctctgttgcccaggctggagtgcagtgccrcgatctcagctcactgcaagctctgcctcgtgggttcatgctattctcccgcctcagcctcctgagtagctgggactacaggcgcccgccaccacgcccg

SEQ ID NO: 14493 - DNA, 201 bp, Homo sapiens
acatcactaggcgataggaattttttagttccattataatcttatgggaccaccattacatatgtggtcccttgttgaccgaaacattgttatgtggcacrtaactgtattcttgtctttaacctaaaaaggttattgaaatgcttaagaacgctttggcatgatcaaattttcattttggaaagcagttctgtctgcaat

SEQ ID NO: 14494 - DNA, 201 bp, Homo sapiens
catttttatatgtgttcttttcctagttatagtttagtacataagacaagtttaatcgttagaatctaaatcttttttttccccttgggaaatcatgatgrtgtttagaaaatcttagtagatttcagctaagcttagtgttttttattgtagtttggggttaacagtttgatacattaggtctttctttgtccaaactgg

SEQ ID NO: 14495 - DNA, 201 bp, Homo sapiens
ggtaggtgtccagtacctgtttatcaaatgaatgactgaagccctgtactaagataggaggagtcgtactaagataggaggagtcaaaataagaaggatagaatgaatgtgaaagatgtttggaaaaagggattgatgggacttggtgactggatgggggatttttgacttttgttgaccatgtcagccatagacatgtcc

SEQ ID NO: 14496 - DNA, 201 bp, Homo sapiens
tttctgtgaaatcttcacagtaaaataggttgattacagttgggtaaatagtatttcccctaatgtcattatgttctttttctctaaagtatctttacgcrttcagtattgttcccatgaagctaatggatgcagcagaactggtaaaacagcctccggatgtcactgaaaacccttacagaaaatctgggcaggaagcat

SEQ ID NO: 14497 - DNA, 201 bp, Homo sapiens
gtaggtgtccagtacctgtttatcaaatgaatgactgaagccctgtactaagataggaggagtcgtactaagataggaggagtcaaaataagaaggatagaatgaatgtgaaagatgtttggaaaaagggattgatgggacttggtgactggatgggggatttttgacttttgttgaccatgtcagccatagacatgtcca

SEQ ID NO: 14498 - DNA, 201 bp, Homo sapiens; identical to SEQ ID NO: 2170

SEQ ID NO: 14499 - DNA, 201 bp, Homo sapiens
aggtgtccagtacctgtttatcaaatgaatgactgaagccctgtactaagataggaggagtcgtactaagataggaggagtcaaaataagaaggatagaatgaatgtgaaagatgtttggaaaaagggattgatgggacttggtgactggatgggggatttttgacttttgttgaccatgtcagccatagacatgtccaca

SEQ ID NO: 14500 - DNA, 201 bp, Homo sapiens
ggcatgtggatcacctgaggtcaggggttcaagaccagcctggccaacatggtgaaaccgtgtgtctactaaaaatataaaaattagcagggcatggtggygcatgcctgtaatcccagctcctcgggagactgaggcaggagaattgcttgaacctgggaggcggagattgcagtgagccgagattgcaccactgcactt

SEQ ID NO: 14501 - DNA, 201 bp, Homo sapiens; identical to SEQ ID NO: 2171

SEQ ID NO: 14502 - DNA, 201 bp, Homo sapiens
gcagggcatggtggcgcatgcctgtaatcccagctcctcgggagactgaggcaggagaattgcttgaacctgggaggcggagattgcagtgagccgagatygcaccactgcacttcaccctgggcgacagagcaaggctctgtctcaaaaaaaaaaaaataaaataaataaaatagccaagctacaaggttgggtgtagta

SEQ ID NO: 14503 - DNA, 201 bp, Homo sapiens
ataatgtatatgttaattagcttgatttagccatcccacagtatatacacatttcaaaacagcatgttgtatacaataaaaaatacaaattttagttatcaattaaaaataaatgagagggaaaatttaaaaaatttttttttgtcttttttttttttttgagacggagtctcgctctgtcacctggctggagtgcagtgg

SEQ ID NO: 14504 - DNA, 201 bp, Homo sapiens
cacctcccgggttcaagtgattctcctgcctcagcctcctgagtagcttggattacaggcgtgtgtgaccatacccggctaattttttttatatttttagyagagacagggtttcaccgtgttagtcaggatcatctcgatctccttacctcgtgatccgcccacctcggcctcccagagtgctgggattacaggcgtgag

SEQ ID NO: 14505 - DNA, 201 bp, Homo sapiens
taatgtatatgttaattagcttgatttagccatcccacagtatatacacatttcaaaacagcatgttgtatacaataaaaaatacaaattttagttatcaattaaaaataaatgagagggaaaatttaaaaaatttttttttgtcttttttttttttttgagacggagtctcgctctgtcacctggctggagtgcagtggc

SEQ ID NO: 14506 - DNA, 201 bp, Homo sapiens
aggtttcaccatattggtcagcctagtctggaacttctgacctcaggcggtccacctgcctcggcctctcaaagttttgggattacaagcgtgagccactrtcccagccgaaagtggtcattttgaaatcagaagttgtatctttttgtggttgagggtgataaaaactgaaaaactgttttcaagtttggagcatgggag

SEQ ID NO: 14507 - DNA, 201 bp, Homo sapiens
tttactatatgaatttagtgccaggaaaggaaagagcagctaaggtacttgggttatttctgtgaaatagattttttggatccagtaggaggatcaagcartgaacttggtagtgaacatgtgatagtgagcttgaaatactggtaggacatccaacatatagttggaagtgagagttattattattattttttgagatgg

SEQ ID NO: 14508 - DNA, 201 bp, Homo sapiens
aatgtatatgttaattagcttgatttagccatcccacagtatatacacatttcaaaacagcatgttgtatacaataaaaaatacaaattttagttatcaattaaaaataaatgagagggaaaatttaaaaaatttttttttgtcttttttttttttttgagacggagtctcgctctgtcacctggctggagtgcagtggca

SEQ ID NO: 14509 - DNA, 201 bp, Homo sapiens
gttgctacaatctctaaaatcagattttttcaagaaagaatttttattaataacctcaagtacttttcgcctacaccctcaggctcactttttgtataggyttttctccctggagaatcctacatgctgtattgatgtctcaattctgtgtgctgcttcttcagtgctaccttgccctggccaaaggaggcttatctgatg

SEQ ID NO: 14510 - DNA, 201 bp, Homo sapiens
atagtcttggctcactgcaacctctgcctcccggattcaagcgattcttctgcctcagcctcctgagtagctggggttacgggtgtgtgccaccatgcccrgctaattttgtattttttagtagagacagggtttcaccatgttggtcaggctggtctcgaaatcctgacctgaggtgatccagctgcctcagcctcccaa

SEQ ID NO: 14511 - DNA, 201 bp, Homo sapiens
atgtatatgttaattagcttgatttagccatcccacagtatatacacatttcaaaacagcatgttgtatacaataaaaaatacaaattttagttatcaattaaaaataaatgagagggaaaatttaaaaaatttttttttgtcttttttttttttttgagacggagtctcgctctgtcacctggctggagtgcagtggcat

SEQ ID NO: 14512 - DNA, 201 bp, Homo sapiens
gggcaacagagtgagactccgtctcaaaaaaaaaaaaaaaaaaaaaaaaggccaatagacatataaaaagatgctcttatcattagccattatggtaatgyaaatcaaaagcacaatgatacaccacttcatacccactaggatggcagtagtcaaaaaggcaaatacataataacaagtgttgacaaggatgtggaggaa

SEQ ID NO: 14513 - DNA, 201 bp, Homo sapiens
ccgccttccgggttcaagtgattctcctgcctcagcctccccagtagctgggactacaggcatgcgccaccatacctggctactttttgtatttttagtcragacggggtttcaccatattggccaggctggtctcgaactcctgaccttgtgatctgcctgccttggcctcccgaaggtattacaggcatgagccaccca

SEQ ID NO: 14514 - DNA, 201 bp, Homo sapiens
ccaggcgtggtggcagacgcccgtagtcccagctacttaggaggctgaggcaggagaatggcatgaacctgggaggcggagcttgcagtgagccgagatcrcgccactgtactccaccctaggcgacagagcgagactccgtctcaaaaaaaataaaataagaatggcctgacttcgaggctgttctgaggcgcttcctgt

SEQ ID NO: 14515 - DNA, 201 bp, Homo sapiens
gctactcaggaggctgagagtcaggaggatcacttaagcctaggagtttgaggatgcagtgaggtatgattgcaccactgtacttcagcctgggcaacatygcaagaccctgtctctaaaaaaaaaaaaaaaaaaaagaggcagtggacaatttggaactagagcactgggtattgactagactggagatgaacagggcat

SEQ ID NO: 14516 - DNA, 201 bp, Homo sapiens
taaagaattgtatattgaaatctgcaaattgattaagaattaaaaactgatttgaaactattaaataactagttgaatattactatcaattatgtactgtwtgatattttaaaatctcatatatctgtttaaaaaactcattttagctgctgttgtgtgtaggaaatttctttggctccacccaagatgctgaatgggagg

SEQ ID NO: 14517 - DNA, 201 bp, Homo sapiens
ccgtagtcccagctacttaggaggctgaggcaggagaatggcatgaacctgggaggcggagcttgcagtgagccgagatcgcgccactgtactccaccctrggcgacagagcgagactccgtctcaaaaaaaataaaataagaatggcctgacttcgaggctgttctgaggcgcttcctgtactatggaaaaagcaccttt

SEQ ID NO: 14518 - DNA, 201 bp, Homo sapiens
tgctatgaacagagtggtgggctacatgggacaattgataaaaagctaaattgtaaacagtccttgccccagaggacccatggtcttagggcagatgtttwcatatatgacagtaatgtaatgtagaatgtgaagagtaccatgacagagttttggagaacaatgtgctgtagaaattcagaaaagggacagctcatttct

SEQ ID NO: 14519 - DNA, 201 bp, Homo sapiens
aaatgaggctctagagcagtgcccggtagacttttcacaacgatggaaatgctcaaatatctgcactgtccaatacagttgtgactagccacttgtggccmctgagtgctgaaatgtggctaatgtgactgaggaactaaatttttgattttatttaattaattagaatttaaatttaaatagccatacctggctaatggt

SEQ ID NO: 14520 - DNA, 201 bp, Homo sapiens
gaaatgtggctaatgtgactgaggaactaaatttttgattttatttaattaattagaatttaaatttaaatagccatacctggctaatggttaccccactrgatagcaggctgtagagagcttaggtagcttgtcctagtcacacagtggtaggttcaaacccaggcctgttggacctcaaaacttgaggtcttaacctca

SEQ ID NO: 14521 - DNA, 201 bp, Homo sapiens; identical to SEQ ID NO: 2182

SEQ ID NO: 14522 - DNA, 201 bp, Homo sapiens
caaaaccatagagggagtaacataacttaagcaaagattgaagatgggaagttgctggcaagaagatacagtttgaaggggagtggaaaatgtgtagaacrgagtatctgatgctggtgtctgtgatttgcagctgttttttctcccctagttaaaaatgggctttgagtgagccttgaacctgtcttggactaattcaga

SEQ ID NO: 14523 - DNA, 201 bp, Homo sapiens; identical to SEQ ID NO: 2183

SEQ ID NO: 14524 - DNA, 201 bp, Homo sapiens
gtgtgtgagtgtgtctgtatgtagttattctttagtcctaagagccaagatagttgttttgttgacattgggcttgtgctgctgttacgtgggcctgagtyccctagaaggagaggcagaggaattttaaatcagagtgggtatgactaggctcctgactctgcaaactcatgtctagttgaggtgacaaaactacagttt

SEQ ID NO: 14525 - DNA, 201 bp, Homo sapiens
ctaaaaaggcagtcttctgttgcttatatacctgtattgggttaaaaatgttgatattctttttatagcttcagattcagaaactagagccttatgaaatttttttttttttttttttgagatggagtctcgctctgttgcccaggttggagtgcaatggcgtgatctcagttcactgcaacctctgcctcccgggttcaa

SEQ ID NO: 14526 - DNA, 201 bp, Homo sapiens
gactttcttattatagatgagaagtgattccttccttcagccttaactttgagcccaccacactaagagcatagttggaataattttttattttttttccygagacagtcttgttctgtcgcccaggctggagtgcagtggcacgatctcggctcactgtaacctccgccttccaggttcaagcaattcacctgcttcagt

SEQ ID NO: 14527 - DNA, 201 bp, Homo sapiens
cttagctactcaggaggctgagagtcaggaggatcacttaagcctaggagtttgaggatgcagtgaggtatgattgcaccactgtacttcagcctgggcarcatcgcaagaccctgtctctaaaaaaaaaaaaaaaaaaaagaggcagtggacaatttggaactagagcactgggtattgactagactggagatgaacagg

SEQ ID NO: 14528 - DNA, 201 bp, Homo sapiens
tgtatgtaggagcacgaatgtgtgagaagagggctgaaggggactgcctttgggaatgtgtgcgtccgtgtgtgtgtgtgtgtgtgtgtgtgtgtgtgtgygcgcgcgcgcgcgcgcttggaggccatatgatatcagtggggactggagtagacaaggaaggcttcatgatgggtccagagttaagcctttggaagcatg

SEQ ID NO: 14529 - DNA, 201 bp, Homo sapiens
attttttgtattttagtagggatggggtttcactatgtgcatcttttctagactgtagcttccttagaactgtatttttcttcgcattgccttttcctgtstccagatgtctgcatttaagtccatgtagaatcttctctagaacgcagaaagccttttccctaatcttctcttcccaactttttccagtaatatttgtaa

SEQ ID NO: 14530 - DNA, 201 bp, Homo sapiens
ttcccaccagcagtgtatgaaggtttctgcttttccacatccctgtcaacatttgttatagcaatagccagttttacaagatagctctcttttcctctctyataaataggtatggttctctaggggtgatgcttttatatacttcttggactctctgtattttttagcccgtctaattgagagtgatgagttccttttgct

SEQ ID NO: 14531 - DNA, 201 bp, Homo sapiens
agctgctggagagtttacacttcagacatgtaaaatggcagggacataggagagtcatgggagattcatccccctattgatggcttttcattctgcaattytgactaaaatttgttcatttttctttgaacccaggtcgtaaaggtatcttcactggaagctcggggctgcagattgtgtacctcagtgggacagaatcct

SEQ ID NO: 14532 - DNA, 201 bp, Homo sapiens
gtttgggttgtttctactttatggctattagaaataatgctcccataaaatatctgcatgcaagtctttgtgtggatatagacctaggaatggtctatatkttggatagacctaggaatggatttgctaggttatatagtaaatttatgtttaacttttaagaaactgctaaactgttttccaaaatgactgcaccatctt

SEQ ID NO: 14533 - DNA, 201 bp, Homo sapiens
cactggtggaagtaagcctaaggaagattttgaaaaggttatgtgtgagggcagaaaacactgggtgagcttcattgaagggaaatgtaagaatgcatttsggaacaaatctccatggttggattcaggattatcagtgatgatccagaagtggagcctgtataccaccccttgccagtttcagcaccatgtgtccatgac

SEQ ID NO: 14534 - DNA, 201 bp, Homo sapiens
acaggcgtgagccaccatacctggccagattttaatattttatgagtaatcttgaaaaggatggtacaccaggagtgacaactatcatggggagtgaaacrctacactggtggaagtaagcctaaggaagattttgaaaaggttatgtgtgagggcagaaaacactgggtgagcttcattgaagggaaatgtaagaatgca

SEQ ID NO: 14535 - DNA, 201 bp, Homo sapiens
gtttttactgaatttaattttacctttgtagtcacacataaaaataaagtttgcactcctttaagtcttgattgaacacataccatttttgttaaattgarttcccttcatgagcataggaacttagtagctgctgagtggctgggggagggagacctatttactgtttactattgatctttatattttttgaatttgaat

SEQ ID NO: 14536 - DNA, 201 bp, Homo sapiens
aattttttaccacaaataaatatgagataatgtatatgttaattagcttgatttagccatcccacagtatatacacatttcaaaacagcatgttgtatacmataaaaaatacaaattttagttatcaattaaaaataaatgagagggaaaatttaaaaaatttttttttgtcttttttttttttttgagacggagtctcgc

SEQ ID NO: 14537 - DNA, 201 bp, Homo sapiens
atgggttcataaaataatagaatgatcaaactcgaaggaaggactttaagagtgtttcattgagattctctttcttcatctttttgtttcacacaagaagstgaccttgggagggtaaattttccagggtcatggctaatggcatagctggggctttaattggggctcctgacacccagttcagtgttcttttgttgtagc

SEQ ID NO: 14538 - DNA, 201 bp, Homo sapiens
tgatattttattcaatagagttcaagcaattcagaagaaaagtggaaactttgatgtaagatgtttgtttttactgaatttaattttacctttgtagtcayacataaaaataaagtttgcactcctttaagtcttgattgaacacataccatttttgttaaattgagttcccttcatgagcataggaacttagtagctgct

SEQ ID NO: 14539 - DNA, 201 bp, Homo sapiens; identical to SEQ ID NO: 2172

SEQ ID NO: 14540 - DNA, 201 bp, Homo sapiens
tgagaccctcagtggatctgcccagtggtttacgtgcactgaaccttgcaaggtaactgcagagagactagatcatgtatctatctaatccaaaagaccartatataccaaacccggcaggcccatttgtttcctgaattgctataatgtttatctctttgtttgcagcttggcttgtggagatgttgaaggaaagtttga

SEQ ID NO: 14541 - DNA, 201 bp, Homo sapiens
gctctgtcgcccaggctggagtgcaatggcatgatctcggctcactgcaacctccgtctcccaggttcatgccattctcctgcctcagcctcctgagtagytgggactacaggcgaccgccaccacacctggctaattctttgtatttttagtagagacagggtttcaccgtgttagccaggatggtctcgatctcctgat

SEQ ID NO: 14542 - DNA, 201 bp, Homo sapiens
tgcagggaggtcctggccagtgaagccatccttaatgttcctgataagtctgactggaggcagtgtcagatcagcaaggaagacgaggagaccctggctcrccgcttccggaaagactttgagccctatgactttactctggatgactaaaacaaagggaagaactttttatgaactccacaggaagtagtaaagcttttt

SEQ ID NO: 14543 - DNA, 201 bp, Homo sapiens
cactgcaacctccgtctcccaggttcatgccattctcctgcctcagcctcctgagtagctgggactacaggcgaccgccaccacacctggctaattctttrtatttttagtagagacagggtttcaccgtgttagccaggatggtctcgatctcctgatatagaggtcaagttcttaaagaatatactgccaagaaaacca

SEQ ID NO: 14544 - DNA, 201 bp, Homo sapiens
agttttagtcccaaggatgtgtcttctctgagaatgatgctgtgtacaacctcccagtttaagggtgttgatatcttgctcacatccccatggcccaagtrtgtggggaactttgggaattcttctgtgagtagtgtttgtttagttggaatttctaaaagcaaattgcactggcttgagttgggacttttttcttttcct

SEQ ID NO: 14545 - DNA, 201 bp, Homo sapiens
cctggctactttttgtatttttagtcgagacggggtttcaccatattggccaggctggtctcgaactcctgaccttgtgatctgcctgccttggcctcccraaggtattacaggcatgagccacccacgcctggcaagatctggtttttgacatgttgagcctaaggtttttgacatgttgagctatcaaggcattccaaa

SEQ ID NO: 14546 - DNA, 201 bp, Homo sapiens
gccaccatacctggctactttttgtatttttagtcgagacggggtttcaccatattggccaggctggtctcgaactcctgaccttgtgatctgcctgcctyggcctcccgaaggtattacaggcatgagccacccacgcctggcaagatctggtttttgacatgttgagcctaaggtttttgacatgttgagctatcaagg

SEQ ID NO: 14547 - DNA, 201 bp, Homo sapiens
cattctacaggaaaatgcacagcatgccacccggtttatagctctggcaaatgttggaaatccagaaaagaaaaaggtaaagatttacctatttggtggarggttgatattcatggtctgcctgataaatgtatctcttgtccagtttagcattcagatcttctcttctccctgactgcaaggtctcagcagtttcggaga

SEQ ID NO: 14548 - DNA, 201 bp, Homo sapiens
tgtatttttagtcgagacggggtttcaccatattggccaggctggtctcgaactcctgaccttgtgatctgcctgccttggcctcccgaaggtattacagkcatgagccacccacgcctggcaagatctggtttttgacatgttgagcctaaggtttttgacatgttgagctatcaaggcattccaaaaatgttattaaat

SEQ ID NO: 14549 - DNA, 201 bp, Homo sapiens
ccttacagacaggctgacacaggcttgtctggcctgaggatattctgtgctgaggggtgtttctccacccctgtgatggatttgctacttctcagagactrtgcaggcacaacttctctgggacctgcacaaggaatttctcctgtctccccaacccccaggtcattcctgtcccaatcagctgctctactactgatgaca

SEQ ID NO: 14550 - DNA, 201 bp, Homo sapiens; identical to SEQ ID NO: 2177

SEQ ID NO: 14551 - DNA, 201 bp, Homo sapiens
gcccttcttaaagaggccaaacctgccattcaaattaaaattgtaaattactctccttctgcatacaagcacttatcaatcaaaaatcaaatttttgtcarttctcctttcttggctctttttttctcaatagcacttatcatttcttattcattatgatattattatgttatatattaatatgttatattatacacaata

SEQ ID NO: 14552 - DNA, 201 bp, Homo sapiens
ctgaaactgactccacactgtgccttctcagacaatccccttccctgtcacactagagcattaaatacctgaaaagataaaacaattcacacctctctccrcagtctactaaggaacccacaaggttgtccactctctaggaaacacacatcaaatgcctgagttttagatggagtccaatgcaatttatctgatcaataa

SEQ ID NO: 14553 - DNA, 201 bp, Homo sapiens
aaagaatttaaatatctagacccttcccacatatttttctgagctaccagttttctctttttcactaacttccacgtatcatactacagactgttgcttaraccatgcatttaagtcacagcatcacccctcccccagatagggagtgtctattttattttttctctgtgaaccttgtctcaggcctcctgaaactgactc

SEQ ID NO: 14554 - DNA, 201 bp, Homo sapiens
gtacctggggcttatagtcaattgtgatacaacccttgccctctgggagctcatagcctgtttctaataagtaagcaatagttacattgcagtgtggtggrtgcattggttagacactgagggcaggttgctatgggaacacagaagtaggagagaccaatgctgccttacctggttgaggaaggcccactggggagagaa

SEQ ID NO: 14555 - DNA, 201 bp, Homo sapiens
tctgcagagttcctgtcctcttggcctctgtctggcagccctgagctgtttagttgagttgctggctgtctgattgtcagtcatcacctattgcactcttyggaccttgacgagatctgtctgggatctagatgagaggttggggaggggcctgatcaggtcctcaccattgttgctcacacacatattatcagcctcacc

SEQ ID NO: 14556 - DNA, 201 bp, Homo sapiens
aagtctctgtttttcaggcagacacagagcagctgccatagttcaggggtggggtttgtgccatcagccatttccaggagctgaaggaggtcagaaccctraccacagatgccgcctggtgctctcagccacaagaccaagacagcctccggggaccccatccctcaagcaagaagtcaaatgcaaaggtaatcatttccc

SEQ ID NO: 14557 - DNA, 201 bp, Homo sapiens
ggggctatgatgggaatgtgaagcagcactgtccccctgggacacacgggcagccaggccttgtccagactgagcccggcagggtcctgacacagaccatrcaggtggagcagagagtatgtggggactgggtctgtaggtacctgaatagaactgtggcagaggggatggatggagagaacggatatgatttggcttggt

SEQ ID NO: 14558 - DNA, 201 bp, Homo sapiens
ctgtcttgctcggggccccccatttaagtggtggagatagaatttagatccaggtgtccctgacttcacagccagagctctttctcaggctgcctcccacrgatctcaggagcacattagaaagccaagagccatttgcaacatcttatttaatctaaaacttacatgataatgatggatgatggatgatgcggtttatta

SEQ ID NO: 14559 - DNA, 201 bp, Homo sapiens
gaccaggcaacgagaaaacccaagggcaggctggaactgctagaggggcctagcacttcccatatcttttccttccttttgcccagcacaaagtctaagtrcctcatgtgcatcatctcatttaatctagtcactccacttcacagatgaaacacccagggcctagtcaaaggcgcatgcctcgactggagccagcatctc

SEQ ID NO: 14560 - DNA, 201 bp, Homo sapiens
acagcgttcccctgtgaaggacttgcctactgccccagcggtccttggacataggagtccttacagactctgaatgcaatcagagccctgagtcattagakcccaggaccctgaagtctctgtttttcaggcagacacagagcagctgccatagttcaggggtggggtttgtgccatcagccatttccaggagctgaagga

SEQ ID NO: 14561 - DNA, 201 bp, Homo sapiens
ttctctggtgtcaccgctgccgcctcttccatctcagtctgagtgagacacactcctgtgtgctcccagagcacctgtgcttttccttccacactgctggragagctgatatcctgctctctttctttcctgttaggttgtaaacatcttaaaggcatgtcttattttcctttgtgcctcccagggagtggggcatatgct

SEQ ID NO: 14562 - DNA, 201 bp, Homo sapiens
taaataaatgaatgaacaaatagatgagtgaattatgggcaatatgctgacaccagatgaaaccttttttttttcttagcctagctggtgcccaacggtcrgtttcttagtgtatgggcttcagatcacctgcatcagaatcttctgggttgcttaataaaattcacattctagggccctactttgcacctgttgaattga

SEQ ID NO: 14563 - DNA, 201 bp, Homo sapiens
aaaatgcccatacccttgacctgcaattctgcttatagaaatttatgcttcaggccaggcgcggtggctcacgcccgtaatcccagcactttgggaggccragacgggcggatcacgaggtcaggagatcaagaccatcctggctaacacggtgaaaccccatctttactaaaaaatacaaaaaattagccgggcgtggtg

SEQ ID NO: 14564 - DNA, 201 bp, Homo sapiens
ccatcctggctaacacggtgaaaccccatctttactaaaaaatacaaaaaattagccgggcgtggtggtgggtgcctgtagtcccagctgctcaggagacygaggcaggagaatggcatgaacccaggaggcggagcttgcagtgagtggagatctcgccactgcactccagcctgggcaacagagcgagactccatctca

SEQ ID NO: 14565 - DNA, 201 bp, Homo sapiens
taagatcaacaacgggaaattttagattagccggctgagccgaggttaaggtgcctgaattgccttactctgtgcctcaattgtatatctaggctgactcrgtgttttagattctcatgttaagcttgccatagtgcctcataaatcagcactgggcagatgtataaggatctattgattgttgcatctaggctgtaagat

SEQ ID NO: 14566 - DNA, 201 bp, Homo sapiens
tatcacatgtagatttgagtaaccaccaccacaatcgacatacacagttattttatcaccacaaagatatctctgtgctaccactttatagttatgcctasctccctgtcttcccccaccatccttaaatcctgggaatcatgaatctgtttttcatatctattattttttcatttacagactgttctatacatggaatca

SEQ ID NO: 14567 - DNA, 201 bp, Homo sapiens
ctgtcttcccccaccatccttaaatcctgggaatcatgaatctgtttttcatatctattattttttcatttacagactgttctatacatggaatcatagaktatgtgacttttggagatgggcatttttttttaactgagaatagtgccattgagatacattcaagttgttgcatgtatcagtggtctgttcctcttttcg

SEQ ID NO: 14568 - DNA, 201 bp, Homo sapiens
agaaatataccagtttgtttaacaatttgtgcattgagcaaaatttggttgtttccattttgtggtcattacaaataaagcagattgtttacatttattayaattatcaaaatgttagaatacaagtctgccattttatttttattttttgtttttttcctgttgtttatttctctggtttctttttcctgcctacctatg

SEQ ID NO: 14569 - DNA, 201 bp, Homo sapiens
catgatgctgcccagctgcacgcactgaactagattccctagttcagtttctggtaagttgaccccctggctcacccatgccataactcagaagtgaaaawgtctgaggatggcatgggtgctttctctcgtgtctgcttcacgcttgccctgggagtggacctttcgcttcctgcttcaacagaactccaagctgtggtc

SEQ ID NO: 14570 - DNA, 201 bp, Homo sapiens
agccgttcctgtttccctccagaggtactctatcagagccagcccaccctcagccagccacagagggccgtgctataaacaacacgtggcctgtcgtgagmgggtggcccgtattatggtgcaatatggggaggatatgtcaagcaaaagctgaactttctccctgcaacctccatccagaggtgaagaactgtggggaaa

SEQ ID NO: 14571 - DNA, 201 bp, Homo sapiens
gtgtgtgtgggagctcagcatgaccaaaggccgcccgaggggcttgcgcctccggcaggtatggtccagctcgtgcaggtgcggtcctcaggtggggacastacttcatgtagggacaaaacctctgcctggcatggcacctgggcaggtgtggtgccggaacacaccctaactctgctcactgagggccctgccaccctc

SEQ ID NO: 14572 - DNA, 201 bp, Homo sapiens
caaaaaaaaattatttcccaaaaatgtcaaaaggcaaaatgctgaagatgtcatgttagtgaaagaaacatttgtccgtgtgagccctgtgttctctggcrcacatgcacccccatacccagaaaagaggagagaaagaacgccaagaatatcagcaacactgctctctgaagggacggtactggactctttttactttcc

SEQ ID NO: 14573 - DNA, 201 bp, Homo sapiens
aggctctgtgccaggggacacacattgaaaggggcatggttttctctactccatgggaagaggctagggtctgaagagatggaatgacttcaccagcatawccagacttggaatgaggtctgggcagctccaaatcccgtgctgtgagccatattccagctggggctgggggtggctcccagagtggagctgagggaggat

SEQ ID NO: 14574 - DNA, 201 bp, Homo sapiens
ttatctatcccccattctcctcccccacctaccccaagacacatggcctgtctggttcacttgtccatttcacttcctagcacagagtaggcccttggtcmatactagtttaatagatacagtctaagcgcttacaaggtcaatcctgattcccatgccctcagaaagggtctcagctctcagctttgtcccagatttcat

SEQ ID NO: 14575 - DNA, 201 bp, Homo sapiens
gccaggacccctggtatcctgctggggacctgaacatcccctcaagttccaccgaggctttctgtccaagtggagggccagtgagcagcactgtgaggctyatgtctggaaaacccagagaagggatggggtctataccttaggttggcaaggaaaggcttgagctctgggctgtttcaagagctccagtagaccctgcct

SEQ ID NO: 14576 - DNA, 201 bp, Homo sapiens
gtatctttagctgaggctgtttgtagaaggtgagggtgggtgttaacctttatatgcagtaacttcctgtctttctgaatctccatgactttctgaaatgmaaacaacacatgtcattcctacttaatatttctgagacgctggttagcattcttcatatgcaaggccattccagagctggccttgtagtttccctggact

SEQ ID NO: 14577 - DNA, 201 bp, Homo sapiens
cttggtttcctgtggaggtagcccactgccctcttccctccctctctctttcccttctgcctcagggtcaggttccaagtcacctccagtcttcccaggartccttggccatggaattgggtgagatcagattgggaaagatggtctttctcggtgtcgtcgtggccatgttcttgattctattcaggttgtcccgggcgt

SEQ ID NO: 14578 - DNA, 201 bp, Homo sapiens
agcatctctgagtctgttttctgcaatgtatttcctgcactagtcagaaagaaaattatattctctctacccaatgaaccagaccttgccctaagatattmtgatgcaaatgttaagtggacatgagtaactagaaacagatttggtataattacaataaactccttttgtcaccatagctatagtgtaattgttattgtt

SEQ ID NO: 14579 - DNA, 201 bp, Homo sapiens
cttcctgataagattccggctaaggtccagctcgtccatgtcactaaggcgcagaatacacttggggaaggtggtaattcccatcttgctcaagtcaaggygctttttcccatcaaaagtgattttgatgcaattcctggccaccttgagggtgatcttcttgcccttggggcctttctcacccttaaccatgttctttta

SEQ ID NO: 14580 - DNA, 201 bp, Homo sapiens
aggatggcaccaggccattcatgagggacccacccccatgaccttccattaggccccacctccaacactggggatcaaatctcaacatgaggtttggaggrgacaaatgcccaaaccatatcagtatctcattatacctacataaatttatcacagactactggcattgagatgtactagtctgagtgaaatgtagaggca

SEQ ID NO: 14581 - DNA, 201 bp, Homo sapiens
gaaagagctgctgcagccacaggggagcccttggtttcctgtggaggtagcccactgccctcttccctccctctctctttcccttctgcctcagggtcagsttccaagtcacctccagtcttcccaggagtccttggccatggaattgggtgagatcagattgggaaagatggtctttctcggtgtcgtcgtggccatgtt

SEQ ID NO: 14582 - DNA, 201 bp, Homo sapiens
tgagctttttcagcttggggagcttggagatgctcacggggatgttgttcagtaggttgtcatggagccctacctcgtggagctccttcagggcccccagygtggtgggcacgctgtccaggtggttcaagcctaggttcacagcgcggatgttcttgagttgcttcagctccacgggcagcccgttgctggtcagccggt

SEQ ID NO: 14583 - DNA, 201 bp, Homo sapiens
taggatggtgacagggcttgggggaagacctgccttgtacattgtagaatgtttagcagagtaaggccagaagattctacccactggttgccaatagctgyccactagttgtaacaatcaataatgtctcttgacattgccaaatgtccactgaggagcaaaattgcctggagatgagaactgctagtatagaataactca

SEQ ID NO: 14584 - DNA, 201 bp, Homo sapiens
gttgtaacaatcaataatgtctcttgacattgccaaatgtccactgaggagcaaaattgcctggagatgagaactgctagtatagaataactcactattaycactgaccaactgaatctgacatgtataaagcactctacctagcaactgcagaatacaaactcttttcaagtacatatggaatatccactaacacagact

SEQ ID NO: 14585 - DNA, 201 bp, Homo sapiens
ggagcaaaattgcctggagatgagaactgctagtatagaataactcactattaccactgaccaactgaatctgacatgtataaagcactctacctagcaaytgcagaatacaaactcttttcaagtacatatggaatatccactaacacagactatattttgggtcatgaaacaagccttaacgaatttaaaggagttgaa

SEQ ID NO: 14586 - DNA, 201 bp, Homo sapiens
tgccactgcactccatcctgggtgacagaatgagactgtgtctcaaaaaataaaataaaataaaataaaataaaataaaataaaataaaataaaataaaatcacaactatcattaagctgtgacttgttttctcctttctccaggattttgtgtcatgtatagagaactacagaagaagaggacaagagctatatgcatct

SEQ ID NO: 14587 - DNA, 201 bp, Homo sapiens
agcactctacctagcaactgcagaatacaaactcttttcaagtacatatggaatatccactaacacagactatattttgggtcatgaaacaagccttaacraatttaaaggagttgaaattgtacaaaaaagtacaagctggttctttgaaaagattaatgaaacagatagccagactgacaatttaaaaaaaaaagaaag

SEQ ID NO: 14588 - DNA, 201 bp, Homo sapiens
cgggtgaggtctccactgggcagcagtgcccagaaggaaaggtggttgctgaggaagggcgctggccccaggctgccaggacagtgctgagccaccacccracctgcgacttttcctccgagggtcccaggtctcagttggcagtgaggcagtggctgagaccaggggctcttctgtgtagcccaggcctggcactgcctt

SEQ ID NO: 14589 - DNA, 201 bp, Homo sapiens
tgcattaatatttattttccccttccttctacttgctttagatttagtttgctcttttttccccagtgtcttcagatggaagtttcagatattgatttaaygtgtttcttttttttcttaatattggcatttataactatgagttttcctttatgctcttctttagttatagcctacgtgttttggtatgttgtgtcttta

SEQ ID NO: 14590 - DNA, 201 bp, Homo sapiens
ttttggaggtcccttgtaatttcatatgatcttgaagattgacttttcaatttttgcaaaaaagagtgatcattggaatttgatagggattgttaattctstagattatgttaggtagtattgacattttaacaatataagaacttgttaccatacatatgggatatcttctattaatttaggtcttccagtgatatttta

SEQ ID NO: 14591 - DNA, 201 bp, Homo sapiens
ctggctcctgcagactcctgaagagcagtcccagccaccagtgtgtttccccttctctttcctgtcactatctaattgatcaggtagagccagagttagcrtctctggtgaatcctgactgattttagaagtctctggaaatacacagcatgccatgatgatttcccttaaactctcacttgcagctgcacgtgggtgggt

SEQ ID NO: 14592 - DNA, 201 bp, Homo sapiens
cactatcacaagaacagcatgggggaaaccacaccatgatttagttgcctccacctggtctcccccttgacacgtggaaatgatggggatttgggggattrcaattcaagatgagatttgagtgggcacacaaagcctaaccatatcacttttcactgttgcttttatttttggtgccaaaatctaaatcggacaaatgcc

SEQ ID NO: 14593 - DNA, 201 bp, Homo sapiens
cttgctcctcttctctgcctatacttattgtgctggtctacactcactctcctggtaagcccacctagtctcattgctttgaatacagtctatacactaaygattgcccggtgtttggttcttgcccggaccttgctccccaattctggactcacttagcctactgcctacttagcatttcttcttggatgatgataagca

SEQ ID NO: 14594 - DNA, 201 bp, Homo sapiens
tgttcaaaacacacaaaccaacctcaagagaagcaaaagtcaaagaaccaaaggcagacctggcccctttgaagcccatgaggtgagcagtgattccattycacccaatgtgttttaagcgctgctattgccagacaggtgttattttgtcttctcctcacagctcctctcctcccacagattaggaaactgggtctcaga

SEQ ID NO: 14595 - DNA, 201 bp, Homo sapiens
gcttctgcatgcttggcttagaagtccagctctactctactcacaatcttcttaaattcccagtgcttgtgttttcttatttgtgaaaacagacacccttrcagagctatgagggggcgtaaattatctaatactataaagcacttataacagtgcctggtacatagtaatagcttgattaatgttagttattaaaaattg

SEQ ID NO: 14596 - DNA, 201 bp, Homo sapiens
catgtggagcccttggaagctgtaaatgctttagaaataggagactgtttacaaattccatttggccttctagctctctctgccaaggtcaagatcatccyataggtgatatgtgtaccaagtcctaaaacttggagcattcccacttgtgcccatatacctgctcctgaccagtgtcacttgagacagaaggggcccagc

SEQ ID NO: 14597 - DNA, 201 bp, Homo sapiens
gtgattttgatgcaattcctggccaccttgagggtgatcttcttgcccttggggcctttctcacccttaaccatgttcttttagtaagggagtgttagaartttattgttctgattggatagtgatcagtgtgaggaaaaatcatgaaaaactgctgaaagataagaaaacatctggttaggagatgccagagggcactgg

SEQ ID NO: 14598 - DNA, 201 bp, Homo sapiens
gtgtgcaacagatttagaaaacaaaatccagccagaagaccaaaaagtcgggggagaagagatgctcctgggagccacagagttcagagagattgcaacarggaagaaattcaggaaaagtgattctgaaagttgtatagcaactctgaactctcctgagctgcctctgtttaaaggcagaggtgatttcttcattgtgtg

SEQ ID NO: 14599 - DNA, 201 bp, Homo sapiens
ctttgctcttcagtggtttaaaaagcaagaaagaggattgcggagagaagtcagggcaaagtggacccagcccagccatagattgtcagcaaactgtgtgmcttcttcagactttgattttcttggatgttaaaataggaggtgcagggtcagcctgaaggacactaaatgtccctctagctgtgccatgccccgacttat

SEQ ID NO: 14600 - DNA, 201 bp, Homo sapiens
gcagttcctcagcctcgtccaccgcacctacccccaggacccagcgtggcaagccccggagttcctccagaccttggccatagccgccttccccctgggakcccaaaaggtaggacatgctgctgtcccacccagagagagcagttgtgagcatcatcatccttcaagggcaaagggcaaaatccctcccctcccccctaa

SEQ ID NO: 14601 - DNA, 201 bp, Homo sapiens
caagaactttaagttcctggtgggcaagccttgttccgtgcccatcttgaaggccttcgggtttgcacagggcctgaactagagcaggtgctgtgaatcamtggctgaaaagagactgctaggaagaagccaggttcatctatttcaggcttacctattttttatgcacaatggctgcatctatggggacccagcctaaag

SEQ ID NO: 14602 - DNA, 201 bp, Homo sapiens
gcaggctattttctcccgtctctacccttgggaaaatgtggtcctctctgcttagaggaggcctgcagggatactgtcccttctgaaagcccaccaagccytctccagcctggctgtgagccggtgtggcctcctctgtgggcaagtcattttctcatttactccctcacaagaactttaagttcctggtgggcaagcctt

SEQ ID NO: 14603 - DNA, 201 bp, Homo sapiens
ggtctcaatagcctctaggctccagcaggaagctattgtgtcctggactccatactccaggccagtgagtgtgggcatcagggggcagtggaaatagcccrgcatgggagggagttgattgggtgggttagaggctgcctctgccacgtgccccctgaggtccatggccaagccccttgctcctcttctctgcctatactt

SEQ ID NO: 14604 - DNA, 201 bp, Homo sapiens
tgtatttatttatattctgactctctccccagaggctttatggtacctctagatgaggatgtgtgcaataaaataaggaaatgagatcaggaaagaaaatratcatagaagaaagtcaattcctaggaaattcagagcttgaatatacagtctctaaagactcaccgtcacataccagcactgtgctccagcttcctgaat

SEQ ID NO: 14605 - DNA, 201 bp, Homo sapiens
gtgtgtgtgtgtgtgtgtgtgtgtgtgtgtgtgtgtgttggtgggggttggcacaggaggcagcagcatggatgggaccacacaactgaccaaatggggarcctggactccaggtgccagcccagtagaaaccctattcagaccctgcagcctagcgtccttatggaccgtgacccctgcctccctgagtgcaggctttca

SEQ ID NO: 14606 - DNA, 201 bp, Homo sapiens
gagtgaggaaggtctgtgaggttcttttcagtccctcaaagtttgatcactgcctccacttgggaagccctgaatcatgaccttgaggagctgattttggmgggctggtggggaagcccctcacggcgacacagaatgctgcccctgcagagcttacctactgctgtggcaccccgaggaggcgagctgggaaagagaatg

SEQ ID NO: 14607 - DNA, 201 bp, Homo sapiens
ttgtaaataccttgagtatttaccttattgaattttgttttgttttgctttgttgtaaataccttaggaattcaacagaatcagggtatctacaaataggracaattttatttatttcttttcaatctgtatggcttttactttttttcttgccttattgcactgaatagaacttctagcactatatttaataaaagcagt

SEQ ID NO: 14608 - DNA, 201 bp, Homo sapiens
aggtcctcggtgagggaaatgatgtttttgactatcccctctgagcacttcacccattatctttttgaaaaaaaaatcattgtggaaattctcaaacatayacataagtagtaaaataatgtgatgaatccccatgtatctatccatcacttgacttcaacaattttcaactcatggccaattttctctccttatgacttc

SEQ ID NO: 14609 - DNA, 201 bp, Homo sapiens
taaaggcctggaaatatttgacaaacaatactaatggccagcacattgtatattctgttagtttttctttcctaggcaaatatacacagatttaattcttrttcttgtaagcatactgttttctattctccttttaaaatcttgatatagcaagaacctggtgcccatcaataggtcctttttgataccagggctgctgtg

SEQ ID NO: 14610 - DNA, 201 bp, Homo sapiens
agccggctctgtcttgggtgagggcaggctgctgaagattttgtcttctatatccattgaggtcttattcacttgttcattcaacaaatatttattgagcrcttactctgtaccctgctctcagcattgaggttacagcagagaacaaaactgacatattctcttctctcaaggagctgcagtctgggaagtaagatagac

SEQ ID NO: 14611 - DNA, 201 bp, Homo sapiens
ggcaccaacaatgtgtgtgtgtgtgtgtgtgtgtgtgtgtgtgagagagagagagagagagagagagatcaggaacgttgttgtaaggtatatggagtacrgtgggtggggggacaggttatctctgccccacagtgtctggggcctcagttgggatcgttggaaggctgagttactcatatatctggtggttggtgctgg

SEQ ID NO: 14612 - DNA, 201 bp, Homo sapiens
catttcagacagtaggtgaagagaaaaatgtgaaggacagtgcttagtgctggcaaggatgccgggaaatgggttctctactacgttactggtaggcgtaygtgtgtaaaccttttatgagctacttgatggcatgtatcaacattattgttaaaagacaccctttaacacaatatttccaataatgaggctatgccaagg

SEQ ID NO: 14613 - DNA, 201 bp, Homo sapiens
ctagtgccctggaagttaacccaagcatcattatatcccattattatatcaacagcaaacattgcaattcaaatagtcaatcagccaatttttttttttttgatccagaagttctgacaaaaagttgcctctacagtctggccctgttcagattcccctttgccttgtccacattatcttcattctcttctctgtggccca

SEQ ID NO: 14614 - DNA, 201 bp, Homo sapiens; identical to SEQ ID NO: 2258

SEQ ID NO: 14615 - DNA, 201 bp, Homo sapiens
aaggtccaagaaagcttctccaaggaggtgataatgagagatgaaggagcggccctccaacatctgggggaggagagcttgggaaaggacccagcaaatgscaaagctccggggtacaaatgggcttgtatatttgagagcagagagaggcccatgtggctgggcacagacaccccttgggggagtgggagtggctcagag

SEQ ID NO: 14616 - DNA, 201 bp, Homo sapiens
taagcattgtgtggaggctggaataaaatgccaaaattttgagtcccagccatgccacaattcctgggtgaaataagcatttggtgaatatgattgcttaytgcagcaaatattatgtctctttacatccattttctctcaaatctgaattcttttttgtagctggaagccaaacatctggaaagacaatctggctcagaa

SEQ ID NO: 14617 - DNA, 201 bp, Homo sapiens
tccacagagagtggagaaaaataagaaccagaggaatggggttgagagtacaaggtgacttccagcccttaaaggggtgggagcctctctgggcagccccygacctgtgtacatagagcataagctggatttcagcccactttcctcctgggatcaactgtatacatatggacagctatcccaggcagtgggccaggcagg

SEQ ID NO: 14618 - DNA, 201 bp, Homo sapiens
caaggcagccgttcctgtttccctccagaggtactctatcagagccagcccaccctcagccagccacagagggccgtgctataaacaacacgtggcctgtygtgagcgggtggcccgtattatggtgcaatatggggaggatatgtcaagcaaaagctgaactttctccctgcaacctccatccagaggtgaagaactgtg

SEQ ID NO: 14619 - DNA, 201 bp, Homo sapiens
tgctgtcctaggtcatctgtgagctctttatgctgtcccagagtggaatgcaagaggtggccactgagagtgggggaggagcaggcagcccaaggcagccrttcctgtttccctccagaggtactctatcagagccagcccaccctcagccagccacagagggccgtgctataaacaacacgtggcctgtcgtgagcgggt

SEQ ID NO: 14620 - DNA, 201 bp, Homo sapiens
gtaaggaaggggaaggcacccacagccaagccgtggtttccaagccgtggcctgtgaggctgtcattttatgatgagagtcagaaatgaaataaaattatrgattcctgctttgaaatgtgggactggtgttccaggcctccagaataaaatcagttccctgtagaccagcatgtgggatccgggatcctgcctcacttcc

SEQ ID NO: 14621 - DNA, 201 bp, Homo sapiens
accacagggggctcatgcccctggctggccctttgaaagccaagctagctataaaaatagtgtgtgctctcacttcacctctgacattctttgcttccctkccctcagcatctgagaagaagtcactggcaagtcgttcaaatgttgcacaccacagcaaagtcactttgtggagtggaagcctgtcctcagccatgaagc

SEQ ID NO: 14622 - DNA, 201 bp, Homo sapiens
attctaggattgtaagataagtcattgatttaatttttgaggcagaaaatgccaacattagatgtacacattgattttgtgatgcagccagactctagaarcattatcatttgataattgcaatcttagaaaggaaaaaatataatacattgtattgtgcaatgcaggaataattttgctttcaggaaaaaaattacatat

SEQ ID NO: 14623 - DNA, 201 bp, Homo sapiens
caggtttgtcgaagatcagatggttgtagatgtgtggtcttatatctgagttctctattctgttctattggtctatgcgtctgtttttgtaccaattctgyacaaaaacagtacactgtttggtaactgtagtctcatagtatagtttgaagtcaggtagcatgatgcctccagctttgttttttttgctttggattgtct

SEQ ID NO: 14624 - DNA, 201 bp, Homo sapiens
agctctgtaaactcctagaacctgcttccttccctttgggtttttattgtgattgttggtttgaccttaattgttattatacctcctcagctaagaaaggrccacaaaggcctttgtcttcacaagacctattttattttcttctttaatactcactctgttgtatttgtgccttcctgcagtggagacaggcatctattt

SEQ ID NO: 14625 - DNA, 201 bp, Homo sapiens
ctctcacctcaggccccctgagcccagtcccagggattggaagcctcagctccctgcacttgcacctgagctctgtaaactcctagaacctgcttccttcyctttgggtttttattgtgattgttggtttgaccttaattgttattatacctcctcagctaagaaaggaccacaaaggcctttgtcttcacaagacctatt

SEQ ID NO: 14626 - DNA, 201 bp, Homo sapiens
gctcctggctattgtccagttggttccactggatctgccctccctccctggagtagaatctgagccaggtgggaggaagcaggaggccctttagtcccagrtaatacctggaggctactgcatgtccagcagggctctcacctcaggccccctgagcccagtcccagggattggaagcctcagctccctgcacttgcacct

SEQ ID NO: 14627 - DNA, 201 bp, Homo sapiens
ggcacattctggagttcatcatgaacactgcaggcctctctgactctgtggtttagcttctttgcacaacacttggcatctcatattctcaaacagtagcrggccactttatgagcagctggatcctgggcaagttgctttcctgtgcggagcctcaatttccgtacatgtcactgggcatgacaataatccgcccatgta

SEQ ID NO: 14628 - DNA, 201 bp, Homo sapiens
tgcacaaattcagattgatttgctaatatacatttagctgttcaactctgagcttaattgcattacctcaccggtattccaccatgacacatggaaaattwtgaggaataacaaataatagaatgtgaaataaatcctgttagtcctaacgtagttagcgctttacagcagacatccattttatagattcaagctggagga

SEQ ID NO: 14629 - DNA, 201 bp, Homo sapiens
cgttgatctcccaacattttataaatataaaacaaaatagtggatgccaaagtgcttcagaaattagaggaaagaactctttggagtcccacttctccacygttcttgcctgaggagcctgtctgtgggcatcagcagagactgggcaggaggtagaggtggggtccccatcacaagatgggcaccgactctctctgactg

SEQ ID NO: 14630 - DNA, 201 bp, Homo sapiens
actaaaaatacaaaaattaggtgggcatagttgcgggcgcctgtaatcccagctagtcgggaggctgaggcaggagaatcacttgaacccataagggggargttgcagtgagccgagatcatgccattgcattccagcctgggcgacaagagcgagacttcgtctcaaacaaacaaacaaagaattaaggggaagtgtggg

SEQ ID NO: 14631 - DNA, 201 bp, Homo sapiens
ggagccccaactctgcccatgtccacagcctggaccagcttccacctcttctccctccagcgtacgcctggtggatgacttgcaggaatgtgcttctggctggaaagagcagccagtagggctgcagtctgggagagactgcaaggtagagagctggatatagagttgaaacttatatctatatcagttagatatagatta

SEQ ID NO: 14632 - DNA, 201 bp, Homo sapiens
tcctgatggagtctatgaatatttccgactcacctggctttggaaaggggttccgctttatgttgagctttttcagcttggggagcttggagatgctcacrgggatgttgttcagtaggttgtcatggagccctacctcgtggagctccttcagggcccccagtgtggtgggcacgctgtccaggtggttcaagcctaggt

SEQ ID NO: 14633 - DNA, 201 bp, Homo sapiens
gccaaggcatttgtggggcctcatgtctttccagagcctctgagaaggcatcctttccaagctcgttccagtgctggcagaatccacgttcctgcttctgyaggtctgagctcctgttccctgcctgctggctgccagggttcatctgtttcttggggtgcccacctcccttaccctgtggcccttcctcctttcatttcc

SEQ ID NO: 14634 - DNA, 201 bp, Homo sapiens
ataagtcttgaaatccggtggaatgattcctctcattttactcttagttttcaaagttgttttaactctcctagtcccttttccaattgacaccagttttrgaaactcgtctgtatctagaaaaagccttgctggtattttaataagaattttattaaacatgcttagcaatttgagaagaaatgacatatttgtaggttg

SEQ ID NO: 14635 - DNA, 201 bp, Homo sapiens
gccagggctactgctgggcaccctacgttgtctatggtggcaagtctgagaactgtgtcagaaaggatccatagtaaacagatatcatgctccagctacayctgcctgctttcctgattatgtggtgtctccatattggttcttttcattgctttaataggagaacaatggcagtgctttatattcgctttctatctctgc

SEQ ID NO: 14636 - DNA, 201 bp, Homo sapiens
tttgaatgagtgctttagaagatgaggcagttatggatactgacatgggttaaggtgtggccatgggaatggtgactttaggtggaatgaaggcaaaaatytttggagatgtggagcttaaggaaccgagaggccagagatcacagtcactgaggatgatggcagatcttggagaagaagggaagatatggccaggaatca

SEQ ID NO: 14637 - DNA, 201 bp, Homo sapiens
caaatgaattgcttatgaacttgctgcagaactttcagcaaattgctttgctgttttcagatttgggtcacagttcaagcaatgtagtcctgtaacaatgytgtccttatacctgcataaccaaagcttccagacacagagcacatttccatcatgtgctccaacacacctagccatcatgcctcctcatgcaggtttgcc

SEQ ID NO: 14638 - DNA, 201 bp, Homo sapiens
agtctgcactcagaagacttcttggaactgtgtcgggaaagacaagttattttacaagagcttcttgataaagaaaaggtaatataccccattgcaatagsctttaagatttttaagttagttgttaagattgtcagacaggagaaaaccaagctttcgccacttacatggggaatgagatctccatttgctatgaaaact

SEQ ID NO: 14639 - DNA, 201 bp, Homo sapiens
gccatcattgaatgtaggtgtatgtatgtgcatgcatatacacacagagagaatcgtacaatctcaaaattccagcattgaaagagaccttttttttttttagatctcagccccattacaagctagagacttttcctgacaagcctccaggaaacctttgctcaaaccctccctgtgatggggaaccccctaaaattcaag

SEQ ID NO: 14640 - DNA, 201 bp, Homo sapiens
tacaataaaaggatattgtttctatcatgagaaaaaacagcaatattcaaagagtgaatgaagtgaaattcagagaaagcaaatcctagctgggcctctgrggagttgctttactgactaacgagggtgaatttggaaatgttgccctgtggtcactggaagtggctgaacagctaggcctgggcatatctgggccctcca

SEQ ID NO: 14641 - DNA, 201 bp, Homo sapiens
aaggtacaaacacacatgcatgcacactcacactcaaacacacacacacacacacacacacgattccgcttcttttcctcttagaggacagggtggtggtrggagttattcactggagctagatttgcctttggcagttgcagatagaggatacctgagaggtgtccccaccactgcagacacaggaattgggcagcaggt

SEQ ID NO: 14642 - DNA, 201 bp, Homo sapiens
agctttgtcccagatttcatagctgagagtcagctgctacataatcaacttgactcactgtttttacatgtactgttgaaggatttccagaatatgaataygttttaagggagaggtccctcaggaaaactcaggttgtcacttgcatactaaatatttgttggtcactgagtgtgtaccctcttggagacaggaatgctt

SEQ ID NO: 14643 - DNA, 201 bp, Homo sapiens
atagagattagaagagaagagttggaagatgcacttttttagaaagggggaggccaggagggccatctttgagaagatgatacctgagcagagatcagagraagtgaggattcagggagagaatttcagatggaggaaacatcaagtggaaaagtctctttgcagagaggaggggatggacaacaagaggaaggagagaag

SEQ ID NO: 14644 - DNA, 201 bp, Homo sapiens
tcaagcaaaaataaggtgtaatgacaggtgtgatggatgttaggaagagaaagagtcaggatagagacatagagattagaagagaagagttggaagatgcrcttttttagaaagggggaggccaggagggccatctttgagaagatgatacctgagcagagatcagagaaagtgaggattcagggagagaatttcagatgg

SEQ ID NO: 14645 - DNA, 201 bp, Homo sapiens
aggacacagctgaacttcccacagccctttgaagtcattcactcatcaacagtatttgttgaaaacctactatgaatgaggcactgttccaggcagcaaasaaaatgaaggtcccgctcacattctagaaaaatcaagcaaaaataaggtgtaatgacaggtgtgatggatgttaggaagagaaagagtcaggatagagac

SEQ ID NO: 14646 - DNA, 201 bp, Homo sapiens
catgaggtgagcagtgattccatttcacccaatgtgttttaagcgctgctattgccagacaggtgttattttgtcttctcctcacagctcctctcctcccrcagattaggaaactgggtctcagagaagcggcttggcagggaaatgtgccagggctttggctgtagtgggtgtgcccagccccctgtttaccttccccat

SEQ ID NO: 14647 - DNA, 201 bp, Homo sapiens
tctcagacatttccctgaccagatgtcggtgatggagtacaaatcttgcacattggagtcagagctggggaatgtgcgtgtgtgcgtgtgtgtgtgtgtgygtgcgcacgcgcatgtgcatgtacctgtacactatggatgcctccgagtgggtacacacaccccatctgtgaagatacacatgtatacagccacataggg

SEQ ID NO: 14648 - DNA, 201 bp, Homo sapiens
atagcacaaacaaaggatggaggcgtcctctttggatttggccacctggaagtccctggtggcctttctgagggaggtagccaggtggaggcagtggctgrctgatgcaggttgaaaagagaatgtcaggtaaggacatggagccagggtgtgttgataatgctttctagaagtttgcctatgagcaggaggagctgcata

SEQ ID NO: 14649 - DNA, 201 bp, Homo sapiens
ttatgtcaaggaatctgaaaaaagaacgtgttttgagaaggcgggtatggtcaaaccatgttaaatgctgataaagaatagcacaaacaaaggatggaggygtcctctttggatttggccacctggaagtccctggtggcctttctgagggaggtagccaggtggaggcagtggctggctgatgcaggttgaaaagagaat

SEQ ID NO: 14650 - DNA, 201 bp, Homo sapiens
aatgtttgtgagacattgaaggtgaagtatcatgtgggagagaaggctctggagctcagggacaggctgtgctggaggtgtaaatatgagggtcatcgccrccatgatgatatttaatctaaggaaattgatgaaatcaccaaaaagaagctgtacagagagaagaaggttgagggggaaacaaagaggagctaaccacat

SEQ ID NO: 14651 - DNA, 201 bp, Homo sapiens
atccttgccagccaatgacccacatgcctggctcctgcagactcctgaagagcagtcccagccaccagtgtgtttccccttctctttcctgtcactatctrattgatcaggtagagccagagttagcgtctctggtgaatcctgactgattttagaagtctctggaaatacacagcatgccatgatgatttcccttaaact

SEQ ID NO: 14652 - DNA, 201 bp, Homo sapiens
cctagcctgtagagcagcaaaaacactcacagagacccagactttggagagaggatcccgtgtgatccccaaagcaccactgacttgcacacctgccttcycaggctcgcctgtgccctggcccccgaggatgcccactgtgccctagctagctgcccttcctgactggggctcaggcaagcttcctcctctcctaaataa

SEQ ID NO: 14653 - DNA, 201 bp, Homo sapiens
catatgatcttgtacaaagtaattagcctgtttcagcttttccatttgtcaagtgaggatgaaatagtatctccaaccaagatgggacaacattttaaaaygtcatcagaagtatctggcacagagaaagggcttactaaatgggacctgttattattagcactatctctgggtgcatgggtgagatttgttttatttctc

SEQ ID NO: 14654 - DNA, 201 bp, Homo sapiens
agtagggagctcagccaaaggagaaaaaaggtcctgtggttctccaccatgcctctcctacacacctctccctgcatgggggaaagctatgagggtttgcktgagcagcagacactttcaatcatccagtacagaaaagataatgaaagtaaatggaccaaattgtaaacagtggagccaaacagactagagatgaaaaaa

SEQ ID NO: 14655 - DNA, 201 bp, Homo sapiens
tatgctgcaggcacagccctgtgctgcagtccacacaagtcctgtggaatcatctggatgcaagtgcttggaaagggccaggggaaggctattgtctgctygcacaagttacttgttattgggcagttgtaacccatactgctataagcattactgcaaatcccataacaaattttacgatgaaaatctcatgaacttgac

SEQ ID NO: 14656 - DNA, 201 bp, Homo sapiens
aactggaaaaaagtacattcagcttcacttttgaagggtgggattgtggtgagattcatgtccatttggtaaaatagctgtccagtccatgctgatgagcwgctacaggaccttccagacctgttgctttctgtccatcaccagtagcctcatggctctgaaggccaaagggcagacaactttctcctcccctaacttgga

SEQ ID NO: 14657 - DNA, 201 bp, Homo sapiens
cacttgctcaaatcaatcagttgtcttgagggcttctaattcccactccactccagttcaggcaactggaaaaaagtacattcaaattcccactccactcyagttcaggcaactggaaaaaagtacattcagcttcacttttgaagggtgggattgtggtgagattcatgtccatttggtaaaatagctgtccagtccatg

SEQ ID NO: 14658 - DNA, 201 bp, Homo sapiens
ggtctgtcatttcgttggagattctgagatccagagatgggagtcacttgctcaaatcaatcagttgtcttgagggcttctaattcccactccactccagytcaggcaactggaaaaaagtacattcaaattcccactccactctagttcaggcaactggaaaaaagtacattcagcttcacttttgaagggtgggattgt

SEQ ID NO: 14659 - DNA, 201 bp, Homo sapiens
caatttactcatttaaaatggccaagatttgcaaggcctacatctataagtcttccagttttttgaaatgctagcagatatcatgcactcataaaataatrgcccctcagcaaagtaatctagctcccatgctcaaggaagtctttggaatccaacagaccaggtttaaatctctgtttggccacctgttggctttggaga

SEQ ID NO: 14660 - DNA, 201 bp, Homo sapiens
gcaagttatgagaacaatttactcatttaaaatggccaagatttgcaaggcctacatctataagtcttccagttttttgaaatgctagcagatatcatgcrctcataaaataatagcccctcagcaaagtaatctagctcccatgctcaaggaagtctttggaatccaacagaccaggtttaaatctctgtttggccacct

SEQ ID NO: 14661 - DNA, 201 bp, Homo sapiens
agattttccacgttagggaaatgaaaagcgataggtagttataacagagaggtttaatgagctgttcatccagcagggtgtctctggtttgaaagggtacrtctgtctctacatggatttctaatgccctgcctgggtttaaaaagtagagtccaggttgaccaagatgtgcttcttaggagaaataaatggggagagagg

SEQ ID NO: 14662 - DNA, 201 bp, Homo sapiens
ggctgaagtacagtcatgtaaatcatagcccacagaagccttgaactcctgggctcaagagatcctcctgcctcagcctcccaaatagctgagagtacagwcatgcactaacatgcccagttatttctttaatttttttgtagagactgggtcttgctatgttgcccaggctggtctttaacttctggcctcaagaaattc

SEQ ID NO: 14663 - DNA, 201 bp, Homo sapiens
ggcaacatgtgtgctctgtgatgaagacccagggagctgtgcatccccaggttgcataggtggagacttggggtggatatgcgttcttttttttttttgayggaggctcgctccttcccccaggctggagtgcagtggcgctatctcggctcactgcaagttccgccttcccggttcacaccattctcctgcctcagcctc

SEQ ID NO: 14664 - DNA, 201 bp, Homo sapiens
ttgggatctggcagtgggctctgaaatgccagtgatagtgagtgtgtggcggcattagctgcttaggccacagtggtagacaagagagatctgggggcaasagtaggatggacatggacaggcccttcctgactcactgtgcctgtacttgtgagtgtgtgtgcagaggacagagaaatgtgtggaatggcaaggaatcaa

SEQ ID NO: 14665 - DNA, 201 bp, Homo sapiens
agaaatgccttgttcatccaccgtatgttcaaaacacacaaaccaacctcaagagaagcaaaagtcaaagaaccaaaggcagacctggcccctttgaagcycatgaggtgagcagtgattccatttcacccaatgtgttttaagcgctgctattgccagacaggtgttattttgtcttctcctcacagctcctctcctccc

SEQ ID NO: 14666 - DNA, 201 bp, Homo sapiens
tggatttgttaaaggaacaaaagggaataggcaccttacaattaaaataaaatattaagatgattagtttaacagactagaaatgccttgttcatccaccstatgttcaaaacacacaaaccaacctcaagagaagcaaaagtcaaagaaccaaaggcagacctggcccctttgaagcccatgaggtgagcagtgattcca

SEQ ID NO: 14667 - DNA, 201 bp, Homo sapiens
aacaaaagattatgctttcttattggtttaatagcatctattttgtaattctggatgtactctgttttaattggatttgttaaaggaacaaaagggaatargcaccttacaattaaaataaaatattaagatgattagtttaacagactagaaatgccttgttcatccaccgtatgttcaaaacacacaaaccaacctcaa

SEQ ID NO: 14668 - DNA, 201 bp, Homo sapiens
gcatctttatacaaagaccatgtgcaagtaagaaacaaaacataggctttctctatacagcaagctggaatccaccttgaacctgaaaaataattggaagrgcctttggtttacgttctggattgctcaccaggcttgcaccatgttggggttttgcattttatcctaaatgcaatgggttgccactgacaagggcaggct

SEQ ID NO: 14669 - DNA, 201 bp, Homo sapiens
tgttttttatattctgtaattcattactttctgcattaatatttattttccccttccttctacttgctttagatttagtttgctcttttttccccagtgtmttcagatggaagtttcagatattgatttaacgtgtttcttttttttcttaatattggcatttataactatgagttttcctttatgctcttctttagttat

SEQ ID NO: 14670 - DNA, 201 bp, Homo sapiens
aaaggctaggtcgttaagtgaagaatgcagaaaattccttaaggctgccccgcaaatcactctgtgctaatttgccttgcgggcccagcccgctggccaamctggtgaccctgtgctcttaccactgagtcctaattgcacctccatcccgtctcctgcgttggaagtaatatgcgttaggaaaatcaatccatttgtagg

SEQ ID NO: 14671 - DNA, 201 bp, Homo sapiens
gaccatattaatctggaccaagagagaaagtggggaacagagagagagcgatacataagaatgaacatccacagacagacagcgtggacttaaaggctagrtcgttaagtgaagaatgcagaaaattccttaaggctgccccgcaaatcactctgtgctaatttgccttgcgggcccagcccgctggccaacctggtgacc

SEQ ID NO: 14672 - DNA, 201 bp, Homo sapiens
tggtggttttcatttctgtgtgagaatgacttggttcatatgcagaagacgcacatatcttggaatgctgaacccaacacccatgcctctttaggggaccyattgctccaggacccagcgctcgctgggctttggggaccatattaatctggaccaagagagaaagtggggaacagagagagagcgatacataagaatgaa

SEQ ID NO: 14673 - DNA, 201 bp, Homo sapiens
tctggggcagcaggcactgggcctctctggtggttttcatttctgtgtgagaatgacttggttcatatgcagaagacgcacatatcttggaatgctgaacscaacacccatgcctctttaggggacctattgctccaggacccagcgctcgctgggctttggggaccatattaatctggaccaagagagaaagtggggaac

SEQ ID NO: 14674 - DNA, 201 bp, Homo sapiens
ataccgaatggagggtagggagccatagccttaccactgtggggaacgtaggttctgcctcacaggtgatgggcaattgcaggaaggccgggacagggaarcggactgacagaggtgttagaacaccccttgacgtcagtggagaagatgaggcatggggatgaggttcaagcaggggctgagatagaatctgacctaata

SEQ ID NO: 14675 - DNA, 201 bp, Homo sapiens
ggaaacgcagaattcaagcagcgctggatcaagttccgtgctctgcttcctctgtgtgggctcctgagggtgccattcccagccctagggggtggtgcctrttggcccatcctataaccattcataacaactcagattatagagacttgggtgaagtgttcatctttgaaggctggtcaaccccactgaagtagcagggac

SEQ ID NO: 14676 - DNA, 201 bp, Homo sapiens
tggttacagatctgcctagttacgttgaggaagccaggccctttacatgtggattctgctggttccatgggggttggaatctcttacacctaaaccacgaycataaactcccaagcctaccaggccataagggcactgtgaagcagcatatcaggctgagggaccatggcaaaatggaaagttcatgctcatataaagaga

SEQ ID NO: 14677 - DNA, 201 bp, Homo sapiens
aggatactttccaagtatttaaatatttaagtcaggttgttttgatatttgaaagaatgaagatataataacatctgccatagataatgggatgtggaccwttgccctgcttttttaaggagtagtatgctttcccaagaaaggcccattccacttccagaaaagtcaggtccaaactctggacagagattaggcttaaga

SEQ ID NO: 14678 - DNA, 201 bp, Homo sapiens
gtttggtgtgtacaggatgtgatcatggctgtgatagtcagagggatcagcaggcatgtctagtttttctgagtgcacaagctggtctttcacagaccctytggttggacaagggttttctctgtgggcatctaccccactccaacattgctgactgtgctgcacagctgggtagggtgtcttgctggcctatatgtgtgt

SEQ ID NO: 14679 - DNA, 201 bp, Homo sapiens
gtttcttggatgaagggacacgtgacttgcctcttgagtaataagcaggagctcagcaaagggatgggattggaaaggacattcccagcttcaggcattaytggaaaagggcatggtgtttagcagaagctgagactgtcactacggctgcagtacagaggggacaaaagtggaggataggaagaaaaatgggaaagagag

SEQ ID NO: 14680 - DNA, 201 bp, Homo sapiens
ccagaaccaatagccaaataaacatttatctttataaattacccagtctggggtattctgttatagcagcagataatggactaagacaccttctaactttmgctccagcattttgttgatttctggacaacctgtttgtcatcatacacagagctagctgtggctactttcttagttattttacccatcaagagtgctaat

SEQ ID NO: 14681 - DNA, 201 bp, Homo sapiens
acagaagaggcactaatcatctgaaactgagttgccttgtctagtttcccccttaaaagcccacaacatgcccctgggaagacccattcatggatgtgcakcctgaaccccagaaacacacagcttagcaacatagcctcccaggctctcctgagtgatgggagcagcagcttaccagacaggacacttgtgagaaacgag

SEQ ID NO: 14682 - DNA, 201 bp, Homo sapiens
tagcctgtgcttactaggcggctattctgtctaatgtctaaggcagagatgggcactagggaaaccaaggtgaagagtcacgggtcgagcagccacccacrgtgttgtgggggtgggagaggagaagagagagagagagagagagagagagagagagaaccagccatagtgtgaaatttaacatgattgaagtatggacag

SEQ ID NO: 14683 - DNA, 201 bp, Homo sapiens
gataggatgttctactatggggaaaggagcgatggggtataaggagccattagtgtgtcctgggtgggccacagagcaggaaggcttacacatggtgcccrgtgccaggaaacagaagaggcactaatcatctgaaactgagttgccttgtctagtttcccccttaaaagcccacaacatgcccctgggaagacccattca

SEQ ID NO: 14684 - DNA, 201 bp, Homo sapiens
aagagcaaggtcagtgctcggtctccaggcttcccagccctccaggactggcaatctgaggagttcagggctctatgcacagtgtttgccttgcccatgcrctggcatggggcagggtatggccagcagcacagcgagcccctttgcagggcacccgagggcccgaatgttgcaactctgcctcatgaccccccaaccttt

SEQ ID NO: 14685 - DNA, 201 bp, Homo sapiens
tgtgtggattatttctggattctctcttctgttccactgatctatatgtctattcctctctcagtaccgcacattctcaattactgtaactatgagtatamtaagtcttgaaatccggtggaatgattcctctcattttactcttagttttcaaagttgttttaactctcctagtcccttttccaattgacaccagtttta

SEQ ID NO: 14686 - DNA, 201 bp, Homo sapiens
aagtgggtgaatctccaagcagttctcaagagcaaggtcagtgctcggtctccaggcttcccagccctccaggactggcaatctgaggagttcagggctcyatgcacagtgtttgccttgcccatgcgctggcatggggcagggtatggccagcagcacagcgagcccctttgcagggcacccgagggcccgaatgttgca

SEQ ID NO: 14687 - DNA, 201 bp, Homo sapiens
tctcatttttgtgaggccacacaactgtgattacaggactaatgatgctttaaacaaacaagtgtaatgactgtcatcagtggttagcgggtgtttcctgygggacagcttggtcagtagtgtcaccagcagctggccagccctagggtgccccaggcaaaggtgggtaccaccaagctttggtgagcccacttagaagtg

SEQ ID NO: 14688 - DNA, 201 bp, Homo sapiens
cagagcttagaatggggacaacaaattggagggtagtcctgtcatctggagcatctggtggaggctgcttcagagacttgggggcttctcagatcagctgyaccagaagtgggtgaatctccaagcagttctcaagagcaaggtcagtgctcggtctccaggcttcccagccctccaggactggcaatctgaggagttcag

SEQ ID NO: 14689 - DNA, 201 bp, Homo sapiens
gactgaaatccagactttgccccactattcaagtcatccatctagggtcaggatggtgtccacccaaagaggatgccgaggtgctgcaagactgggggcasccgttggtgagagcttgatttgtgctgactgcatagcattctatcacaggatggaccctcctccatatgtggatgcttaaattgtttcattttgtgctgc

SEQ ID NO: 14690 - DNA, 201 bp, Homo sapiens
ctcagagaaaagagccttttctggcctgagtcatccaaatacacgtcccccaaagacccctgagccccgaccatagcttgctgtggagcccaggctgtccsgtcactcagtacacactgtgccttcttcctcaagggcagccagcattttctgggctcacataaggatagtatacacatgatttaccaacaaacagggaca

SEQ ID NO: 14691 - DNA, 201 bp, Homo sapiens
tcatctcctgttataagcacaccagtcacgtaggattagggcccatcctaatggcttcactttaactttatcacctctttaaaggccctgtctccaaataytgtcacattctgaggtactaggggttagggcttcaacatatgaattggggggaacatggtttagtccatatcagtgcctcacgtctcaatacatattcag

SEQ ID NO: 14692 - DNA, 201 bp, Homo sapiens
tattctattatgtggtgtagtacattaattattttcagttgttaagccaactctgcattactaggctaaatctcacttggtcatggtatataattttttayatgttggtggattcagtttgttgatattttgttggggatttctacattaatatttatatgagatattggtctgtagttctctagtaaagcctttgtctgt

SEQ ID NO: 14693 - DNA, 201 bp, Homo sapiens
gtcttccttaactcagtttgagattttcctgattcttgatgtgagtctatgttatgagactctggattttatttttccctaaatattttttattaaacagrtttatttatatgtaattcatataacatacaattcacctatttaaagtaaacaattaaatggtttatagcagggatccccaacccccaggccatggacccg

SEQ ID NO: 14694 - DNA, 201 bp, Homo sapiens
gacatagaaactgccagcctccctctgattacagtgaaagggcatgggatctgtaagggcccaaagtgtgacttgaggagaatcattcaggatctccaacrccgtctggtttttatcatacagacttgaggagtattggaaaagcacgtgcaatagagacagacagtcccgggataatctcctggctctagaactttctaa

SEQ ID NO: 14695 - DNA, 201 bp, Homo sapiens
gcgtgtgccagggaaggcgaggaacctggagcgtctgtgtctgtgctcacacccaggtggaccatgcctgcctcttcacttgctgcctgcagctcagcccytgcctctgaggcaagcaacccacctcctggtaccctaaggctcacatagggccagcctacccaatgcagccagggctgtggggctagacatagaaactgc

SEQ ID NO: 14696 - DNA, 201 bp, Homo sapiens
atagatgggaagcgttggaggattttaagcagagggttgatgtgaactgacatattaataagaatcactctggctgctgtgccaagaatagactggagtgrgtcaaaggcagaagctggagactagttaggaagctattgctggaggctgttgcagtaatccaggtgagagatgatggtggcttggatcaggaacatgaaa

SEQ ID NO: 14697 - DNA, 201 bp, Homo sapiens
aggccattcaaaatcaaattgactgagcttttgccaaaagtccagttgtcaagtgtatgttttcacttgatcattgtctttgaagatatttggatgaagakttcttcgtgcagagataggccttgccttttccagttgacccaggttcagataatgacaagatgacttcttagcccagtcgctctcaaactagctgacacc

SEQ ID NO: 14698 - DNA, 201 bp, Homo sapiens
aaaagatcgatgcatcattacattcctttctatatttcccaaattaatatatatgtgtatatatgtaaaatataaaacaataaggagatgttctctctctstctctatatatatatatatagatagataggtagatagatagataaatagatagatagcatctccttattgttttaacatacattcctttgattattagta

SEQ ID NO: 14699 - DNA, 201 bp, Homo sapiens
gaggccaaggaaaggaggatgggtgcattgattgttgacccgtgaacatgttcaggcaaatagaaagtttgtgcaaggggtgtgtgtgtgtgtgtgtgtgttactctctacattccccaggctggtacaattagcctatgttgaggcattttttagcaagtgttggttgtaagctgggacttcccgtaattcagatgtcat

SEQ ID NO: 14700 - DNA, 201 bp, Homo sapiens
gagaagtcaggtcatagcacagaaaagtggccacagaagttgatgtgtatttttcttctgagaacatggaatgaaggatggtagcagcagagagcagaagstttgcagactggactgggacaagtgggtgaaggggaaatctctaatgatgcattcatgaggaaactgctttgtgttaaccttttcagataatggcgtttc

SEQ ID NO: 14701 - DNA, 201 bp, Homo sapiens
tgaggccaaggaaaggaggatgggtgcattgattgttgacccgtgaacatgttcaggcaaatagaaagtttgtgcaaggggtgtgtgtgtgtgtgtgtgtgttactctctacattccccaggctggtacaattagcctatgttgaggcattttttagcaagtgttggttgtaagctgggacttcccgtaattcagatgtca

SEQ ID NO: 14702 - DNA, 201 bp, Homo sapiens
ttgaggccaaggaaaggaggatgggtgcattgattgttgacccgtgaacatgttcaggcaaatagaaagtttgtgcaaggggtgtgtgtgtgtgtgtgtgkgttactctctacattccccaggctggtacaattagcctatgttgaggcattttttagcaagtgttggttgtaagctgggacttcccgtaattcagatgtc

SEQ ID NO: 14703 - DNA, 201 bp, Homo sapiens
ggcttactaaatgggacctgttattattagcactatctctgggtgcatgggtgagatttgttttatttctcacaacttcatatcttttccaagttttttttacaataaaaggatattgtttctatcatgagaaaaaacagcaatattcaaagagtgaatgaagtgaaattcagagaaagcaaatcctagctgggcctctga

SEQ ID NO: 14704 - DNA, 201 bp, Homo sapiens
gtgccactgcactccatcctgggtgacagaatgagactgtgtctcaaaaaataaaataaaataaaataaaataaaataaaataaaataaaataaaataaaatcacaactatcattaagctgtgacttgttttctcctttctccaggattttgtgtcatgtatagagaactacagaagaagaggacaagagctatatgcatc

SEQ ID NO: 14705 - DNA, 201 bp, Homo sapiens
tgtgccactgcactccatcctgggtgacagaatgagactgtgtctcaaaaaataaaataaaataaaataaaataaaataaaataaaataaaataaaataaaatcacaactatcattaagctgtgacttgttttctcctttctccaggattttgtgtcatgtatagagaactacagaagaagaggacaagagctatatgcat

SEQ ID NO: 14706 - DNA, 201 bp, Homo sapiens
ggtgtaagttaaagtcagatggattcagccctggcctaattatcagctgaccttggtaatgttccttttccatgacatacgtaggctaccttgtttctctrtatctcaatttcaactactcagatttggcctggatcacagagatcacagactcaacatctcgggtccagagaggtaatgaacatgcataagtgaagccag

SEQ ID NO: 14707 - DNA, 201 bp, Homo sapiens
agagtgaaacaggaggattgcttgagcccaggaggttgatgctgcagtgagtgagccatgattgtgccattgaactccagcctgggtgacagagtgagacyttgtctcaaaaaaaacctaaaaactaaaaactaaaaaagcaaacagacataatctcacatggagaagaagggataaaaagcaagcttccatggatgtgga

SEQ ID NO: 14708 - DNA, 201 bp, Homo sapiens
ggcatggtggtgtgcacctgtagtcccagctacttggaagagtgaaacaggaggattgcttgagcccaggaggttgatgctgcagtgagtgagccatgatygtgccattgaactccagcctgggtgacagagtgagaccttgtctcaaaaaaaacctaaaaactaaaaactaaaaaagcaaacagacataatctcacatgg

SEQ ID NO: 14709 - DNA, 201 bp, Homo sapiens
tgaaaatcgaatgtagttctttaaaggatacttacatgcaagcatctattttgaggttcagatttagatatattggacttcccaatgtaagatgtacctgmattctgaaaattagagtagtggttggggggaaaggtatcaccatcccaggagatgtttttaatttttaaaaattatgagttatgaggaaacacatttttg

SEQ ID NO: 14710 - DNA, 201 bp, Homo sapiens
ggtggcataaactacagacatttattgtctcgcagtcccggaggctagaggtccgagaagaaagtgatggaggggctggtttcccctgaggcctcttttcyggctcagagatgctgccttccccatgtcctcacgtggtctgtcctctgtacatgaccgtgtcctcatctcctgttataagcacaccagtcacgtaggatt

SEQ ID NO: 14711 - DNA, 201 bp, Homo sapiens
aatttcagcactttgggagtccaaggcaggaggattgttagaagccagaagtttgaaaccagcttagacaacagcaaactccatctgtacaaaaaattttwaaaaatcagccaggcatggtggtgtgcacctgtagtcccagctacttggaagagtgaaacaggaggattgcttgagcccaggaggttgatgctgcagtga

SEQ ID NO: 14712 - DNA, 201 bp, Homo sapiens
tctctctaccatgggttctgcaatctgagagtgacccaaatgccatctctttgactgttcttttggccatgcagcctcccaaaaaatggggttaaagttgrtttgcttttggcaacaagactatggtctgaaaacccttccaacaaggaaggcactgaggttatgcaagctccacgaatcaatggaatgttctcatccagg

SEQ ID NO: 14713 - DNA, 201 bp, Homo sapiens
gcaggagaattgcttgaaccctggaggcagaggttgcagtgagccgagattgagccattgccctccagcctaggtgacaacagcaaaactccttctcgaamaaaaaagaaaagcaccgagtccagccctggcccaagagtgaggcttggggctcccaggtgcttgtgtatccactatcacagggagtgacagtggcaatgg

SEQ ID NO: 14714 - DNA, 201 bp, Homo sapiens
aagttacctttctcatagggaagtgagaggttacagaaaggcaatggcacagtcaggccaggacattagagagactattgtcatcctcagtctgcatctcrcgttatttttgggtgaattccagagatctaaaggctgcagtgaagacactgctgccatggaagcctccagaacagcctggcaagacacagagaagattgg

SEQ ID NO: 14715 - DNA, 201 bp, Homo sapiens
ccacagagagtggagaaaaataagaaccagaggaatggggttgagagtacaaggtgacttccagcccttaaaggggtgggagcctctctgggcagcccccracctgtgtacatagagcataagctggatttcagcccactttcctcctgggatcaactgtatacatatggacagctatcccaggcagtgggccaggcaggc

SEQ ID NO: 14716 - DNA, 201 bp, Homo sapiens
acagaaagaagcataaagatgcctatttggggactctgaatagttaagctgggctagaatagaacacatggatgaaaaggctaaaatagaacacatgaatrgaacatatggatgagtggggctagaaaggtctcttgaagccacattgtggaggacctcgaatgttgagctaagagaatttaactttattgggttgccatt

SEQ ID NO: 14717 - DNA, 201 bp, Homo sapiens
gtaagaaaggggccaaggcagtgggtaaaagccaggtcagggggtaccacaggccagcctagacactcatgtttacctgtaggtgagaggttaaacagagkcatggcatctgctcctataggtgagattacaggtgagggcccctggtggggagccaaactgtgggtgacagggggctgtagtgtgattcaggtgggagat

SEQ ID NO: 14718 - DNA, 201 bp, Homo sapiens
ccagaaaaaagtaactaattgggaataaagatactttccctttctagcaggcttagcagccatgagtgtctgtcataagagatgtggccgtgggctagagytctgaccagtattggaaggactttccagtcccaaatgccattccacttccttgagggctacggcttctaatcaggtcttaactgagggtgtttgctgtgc

SEQ ID NO: 14719 - DNA, 201 bp, Homo sapiens
agggtggccagctcccctcttcacagccgtggattcagctctgcttacgtactcaattccagacttccttgtttaaaaacagctgaaaagacatcaacaascaatgttggtttcttagttttgacaggtacaccatggcaatgtgggatgttaataactttataggaaaacaggtgaagggtagatgaaaactctctacta

SEQ ID NO: 14720 - DNA, 201 bp, Homo sapiens
ggccctttcttggcttatttattcctcttgcagttttgtcgagggcatcaatgccagtattttaaccaatggagaaatgtgagttcagacaatgcacatgwctctcaaggatgcccagttgtgaacctggtattgaatgtggccttaccttggggcaggactcctggtcttccctatacatagaagtggcttccagaggat

SEQ ID NO: 14721 - DNA, 201 bp, Homo sapiens
cttcttctccccctgaccccatcacagtcccctgtgggagcaaattgtgacatcacccactatctctagaaggctgtgagtgtcagcttgttggacagagrttgggaacttggactcccttgaggccaccaaagggcaactcagggtgcaggccactttctcatgtccaccatctgcctggagaatccagactgcacaggg

SEQ ID NO: 14722 - DNA, 201 bp, Homo sapiens
tgatattacagggaaaaatcagggtgctgaggtagaagaatgagaatggaggcaggaacagatctcattaaatctaatttagataaagggttggaggtcarggaagccgtctctagatggtgacatgtaagcagagacctgaagggtgagtagctagtgtgaactgggtgggaaggggcctgctgttggtggctaggggag

SEQ ID NO: 14723 - DNA, 201 bp, Homo sapiens
accccactttcccttcaatttgattttttctttctacactttaaattatcttgtagattttaaaagacacattattttggaaacaaggactatgttttaayttttaaaattaactgcatctttgcttagcaacatcttgtactggtaactaagtcttggatgggcacagtgcctgctacacggtaggcccttaaagaatgc

SEQ ID NO: 14724 - DNA, 201 bp, Homo sapiens
cttcattcttctccactgaccccactttcccttcaatttgattttttctttctacactttaaattatcttgtagattttaaaagacacattattttggaarcaaggactatgttttaatttttaaaattaactgcatctttgcttagcaacatcttgtactggtaactaagtcttggatgggcacagtgcctgctacacgg

SEQ ID NO: 14725 - DNA, 201 bp, Homo sapiens
tacaaatgcatacatacataccctctccctggcttcattcttctccactgaccccactttcccttcaatttgattttttctttctacactttaaattatcytgtagattttaaaagacacattattttggaaacaaggactatgttttaatttttaaaattaactgcatctttgcttagcaacatcttgtactggtaacta

SEQ ID NO: 14726 - DNA, 201 bp, Homo sapiens
tctggacactcagaaactgagagagataagcatggttaagcttttgtaattgcacacaactagtgggataaatttttgagccacctacgcatacaaatgcrtacatacataccctctccctggcttcattcttctccactgaccccactttcccttcaatttgattttttctttctacactttaaattatcttgtagattt

SEQ ID NO: 14727 - DNA, 201 bp, Homo sapiens
ctttggcaggaaatgccaagttctttaggatcaagtgcagttggtctatttgggtacagtcagcccttattgtgcaattctcctgtgtttatgaagtaagrccattcaaaatcaaattgactgagcttttgccaaaagtccagttgtcaagtgtatgttttcacttgatcattgtctttgaagatatttggatgaagattt

SEQ ID NO: 14728 - DNA, 201 bp, Homo sapiens
tatgacatggttgagctggggtggtgaaaacagtcagatctgatttgctgctggctggagacaggactagggtggccctcgggtggctggctcatcctgcmtctttgtgctcatcaagcccaggggctcatcaattatctcctctgtgcagggccagcactctgaagcatgtgccccttccaatctgtgcagcgagtgcat

SEQ ID NO: 14729 - DNA, 201 bp, Homo sapiens
tccatcccagaccactgaaatagcaacacaacggggcaccctcctttcagtcttgaccctttctaatgccatctccacccagcagtcagtgtcatcttttrgaaacaaactctcccatggctttctgttgcaaccacaataaaacccaagggccatgctaaggtacctaagaccacctatgatgttggtactcctaatttc

SEQ ID NO: 14730 - DNA, 201 bp, Homo sapiens
tgtgttctagggtttcaggggcctggaaacatcatctagctttcactctctcatctctccgctgataggaagggagaaagggcctgacatcacccttgatrctgggtaacagtgagagaccattggaggcccaagcagaagctggaggcaccaagcaccaggcactaacaaaccggtctgcagacaaccacagggctcagg

SEQ ID NO: 14731 - DNA, 201 bp, Homo sapiens
gccagtgatagtgagtgtgtggcggcattagctgcttaggccacagtggtagacaagagagatctgggggcaagagtaggatggacatggacaggcccttsctgactcactgtgcctgtacttgtgagtgtgtgtgcagaggacagagaaatgtgtggaatggcaaggaatcaaaagcccttcaatcaacacaatcacacg

SEQ ID NO: 14732 - DNA, 201 bp, Homo sapiens
ccagctcactgtgttggacaagttacataacctttccagcaccctgtccctcagcagccggctgttattgggcttggagttgtggctcctggccccatgtkctttctctataactgttccagttaaagctggtgcaaggaggccttcaggtctctcaccaacatggcatctctgcctgggatgcaacatgccaagcaggtg

SEQ ID NO: 14733 - DNA, 201 bp, Homo sapiens
ccatgctgggatggatgcttcatgttgctggcttcccaggggctggtgcaactgacaggcacatctggctgggtgcagccaggctcatgggcaggtggtascttcccataaatgcagcatttatgggatggttacgcatgtaaaggacccagtaacagaaaatgagaatgaggcttgaggagtgtgggaggaaaccaggag

SEQ ID NO: 14734 - DNA, 201 bp, Homo sapiens
cactgatgaatgacgtgctaaattcatgtgcattttattttgataatggaagtatcatatatctactatgtgaaattttgataaatggatattaaaatatrtaacacatgtatgcataagtgtatattcataatatccagttgctgaggactaacggcagatcataacagttgggatatatcaatatattaatatgctcat

SEQ ID NO: 14735 - DNA, 201 bp, Homo sapiens
tataaggataacgctggccgtggggaggcagcagaggcagggaaggagagtgatggagacaggccagctgcaggcaggagaagaggggagtctgtgctgargggcatggcagaggagggaccatgtggatccaggctctgtggtggaagcagagcagatggaacattcttctagattgtatatgtggaccaggcaacgaga

SEQ ID NO: 14736 - DNA, 201 bp, Homo sapiens
ttgtgccactgcactccatcctgggtgacagaatgagactgtgtctcaaaaaataaaataaaataaaataaaataaaataaaataaaataaaataaaataaaatcacaactatcattaagctgtgacttgttttctcctttctccaggattttgtgtcatgtatagagaactacagaagaagaggacaagagctatatgca

SEQ ID NO: 14737 - DNA, 201 bp, Homo sapiens
tgtaataatagctacttacagatataattatccctatactcacttttaatctctagagctggctacagttcagtctcctcattcagtcatctgtccaacarttcctactggagttgtactatgggtcaggtcagtggatatgcagtgagcaaggctatacctttgtgtttctcgtgaagctaccatgtcaagagagagcaa

SEQ ID NO: 14738 - DNA, 201 bp, Homo sapiens
attgtgccactgcactccatcctgggtgacagaatgagactgtgtctcaaaaaataaaataaaataaaataaaataaaataaaataaaataaaataaaataaaatcacaactatcattaagctgtgacttgttttctcctttctccaggattttgtgtcatgtatagagaactacagaagaagaggacaagagctatatgc

SEQ ID NO: 14739 - DNA, 201 bp, Homo sapiens
tcgcacttatttttgtacaggcatttctttgggaagctaacaatacctggctcagttacattgctttctaatgacctcagttcatactgagcccagatttyagaaaactcagagaaatacaaggctaggatgcctatctgattctctttctctcaaatctctcttgggctcagcacatatttttggataaactggaaacat

SEQ ID NO: 14740 - DNA, 201 bp, Homo sapiens
taagcctttcctcttttttcttggtcaacctagctaaagactgccaattttatcgatctttccaaagtaccagattttagtttcattaattttatttattrttttttatattctgtaattcattactttctgcattaatatttattttccccttccttctacttgctttagatttagtttgctcttttttccccagtgtct

SEQ ID NO: 14741 - DNA, 201 bp, Homo sapiens
gtatactgtatctacccatatttatgttgcttactatattccttttttcttcctggtatttcaagattccttcttttatcatttaccttctgtttaaagarcttcctttaactattcttatagggtagctttggtggtgacaaattctcttaattttactttatcttagaatgtgttaatttaccctttaatccaaaggga

SEQ ID NO: 14742 - DNA, 201 bp, Homo sapiens
gcctctcccgtcctcatcactcaactcagccgcttcatgggctgtgtgtcccatccttattttcttcccctgtagaacctgaaccctcagttcctttctgwttcgtttgctttttgaccttctcttgtccactgccaagctcccctcagcctctaatatactgtatgctctgtcttcatgtccttatctccaaatctctaa

SEQ ID NO: 14743 - DNA, 201 bp, Homo sapiens
gggagaatcagatgctaaaggaatctggagttgacattaaaatcaagcagcatgaccattgctttcctttatggattttttggttaatgaatacacagaamccttaaaaaaataataaagaagacagcctatggagtcacataatatatggggttaagttctaaagtctatttataaaatggaaatcaagttgtcagcaat

SEQ ID NO: 14744 - DNA, 201 bp, Homo sapiens
tagatgaggatgtgtgcaataaaataaggaaatgagatcaggaaagaaaatgatcatagaagaaagtcaattcctaggaaattcagagcttgaatatacagtctctaaagactcaccgtcacataccagcactgtgctccagcttcctgaatgccactgtggagtggtaggcaagagggtacatgcatccattcctcatcc

SEQ ID NO: 14745 - DNA, 201 bp, Homo sapiens
ctagatgaggatgtgtgcaataaaataaggaaatgagatcaggaaagaaaatgatcatagaagaaagtcaattcctaggaaattcagagcttgaatatacagtctctaaagactcaccgtcacataccagcactgtgctccagcttcctgaatgccactgtggagtggtaggcaagagggtacatgcatccattcctcatc

SEQ ID NO: 14746 - DNA, 201 bp, Homo sapiens
tctagatgaggatgtgtgcaataaaataaggaaatgagatcaggaaagaaaatgatcatagaagaaagtcaattcctaggaaattcagagcttgaatatacagtctctaaagactcaccgtcacataccagcactgtgctccagcttcctgaatgccactgtggagtggtaggcaagagggtacatgcatccattcctcat

SEQ ID NO: 14747 - DNA, 201 bp, Homo sapiens
tcttcctttccaatccatatgttccagtattacatccaatagcaatggagagatccttgcttgttcttaatcttagggagaaagtcttcagtctttgccaytgaatataacatcagctatgggaatttgtagatgcccattgttaggttataaacaattcctttgaatttactgagaatttctttttatcatgagcagatt

SEQ ID NO: 14748 - DNA, 201 bp, Homo sapiens
agcagtatcattgcccccatctttcaggtggcctgggaagtcaatttccctgaagtctttcccacgattcacacttgactgccccctttagtgggtggccytgatgctgggtttctttcaaagagcaaaacgacaattcaattccctgcagtgtccctctgagaagtggtgaggtatcacagatctaaccactgtgagtag

SEQ ID NO: 14749 - DNA, 201 bp, Homo sapiens
aattttacacacccaacagcaatataaaaggttttcaatttctccacaggcttgccaatatttatttccctttaaaaaattttttagccattctaatgggyatggagtgttatctcattgtgattttgatttttgtttctctaatggctaataatgttgaatttttttatgtgctttttggccatttgtatatctttttgg

SEQ ID NO: 14750 - DNA, 201 bp, Homo sapiens
tcaaatttattttcaaaaggacagtatcagttttttactccacatttaataacttgttttgcgcatacttctgagatttgagaattatattttagttttttagataaaatacatttttactatgagatgagaataagatgcatcatgttatatcactttgtatttacttgattaactctgagatcaaacactactcactct

SEQ ID NO: 14751 - DNA, 201 bp, Homo sapiens
gttctatgtgtttgagagattatgctctctcttggtctaggaagcagaagctctgccactccttctgccagtctggtttgcagactgttacacttacctaktcatatgttgtaatacaagattgtacacacgaccaggtgcagtggcttacacctgtaaccccagcactttgggaggccaaggcgggtggatcacctaagg

SEQ ID NO: 14752 - DNA, 201 bp, Homo sapiens
acagcaatgcttctcatagtgtggcctgtagaccacctgcatcagaatccattgtaaagttgcacaaaaatatagttgtgtaaactagatttcccgaatcrcaaatccctggggttgaaatttagggttctgtttttaaaaaggtcctcttattatgtgtaagcacattaaagtttgagaactgctccaggtgctggacat

SEQ ID NO: 14753 - DNA, 201 bp, Homo sapiens
taagctccgcctcctgggttcgcgccattctcctgcctcagcctccccagtagctgggactacaggcacccaccaccatgcctggctaatgtttgttgtgwtttttagtagagacagggtttcaccatgttagccaggatggtctcgatctcctgacctcgtgatccgcctgcctcggcctcccaaagtgctgggattaca

SEQ ID NO: 14754 - DNA, 201 bp, Homo sapiens
gagtctcctggatagcattttttaatctagataaagtattatctcttatccttagatcaagccgcaagaaattactattcccattttgcagactaagaaayttaggttcaatgagattaggagctaattgaagatgggaccaaaatctgaatagacggaaatatgactccatttccccaggttgcctcatcagtcctattt

SEQ ID NO: 14755 - DNA, 201 bp, Homo sapiens
ctgcagtctgggaagtaagatagacaataagcaaatacagttgtaaatattgggagaactgatggcaatgagaaaaaacaatgcagggtaaggcagggagsggggcgagagaggggctgggcttgttcagatggagaaggtcagcaaagtcatctttggcaaggatgccttggagcagaggagataatttatgaagaacat

SEQ ID NO: 14756 - DNA, 201 bp, Homo sapiens
atggcacaggttggtgggaaagagcttgaggcagggcaggccactcatgttggggttctcttgtctttgagggggttggggctgagtccacccggaacacyagcagtcctgaggccgcagctgaaggcgacagcacagtggagggtctccaggctcccaccaaggcacatcccgcccggaggaagctgagggagttcacgc

SEQ ID NO: 14757 - DNA, 201 bp, Homo sapiens
aaggagacttcctaaccaggtctccttgactgtttatcttcttatttttcagatgttgctcaatatttgcagtgactctcagggcctggagggactcctcycaggaagtgagctgcagtctctgctgattgccacgacctgccttcgggagcacagctgctgcttctggaaggaacccaccttctgcgtgctaagggcaat

SEQ ID NO: 14758 - DNA, 201 bp, Homo sapiens
gagagactggttggtgctagtccctgagagagaagccctagagttttggaagaggatggtggctgtctggagtaatcagcatggactgcacaaatgaggcygctttgcttttaattttctaatgcatccctcaagtatccacaggccttagtaacaggagatagttattaatcttgcctcctgaagtttgatagagtccac

SEQ ID NO: 14759 - DNA, 201 bp, Homo sapiens
ccggtttccccagcagggctgtgtgtttactgttcccactgctcaggctcccccactgtggccaaatattcaggaatttccataagcactgccatccttgscagccaatgacccacatgcctggctcctgcagactcctgaagagcagtcccagccaccagtgtgtttccccttctctttcctgtcactatctaattgatc

SEQ ID NO: 14760 - DNA, 201 bp, Homo sapiens
aaggtcacacatttagtaaataataaagctagaatttgaacccagggctacctccaaagcctgcatgcatttgtctgtgcgtgcgtgtatgtgcacacacrtgtgtgtgttcttcctgtttttttcctgatactcccacaataatagtgatagttttccaaatgtctgacacgacagcctgcagtttgaagattgggttct

SEQ ID NO: 14761 - DNA, 201 bp, Homo sapiens
atgttggccaggatggtctcaatctcctgacctcgtgatctgcccacctcagcctcccaaagtgctgggattacaggcatgagccaccacacccagttgcrtcgtttactttttttttttttttttttttgagacggagtagtctcgctctgtcaccccaggctggagtgcagtggtgcgatctcggctcactataagctc

SEQ ID NO: 14762 - DNA, 201 bp, Homo sapiens
aaaggtcacacatttagtaaataataaagctagaatttgaacccagggctacctccaaagcctgcatgcatttgtctgtgcgtgcgtgtatgtgcacacaygtgtgtgtgttcttcctgtttttttcctgatactcccacaataatagtgatagttttccaaatgtctgacacgacagcctgcagtttgaagattgggttc

SEQ ID NO: 14763 - DNA, 201 bp, Homo sapiens
acgaggttctgcaggaacatgtgggactggaaatgttgctgaggctcttttggaaatgcatgatctgtgatatattctaatgccagtgatatattctaatsccaggggcactgacttcttcagaggtggactgtggtttttgctagacatggctgtagggtcaggagaccttgggcagtttacttaactccccagtgggat

SEQ ID NO: 14764 - DNA, 201 bp, Homo sapiens
tatatgtctagatatactgtttctttttcaaataaacttgatttgatagcccttttcctttctcatatctttcatttttatttcttcaaacacaagaatcrtaattatttcttcttgtgttttttgagagtatattgtttctgtgacaatcatggaaggtcccttgtatgatgtctgattttttattgtgaatcttgctcc

SEQ ID NO: 14765 - DNA, 201 bp, Homo sapiens
tgagaagaagtcactggcaagtcgttcaaatgttgcacaccacagcaaagtcactttgtggagtggaagcctgtcctcagccatgaagctgatgcccgggmggcaggccaaggaccctgagtgcaagacagaggtgagcccagaccccttttcctcagaaaagtatcaggcatttgcttcaaaccccatgagtcatatctc

SEQ ID NO: 14766 - DNA, 201 bp, Homo sapiens
ggtaattcccatcttgctcaagtcaaggcgctttttcccatcaaaagtgattttgatgcaattcctggccaccttgagggtgatcttcttgcccttggggmctttctcacccttaaccatgttcttttagtaagggagtgttagaagtttattgttctgattggatagtgatcagtgtgaggaaaaatcatgaaaaactgc

SEQ ID NO: 14767 - DNA, 201 bp, Homo sapiens
ttcataattattaatatatttggaatgatttctacttagctttttacatttgttccactttaaaaaaaaacatttttggtcttatttttgaattgattttwaaaaattgtgtttcctacctactagtatgaaatttaaactctctatgattaattttatagtagttgccctagagtgaattaacaggcatactcatgtttt

SEQ ID NO: 14768 - DNA, 201 bp, Homo sapiens
acacaggctgcatcctctcctgagtgaggtttgtgaagaacacacacaatttagctggagccgaagcagctacagacatataggcgctcccacatatgctyaaccccaaacccagaaggctggcccatgcttggcatggcgcccagggccacccctcctttggcagtgctagaggccagccctggctctgccctttggagc

SEQ ID NO: 14769 - DNA, 201 bp, Homo sapiens
cacctcccaaaaggtcccacttcttagtaccaccacaattgggattaagtttcaacatgaattttggagggaacacacattcaaacgatagcaatacctgyctactttcatgtacttttaaagtcaaaatgtcagattctatttcagagaaaagtaaaataggatatacatatccatgcacatagagtggaataaagtagt

SEQ ID NO: 14770 - DNA, 201 bp, Homo sapiens
acattttgccttaataataataggactatatcaggtttcttttggttagttcgtgcctgggatttttcttcatcctttggttttaacctttctgtgtactstccttacatttttaggtgtttttcttgtaaacaataaggaaccacttttgttggttttactttgtttttcaatctagtgtggtattatttctcatttaac

SEQ ID NO: 14771 - DNA, 201 bp, Homo sapiens
tcacctcccaaaaggtcccacttcttagtaccaccacaattgggattaagtttcaacatgaattttggagggaacacacattcaaacgatagcaatacctrtctactttcatgtacttttaaagtcaaaatgtcagattctatttcagagaaaagtaaaataggatatacatatccatgcacatagagtggaataaagtag

SEQ ID NO: 14772 - DNA, 201 bp, Homo sapiens
ctgttttttgcctttgtctattaatgtggtgtattttgttgattggttttgttatgttgaaccacccttgcatttctaatataaatcatacttggtcatgrcatataatccttttaatatgctgttgaatttagtttgctagcattttgtttaggattttgcatgtatgttcataagggacattgatcccttggatattgg

SEQ ID NO: 14773 - DNA, 201 bp, Homo sapiens
tttttgcatattagtcaatgcaactgcaagaatgaatttttaattttgttttcaaggtgatcactgctctcaacttacacctcctatacttgtacatcttycagaatcacaaaatgtgcagtgattcaagagttagttatttccatgtatattgtcccagactgtccagtggcccagaatctccttctaaattggctttat

SEQ ID NO: 14774 - DNA, 201 bp, Homo sapiens
gcaggaagattccagtaatttcttagaggaagaggcccatgtggaggctgtggcctgggctcaggaacttgaggttctaggtcctaccctgttatccacckaccagctttgaaacctttcactgtcatgcaatgtccttgagcttaggttcctcatgtcctgtcacttcatgaaatgaaagttttcatccccaaaatatta

SEQ ID NO: 14775 - DNA, 201 bp, Homo sapiens
ggtcactgaggccatcctgagtgtgccatgtgctctctctgctagtccaacacaacatccagaagacagtgcagactctctggcagcagctggtggcacaraggcagcagaccctggaggatgccttcaagatcgatctctctgtgaaacctggagagagggaagtgaagattgaagaggtcacaccgctctgggaggaga

SEQ ID NO: 14776 - DNA, 201 bp, Homo sapiens
ttgcaaataggcaacacaacatgggagaatttggagaggcagcaggattttgagatgtgtctgcattagctcggggtcccaggttaacctgcaggccctcygtagttgtctgccatgttagggctacacctagcctcctagtgccaggtgaagaagaggataggcagagaccccagactccttccagggctgagagggtgc

SEQ ID NO: 14777 - DNA, 201 bp, Homo sapiens
cacaggcatgcctgaagcagccagtcagtcaacactgatgaatgacgtgctaaattcatgtgcattttattttgataatggaagtatcatatatctactaygtgaaattttgataaatggatattaaaatatataacacatgtatgcataagtgtatattcataatatccagttgctgaggactaacggcagatcataaca

SEQ ID NO: 14778 - DNA, 201 bp, Homo sapiens
aataacttcacatttgggatctggcagtgggctctgaaatgccagtgatagtgagtgtgtggcggcattagctgcttaggccacagtggtagacaagagaratctgggggcaagagtaggatggacatggacaggcccttcctgactcactgtgcctgtacttgtgagtgtgtgtgcagaggacagagaaatgtgtggaat

SEQ ID NO: 14779 - DNA, 201 bp, Homo sapiens
acttacatggggaatgagatctccatttgctatgaaaactttcaacacaataatcagtgaaaaaagggatagattcctaaatttgttggcccagagaaagrgtgcaaagggaagtctatacatcctgcatcaaaatatttaataggtgtaccacaaactgttaagtgaaaaatactctaacttcctactttgaccttcata

SEQ ID NO: 14780 - DNA, 201 bp, Homo sapiens
gggacctgttattattagcactatctctgggtgcatgggtgagatttgttttatttctcacaacttcatatcttttccaagttttttttacaataaaaggwtattgtttctatcatgagaaaaaacagcaatattcaaagagtgaatgaagtgaaattcagagaaagcaaatcctagctgggcctctgaggagttgcttta

SEQ ID NO: 14781 - DNA, 201 bp, Homo sapiens
aactccaagctgtggtcaggccccctgccctcccacacattctgcagaagcaccccatccctgtcaccaaggtcttcctaccatgggaactcaaaaggacsacccaggaagggtcttctgacacggagacccgcaatgacccatttccagcagctgtgtcaccctggggcgtctctagtccacaaaatatcaggagcatta

SEQ ID NO: 14782 - DNA, 201 bp, Homo sapiens
tcagaatattgacagttatcctaagcacatggacagtttttgcagatcctgctggctgttatgctgacgaactgtgaatggcagcctctgaactatggtartggctctacccaaagaatatggatcagctgccccttctacccagtacccttgactgcctgaaattcgattcattttgtagaacatgtagggtgtagtatt

SEQ ID NO: 14783 - DNA, 201 bp, Homo sapiens
ggagctgcccaccctgaccctgctcctcgtaggtggcgtcagcaggtcatgctgggtctctttaatcctgacccctggggtattttactctgggcaggggrtgaccagctgtggcgatttgggccccagtgagtgaggaaggtctgtgaggttcttttcagtccctcaaagtttgatcactgcctccacttgggaagccct

SEQ ID NO: 14784 - DNA, 201 bp, Homo sapiens
ctctccctggagctttggatgtcaagaacagctggctctccccacctcaaaatgaagcacaaaggaagaaggaaaagttcatatgcttttgaaaaatagarcaaaatgcatcggaatctttgtgtcatagaggccagcttgaattcctcctgcaacaaggagctcactactacaggaagcagccccccgtgacagcaaggc

SEQ ID NO: 14785 - DNA, 201 bp, Homo sapiens
tcatataaatttgtcaggaggataaattttaaatgtgcacatgcataacttctttgtcagtcataaagtgccctgtgcctgttagttaattgaaagtaatrttgagagaacagaccaagggatgatacatatttgggttatcaatactcttagataatccactgatgtgctctgggtctgttccctgttccattctcccaa

SEQ ID NO: 14786 - DNA, 201 bp, Homo sapiens
cagctttataaatagtgtttaataatttaccagcctataaatcctttctttcttagaatcaaaacatggtagaactggaagatgccttggaaatgagatastccagccactttcttttccatctttttgaaagggaatgtagtgcagtgcctaacagctgggctctggcatctataccttccgggttcgaatcctagccct

SEQ ID NO: 14787 - DNA, 201 bp, Homo sapiens
ttaatagacaaatgcatcatttgcacaacaatcttgccagcattttattttactattctttttaaatgtaatacataataagtgatgttaaccttaacttrcctctccttggtgacttgtaaggctggacatttcatattttctggacatgtcactcgctcatggactgagagaacattggttgcatttattaatccccag

SEQ ID NO: 14788 - DNA, 201 bp, Homo sapiens
ctctagatgaggatgtgtgcaataaaataaggaaatgagatcaggaaagaaaatgatcatagaagaaagtcaattcctaggaaattcagagcttgaatatacagtctctaaagactcaccgtcacataccagcactgtgctccagcttcctgaatgccactgtggagtggtaggcaagagggtacatgcatccattcctca

SEQ ID NO: 14789 - DNA, 201 bp, Homo sapiens
acctctagatgaggatgtgtgcaataaaataaggaaatgagatcaggaaagaaaatgatcatagaagaaagtcaattcctaggaaattcagagcttgaatatacagtctctaaagactcaccgtcacataccagcactgtgctccagcttcctgaatgccactgtggagtggtaggcaagagggtacatgcatccattcct

SEQ ID NO: 14790 - DNA, 201 bp, Homo sapiens
atcactcaactaaaaccaggcctccactaagaacttgtattccaaggtggatatgtcagccttctgaggaggacacataatagaagtgtttaggtcacccrtttactggatcctttgcaactagtaaaagactgcattgcagatggacttaaacaaggggtgggagtaagagcaggagctgcccaccctgaccctgctcct

SEQ ID NO: 14791 - DNA, 201 bp, Homo sapiens
tagtgcttactcatgcattcgttcatttgttcattcactgtatgagcatattgagtgcctaccatttatcaaccctctgagcaacacagataaacagtaawcaggcccagtcctcaagttgaaatagttcaaatctagattctcactgattctggccaccagattcccctgaacaccaaaaacctgggctgccttttggtt

SEQ ID NO: 14792 - DNA, 201 bp, Homo sapiens
aaacctgcaaaacaagtcttcctaaaactcattggcaccaacaatgtgtgtgtgtgtgtgtgtgtgtgtgtgtgtgagagagagagagagagagagagagatcaggaacgttgttgtaaggtatatggagtacggtgggtggggggacaggttatctctgccccacagtgtctggggcctcagttgggatcgttggaaggc

SEQ ID NO: 14793 - DNA, 201 bp, Homo sapiens
aaaacctgcaaaacaagtcttcctaaaactcattggcaccaacaatgtgtgtgtgtgtgtgtgtgtgtgtgtgtgtgagagagagagagagagagagagagatcaggaacgttgttgtaaggtatatggagtacggtgggtggggggacaggttatctctgccccacagtgtctggggcctcagttgggatcgttggaagg

SEQ ID NO: 14794 - DNA, 201 bp, Homo sapiens
gggattttctaatcagtttctcaaaacctgcaaaacaagtcttcctaaaactcattggcaccaacaatgtgtgtgtgtgtgtgtgtgtgtgtgtgtgtgakagagagagagagagagagagagatcaggaacgttgttgtaaggtatatggagtacggtgggtggggggacaggttatctctgccccacagtgtctggggc

SEQ ID NO: 14795 - DNA, 201 bp, Homo sapiens
tgcagtggcttacacctgtaaccccagcactttgggaggccaaggcgggtggatcacctaaggtcaggagttcaagaccagcctgcccaacatgctgaaascctgtcactactaaaaatacaaaaaaattagctgggcatagtggcgggcacctgtaatcccagctactcgggaggctgaggcaggaaaatcacttgaacc

SEQ ID NO: 14796 - DNA, 201 bp, Homo sapiens
tttttttttgttttttttgtttttttttgagacagagtcttactgtgttaccctgggagagtgcagtggcgtgatctcggctcactgcaaccgctgccttmtgggttcaagcgattctcccacctcagcctcccaagtagctgggattacaggtatccaccaccatgcctggtgaatttttgtgtttttagtacagacagg

SEQ ID NO: 14797 - DNA, 201 bp, Homo sapiens
tcgtcggtgaatgagaggcagatctgcatggacggagccctggacccttccctgcctggtgagaagacctttgccagttcgaaggcagtaggacggccctyacggaacccctgagaggcccacattgtgcagagggaggggctaagtaaggaaggggaaggcacccacagccaagccgtggtttccaagccgtggcctgtg

SEQ ID NO: 14798 - DNA, 201 bp, Homo sapiens
tcttttttttttgttttttttgtttttttttgagacagagtcttactgtgttaccctgggagagtgcagtggcgtgatctcggctcactgcaaccgctgcyttctgggttcaagcgattctcccacctcagcctcccaagtagctgggattacaggtatccaccaccatgcctggtgaatttttgtgtttttagtacagac

SEQ ID NO: 14799 - DNA, 201 bp, Homo sapiens
acaagactaagacctgtgcttgaacaaagacaggatgcctctgctaaaaactcagtcattagccagtgattcccagttgacattggctccaggattctggytcaccagccaaggcaggctgttcttcctcagttacacctgcacatctgcccaacaaagtcttgcaaaatgattctaaaaaataagaaatgagacatgaaa

SEQ ID NO: 14800 - DNA, 201 bp, Homo sapiens
ttttcaaggctggtcatggattccttcagctccttccttgggtgacctcatcccatagttatcctttctttctttcttttcttttttttttgttttttttktttttttttgagacagagtcttactgtgttaccctgggagagtgcagtggcgtgatctcggctcactgcaaccgctgccttctgggttcaagcgattctc

SEQ ID NO: 14801 - DNA, 201 bp, Homo sapiens
cctctaggctccagcaggaagctattgtgtcctggactccatactccaggccagtgagtgtgggcatcagggggcagtggaaatagcccggcatgggaggragttgattgggtgggttagaggctgcctctgccacgtgccccctgaggtccatggccaagccccttgctcctcttctctgcctatacttattgtgctggt

SEQ ID NO: 14802 - DNA, 201 bp, Homo sapiens
agctttggatagtcagttggatagtcattatttttctggtggcccccccctttttttttttttctgagacaaggagggtcttattttgttgcccaggctgragtacagtcatgtaaatcatagcccacagaagccttgaactcctgggctcaagagatcctcctgcctcagcctcccaaatagctgagagtacagtcatgc

SEQ ID NO: 14803 - DNA, 201 bp, Homo sapiens
ctcttgagccaggcgccccacgtaggcaaactctcttgtgggcttcagatgcacagccttgcgggcagcagaaacacccatctagttttcctgctgtaggkcggtgggattccatcgaacacctcggcgtccaaggcagcctggcctcgctgggccttgcggaccgcgggccctgcactgtcggctggaagacgctgctgg

SEQ ID NO: 14804 - DNA, 201 bp, Homo sapiens
tctgtttaacattgtagagcttaagatttcctttgtgactgattgacttttcatggcatgtgtcacgtgaccaggcataggtcaggttcagacgcgtgccrtaccacatcgcagtgaacagcctttggtatggtttatcagttagaaaggagggaccaaaaccaccacacacacgtcaaggttggagtgagtttccaactc

SEQ ID NO: 14805 - DNA, 201 bp, Homo sapiens
gaactatttaggacgtaactttgcctggccttggtaaccaatttgatgagagtgtgagagagactggttggtgctagtccctgagagagaagccctagagktttggaagaggatggtggctgtctggagtaatcagcatggactgcacaaatgaggccgctttgcttttaattttctaatgcatccctcaagtatccacag

SEQ ID NO: 14806 - DNA, 201 bp, Homo sapiens
cagggaaggacccaggaatgctgaagctgcccaccaggcacagcttatacccaagctcatcttcctattcaatgagccgagcctcatcccctccaagatcyccaccatcattggcatcctggcctgtcagctgaggggccacttcagcacccaggacttgctcaggtaccacaccaagctgcccagggggaagagcagggc

SEQ ID NO: 14807 - DNA, 201 bp, Homo sapiens
ccctggtgattgtgcagggccacctggtgtcagaaggggtcctgctttttggccaccaacacttctacatctgcgagaacttcacactgtctcccacgggwgatgtctactgtacccgtcactgcttatccaagtgagttatccacttctcccagcagattcttccctgagccccattcatccttaccagccgcccccact

SEQ ID NO: 14808 - DNA, 201 bp, Homo sapiens
gtcttgcataatttgaaggggtcacatgcatgtgcgtgtttgtgaatctgtggaattggaggtgagtgaagcatagatgtagcatccaggatttaattttycttttcaatgtccttatttcaggaaagccaagacaaaaatgatcatatttctcaaacaaatgctgaaaaccaaggtattcagtttatctattttttcctt

SEQ ID NO: 14809 - DNA, 201 bp, Homo sapiens
tttgccttaaacaaagctcctagaggtcttagagccattgaaagcactcacataaatttagtctgtttaacattgtagagcttaagatttcctttgtgackgattgacttttcatggcatgtgtcacgtgaccaggcataggtcaggttcagacgcgtgccgtaccacatcgcagtgaacagcctttggtatggtttatca

SEQ ID NO: 14810 - DNA, 201 bp, Homo sapiens
tccctggtgattgtgcagggccacctggtgtcagaaggggtcctgctttttggccaccaacacttctacatctgcgagaacttcacactgtctcccacggstgatgtctactgtacccgtcactgcttatccaagtgagttatccacttctcccagcagattcttccctgagccccattcatccttaccagccgcccccac

SEQ ID NO: 14811 - DNA, 201 bp, Homo sapiens
tattttgttgcccaggctgaagtacagtcatgtaaatcatagcccacagaagccttgaactcctgggctcaagagatcctcctgcctcagcctcccaaatrgctgagagtacagtcatgcactaacatgcccagttatttctttaatttttttgtagagactgggtcttgctatgttgcccaggctggtctttaacttctg

SEQ ID NO: 14812 - DNA, 201 bp, Homo sapiens
gggtgatgttcaagaccttaagtgagaagggtgtgggtaaaaccactcatgatgcaccatctcccagccctctctgggagggtcactgaggccatcctgaktgtgccatgtgctctctctgctagtccaacacaacatccagaagacagtgcagactctctggcagcagctggtggcacaaaggcagcagaccctggagga

SEQ ID NO: 14813 - DNA, 201 bp, Homo sapiens
tgtgtttttcacatttcgatgaagcacagtatgagaactgcttaaatgtagccccccctccctctctctcttcctccctccttccttccaatagcatgtaytgattacctagagtatataccatgcactgggcccaagtaagtaagtgctcaagaaaggtttgattttagaaggaaataaaagcttggctggccagtacag

SEQ ID NO: 14814 - DNA, 201 bp, Homo sapiens
tatctgcttcaacactctttgagtgatggagttcttttaagcaatattcagcatcaaattggacaactgaattgggagggggttccttgggggaagagggrtttatagtggtcacccagcactcaggcgattgtctgtaatctgatcagttttgttttttaatcattctcccttcctgatgtttgttttgtcgtgtgttat

SEQ ID NO: 14815 - DNA, 201 bp, Homo sapiens
acatgtgaggcaggcaggaattggtggtaagcaggtggaggtggagaaaggccagcttgcatgggtgttggtggcattgttgtcaggcctgtggctctcartactgattgcttctcgctgaagcttgcaaagctggggtgatgttcaagaccttaagtgagaagggtgtgggtaaaaccactcatgatgcaccatctccca

SEQ ID NO: 14816 - DNA, 201 bp, Homo sapiens
agtccaatgcaatttatctgatcaataaataagtactaaaaattacagacttttaatacttatttaaaatcgtccctgtgtttttcacatttcgatgaagyacagtatgagaactgcttaaatgtagccccccctccctctctctcttcctccctccttccttccaatagcatgtattgattacctagagtatataccatg

SEQ ID NO: 14817 - DNA, 201 bp, Homo sapiens
ggccggtgggactgtgattgggttatgcacaaattcagattgatttgctaatatacatttagctgttcaactctgagcttaattgcattacctcaccggtmttccaccatgacacatggaaaattatgaggaataacaaataatagaatgtgaaataaatcctgttagtcctaacgtagttagcgctttacagcagacatc

SEQ ID NO: 14818 - DNA, 201 bp, Homo sapiens
ctgagatcacacaaggtgtccctctggtatccaacagaattatggggtggagagttgagggtctctgagctcataaatgatatgtttcccagtcctggacwtgtgaggcaggcaggaattggtggtaagcaggtggaggtggagaaaggccagcttgcatgggtgttggtggcattgttgtcaggcctgtggctctcagta

SEQ ID NO: 14819 - DNA, 201 bp, Homo sapiens
aagttttgcttttactttgcttgaagagtaaaagtatttttgtgtccaatgtagaaaagagtgatctgctttgctcatagaaagttccttttgtttactckgtagcccagaggcatcgtattggagtgtcagcccttgggcaataggactaaatgtctagaattagtaatgtaaagtcgttatggtgttttacagattcaa

SEQ ID NO: 14820 - DNA, 201 bp, Homo sapiens
atgataacaagaagcctctctcacgtgagtggagggtgacatgatcagattttgcgtgaaaaacattacattggctgcttggtggagaatggacagggaawgagggttgagaggaagaggcaaggggcaagagttaggaggctctgcctgcggtccatgtgatgtgtggtgatagctggattagggtggtgtctgtgagaa

SEQ ID NO: 14821 - DNA, 201 bp, Homo sapiens
taattgttcctgacagtaccatatcaaaagccaaacagatccacagagaggaaagttttgcttttactttgcttgaagagtaaaagtatttttgtgtccartgtagaaaagagtgatctgctttgctcatagaaagttccttttgtttactctgtagcccagaggcatcgtattggagtgtcagcccttgggcaataggac

SEQ ID NO: 14822 - DNA, 201 bp, Homo sapiens
taaaactgtcactccccatctcacctaatttagttcaagccattacctagttgctgctcagcttcattccctagtaaatgagaagggattaaacaaacccattactctctataagactttttgcctaatggagtttattcttggatttactaatctcaaatcaagttaaagggattagcagttatttttctagcagccagt

SEQ ID NO: 14823 - DNA, 201 bp, Homo sapiens
catttagagaatggtgtttgtttcatcatacttactttatttctctgcacattcgatgtcagacattgatgtgagctgttccagttattatgtggcctaarccagcagtgattggtgtggccaaagcattgcgtggtccatccaaaagtggcgtcatgaccataatcatcatgtttcacagatgacaagaacccagccagt

SEQ ID NO: 14824 - DNA, 201 bp, Homo sapiens
gagagaccaatgctgccttacctggttgaggaaggcccactggggagagaacctgtgagctgtgaaaaagaagcaaaaggcagtcagaggtgtggaaacasggggcacaaagggacaagtgaggcagggttatcatgtttgggcaacagagatataagtgtatgtgtttgtaatattgttaacattcatcaatttatctta

SEQ ID NO: 14825 - DNA, 201 bp, Homo sapiens
aattctgcatagccttgattgatcatttccttaaatagaggcttgaaagtagaggaaatgagtcctattagaatttcaggtcatgtcaatttttttttaaragacaaagttcctgccctgtcttccaggttggagtgcagtggcatgatggagtgcagttcacctcagcctcgaaatcctgggctcaagcaatcctcccat

SEQ ID NO: 14826 - DNA, 201 bp, Homo sapiens
tcaggcctagaactggcacgggttattttctgtccaattttctttaggaagaactttgggcaggactcacctggatgcaagggatgctaggaaatgttttycctggctaggcagctacttcccacaacactgtaaactatggaagtgcagctcaaatcagcaatggccaagtagctgccttgttgatctgatgagcattta

SEQ ID NO: 14827 - DNA, 201 bp, Homo sapiens
gttaaaatcagattcctggcaagttgtgttgtaaatggaaagaagctgctgagctccctatggctaaagcatggactcccagctaatatcccaaacatagrtgccagtgggggccaccgtgctttcagggggaccaggcctgagggctcggctccccacatatccaccagcctcctctcttgcttgctgtctgtgatgcct

SEQ ID NO: 14828 - DNA, 201 bp, Homo sapiens
gcgctcatcccccttatctcctacaggtcctgatgacattcgagaacctggctgcctggggccgctgtctgtgcgccgtgtgcccatccccaacaacgatygtcacctctgggaccagcactgtggtgtgtgtgtgggagctcagcatgaccaaaggccgcccgaggggcttgcgcctccggcaggtatggtccagctcgt

SEQ ID NO: 14829 - DNA, 201 bp, Homo sapiens
cacattctcccccatcctcctccaaaaagccacaggaagaaatgcttcaccttgcttgctttctcaccacttggtttatgtcgctgaccagattactcaasatctgttcattttgattaaatgtgtgtgtgttgggcacctcgtcagtacaagactccatctttggaaccatggggtacacagaggtgaataagatgcagt

SEQ ID NO: 14830 - DNA, 201 bp, Homo sapiens
gcagtacagtcctgggacagcgggactgccattcatacaaggcactgctctcacctccaattgccccatggatggctggtcactaccctcctgtttccccyaagaatcatgggcatgcttcctgtgcaccacctgactctgccactctctccttccaggtgacgcagaagttctccctggtgattgtgcagggccacctgg

SEQ ID NO: 14831 - DNA, 201 bp, Homo sapiens
tacagtggcatgatcatagttcatagcagcctggaactccagggctcgagcaattttcctgcttcagcctcctgagtagctaggactatagatgtgcaccmccactcctggataattaaacaaacaagcaaacaaaaacaaacaaacaaaaacaaagaaacaaaaaaaagcacacattttgtaaagacggggtcttattat

SEQ ID NO: 14832 - DNA, 201 bp, Homo sapiens
gcagcatcacacacaggtgcacaggcatgcagtgtgacatgtaggcagtcacccggtactgcagcaggcatgcagtgtgctggctgcatgtgtgtgcagcrtggcccctggtgcccccagtgcagagtgacaggcagcacaacagctctgccatggagcacctttgctgtcacgtactgtatgcctgtgtggcacacccag

SEQ ID NO: 14833 - DNA, 201 bp, Homo sapiens
atccattgttgcggcatgtgtcagtttcctacggctgagtctgcgcccctgtatttgtagaccacatgttgtttatcattcgtccatggctggggtgcttyctccctctgatgacaatgaagggtgctgctgtgaacactgctgtgcctccttggaccctcacaagcttgtgagaggctgctgtgattaatctcaggatac

SEQ ID NO: 14834 - DNA, 201 bp, Homo sapiens
atgatcagattttgcgtgaaaaacattacattggctgcttggtggagaatggacagggaatgagggttgagaggaagaggcaaggggcaagagttaggagkctctgcctgcggtccatgtgatgtgtggtgatagctggattagggtggtgtctgtgagaaggtgtgaagaaaggaattaagagacctgtccagaggcaga

SEQ ID NO: 14835 - DNA, 201 bp, Homo sapiens
ggcagaggcttcctcctcctccttctcctcctcttgcagagatcaccaggaggccagttgctctcacagtcccctctgcggcacctccaggctcttggggytttgcacaccctcagcctcagctgtcttttcctatgcttattgttttataaaatagaagtaataattactgacttcataagttgcttggaaagttaaaat

SEQ ID NO: 14836 - DNA, 201 bp, Homo sapiens
tgagactgcacaccattttagttttgggctcaaatgcccacttttgaagctattggggcccagtaagctaacggcattagctaagcctacggttgatgaayggatgtctgagaaagaatgctggatggatgggtaaatggatggatggatggaaggatggatggatggatggatggatggatggatggatggatggatgga

SEQ ID NO: 14837 - DNA, 201 bp, Homo sapiens
atcatgttggccaggctcagaagtgtttttatcgttattattagatacccttttagcacacagttagataatcctatgctttttttttttcttttagccartttcctatgatgaattacatcaatagatttctttgcattctttcaaagacctcatttagtcactctgtccttattctgtttgtattttctttatgatttc

SEQ ID NO: 14838 - DNA, 201 bp, Homo sapiens
cagcctctactgtgtcctaggctctatattagtggtcccttccttcaagataacacctggggacccttgtaaacaatctgggctgagccaaggcaataacrtcacaaagatcaataatatcacaaagatgcagatcaagaactccgtcagttcacaggttctgtttctctagggtacttggagaccaccacaaggagtcag

SEQ ID NO: 14839 - DNA, 201 bp, Homo sapiens
aacgttgaaaaaaacagcgcattttattcaaaacaaggcaatattggtattgacagagctgcagtgataatgaggacgatcaattttctctcctccattayggggtattgagcaattttggagtaaacttgtggcatcattagacaagatcagcatttctcccttttgaaaactttcagtttttcttttttgcatatttag

SEQ ID NO: 14840 - DNA, 201 bp, Homo sapiens
agggcacaggctctggcggggcgtgttcgaggttgggcgtcagcggaggccgcaggggctcgggcgaggcagccactggagcgcggagccggccccacctrcagggcccgggcttcccctctgacaaaagctgctgtcgggaggggctgtaaagcagcagagaagaccaggcgagggatctgcaccagaggaagggaggca

SEQ ID NO: 14841 - DNA, 201 bp, Homo sapiens
ggtgccctggggcagggtccccaaggctcctctccaccgtggaggctgaggccaagcccacggcacagggcacaggctctggcggggcgtgttcgaggttrggcgtcagcggaggccgcaggggctcgggcgaggcagccactggagcgcggagccggccccacctgcagggcccgggcttcccctctgacaaaagctgct

SEQ ID NO: 14842 - DNA, 201 bp, Homo sapiens
ctgtatgtggcaggcagtaccctgtattaggtagcgtcaggtgctgtaacaaataaatcccatatcctcagtagcctggtacatttgaaatttctttgcawcatacagtccagtcaatgattggtgactgtcattaaggaactaccatcacctgggcatctaacttggccagcagacaagggaagagagaccatggggaac

SEQ ID NO: 14843 - DNA, 201 bp, Homo sapiens
ctgtggatatgcaccaagcgatccacatttgctcaggcatttgtattcatgtaattcagttagccactgtatgtggcaggcagtaccctgtattaggtagygtcaggtgctgtaacaaataaatcccatatcctcagtagcctggtacatttgaaatttctttgcatcatacagtccagtcaatgattggtgactgtcatt

SEQ ID NO: 14844 - DNA, 201 bp, Homo sapiens
gtttttgtgtctgggcctctgggccaagccctggacaatattttatgagttgctttctactgcttagtaacttctgtccttaaatcccatcttgaatgaarttaatgtattgcttcatccgctttccttggtgtttaaatgagaagtctttgcaccgtctctttgtttggtggttctgtcttatcttagctggtatttctt

SEQ ID NO: 14845 - DNA, 201 bp, Homo sapiens
gagcttccccacagtgctgtgggagccaccaccctcacagctcaatgctttcccctcccccaggtggaaaccttctccattcctcccactgcctcccctgyctcaagggagacaagaccaggggcaagctccgctgggccccagatagagccccagagttgcaatatcccatgtgctggcggggacaagtggtactgtccc

SEQ ID NO: 14846 - DNA, 201 bp, Homo sapiens
ggctgagcacagtacctgctgtgttggtgagcatagatggataatgacagtatggctttatcctctgcctagtgtagcagcagggcccctggtcatcatgrtgcctgctcatttgtctcaagcagcacattctcccccatcctcctccaaaaagccacaggaagaaatgcttcaccttgcttgctttctcaccacttggtt

SEQ ID NO: 14847 - DNA, 201 bp, Homo sapiens
gggagagagctccttggggtcttgcgggcccagcacgcccctccaagtcttggtgccctgctgggctgcatacctgtggctccttggcaacattcccttgmccctacttggcccctgcaccctggagtctcaatcccaatagcctctgctgtcccctgaggctttagggtctcatgagggtgcttggtggctcaggggttg

SEQ ID NO: 14848 - DNA, 201 bp, Homo sapiens
ttggaactgtgtcgggaaagacaagttattttacaagagcttcttgataaagaaaaggtaatataccccattgcaatagcctttaagatttttaagttagytgttaagattgtcagacaggagaaaaccaagctttcgccacttacatggggaatgagatctccatttgctatgaaaactttcaacacaataatcagtgaa

SEQ ID NO: 14849 - DNA, 201 bp, Homo sapiens
accctagtcaggtgcctggacctgtgagtaaggacgacagtcgtggtgaactcacagggttgtgctaggggttagttgagatcatcacacacatggctgarcacagtacctgctgtgttggtgagcatagatggataatgacagtatggctttatcctctgcctagtgtagcagcagggcccctggtcatcatgatgcctg

SEQ ID NO: 14850 - DNA, 201 bp, Homo sapiens
ataggagttagaacacagaaacttcaaatggcatgcccacttagtaatgaaaacatctatttgtagacacaggcaggagaaatgacttgtaagatcattcwtgttttcctcctcaggggtgactgttaagaatcttcaggccttccaggtcctacagaatgttttccacaaagccagtgactctgtcctctgcatacaagt

SEQ ID NO: 14851 - DNA, 201 bp, Homo sapiens
ttaaacaatgaacctggatgaagatgctgccatgccccttcagagcttaaaattgaaggttcattcaaaaaacttggttccagggcagctgtaccttttcracaagcctaaacaaaagccttttctgtggttcccaagccacaggaatccctaggaacatgagtcctactctggacttctccttgcctcctactcagaagc

SEQ ID NO: 14852 - DNA, 201 bp, Homo sapiens
gcactagccttcttcataccccaggtggctggcttttctggacttctgatggacatgtgcccataggagttagaacacagaaacttcaaatggcatgcccwcttagtaatgaaaacatctatttgtagacacaggcaggagaaatgacttgtaagatcattcatgttttcctcctcaggggtgactgttaagaatcttcag

SEQ ID NO: 14853 - DNA, 201 bp, Homo sapiens
ctgggcaggttttctgcaggggtccagcggcctaacattctctacccagatgcccagctcagcccccatgcccaagggccaggctcgccatctgctgagtyggggctccagccgagtgcccccgccagcagcccaggtgcacactctgacccagggctcctgctccccatggtcagcagttcctgcccaggggagggtctg

SEQ ID NO: 14854 - DNA, 201 bp, Homo sapiens
atggtttaggggagtgcctgaatcagacaggagtttcacaaacatctctgttatctgaggcagagaaggctggaggcagggagctttctgacaaagtgtcycctgggggagagagaatgaggcttaaccttcaagctggaggaaaaggtaggggtgggtcaggaaagtgtaattatttatcagcttgtctagaaacaaaac

SEQ ID NO: 14855 - DNA, 201 bp, Homo sapiens
gacttctcagtactttgagacattgattgattgatgaactcaatcagcaggcatggatactttctgtgtggcaggcactctgccccatgctgggtgccagygtgaacaggccagttgtctgctccctaaaattcctctgtagagactgtcacatgtccttgaaccctagtctgctggagaatcggctaagaaatgcatcag

SEQ ID NO: 14856 - DNA, 201 bp, Homo sapiens
gcaggttctgaggatggtgcctgggcacagaccttcccggccagcgtgctgcagttcctcagcctcgtccaccgcacctacccccaggacccagcgtggcragccccggagttcctccagaccttggccatagccgccttccccctgggagcccaaaaggtaggacatgctgctgtcccacccagagagagcagttgtgag

SEQ ID NO: 14857 - DNA, 201 bp, Homo sapiens
catagaacatggccagagagacctcttatttgcaaaagtgattcattgtgcagacaggcatggggaccacttccttagagaatcagtagttttacaaagtktacttgtaggcacctgtcacctgcatgcctgctggcctgattttccccggtcagaacccaaacagaagccctgtctgttggagggcttctggcactgctg

SEQ ID NO: 14858 - DNA, 201 bp, Homo sapiens
gctgagagaagtaaaaatataagaccaaacatgtatgtcataacagcaaacataaaaaggttaaatttctatattaaagatgtgaattttagacttggtgraaaacaagactcagacttctaagatctaacatgtatgtatatacaacaataacaaagttactcagtgagtttggtacaatcaagatctgtgtcaggaaag

SEQ ID NO: 14859 - DNA, 201 bp, Homo sapiens
aatttagtttttgttgaaaaatatttttcaggttttgacatcagtattatgctaatattatataaaaaagacttctctcctttctttgtattcagcaagaygttaaatccatgatttttatattattttaattgttcctatgaaattgcctggacctaaatttgtcccattattattggcttgtttaggcttttaaatgtc

SEQ ID NO: 14860 - DNA, 201 bp, Homo sapiens
cagccttacacgaaagtctgcactcagaagacttcttggaactgtgtcgggaaagacaagttattttacaagagcttcttgataaagaaaaggtaatatamcccattgcaatagcctttaagatttttaagttagttgttaagattgtcagacaggagaaaaccaagctttcgccacttacatggggaatgagatctccat

SEQ ID NO: 14861 - DNA, 201 bp, Homo sapiens
gtggcatacctggggccttggttgaagctgtcagtgggatcctggggtctcctctacatagccctctccatctggcctctgcctgtgtccctccaggcagrctctttagcagggcacacagtggctccgggcccccacaggcacaaaagcagaagctgccaggcctgccaaggacttaggcccaggaaaagccagctttgg

SEQ ID NO: 14862 - DNA, 201 bp, Homo sapiens
gattaggagctaattgaagatgggaccaaaatctgaatagacggaaatatgactccatttccccaggttgcctcatcagtcctatttctacagtatggcgkggtgtatgccctgtattggtgtgaaattgctggcaactgagggaatgaacaaatgggtaatgggccaagagtgaacttatttagtcaaccttccttctca

SEQ ID NO: 14863 - DNA, 201 bp, Homo sapiens
acattgcacaagcttatgagccacatgcagtcattggaacttctgtaccctgccatccaccaggtggcatccaaaacttctttatggggcagggctgaccwaccaggtgtaagctgtgtgtccaaagccagggctacccttcaggctggatcttctgtggcagtcagggtgtggttggggagtgggatctgggaggagcct

SEQ ID NO: 14864 - DNA, 201 bp, Homo sapiens
gagagcccctaagccacatatagccatttaaattcaaattttaactaattaaaattaaatgcaattaaaaacttaattcctcactcactgtagccacgttytaagtgctcactagctacctgaggctagcggctactctattggacaaggtagatataaaacagttttatcatcacaaaagagtctcctggatagcatttt

SEQ ID NO: 14865 - DNA, 201 bp, Homo sapiens
ccagttgttttctaagaaacagatatttatcctgggagctgttttctttgggggagtagaatttactggaaattggatttgtgagtatctgagggagggggtatggataggtggattctgtctttttctcctttgactttcagtggcgtgtctctccactttgtggtttggggcgggcaggaagatcacacaaccagacaa

SEQ ID NO: 14866 - DNA, 201 bp, Homo sapiens
tttttcagctgatcctctcagtggctggcactgtggagctgggcttcaggtcatctgctatcaccaacactggtgtcttccagcacatcctctgcaatttygaggtaaatcagagattggcccttagtccttcaggagtgtgtgtgatggtaaatatgctaagtctgggctttcccctaaacctagcatgtcagcttccct

SEQ ID NO: 14867 - DNA, 201 bp, Homo sapiens
gctgagggttgtcagggtctgaggaggtagtgtggccgggtggggtggaggaagtggagaggagcagagaaatggcaatgcaagcccagggacaggtgagmccttggtcacatggccacagctacctgcaagggaggcagggaaatgggacctacagctgtggtccatgaagcccagcttctctctgtatcagactagaag

SEQ ID NO: 14868 - DNA, 201 bp, Homo sapiens
gtatccagggtgactctgtttctgctccccagaggcgaaaatgtggcaacatcaaggcagccaacgcctgggccaggatccaggagcagctttttggggasctgggcttgtggagccagggggaagaaaccaagccctgttccccatgggaactcgactggagagaaggaccagctcgaatgaggaaacgcatcaaacgct

SEQ ID NO: 14869 - DNA, 201 bp, Homo sapiens
cagctgtgtcttgttcaatttgttccctctgctagggcagtgtgatggcagcaatcacaactgctttgtcctgggccctgcggctctgcactgtccaagaygagagcccctaagccacatatagccatttaaattcaaattttaactaattaaaattaaatgcaattaaaaacttaattcctcactcactgtagccacgtt

SEQ ID NO: 14870 - DNA, 201 bp, Homo sapiens
gttgaaaaaaacagcgcattttattcaaaacaaggcaatattggtattgacagagctgcagtgataatgaggacgatcaattttctctcctccattacggrgtattgagcaattttggagtaaacttgtggcatcattagacaagatcagcatttctcccttttgaaaactttcagtttttcttttttgcatatttagatt

SEQ ID NO: 14871 - DNA, 201 bp, Homo sapiens
gtaactgcttagcttcaagcaaggttgagtattgaccctatgggtcactatctgtaggtgatacccatgggtacccagtgtggggcaagggaatgggcttygtagtcaggtggattgactttgaaaacagtctctgccaattaaaaaaaaagtctggtgccagaaaagttacttagtctccctgagtcccattctttctag

SEQ ID NO: 14872 - DNA, 201 bp, Homo sapiens
aagaggtcacaccgctctgggaggagacgatgctcaaggcctggcagcattacttaggtctctatccactcggctccagggaatgggaactcctgggtctyacagagccagactcccgcaaggttcaactcagtgcctagagccttttccacctggaccctctgtctcatcccttaagtggatgggatttatatcactgaa

SEQ ID NO: 14873 - DNA, 201 bp, Homo sapiens
tctggcagcagctggtggcacaaaggcagcagaccctggaggatgccttcaagatcgatctctctgtgaaacctggagagagggaagtgaagattgaagasgtcacaccgctctgggaggagacgatgctcaaggcctggcagcattacttaggtctctatccactcggctccagggaatgggaactcctgggtctcacag

SEQ ID NO: 14874 - DNA, 201 bp, Homo sapiens
ggacggccctcacggaacccctgagaggcccacattgtgcagagggaggggctaagtaaggaaggggaaggcacccacagccaagccgtggtttccaagcmgtggcctgtgaggctgtcattttatgatgagagtcagaaatgaaataaaattatagattcctgctttgaaatgtgggactggtgttccaggcctccagaa

SEQ ID NO: 14875 - DNA, 201 bp, Homo sapiens
gtttctcctaaaacagacaaacgtctgttaagattggccaagaaaagaagacagaagccacaaataaataatattaggaaggaaaaggggagaataccacmgaagaatgagcaattagaaaggaaagagacaattggattagtaattttgtgccagtaaattagaaaacttagttcatttgaacaatctcatcgaaaatgt

SEQ ID NO: 14876 - DNA, 201 bp, Homo sapiens
gaaggaaacatataaatgagaacataaattaataaaataggaaaaaaaaacatacagaggatcaacaaggccaattactgtttctcctaaaacagacaaaygtctgttaagattggccaagaaaagaagacagaagccacaaataaataatattaggaaggaaaaggggagaataccacagaagaatgagcaattagaaag

SEQ ID NO: 14877 - DNA, 201 bp, Homo sapiens
gagcaatattctcccagcatgtaagtcccagtttgggaaaaaattagggccttttggaagctgccttaactctttggggtccccatggtaccatttagtaratgattggctctgtgcatcaaacagcaccccggtggcctgaaagagttaacgcagcttccagaagtgcccatcgaggtcccaggaaggagtctgggcctt

SEQ ID NO: 14878 - DNA, 201 bp, Homo sapiens
cccaactctcaccctaaattgaaataatgcagttaccacataaaataatccaagttttgggagatgagatattcaaggcaagagggtggatgttacttttytgttttgagaagagaagcaggggctgggcttaggtggatgaaggaagagagagttggagcctcagaaaaaaggccttgggaagggagtcaaggacttcgg

SEQ ID NO: 14879 - DNA, 201 bp, Homo sapiens
tagggagttgggcagtaagcatgtagggactgcagacatggaggaggatggggcagaacccacctggatcctccagggggctttcctgctgtcagcctctrcatgaagccacattcctggagagccatggcagggagagaaagtgcaaaggtgcacagggtgggaagcagggagcagacgtggaagacaagagagcagagg

SEQ ID NO: 14880 - DNA, 201 bp, Homo sapiens; identical to SEQ ID NO: 2212

SEQ ID NO: 14881 - DNA, 201 bp, Homo sapiens
aattgacaatgatattgtttttatttcagcatccatgtgttcattgctaatattttgaaatacagttattatgtgtgtgttgatcttatatcctgtgaccrcattttttttgtaaataccttgagtatttaccttattgaattttgttttgttttgctttgttgtaaataccttaggaattcaacagaatcagggtatcta

SEQ ID NO: 14882 - DNA, 201 bp, Homo sapiens
gtaaactctcatttagaaaaatacagtcatccctcagtttcctcaggggattggctccaggacccttcctggataccaaactgcatggatactcaagtccyttaaataaaatggtgtagtatttgcaaataatagatgcataccctcctgcatgcttaactaagctctagatgatttataatacctaatacaatgtgaatg

SEQ ID NO: 14883 - DNA, 201 bp, Homo sapiens
gaggtcattagggacacatgctgaatcaaatttctgggttagtttaagcacatgaaagacgttcaacatcattggtcaccagggagaaataaattaaaacyaccatgagatgagatgctatgacatacccaccggagtggcttaaatttaaaagaccagtgaaaccaatagttgatgaaaatgtggagcaactggaatgca

SEQ ID NO: 14884 - DNA, 201 bp, Homo sapiens
cagaaaggtgagtcaggccaggacccctggtatcctgctggggacctgaacatcccctcaagttccaccgaggctttctgtccaagtggagggccagtgascagcactgtgaggcttatgtctggaaaacccagagaagggatggggtctataccttaggttggcaaggaaaggcttgagctctgggctgtttcaagagct

SEQ ID NO: 14885 - DNA, 201 bp, Homo sapiens
aaaaggacacaggggctgggttcatttggcacctctttctatgtgcctgcttcatcgcatgagatatgtctctctctctctctctctctctctctctctcwcacacacacacacacacacacacacacaattgctttcacaccaacagctatcatccagggttcatagacaagggcatgggcggttaaagagattaagaaa

SEQ ID NO: 14886 - DNA, 201 bp, Homo sapiens
ggaatgactcagccaggagcagccgccagcagcatgggccacgcagcaaacgggcgcgccgtgggagctggagaggccaggtcttctggaaccaggccagygcaccctgcccgggcgtcaccccaccacggacattcacaatgacagtcagcacttctcagcacactgtggatcacacgcattagcctggcacctggcagc

SEQ ID NO: 14887 - DNA, 201 bp, Homo sapiens
ttgtgtgactctagctcccaaactttgtccatctacacgccatctttagacgttttgccacattcacgtgccgtctgtgatcttattgcctgaatgttttwctttaggtctgttcacttcctaaacgtcaatgaatatatgtttttaatgccgttcatgaacacagtgtagcacacatatctgccacgtgtgagtgcaggt

SEQ ID NO: 14888 - DNA, 201 bp, Homo sapiens
tcagacatttccctgaccagatgtcggtgatggagtacaaatcttgcacattggagtcagagctggggaatgtgcgtgtgtgcgtgtgtgtgtgtgtgtgygcgcacgcgcatgtgcatgtacctgtacactatggatgcctccgagtgggtacacacaccccatctgtgaagatacacatgtatacagccacataggggg

SEQ ID NO: 14889 - DNA, 201 bp, Homo sapiens
tgtagggacaaaacctctgcctggcatggcacctgggcaggtgtggtgccggaacacaccctaactctgctcactgagggccctgccaccctcagaagctrggaatgagcgaagtgaggtgcagagggtggcccacagctcagtgtcattcaggagtatcattttattcccatggtgcatttgacaggtacacagggcagg

SEQ ID NO: 14890 - DNA, 201 bp, Homo sapiens
caacatgggagaatttggagaggcagcaggattttgagatgtgtctgcattagctcggggtcccaggttaacctgcaggccctccgtagttgtctgccatrttagggctacacctagcctcctagtgccaggtgaagaagaggataggcagagaccccagactccttccagggctgagagggtgcagcctttagccagatg

SEQ ID NO: 14891 - DNA, 201 bp, Homo sapiens
tgtactatgggtcaggtcagtggatatgcagtgagcaaggctatacctttgtgtttctcgtgaagctaccatgtcaagagagagcaaataaaaaaaaaaaagagggagagagagagaaaaaaaaaaccaaggagcatttcagttggtgtaaatgctctgcaaataataatagctgatgatgtgacagagaatgccaaagtc

SEQ ID NO: 14892 - DNA, 201 bp, Homo sapiens
ggaaatggggctaagtcagaagctctcaacacaggtgtggttagaaacctggtgaccttctgtttctcctcatcctttgaaattgctcccttgggttccayacctggtgaaaggtctacaatatttgttgtggttcactgtggcctgggctctaggcttgtaagtgtcaggcagatgaggccccagcccttggcacagctt

SEQ ID NO: 14893 - DNA, 201 bp, Homo sapiens
ttagcaacaccattccttgttatcagactcagcagggggcccgggctgggggccagggagccaccctcgctggtgcttaggaagtacctggtgactgtgcraaactctctttctgggctgcggcagatactttggggttattgtcagaagcgagacagaaatgctttgagcagagacacatctcttctcttgcttgctgcc

SEQ ID NO: 14894 - DNA, 201 bp, Homo sapiens
atgagagaaggtaagagctgcccacttgtttccttgtctgctggtggtccatgcagaaaggagagatttagaggaaagcttgattgaggactgagttctgkataaatgatatcatccttttgtttatctggtcttccatattttgtgaaatgtttgataacatggtaagtaatccccaaacttgtccatgtgacagcagtt

SEQ ID NO: 14895 - DNA, 201 bp, Homo sapiens
gactaggccactccaagcttgcagacaggatcgtcttccccgccgatgacatttgctcttttggggcaggtttggaagactgaggatgtgaagatgtctgytcctggacggccagcaggagaggagcccctggctcagcctccaagcccaagaggtacctgacctgctagggatgtggccgtcctggccttgccctgccct

SEQ ID NO: 14896 - DNA, 201 bp, Homo sapiens
agttaaccttttctgcaattattaacaatatcagtcctccctccttccctttctctctttcttcttttcctcattaaatatttattgagcacctgttatgkgttagctaatattttaggtgctaagaattgtttatgcctataagctaaagacctccaggaacatacatatagtataaggtgctaagaattgttttaggtt

SEQ ID NO: 14897 - DNA, 201 bp, Homo sapiens
atatatgtgtgtgtgtgtgtatatatatatatgtttttttgagataggatttcgctcttgtcgcccaggctggagtgcaatggtgcgatctcagctctccrcaaccactgcctccaggattcaagcgattctcctttctcaacctcctgactaggtgggattacaagcgcccaccaccatgcccactaatttttgtatttt

SEQ ID NO: 14898 - DNA, 201 bp, Homo sapiens
catgtcagagccttggaggcccaagatgcaggtggtacccctgtgtcaggcctagtacctggggaatgttggccagggaaccagcttagagaaaagaaacycgtggacatcttgaatgtaagatcacataagacctcaaggaaacaggcaggcccagtggagaagcaagggtgcgggatcaggcttggggctgacagctgc

SEQ ID NO: 14899 - DNA, 201 bp, Homo sapiens
attttgtcaccaagaactggctcctgaacacatggcatgtccccagttcccaaggcactcagactggcccacatacccccgtgactctatcctgggctccygtccctgctgtctccacagcagcgctcatcccccttatctcctacaggtcctgatgacattcgagaacctggctgcctggggccgctgtctgtgcgccgt

SEQ ID NO: 14900 - DNA, 201 bp, Homo sapiens
ggtcatctgctatcaccaacactggtgtcttccagcacatcctctgcaatttcgaggtaaatcagagattggcccttagtccttcaggagtgtgtgtgatrgtaaatatgctaagtctgggctttcccctaaacctagcatgtcagcttccctcatagtcatgatggtagggagagggaaaaccaaacgagcctgcccaga

SEQ ID NO: 14901 - DNA, 201 bp, Homo sapiens
tcagaaaaaaggccttgggaagggagtcaaggacttcgggtggatttccatggggaagagtgaaagtgatggaatagttcagagcaaattaactttggcayttctgctttcagtttctgatccttgttgggctacacatgtccatctgccagttcaggctggctgtgcagatgccacattctggggaaggggaccctgtct

SEQ ID NO: 14902 - DNA, 201 bp, Homo sapiens
agagagagttggagcctcagaaaaaaggccttgggaagggagtcaaggacttcgggtggatttccatggggaagagtgaaagtgatggaatagttcagagmaaattaactttggcacttctgctttcagtttctgatccttgttgggctacacatgtccatctgccagttcaggctggctgtgcagatgccacattctggg

SEQ ID NO: 14903 - DNA, 201 bp, Homo sapiens
tgaaggaaagtgtgggctttgtgagcagacacaaagctccagtgagtaactccaatggggcaagccagagacagaggtggcagcagtagaatgtgctatgstggaaaagggatctgtgctggaatgaaagaaaagtttctagaaggagcaggttagcaacaccattccttgttatcagactcagcagggggcccgggctgg

SEQ ID NO: 14904 - DNA, 201 bp, Homo sapiens
atattcaaggcaagagggtggatgttacttttctgttttgagaagagaagcaggggctgggcttaggtggatgaaggaagagagagttggagcctcagaaraaaggccttgggaagggagtcaaggacttcgggtggatttccatggggaagagtgaaagtgatggaatagttcagagcaaattaactttggcacttctgc

SEQ ID NO: 14905 - DNA, 201 bp, Homo sapiens
taaacatggttttgtctgctgctcaatgcagcaactgaggaaaaagcaaagaaattcctggtctctggagaaagaccatatccagatggagaaagatgaasccccacccagacatataagacagatgatccctttgggttccagatcatggaagcagagacagagtttccttcatgacacagcagtacgtggcgctgcact

SEQ ID NO: 14906 - DNA, 201 bp, Homo sapiens
ttaccacataaaataatccaagttttgggagatgagatattcaaggcaagagggtggatgttacttttctgttttgagaagagaagcaggggctgggcttaggtggatgaaggaagagagagttggagcctcagaaaaaaggccttgggaagggagtcaaggacttcgggtggatttccatggggaagagtgaaagtgatg

SEQ ID NO: 14907 - DNA, 201 bp, Homo sapiens
gggcaatgtgtattttacatcccccagttcctagcctgatttgagttacccaaatctctgctgcttctcatcccatgcaggctgcatgcaggacgggactrtgctaggagacgtgcagctccctccctgggctgatggggaccctcggaaattcatcagcctgcacagaaaggtgagtcaggccaggacccctggtatcct

SEQ ID NO: 14908 - DNA, 201 bp, Homo sapiens
ccccagcccctcatcctcaaccacccacttaggtcatcatcttcttgcccctgttgctaggacagggagacttttcaaggctggtcatggattccttcagmtccttccttgggtgacctcatcccatagttatcctttctttctttcttttcttttttttttgttttttttgtttttttttgagacagagtcttactgtgt

SEQ ID NO: 14909 - DNA, 201 bp, Homo sapiens
ttgcaaagcaagcactagcactgcctgggaagcaaggagggcctcctggaggaggcaaaggcctagaagccatgctgaggggtcattccaggcagagaagrttgaaagcagcatggtctgcagagaacataactcacgttcagacctacacaaaatcagcaatcctgggcaatgtgtattttacatcccccagttcctagc

SEQ ID NO: 14910 - DNA, 201 bp, Homo sapiens
gaatacacagtttccaattgcttcaaaatgctgtggccaacttacactgcaaccattaatagacaaatgcatcatttgcacaacaatcttgccagcatttyattttactattctttttaaatgtaatacataataagtgatgttaaccttaacttgcctctccttggtgacttgtaaggctggacatttcatattttctgg

SEQ ID NO: 14911 - DNA, 201 bp, Homo sapiens
cctccatcccgtctcctgcgttggaagtaatatgcgttaggaaaatcaatccatttgtaggaggagaaaccacactggtttcctgctactgctatcttcaytaaaaccccattttactggaactaacgttgaaaaaaacagcgcattttattcaaaacaaggcaatattggtattgacagagctgcagtgataatgaggac

SEQ ID NO: 14912 - DNA, 201 bp, Homo sapiens
gcaagagggcattggttgagcaaaatggcaataaactggttgcagagtcacatccctgcaagaaaagggctgtgggggtcatgagatgcacttagggacaygggtggggtaaattcattcaaggtgcaactgtgattggccaaacctctgcatgaggaagctgaaggctaaataaccttttacctgatgataagttaacat

SEQ ID NO: 14913 - DNA, 201 bp, Homo sapiens
agaactccagcagctccgtggtcggctggagagtgggcagagtcaggcatctgccggctctccacttctgctttctccaggaaatgagcagagacccagcwccagtgattcagagtgaaacggcgctgaggactgacgatgtggggccgggtcctcttcccccgagcctgaggggctgcagctggggatagggggcccatg

SEQ ID NO: 14914 - DNA, 201 bp, Homo sapiens
ctggtgaccctgtgctcttaccactgagtcctaattgcacctccatcccgtctcctgcgttggaagtaatatgcgttaggaaaatcaatccatttgtaggrggagaaaccacactggtttcctgctactgctatcttcattaaaaccccattttactggaactaacgttgaaaaaaacagcgcattttattcaaaacaagg

SEQ ID NO: 14915 - DNA, 201 bp, Homo sapiens
aagtcactttgtggagtggaagcctgtcctcagccatgaagctgatgcccgggcggcaggccaaggaccctgagtgcaagacagaggtgagcccagacccyttttcctcagaaaagtatcaggcatttgcttcaaaccccatgagtcatatctcttctttgctgcctgttactagacatgatctaactccacgtccttgtg

SEQ ID NO: 14916 - DNA, 201 bp, Homo sapiens
caggaaataagaacaagacttttgatagaaacatgcttatggtggtgccatttaaaatagtaaaaaaaaattagaaacaacctaaatatctaacaatagaygagtgattaaataattaatatgtaatcatagaatgaaataaataataaacagaaactaaaacaaaaaaaaattatttcccaaaaatgtcaaaaggcaaaa

SEQ ID NO: 14917 - DNA, 201 bp, Homo sapiens
cttctaagaatctcccttcaggaaataagaacaagacttttgatagaaacatgcttatggtggtgccatttaaaatagtaaaaaaaaattagaaacaaccyaaatatctaacaatagacgagtgattaaataattaatatgtaatcatagaatgaaataaataataaacagaaactaaaacaaaaaaaaattatttcccaa

SEQ ID NO: 14918 - DNA, 201 bp, Homo sapiens
acaaatcatatgctgaggttgctaacatctacagcaagaatgaatcttctatctgtgaagttgagaacagtaaattgttgaaattgttctattttatgatraattgttgttcatctcttacggtgcctaactcgtaaattaaactttatcataggcatgttttcctataggaaaaacatagtgtactatagtggtttcagg

SEQ ID NO: 14919 - DNA, 201 bp, Homo sapiens
gacgtccacaaaaaagctagagcggacaaaaaaccaaataccacatgttctcactcataggtgggaattgaacaatgagaacacatggacacaggaagggragcatcacacaccggggcctgttgtggggtggggggaagggggagggatagcattaggagatatacctaatgttaaatgacgaattaatgggtgcagcac

SEQ ID NO: 14920 - DNA, 201 bp, Homo sapiens
ttgaagtggtgaaaggttaattttaagcagacagtaaagtatgtgtattttaatcctcagagcaatcactaaggcaatatataaaaagatatagtaaatartaaaaaactaaatatataaatgagaataaaacagtttaaaaattcaaataatacaaagaaggcaggaaaagggaacagaaagagcaaacagacaacaact

SEQ ID NO: 14921 - DNA, 201 bp, Homo sapiens
gagaagagatgctcctgggagccacagagttcagagagattgcaacagggaagaaattcaggaaaagtgattctgaaagttgtatagcaactctgaactckcctgagctgcctctgtttaaaggcagaggtgatttcttcattgtgtgatcaaagagtatacttacacaaacctaaatggaataacctactacagacccct

SEQ ID NO: 14922 - DNA, 201 bp, Homo sapiens
gaataaggtgggtactaagaccaacttctcacatccctcttcccctcatggacccagaggaactagtgaggccttggctacagtccaacagtagccatgcrgaaaagcctgttgctcagcccagggatatcagggtgtgccattgctgggcccagcagcaccataactccccatcatgagcacacagggggatggggggtg

SEQ ID NO: 14923 - DNA, 201 bp, Homo sapiens
aagcctggatcttagagaataaggtgggtactaagaccaacttctcacatccctcttcccctcatggacccagaggaactagtgaggccttggctacagtscaacagtagccatgcagaaaagcctgttgctcagcccagggatatcagggtgtgccattgctgggcccagcagcaccataactccccatcatgagcacac

SEQ ID NO: 14924 - DNA, 201 bp, Homo sapiens
gctgtgccaagaatagactggagtgggtcaaaggcagaagctggagactagttaggaagctattgctggaggctgttgcagtaatccaggtgagagatgawggtggcttggatcaggaacatgaaagcaaagataatatgatgtgatcagattatggacatgtttaaaggtacatttgatgggatctgatgacaaatcaag

SEQ ID NO: 14925 - DNA, 201 bp, Homo sapiens
tgctggcatgtggcctccatctttagccattgacctctccccacactgacctgggcagcttgtgtcctgccagaggctgcctcccacagacttgccccccsccaggtgaggagggcactggaagaaccctgagacaggcgtgggtgtagtggggatggggtatggtgggcgcagtctccttgttccacaactcaccccagg

SEQ ID NO: 14926 - DNA, 201 bp, Homo sapiens
gacggcagtgtgagcttgtagcctgggttgtttctctttttggaggcaaccacagggggctcatgcccctggctggccctttgaaagccaagctagctatraaaatagtgtgtgctctcacttcacctctgacattctttgcttcccttccctcagcatctgagaagaagtcactggcaagtcgttcaaatgttgcacacc

SEQ ID NO: 14927 - DNA, 201 bp, Homo sapiens
tcagggtcaggttccaagtcacctccagtcttcccaggagtccttggccatggaattgggtgagatcagattgggaaagatggtctttctcggtgtcgtcrtggccatgttcttgattctattcaggttgtcccgggcgttttggcattttctcaggcaagccgcacacagatccttctcctccacaacatacaagttctc

SEQ ID NO: 14928 - DNA, 201 bp, Homo sapiens
gctccatttcccccagggcggaagcttcgacgtggcagacagaatgttccacagtgtgaagagcacgtgggagtcggcctccagagagaacatgagtgacrtcagggagctgaccccagagttcttctacctgcctgagttcttaaccaactgcaacggggtagagttcggtaagtggaggcctggtgaggccgggtgagt

SEQ ID NO: 14929 - DNA, 201 bp, Homo sapiens
ggctcttctctttgcttgaaatgcttttcccatggatgtctgcatcccgtctttcagttttgcccttcttaaagaggccaaacctgccattcaaattaaarttgtaaattactctccttctgcatacaagcacttatcaatcaaaaatcaaatttttgtcaattctcctttcttggctctttttttctcaatagcacttat

SEQ ID NO: 14930 - DNA, 201 bp, Homo sapiens
ggtcctagtaacctcattttatagatgataagtaaagtttcagaaagattgagtgatctctcctgtaatgtgactactaagaaccaaaaactaaggtgtckggatttctgcgctttctgcttcccacactgttattctgtagtgctcagaacatgaaggtcttttcctattatcacactgaagttgggctgactgaacctc

SEQ ID NO: 14931 - DNA, 201 bp, Homo sapiens
ctgggctgatgggtacacgtgtgtgaggagagtaaatgagaggagctaatggtggaacccgtgcctctgaggcagaatggacggtgcctggccagcaggarggtgccagtgagagcggctggtcatgttggctccatttcccccagggcggaagcttcgacgtggcagacagaatgttccacagtgtgaagagcacgtggg

SEQ ID NO: 14932 - DNA, 201 bp, Homo sapiens
taaccaattctggactgcagctattgtagaaaaggtatttctttgaagtatgaagatgtttataaccaaactcatagagcattttctttaagtgctaattktaatttttaggagacagtctaagtcatttttttttttttttgacaaggtctggctctattgcccaggctggagtacagtggtgcgatctcagctcactgc

SEQ ID NO: 14933 - DNA, 201 bp, Homo sapiens
caacggggtagagttcggtaagtggaggcctggtgaggccgggtgagtggcgttgcagggtgctctttcccacagcccctgggtgatgaccaacatcatcyggacctttgctaggccctccccaggacctcaacttcgggtgaggtctccactgggcagcagtgcccagaaggaaaggtggttgctgaggaagggcgctgg

SEQ ID NO: 14934 - DNA, 201 bp, Homo sapiens
accaagaatttacaactgtgtgaaaacacagcagacctgtaagtcagctggaaagaagttttggggtaccttgggggtcttcagagcatgacagattgagrgtacttgggtgtaccaactgggtagctgagcaagtggctgatgggcaggcagtgactccagcttagagtgatgccagctctcactgcacagggcaccatt

SEQ ID NO: 14935 - DNA, 201 bp, Homo sapiens
tgcttcaccttgcttgctttctcaccacttggtttatgtcgctgaccagattactcaagatctgttcattttgattaaatgtgtgtgtgttgggcacctcrtcagtacaagactccatctttggaaccatggggtacacagaggtgaataagatgcagttggtcactacagggggcttggagattgtcatggacagaagtc

SEQ ID NO: 14936 - DNA, 201 bp, Homo sapiens
acaagaactccctggctcctgccttggggcccagtggaggggtgcttgctactttccatgacacccttgtcatgctgtgccacttacagacagaaagcccktttgcctctaagcaaaaatcggctctcctgtagcctcagtagaaatgcaacctcttcccataagggaaaccaagataccacaatttaaccttccgtgctc

SEQ ID NO: 14937 - DNA, 201 bp, Homo sapiens
tctgatcaaattattcttgaaatttaataagctaaatgggatgattgtgtgaccaaaccaagccatctggaaatgtgtcaaaatctttcttaccttagcamgtgagatataaaggatcctgcaaagttcccctgtcattttccttctctgggagtttggagggtgaggaatcagatgggggctgctcagagtctggagaca

SEQ ID NO: 14938 - DNA, 201 bp, Homo sapiens
atcaacccacagacttacaatacaagtaacaaagcaactccactttttcttctagggaatttggtgttttcttttgtattgcagaagtgagaagacccatkaattttgaaacaaatgtatgcaaatacatttattaatatagcaaataggaaaatcagttattgcttcctttataaataatacaggcctaagttttaaaga

SEQ ID NO: 14939 - DNA, 201 bp, Homo sapiens
tgtgctcatcaagcccaggggctcatcaattatctcctctgtgcagggccagcactctgaagcatgtgccccttccaatctgtgcagcgagtgcatgagtmcatgagtggcctgggttttaatgctctttgggtttttgttccaggccctggaaagtgactttgtcagtgccaacctccaccattggatagaccttatttt

SEQ ID NO: 14940 - DNA, 201 bp, Homo sapiens
gagctttttcagcttggggagcttggagatgctcacggggatgttgttcagtaggttgtcatggagccctacctcgtggagctccttcagggcccccagtrtggtgggcacgctgtccaggtggttcaagcctaggttcacagcgcggatgttcttgagttgcttcagctccacgggcagcccgttgctggtcagccggtt

SEQ ID NO: 14941 - DNA, 201 bp, Homo sapiens
gtggcaggggaattctgtgtgggttgtgaaggaggcccccaagcctgaggctgcatgtcccctggaattcttgaggcagcagcttgttctggcatcacagyggagggacactgactgcaagaacctaaccttcagcaggccagggtggggcaggaagagctggatgacagtctccctgtgctgtccgctgagagttgctct

SEQ ID NO: 14942 - DNA, 201 bp, Homo sapiens
caaaacaaggggtcggggcagggataaagaaggccgagatgtggcaggggaattctgtgtgggttgtgaaggaggcccccaagcctgaggctgcatgtccyctggaattcttgaggcagcagcttgttctggcatcacagcggagggacactgactgcaagaacctaaccttcagcaggccagggtggggcaggaagagct

SEQ ID NO: 14943 - DNA, 201 bp, Homo sapiens
gtttgcattttatccacgagcaaaacaaggggtcggggcagggataaagaaggccgagatgtggcaggggaattctgtgtgggttgtgaaggaggcccccragcctgaggctgcatgtcccctggaattcttgaggcagcagcttgttctggcatcacagcggagggacactgactgcaagaacctaaccttcagcaggcc

SEQ ID NO: 14944 - DNA, 201 bp, Homo sapiens
aactattccacatgacaagtggaggtgatgcagcgatgttcagaggtgagtggggcaactcggtcccctccattcatgacatgaggctgctgacagtggaraggaaaccagcatgctggccaggaactgaccctagctgtgggatgctgcctccacctggcgtcagtccctccaggcatcatcaacaagaactccctggct

SEQ ID NO: 14945 - DNA, 201 bp, Homo sapiens
tctccagaccacgccaccagccaacagaagcgagacttccagtccgaggtcctgctttctgctatggaactattccacatgacaagtggaggtgatgcagygatgttcagaggtgagtggggcaactcggtcccctccattcatgacatgaggctgctgacagtggagaggaaaccagcatgctggccaggaactgaccct

SEQ ID NO: 14946 - DNA, 201 bp, Homo sapiens
ggcagcgtcagtcaccttcagcctcctggtgagcggctcccaggactgcacctgtatcctgtgggatctggaccacctcacccacgtgacccgcctgcccrcccatcgggaaggcatctcagccatcaccatcagtgacgtctcagtaagtctcctgtttctcagtgtccgtgtcctcaccttcgcagtagcatggggtac

SEQ ID NO: 14947 - DNA, 201 bp, Homo sapiens
tgccaatgtaaatgataacaagaagcctctctcacgtgagtggagggtgacatgatcagattttgcgtgaaaaacattacattggctgcttggtggagaawggacagggaatgagggttgagaggaagaggcaaggggcaagagttaggaggctctgcctgcggtccatgtgatgtgtggtgatagctggattagggtggt

SEQ ID NO: 14948 - DNA, 201 bp, Homo sapiens
atgcaacttttagccatcctaattttgtcttgctgtgggatttcatatatgtgtgtgtctgtatatatatatatatatatatatatatacatatatatatcacacatgaatagtctggaaagatattgagtcttttctgatcacaaacaaggcttccgaagggcacgttgcaagaacatgtctgggaggacagggagaaag

SEQ ID NO: 14949 - DNA, 201 bp, Homo sapiens
atccttcatcctactcctgaaattccttctgccagttaaacctctgtgaacagacttgaagtctcacatgccctgtggctttttcagacccaagtggcagraagccatcctctgcctttggtgactgggcaggtggcacagaggtgtggagtcaggcccagccttggaggtcaggccctcccatgggggtgtgtgagcaat

SEQ ID NO: 14950 - DNA, 201 bp, Homo sapiens
ctcacagtccgcagggtgtacacaaaacgtggtgctgacatctgcttttggtgaggcctcaggaagcttccagtcatggtggaaggtgaatgggagccagmgcatcacatagtgagagaggcagcaagagagagagggaggaggggccaggctctttcaaataaccagatctcagctgaactctcggagaactcattcatt

SEQ ID NO: 14951 - DNA, 201 bp, Homo sapiens
cagcaccaagacatttacaagggatctgcccccatcattcaaacagctccctctagcccacacttccaacacttaaggccacatgagatttggaacaaaayatccagactgtatcaggaggctttgttatttccattgcaaagatggcaaaaacagagcccagggtggctactcactggaattgctaggatttgacctcag

SEQ ID NO: 14952 - DNA, 201 bp, Homo sapiens
atggagcgagggggagcaataatgagcctagcttcctgcctgactccggaaatgcctctgcagcaggagaaagggtcttgactctgctgatggaattatcycttcccttttcatgtagcttctgctctttccaacccagcctgaaggggaaagccacctcggaggacaccctcaatctaaggtaatggcgggtagccatgc

SEQ ID NO: 14953 - DNA, 201 bp, Homo sapiens
ggaccacctcacccacgtgacccgcctgcccgcccatcgggaaggcatctcagccatcaccatcagtgacgtctcagtaagtctcctgtttctcagtgtcygtgtcctcaccttcgcagtagcatggggtacaacactcaggagaaagcccagagacacagagactctagccaccccagaatgctgagagggcccccaatt

SEQ ID NO: 14954 - DNA, 201 bp, Homo sapiens
tccgtgtcctcaccttcgcagtagcatggggtacaacactcaggagaaagcccagagacacagagactctagccaccccagaatgctgagagggcccccarttgtgtggaacagtcgctgtagatctcacttgtagcacccaggtctagcttcaatgtccgcttctttactttcctccctctggtgttggggacagtggga

SEQ ID NO: 14955 - DNA, 201 bp, Homo sapiens
attaaaaggggcttctcttcacaggacatcgccctggagatcttcttccacaatggatattccaagtttcttgtcttctacaacaatgatcggagtaaggyctttaaaaggtaagagcttgaaaatcctccttctgaggaaactgatcctgaactgagagcagaggggcagagaacactcagctctgtgctcaggaaaagt

SEQ ID NO: 14956 - DNA, 201 bp, Homo sapiens
tggctgtagagaggaacaaagtgctgctgcctcctctctggaacaggaccttcagctggggctttgatgacttcagctgctgcttggggagctacggctcygacaaggtgagggggctgcagggagcaggggcagcctcaggacctcagccttcctccagctggaggcagagatggcccagagataagtgagtccaaagca

SEQ ID NO: 14957 - DNA, 201 bp, Homo sapiens
ccaaaggggccattggccacattgtctctactgagaagaccattctggctgtagagaggaacaaagtgctgctgcctcctctctggaacaggaccttcagytggggctttgatgacttcagctgctgcttggggagctacggctccgacaaggtgagggggctgcagggagcaggggcagcctcaggacctcagccttcct

SEQ ID NO: 14958 - DNA, 201 bp, Homo sapiens
tgctttttggccaccaacacttctacatctgcgagaacttcacactgtctcccacgggtgatgtctactgtacccgtcactgcttatccaagtgagttatycacttctcccagcagattcttccctgagccccattcatccttaccagccgcccccactattccccttctcaccttgttcttacagtgggcttagatttgg

SEQ ID NO: 14959 - DNA, 201 bp, Homo sapiens
aatgttttcacatgcaacttttagccatcctaattttgtcttgctgtgggatttcatatatgtgtgtgtctgtatatatatatatatatatatatatatayatatatatatcacacatgaatagtctggaaagatattgagtcttttctgatcacaaacaaggcttccgaagggcacgttgcaagaacatgtctgggagga

SEQ ID NO: 14960 - DNA, 201 bp, Homo sapiens
gcaatgaaaccatgatctttaggataagaaaatatagcttattagaaggacagagttggattgccagaactgactgagtgtcagtttgacatttgacactrtttgatgtaaagtgaagccagtcagcctgaatgttttcacatgcaacttttagccatcctaattttgtcttgctgtgggatttcatatatgtgtgtgtct

SEQ ID NO: 14961 - DNA, 201 bp, Homo sapiens
tttggcattatatgtaaaaatccattgccaaatccaaggtcataaagatttaccactgtgttttctcctaaaaattttgttttggctcttattgtagatarttaattcattttgagttaatttttgcatatggcaaggggtcagggttcaacttcattcttttgcttatagctattcaactgctctggtaccattagttga

SEQ ID NO: 14962 - DNA, 201 bp, Homo sapiens
tctccttcccatacaaactatattgattatcctgcagccactttcagattcagcactagcttatattggaacttcactcatttgtcaacgggtgtgagtgactttgtttacttggataatagttttcaaatatgggaaaaatattatctcaatctttgcactattcacaatgcaagggctatagacatagcacaatttaag

SEQ ID NO: 14963 - DNA, 201 bp, Homo sapiens
aatatttatgtctttggggaaaatcagaaggagaagctgcgtggcaagagaggtggtaaatggcaggtttgagtgaagaaatagtattattttgtttttgyttttgtttttttaaactttcttgtccactctttataaaatgcaacctccatcctccctcatccttttctaggcacgttttctcgctttgtgtttctttgt

SEQ ID NO: 14964 - DNA, 201 bp, Homo sapiens
attgaagctgctgctgtactttctggcaagcccctccctccgcacacggtttagagatggcctgtgtgcaggatcctgggtggaacgcagcactgagggcrtggatattgtaatgggtgagcacgtggctgtctccagggagtggggcaccacctagtcctgggatgtgaatgaggaccaagccaggccccttcttatttg

SEQ ID NO: 14965 - DNA, 201 bp, Homo sapiens
cattgcaaagatggcaaaaacagagcccagggtggctactcactggaattgctaggatttgacctcagatctctcttattctcagttcatgtgttttcgtyccctctctactgcctcccagctcactgtgttggacaagttacataacctttccagcaccctgtccctcagcagccggctgttattgggcttggagttgtg

SEQ ID NO: 14966 - DNA, 201 bp, Homo sapiens
agcagccggctgttattgggcttggagttgtggctcctggccccatgtgctttctctataactgttccagttaaagctggtgcaaggaggccttcaggtcyctcaccaacatggcatctctgcctgggatgcaacatgccaagcaggtgcctacctgccctcctgcatgtgcctggagggcccctggtccactgtggcctt

SEQ ID NO: 14967 - DNA, 201 bp, Homo sapiens
tgattgttgacccgtgaacatgttcaggcaaatagaaagtttgtgcaaggggtgtgtgtgtgtgtgtgtgtgttactctctacattccccaggctggtacrattagcctatgttgaggcattttttagcaagtgttggttgtaagctgggacttcccgtaattcagatgtcattgtgagactttgtgggccttgtactttt

SEQ ID NO: 14968 - DNA, 201 bp, Homo sapiens
tactttttctaaatttctaagcgaaacatgcccacgataggggcatggcaggactgtgtgcatgctcctacaacagagtccccactcctcctcccctaccrtctcagaaatgcttgatcatatggcctttgctggacacatggcacaggagactttccagggcatgactgcttttcaggcatctgggtggcatgcctctgg

SEQ ID NO: 14969 - DNA, 201 bp, Homo sapiens
aacatacattcctttgattattagtatgacgaattctctgtctaaatacatttaagatagaaaaaagtagatactagagctcatagatgaccaaatatagmcttttgcctctttgatacttgactttttctcagcaatctgtgcttttctaaaaaataagaatacttattccatatgccaatactattagaatgtattcag

SEQ ID NO: 14970 - DNA, 201 bp, Homo sapiens
atgggcaagcactcagcaaggatttctcagatgagtagggctagcacactggttggcagtgaccaccgcacttctctgatgtgtcattggaaatgtgggtrgagctggtggagggcaggaagaagaagaagcctgcacgtgtcctcactctgatgtctgaacatgtgccctgcatgcctgtttccttttcagcatcagcga

SEQ ID NO: 14971 - DNA, 201 bp, Homo sapiens
gcttccgcccttccatcatggggtgaccctcactagatgccagtgccatgctctgggacttcctgtccaccagaaccaatagccaaataaacatttatctytataaattacccagtctggggtattctgttatagcagcagataatggactaagacaccttctaactttagctccagcattttgttgatttctggacaacc

SEQ ID NO: 14972 - DNA, 201 bp, Homo sapiens
atcttaaaaaagctctacttatgaggcaaaagttctactctttaaagtgatcaatagaatcatggcataagggatttcttaatcatgagtaaacttagggwtggagccctcctagggctaatttaaatggaagagcaggtaatagttcacttgggttcattttctagtttttaaaatgccatttcttttctagcagaatca

SEQ ID NO: 14973 - DNA, 201 bp, Homo sapiens
tgctcatcaagcccaggggctcatcaattatctcctctgtgcagggccagcactctgaagcatgtgccccttccaatctgtgcagcgagtgcatgagtccmtgagtggcctgggttttaatgctctttgggtttttgttccaggccctggaaagtgactttgtcagtgccaacctccaccattggatagaccttatttttg

SEQ ID NO: 14974 - DNA, 201 bp, Homo sapiens
catcatctcatcatgtgaacctgaggttggggtctctgagtctcatctgggaaaaggtacaataagagaaaaagtttaagcagcctgacataatcttcctratagtcctggtgggagtgtaaattagtgtcaccttgtgggagggtaatctggcaatggctacttgaattaaaaatgcccatacccttgacctgcaattct

SEQ ID NO: 14975 - DNA, 201 bp, Homo sapiens
tggcctgggttttaatgctctttgggtttttgttccaggccctggaaagtgactttgtcagtgccaacctccaccattggatagaccttatttttgggtayaagcagcaggggccagccgcagtggatgctgttaatatcttccacccctacttctacggtgacagaatggacctcagcagcatcactgaccccctcatca

SEQ ID NO: 14976 - DNA, 201 bp, Homo sapiens
ctcgccactgcactccagcctgggcaacagagcgagactccatctcaaaaaaaaaaaaaaatttatgcttcagatttacttgtgtattcaaaatgacttawctgcaaggatggtcattgtagcattgcctgttatgtcaaaacatttgaaagcaacctgaatcaaaaaaggactgactggtcaaataaactgtagcatatc

SEQ ID NO: 14977 - DNA, 201 bp, Homo sapiens
attcgtttatattccttcaccctaatggacagagggtacccccagaggatggggagtcaggaactaggtcctgttgatcatgaaagttgtggcttagcagyaacacaccgctttctgatgtaggagtccaggattcctatcttcttgcccctttgacatctgtagagattgggctcccagagcctgaacaaccctagtctg

SEQ ID NO: 14978 - DNA, 201 bp, Homo sapiens
atggacctcagcagcatcactgaccccctcatcaaaagcaccatcctggggtttgtcagcaactttggacaggtgcccaaacaggtacagcatgccttgtmatttgccttgctttctcaaaagagtgtgtgcagtgtgaggacattctctcctggggtgaaagtgaaggagatggctgaagaggtgaaatggtcccccatc

SEQ ID NO: 14979 - DNA, 201 bp, Homo sapiens
cctcctgagtagttgggattacaggtgtgattcacagcagcacccaatattgctgtgattaaaacaacaaacaaacaaataaaaacagtaaattttcaaarcaacaaggagatatgtttgtagatggggatgccattaaatttacttccaatttttgcataaagagctcttttgcttagcactgatgaaaatttgcaattc

SEQ ID NO: 14980 - DNA, 201 bp, Homo sapiens
ttagtttctgtttgtttattgttagcctacacaaataaaattgatttttgtgtattgatcatgtatcctgtgaccttgctgaattcacttattctaggatrttaaaaaaaattccttggaactttctacatggacatgatagaaacagttttatttcttcctttccactctgtatgtatgtaattattgttcatacataaa

SEQ ID NO: 14981 - DNA, 201 bp, Homo sapiens
acctcgtgatctgcccacctcagcctcccaaagtgctgggattacaggcatgagccaccacacccagttgcatcgtttactttttttttttttttttttttgagacggagtagtctcgctctgtcaccccaggctggagtgcagtggtgcgatctcggctcactataagctccgcctcctgggttcgcgccattctcctgc

SEQ ID NO: 14982 - DNA, 201 bp, Homo sapiens
ttccttgaacttggcgcaggggctgacacacagtaagcatggaataaacacttgatgaactgaattgaatgtgcagccacaggaggaacatgactggctgstagtgtggttgggtgaagtggtacaggcattaacatcctccctgcgggacctgctaagcctagggccatcaacagggaggtcaggagtggtgtgttgcta

SEQ ID NO: 14983 - DNA, 201 bp, Homo sapiens
agtcccaaattctgtgggacacatataggtgaatttgataccatctgctggtaaagttctgttatcaaaaaaaggcagtgatgaccaaatatatatatatrtgtgtgtgtgtgtgtatatatatatgtgtgtgtgtgtatatatatatatgtgtgtgtgtgtgtatatatatatatgtttttttgagataggatttcgctc

SEQ ID NO: 14984 - DNA, 201 bp, Homo sapiens
agcttctcattttgaggggcaaactcctcagggaggtctgggcagggcctaaggtatgacttttccaagaagctcccaggtgaggccaacgcagctcatcyttgcaccacacggaggagcaggacactagagtgggcagacaccaacacgtgtcgtcagatttagagcaagaaccatgaggaaggtaatagaatgcaaatg

SEQ ID NO: 14985 - DNA, 201 bp, Homo sapiens
aggttagttacatatgtatacatgtgccatgctggtgcgctgcacccactaactcgtcatctagcattaggtatatctcccaatgctatccctcccccttmcccccaccccaccacagtccccagagtgtgctattccccttcctgtgtccatgtgatctcattgttcaattcccacctatgagtgagaatatgcggtgtt

SEQ ID NO: 14986 - DNA, 201 bp, Homo sapiens
caatgtgtctgcccacgtgtatcacctttaatctgtgaatcccttgaaagcagggacagtgtcttattcatctttaaacgcctagagctttacccagaagwtgatgttgagagccacttcattcttgtttgagaaagaataggaagagaggaagcagggaggactccaagaaagctcttactgggtggtgtaacaggtggt

SEQ ID NO: 14987 - DNA, 201 bp, Homo sapiens
gatcaattttctctcctccattacggggtattgagcaattttggagtaaacttgtggcatcattagacaagatcagcatttctcccttttgaaaactttcwgtttttcttttttgcatatttagattttaagtattcctgctatgttggggggaaagaagcaaaaccaaaacaaaccagaacaaacccagaagtccccaaa

SEQ ID NO: 14988 - DNA, 201 bp, Homo sapiens
ctctcattctgtaggttctcctttcattttcttaataatgtcctttgatgcacaaaaattttcagttttgatgaagtccagtttatccattttttcttctrttacttgtgcttttggcattatatgtaaaaatccattgccaaatccaaggtcataaagatttaccactgtgttttctcctaaaaattttgttttggctct

SEQ ID NO: 14989 - DNA, 201 bp, Homo sapiens
gctcagcctcttttcccatcttttggaaatccttcaatcaccaaggtaggctgggtcttggcagcctgggggttagaactgaaggctgaatgtccagaacwgagacagggcagggtggccagtggctcttccctgctcccagaacactgggtccccaaatgggagcacatccttcccagtggctcatgcttgtggggcagt

SEQ ID NO: 14990 - DNA, 201 bp, Homo sapiens
tcgtcttccccgccgatgacatttgctcttttggggcaggtttggaagactgaggatgtgaagatgtctgttcctggacggccagcaggagaggagccccyggctcagcctccaagcccaagaggtacctgacctgctagggatgtggccgtcctggccttgccctgccctcctcacctcccctctctccacctcagccca

SEQ ID NO: 14991 - DNA, 201 bp, Homo sapiens
aaaaaaaatttatgcttcagatttacttgtgtattcaaaatgacttatctgcaaggatggtcattgtagcattgcctgttatgtcaaaacatttgaaagcmacctgaatcaaaaaaggactgactggtcaaataaactgtagcatatccattcaagggaatagtctgcaactattaataagaattagacagctctatgata

SEQ ID NO: 14992 - DNA, 201 bp, Homo sapiens
ccagaccactgaaatagcaacacaacggggcaccctcctttcagtcttgaccctttctaatgccatctccacccagcagtcagtgtcatcttttagaaacraactctcccatggctttctgttgcaaccacaataaaacccaagggccatgctaaggtacctaagaccacctatgatgttggtactcctaatttccaactt

SEQ ID NO: 14993 - DNA, 201 bp, Homo sapiens
agctcagccctgacttgccctggatcatagtggttaatacttatcttggaacaaaatgctcagtgaacctttgctttctgcccttggctctggctttcackgatcccatttggtgcaggagttggaaaactggtcttcagggcaccactgtggccttgtcattgctcccaaaggtgagcagggagctttgcttcagtccca

SEQ ID NO: 14994 - DNA, 201 bp, Homo sapiens
gatccttaccacatgcagaactctgggtcataccaagatattgtcatgggtcaggttctgcacggagaaagttgattgggaatgaggattgcagggctggrccagcggagaagtgcaaccacaatgtagtctcagcaaagacttcagctgattccagagcagctctaggtttgggatggttgtttagagttttcttgaatt

SEQ ID NO: 14995 - DNA, 201 bp, Homo sapiens
tcttctgcacatgtttccttggccttgcagagatggcagtacctgtcttgcacttgtggttctaggcacatttgaattctagtcctggctcaaccatgtaytggctggtccctggacaagctccctctcctctgtaactgagcgatgtcttgtacctggtgaactttcctcacagttaactgtgggatgctttgcatggtt

SEQ ID NO: 14996 - DNA, 201 bp, Homo sapiens
tagaccttgaaagagcctgtccgatgtaccataaaaacatccaaaatcagactcaagaacattacagactccttgacagtgactggaatttgcactttgcmctttggaaatttcctcagaaactaacagccttctgagaaggttagcttttgcttgtagtaagtccctttcttagctgattagggtggctgtattcatttg

SEQ ID NO: 14997 - DNA, 201 bp, Homo sapiens
gtaggtggcctgactccctcaggcatccaaggctggcctgggagttttcaccctggctaggctgaagtttatggtcagggacccgagtgagtcccagcccsgcctcttgcagcctgcaggtgcctttgacacttgtcctgtctctgagagtcttgtttttgttgactgtccaccaggtgacattttcctcagggatcttgc

SEQ ID NO: 14998 - DNA, 201 bp, Homo sapiens
tggtttgacacgagacatcactctacagtctcagtgagagcctcactcacctctgaagagacctcatcctgaaggttgccagggcccaggccaggctgggmagcctctcaggatgcaggcgctgtgcagatgagctctaggtgctgtcctcatgccttgccagcggcctctttgccttcctctgctccactccctcctctt

SEQ ID NO: 14999 - DNA, 201 bp, Homo sapiens
caggccacacctgactcagttaccttgtccagcccctcagccctgccagggaaagaggtcattcaatacaaaacgagaacacctgggcagagggactaagrtgtgtggcacggcaggtatcctggggctgagactgtcacgcctgggcagaggtagctggcacagcgccaggctgggcatgggggagccagggaagagagg

SEQ ID NO: 15000 - DNA, 201 bp, Homo sapiens
ctggcagaaaaggggatcctagggaccacgtaacaggagggtcaggatctcttcccaccctctctacaggatcacttagttccaaaggccagcaagagagyagtgcttggcctagatgaactagacatttttcatttgtaaatctattttctgtacgtaggtcattgattcatccagtgacccctcctgcaagagggctca

SEQ ID NO: 15001 - DNA, 201 bp, Homo sapiens
ggactttgagaactcacttccagccaggtagatgcaggacaggactctgctattgggtgcagtacccacctctgagtctgaatcttaccccaccccatccytccctccatgtacaggtctcttctctccctaactctcccttcagccctgggaattctctctccttggcctcatctcatccctgaggcttatcttataggt

SEQ ID NO: 15002 - DNA, 201 bp, Homo sapiens
ccttgccagccaatgacccacatgcctggctcctgcagactcctgaagagcagtcccagccaccagtgtgtttccccttctctttcctgtcactatctaaytgatcaggtagagccagagttagcgtctctggtgaatcctgactgattttagaagtctctggaaatacacagcatgccatgatgatttcccttaaactct

SEQ ID NO: 15003 - DNA, 201 bp, Homo sapiens
gcccaggaggttgatgctgcagtgagtgagccatgattgtgccattgaactccagcctgggtgacagagtgagaccttgtctcaaaaaaaacctaaaaackaaaaactaaaaaagcaaacagacataatctcacatggagaagaagggataaaaagcaagcttccatggatgtggaatggtggtgtaagttaaagtcagat

SEQ ID NO: 15004 - DNA, 201 bp, Homo sapiens
gccaggcatggtggtgtgcacctgtagtcccagctacttggaagagtgaaacaggaggattgcttgagcccaggaggttgatgctgcagtgagtgagccaygattgtgccattgaactccagcctgggtgacagagtgagaccttgtctcaaaaaaaacctaaaaactaaaaactaaaaaagcaaacagacataatctcac

SEQ ID NO: 15005 - DNA, 201 bp, Homo sapiens
tcatacacagaattgggctctggtcctgcctcttttgtgtatcagggagatggagctcagcagaatttaatgtgttaatacaaaaaaaaaaaaaaaaaaaagacagttcaaagtgaggaatctgcccaaagtcaccctcctccacatttttctccaccattttttctcttccactttccactttgttcctgtacctgtacc

SEQ ID NO: 15006 - DNA, 201 bp, Homo sapiens
atcatacacagaattgggctctggtcctgcctcttttgtgtatcagggagatggagctcagcagaatttaatgtgttaatacaaaaaaaaaaaaaaaaaaaagacagttcaaagtgaggaatctgcccaaagtcaccctcctccacatttttctccaccattttttctcttccactttccactttgttcctgtacctgtac

SEQ ID NO: 15007 - DNA, 201 bp, Homo sapiens
aatcatacacagaattgggctctggtcctgcctcttttgtgtatcagggagatggagctcagcagaatttaatgtgttaatacaaaaaaaaaaaaaaaaaaaagacagttcaaagtgaggaatctgcccaaagtcaccctcctccacatttttctccaccattttttctcttccactttccactttgttcctgtacctgta

SEQ ID NO: 15008 - DNA, 201 bp, Homo sapiens
tccagctttgctttgtccaggagttcagacggaggcaacatgtttggggaagaaattgctactagttggcattattagtcacagcctaaaaatgacagtgrcctcataaaaatattgcaagtcctctgagatcagtgagaaaagtggagtggcggagcagaagctctgggacagcaactgtttccaggaaaggaaatctgt

SEQ ID NO: 15009 - DNA, 201 bp, Homo sapiens
tgacccaagacagcttttttccttttgtccgtgtcttcagtgccctgcgttagcagagctccccatgggaaacacctatagtgggaaagtaccagggtgtyctggacacttgactgagttgtgcccacccttgcaaggccatccaaaacagatcacttctgttaacaaagctaccttctaagaacaacagccaaacaaaaa

SEQ ID NO: 15010 - DNA, 201 bp, Homo sapiens
tttttcaattctagtatttaggaatatggttaacttttgtatgtcgactattattctgagactgctaaatttaattattagttctagaagtttttttttttatggattccttgggattttctatgaagacaatctcatcgtctgtgactagtgccagtttttggtcttcctttccaatccatatgttccagtattacatcc

SEQ ID NO: 15011 - DNA, 201 bp, Homo sapiens
atttttcaattctagtatttaggaatatggttaacttttgtatgtcgactattattctgagactgctaaatttaattattagttctagaagtttttttttttatggattccttgggattttctatgaagacaatctcatcgtctgtgactagtgccagtttttggtcttcctttccaatccatatgttccagtattacatc

SEQ ID NO: 15012 - DNA, 201 bp, Homo sapiens
actggagatcagagtttcaatacagatttttgggggacacaaacattcaatcaattgcaaagacatactagcaatttgatatgatctctttcaaaaaaaaatagaatagagagtgattctcaacttattttctgatgtcagcattaccctgatgctaaaatcacacaaagacatataagaaagagatcttcagaccaatat

SEQ ID NO: 15013 - DNA, 201 bp, Homo sapiens
aatttttcaattctagtatttaggaatatggttaacttttgtatgtcgactattattctgagactgctaaatttaattattagttctagaagtttttttttttatggattccttgggattttctatgaagacaatctcatcgtctgtgactagtgccagtttttggtcttcctttccaatccatatgttccagtattacat

SEQ ID NO: 15014 - DNA, 201 bp, Homo sapiens
tctggttcacttgtccatttcacttcctagcacagagtaggcccttggtccatactagtttaatagatacagtctaagcgcttacaaggtcaatcctgattcccatgccctcagaaagggtctcagctctcagctttgtcccagatttcatagctgagagtcagctgctacataatcaacttgactcactgtttttacatg

SEQ ID NO: 15015 - DNA, 201 bp, Homo sapiens
gcccgttgctggtcagccggttgttgctgacgttgaggtagagcaggctggtcatctggccaatggactcaggcagcttgtctatgtagttgctgtgcagrtccagccaccggaggttctggaacttggagatggagtcagggatcttcctgataagattccggctaaggtccagctcgtccatgtcactaaggcgcagaa

SEQ ID NO: 15016 - DNA, 201 bp, Homo sapiens
gctcagcgggaagctgtcagaaatgccacacactgtttgctgtgccagtggggatccgcaggatgtgcagacaggagcatgtggaacccggtgggcggtcrggaggggaaagagcaggagctgtcctgcttccacttggcacccggtggccagtacattcagaagggagggaccctgtgtgaggttcggctcctggcccag

SEQ ID NO: 15017 - DNA, 201 bp, Homo sapiens
gctggtgggacatatggggcctctctgtggcctggcacttctcctccccctcacacctccaccagccaggtccacacagtcccatgcccattcactcttgkctcccagcctggcggcctcctgggtgaacctgtcctggtgcgcccatccccagcatactcccaccccagagcatagctggtggatccatcccctgggcct

SEQ ID NO: 15018 - DNA, 201 bp, Homo sapiens
tcctcctcgtcccttccttccctgatacatagggtgagtgcttgggaacaatctgcagaccaggtgagctcagcctgacagggcagcaggaatcaggaggycctccaggggagccaacctgcagccaggcctgggtctgctcacatgccttaggacccagcttgagggagggcatgccctgggggaacctgggtcttgggg

SEQ ID NO: 15019 - DNA, 201 bp, Homo sapiens
gttagtccatttgagttgctataaaggaattcctgagatggggtaatttataatgaaaagaggtttagttggctcacagtccgcagggtgtacacaaaacrtggtgctgacatctgcttttggtgaggcctcaggaagcttccagtcatggtggaaggtgaatgggagccagcgcatcacatagtgagagaggcagcaaga

SEQ ID NO: 15020 - DNA, 201 bp, Homo sapiens
agccaggtagatgcaggacaggactctgctattgggtgcagtacccacctctgagtctgaatcttaccccaccccatccttccctccatgtacaggtctcwtctctccctaactctcccttcagccctgggaattctctctccttggcctcatctcatccctgaggcttatcttataggtaactcactctatctcttattc

SEQ ID NO: 15021 - DNA, 201 bp, Homo sapiens
tcaaaatcaaattgactgagcttttgccaaaagtccagttgtcaagtgtatgttttcacttgatcattgtctttgaagatatttggatgaagatttcttcrtgcagagataggccttgccttttccagttgacccaggttcagataatgacaagatgacttcttagcccagtcgctctcaaactagctgacaccagcatag

SEQ ID NO: 15022 - DNA, 201 bp, Homo sapiens
taaaagaatgtaaaaagacataccatgcaaacactaaaggaaggatgtagtgactttattaatgtcagataaagcatatttcagaacaagaaaatttacakgaagtaagaccattacttattaataaaatgatcatttaaccaataggacaaaaaaatcctaaatgtgtatgtacctaacagcagagcttcaatttaaatg

SEQ ID NO: 15023 - DNA, 201 bp, Homo sapiens
ctctatctcttattccaagtttattatttacatagcttggaatagaagggagttagagaggaaacaagggtgggagaaaaaaaaagaaaagatagttatgygaatttaatttaggcattaaggaagtacccctgacaaaaactttactatgccagtggggccacatcaaaatggcctcggcaggggaccctgtgctgctta

SEQ ID NO: 15024 - DNA, 201 bp, Homo sapiens
ggtttgtagtgaatctagaaagaacagaaaggaaggtcagttcctcatcattatagaccacagagaggctgattaacagagggagtggttatgtgctgctscacatgggctggaagttctgaggtgagatttgatatcccctggccaaggagcccattttgtgctcagaaattcaagccctgccttctagtggccctgtgg

SEQ ID NO: 15025 - DNA, 201 bp, Homo sapiens
agaaagggtcttgactctgctgatggaattatcccttcccttttcatgtagcttctgctctttccaacccagcctgaaggggaaagccacctcggaggacmccctcaatctaaggtaatggcgggtagccatgctgtctgggcatggcactgccctggctttgatgttcctcctctgcctcatcccactctaaagaagtct

SEQ ID NO: 15026 - DNA, 201 bp, Homo sapiens
aaacccaagctcagacaccgttcagcagggcctgggctggctccttgccttccactctgccttcctgtatcatcttcgagtggggcccagggattacagasagcaagggatggaaatcaaagaaatgccttgatggcccaagctcctctgctgatcttggggaagctgctatagggcaaggccacatactttcccttgggc

SEQ ID NO: 15027 - DNA, 201 bp, Homo sapiens
gcgggtagccatgctgtctgggcatggcactgccctggctttgatgttcctcctctgcctcatcccactctaaagaagtcttgcagagagcatgcccaacwgtttccctcatttttctctctcctattcctatacatccttcatcctactcctgaaattccttctgccagttaaacctctgtgaacagacttgaagtctca

SEQ ID NO: 15028 - DNA, 201 bp, Homo sapiens
agagcatgcccaacagtttccctcatttttctctctcctattcctatacatccttcatcctactcctgaaattccttctgccagttaaacctctgtgaacwgacttgaagtctcacatgccctgtggctttttcagacccaagtggcaggaagccatcctctgcctttggtgactgggcaggtggcacagaggtgtggagt

SEQ ID NO: 15029 - DNA, 201 bp, Homo sapiens
ttcagacccaagtggcaggaagccatcctctgcctttggtgactgggcaggtggcacagaggtgtggagtcaggcccagccttggaggtcaggccctcccrtgggggtgtgtgagcaatcccatgctgtccctcctgtgatgagggtttctgaacgcttagaagctaaattcatacaagttggtgtgcgaatcagacatta

SEQ ID NO: 15030 - DNA, 201 bp, Homo sapiens
atgagggtttctgaacgcttagaagctaaattcatacaagttggtgtgcgaatcagacattaatttaggaatctgtgctatggggcgtctctcccagtgartgaattgcttgcagtcccccccgccgccgccaggtcccctttccagctacccagttctctggaaggccacttagggatcagtaggtgtttttatttcagt

SEQ ID NO: 15031 - DNA, 201 bp, Homo sapiens
aagtgtaagtgtaaaaaaccaagcagatagaggtgggcattgaaatcttagatgaggtggcaagcgaagcccttatcaagaaaacaatctttgaattaatwcttggccgggcgtggtggctcactcctgtaatctcagcacttggggagaccaaggtgggcagaccacctgaggtcaggagttcaagaccagcctggccaa

SEQ ID NO: 15032 - DNA, 201 bp, Homo sapiens
tgaggatgatcagagaaagagtggctgtagggccactgtggctatctgaagctcagatttagacatgtgaattttgagatgcctatcatacatctcaaagrcatcatggagctattgggcatatgaatctggagttcaagagagaggttcaagtgagacataaatttagaatagtgtttaaagtgatgagaatgggcaaga

SEQ ID NO: 15033 - DNA, 201 bp, Homo sapiens
cacactatatacacatcacatgcacatatacatacaccacatgtacacaaaacacacacacaccacactaaacatacaccttacacatactggcataccayacacccacacactgcacttacacaccacacagcacctagcacatacacatgaatacacaccacacataccacctacatatgctacatacagacaccacac

SEQ ID NO: 15034 - DNA, 201 bp, Homo sapiens
tcatctgtaaagtgggaacatcatcatttgtcttgcaggatccagggaggttgagatgagtttgcaatatggacacttgggctgtgggcccaaggctgagmagatgggggagatggttagtgcaggcgtccttggttggaaccaggcccacaatgaagtgccaagtagcagcagagatggcgagagaaggccttcctacag

SEQ ID NO: 15035 - DNA, 201 bp, Homo sapiens
gagctcccaaagtgcatgacttcatgtttgacagtgacctgtaactttactaagtttctattaactaaaaagaatttaaatatctagacccttcccacatrtttttctgagctaccagttttctctttttcactaacttccacgtatcatactacagactgttgcttagaccatgcatttaagtcacagcatcacccctcc

SEQ ID NO: 15036 - DNA, 201 bp, Homo sapiens
cagggttcaggcaatttacctgcctcaacctcccgagtagctgggactacaggcgcacgccgccatgcacggctaattttttttttttttttttttttggkattttagtagagacggggctttaccatgttgaccaggctggtctcaaactcctgagctcaggcgatctgcctgcctcagtctcccaatgtgctaggatta

SEQ ID NO: 15037 - DNA, 201 bp, Homo sapiens
cacttagcaatgtaatccattcaaattttcttttagcgtcctaagatcatgtggcttctgggttttaaaaataatatgtgcatatatatatatatatatawaatgacatagacacaccaacatcatatcagtgggtttggtgatttaggcatctttatctgaggccttcacagagtaactatacctaatgtaaaaaattat

SEQ ID NO: 15038 - DNA, 201 bp, Homo sapiens
ctatgctcaatctagcattttctaaatttatgagaaaaatttattagtgtcctgctgcactgactgtagatgctttttaatttttttttagatccaaagartaacatacgggcaaagaaatctagccattttaaagaaatgcaatttgttgtgctctcatcagacatgatgcacttagcaatgtaatccattcaaattttc

SEQ ID NO: 15039 - DNA, 201 bp, Homo sapiens
gactatgctcaatctagcattttctaaatttatgagaaaaatttattagtgtcctgctgcactgactgtagatgctttttaatttttttttagatccaaaragtaacatacgggcaaagaaatctagccattttaaagaaatgcaatttgttgtgctctcatcagacatgatgcacttagcaatgtaatccattcaaattt

SEQ ID NO: 15040 - DNA, 201 bp, Homo sapiens
gattccggcaccctcatttatacactgggaactatgtgtaggggttaaggccaaagactctggagccagacagccaggactggactccagctctgtcctcrtagctgagtgatctcaggcacttaaccattggggtgcctcagttctctcatccgtaaagtggggataataatgctgctgatcttattggattgttgtgat

SEQ ID NO: 15041 - DNA, 201 bp, Homo sapiens
aatggctaataatgttgaatttttttatgtgctttttggccatttgtatatctttttgggggaaacgtctattcaagggcttggcccatattttaattggkttgtttctctttttgttgctaagttgtatgaattctttatatattgtgggtactagactctcaaaagaaatatgatttgcaaatattttctctcattctg

SEQ ID NO: 15042 - DNA, 201 bp, Homo sapiens
tcacactggcctgcagtttagagttaacaaatctaaaatatgtgcagatttacaagcctaaactgctggaggtctctaataaaaaggcatgttgttcttayattgctcaaaactgctttgttggaaagggacctgtattgggcatggcacgtggatatttgcatgtgtgtcctcttggcgtgtatattactatacccctca

SEQ ID NO: 15043 - DNA, 201 bp, Homo sapiens
cagggtcagactgtggtgggccttgcacaaaccctatgggagaccatttcacttttaccctataggcaatgtggagctagggtggtctctgtgcaggactrtggcatcatggggttatgggttatgaggactgctctacaactgggtctgtgtatagctctgagaaaagccccctccaaagcaaggcagccctgctccttc

SEQ ID NO: 15044 - DNA, 201 bp, Homo sapiens
atcacactggcctgcagtttagagttaacaaatctaaaatatgtgcagatttacaagcctaaactgctggaggtctctaataaaaaggcatgttgttcttwcattgctcaaaactgctttgttggaaagggacctgtattgggcatggcacgtggatatttgcatgtgtgtcctcttggcgtgtatattactatacccctc

SEQ ID NO: 15045 - DNA, 201 bp, Homo sapiens
aatcacactggcctgcagtttagagttaacaaatctaaaatatgtgcagatttacaagcctaaactgctggaggtctctaataaaaaggcatgttgttcttacattgctcaaaactgctttgttggaaagggacctgtattgggcatggcacgtggatatttgcatgtgtgtcctcttggcgtgtatattactatacccct

SEQ ID NO: 15046 - DNA, 201 bp, Homo sapiens
gactgcacaccattttagttttgggctcaaatgcccacttttgaagctattggggcccagtaagctaacggcattagctaagcctacggttgatgaatggwtgtctgagaaagaatgctggatggatgggtaaatggatggatggatggaaggatggatggatggatggatggatggatggatggatggatggatggatgg

SEQ ID NO: 15047 - DNA, 201 bp, Homo sapiens
ttgaatacgtgaatgtgtgagtaactcactcagattttgtaatagctgcatcagacaggtattatagccttgttataaaaatgtggaagctgaatctgaaraaaaaaaagaaagttaagggcttttcagtcattaaatgtcagagtgaagataggatcccatctttgtgctgctgaggaggaccttagggaatttatggaa

SEQ ID NO: 15048 - DNA, 201 bp, Homo sapiens
cacaccaaacttaccctctggtaaggacatgggcagagccagctgaagagatggggaaggagtagccagaaaggtagcagaaactgtaggtgtggaagacrtcctggaagccaggtagagtgactcaaggtgggagtggtcaagtgttgttggtaggccaagtgggataagaactgagaaatgaccattgagctttgtaac

SEQ ID NO: 15049 - DNA, 201 bp, Homo sapiens
tctgggcttgggggtaaagagttacccctcagtaaagcagctttataaatagtgtttaataatttaccagcctataaatcctttctttcttagaatcaaawcatggtagaactggaagatgccttggaaatgagatagtccagccactttcttttccatctttttgaaagggaatgtagtgcagtgcctaacagctgggct

SEQ ID NO: 15050 - DNA, 201 bp, Homo sapiens
agatggttttctctctccctggagcaatgctgcatcaatcatgacacacatcacttcactgggctccattgtctctgcagctcaccctttgatgaacctaktctgtaatgtcactcagtgacagcatagctgtccctatgactgtgggtagctctctgtccattatttgtcttttgtcctcagaatcttagtgttgccttg

SEQ ID NO: 15051 - DNA, 201 bp, Homo sapiens
tacatgctttgtgactcactggctacctggctatcttcccagaaactctgagcttctcagaaagctcagactacctcaggctcactgtggtctcattgccyagtcctggggatggtgggtgggcgcggtgagctctcagtgagggttcagaaatgagaacattgccttgagaggaggaactatctaccacagaggtacata

SEQ ID NO: 15052 - DNA, 201 bp, Homo sapiens
tttgatagaaacatgcttatggtggtgccatttaaaatagtaaaaaaaaattagaaacaacctaaatatctaacaatagacgagtgattaaataattaatrtgtaatcatagaatgaaataaataataaacagaaactaaaacaaaaaaaaattatttcccaaaaatgtcaaaaggcaaaatgctgaagatgtcatgttag

SEQ ID NO: 15053 - DNA, 201 bp, Homo sapiens
ccaccttgcttctgtggtacagttgagccccattctgattttatttccaatgtgattatttttgccatcatggctacctgatcccactggagcagggtctyccagggctatgctgggtcattcctggcacagtctcagcacagctccaggttggagacccttggagaagcttctggggtcatctaggaacagtgcttagtg

SEQ ID NO: 15054 - DNA, 201 bp, Homo sapiens
tcttttggatcactggaggcaataatcatagaatgagtcttgaaaaatgcctagctgcttgttagtcactctaatgaatgtggacttcttacctataaacraggtgtgtgtgccgttctgagggttttcaactggcccatgacacttggcctaggctacagattttcatgccctaaaccttcagcttttgatgactcatgt

SEQ ID NO: 15055 - DNA, 201 bp, Homo sapiens
atggtagcctgttcagacttctgtggggtgcaaggttctgcaagccgacagggccttctaacatatgccagctagagctgttggatgagtcctgctctgtrgtgttgaataccggcaggatttttgagatgtaaaaagaccaatcagaaaaggagaaatgatggcaggaactgcagggaaagggggcagctagctggaatg

SEQ ID NO: 15056 - DNA, 201 bp, Homo sapiens
caaatttggttcttctctaaaggattgtgggtaccaaaggtggcaattcctttttaataaaacatacaaaaagagtactggggaacctaattctctgtatyagttctctgcatgaatgggagcctaacattcgcacttatttttgtacaggcatttctttgggaagctaacaatacctggctcagttacattgctttctaa

SEQ ID NO: 15057 - DNA, 201 bp, Homo sapiens
ttggaaaggggttccgctttatgttgagctttttcagcttggggagcttggagatgctcacggggatgttgttcagtaggttgtcatggagccctacctcrtggagctccttcagggcccccagtgtggtgggcacgctgtccaggtggttcaagcctaggttcacagcgcggatgttcttgagttgcttcagctccacgg

SEQ ID NO: 15058 - DNA, 201 bp, Homo sapiens
aatgaaatttattttgggggtgcaaagatttacagttgaacattttcagtttattgtctcctttagagattatctttgaaaaataatgaaagacaaataayttaaaaaacctaccataagaacctatgcgattcccatgagaatatgaccttccatgttaattaaccacaccccagaggcaccacagttagctggggggag

SEQ ID NO: 15059 - DNA, 201 bp, Homo sapiens
ggtccttggatttcttgctgtactgaagccctgggagcacaactgtggagaccaaactactcatatcctctgtctataccagagtcactgggaccagaggygaacggcacctggctgcagactcaaaatgagagtgacagccagtgctgcagcatctaggagcttgttcacacatttggctttgtgggccatgagcatctg

SEQ ID NO: 15060 - DNA, 201 bp, Homo sapiens
tgggagcacaactgtggagaccaaactactcatatcctctgtctataccagagtcactgggaccagaggcgaacggcacctggctgcagactcaaaatgaragtgacagccagtgctgcagcatctaggagcttgttcacacatttggctttgtgggccatgagcatctgatccctggccattcttcctaggtcatgatca

SEQ ID NO: 15061 - DNA, 201 bp, Homo sapiens
tggtcccagagctgcaccccatgccaggaatcccatccagatgttgctcattaatccacaagaaatgatgatcaccgttgacgatgatagtgatggattcygccactggtttctatcctgggaatttaagtgtttaagtgttcagaatgctttggagtttcctgttgccccttcaggaggctgcattataacccaaaaccc

SEQ ID NO: 15062 - DNA, 201 bp, Homo sapiens
attctcatgttaagcttgccatagtgcctcataaatcagcactgggcagatgtataaggatctattgattgttgcatctaggctgtaagatttttttttttaatttttatttcaaaatattgattcacagttgcaaaaatagtacagagagacactgtacacctttcacttaatatccccctctaccatggttacatttta

SEQ ID NO: 15063 - DNA, 201 bp, Homo sapiens
ccaaagccctgggattacaagcgtgagccaccgcgcccagccggtttcgtgttttaagatggaagagacttaagtctgtttgtaggttgaaggagaagackcagtaaaaaccagacagttaaaatagtagtgggagaagaaactgctaatgagacacatcctcagagggtttggagacaagagagtggatcacaggagaaa

SEQ ID NO: 15064 - DNA, 201 bp, Homo sapiens
catgagtaactagaaacagatttggtataattacaataaactccttttgtcaccatagctatagtgtaattgttattgttttggcagttgtgacaattactgattttgatgtcttgtacttggcagacaatagaatgaagaaatcgtgagcctaaataacatctatcaaggaaaagtcttgccaaattcttctgctattta

SEQ ID NO: 15065 - DNA, 201 bp, Homo sapiens
acatgagtaactagaaacagatttggtataattacaataaactccttttgtcaccatagctatagtgtaattgttattgttttggcagttgtgacaattactgattttgatgtcttgtacttggcagacaatagaatgaagaaatcgtgagcctaaataacatctatcaaggaaaagtcttgccaaattcttctgctattt

SEQ ID NO: 15066 - DNA, 201 bp, Homo sapiens
gacatgagtaactagaaacagatttggtataattacaataaactccttttgtcaccatagctatagtgtaattgttattgttttggcagttgtgacaattactgattttgatgtcttgtacttggcagacaatagaatgaagaaatcgtgagcctaaataacatctatcaaggaaaagtcttgccaaattcttctgctatt

SEQ ID NO: 15067 - DNA, 201 bp, Homo sapiens
tccaccaggtggcatccaaaacttctttatggggcagggctgaccaaccaggtgtaagctgtgtgtccaaagccagggctacccttcaggctggatcttckgtggcagtcagggtgtggttggggagtgggatctgggaggagcctgagggtgagccaggtgccttctgccaggaaagaagtatctaagcacatgactgca

SEQ ID NO: 15068 - DNA, 201 bp, Homo sapiens
ggacatgagtaactagaaacagatttggtataattacaataaactccttttgtcaccatagctatagtgtaattgttattgttttggcagttgtgacaattactgattttgatgtcttgtacttggcagacaatagaatgaagaaatcgtgagcctaaataacatctatcaaggaaaagtcttgccaaattcttctgctat

SEQ ID NO: 15069 - DNA, 201 bp, Homo sapiens
gtggacatgagtaactagaaacagatttggtataattacaataaactccttttgtcaccatagctatagtgtaattgttattgttttggcagttgtgacaattactgattttgatgtcttgtacttggcagacaatagaatgaagaaatcgtgagcctaaataacatctatcaaggaaaagtcttgccaaattcttctgct

SEQ ID NO: 15070 - DNA, 201 bp, Homo sapiens
accaggctcctctttgagagtgctggggccttggcagacctccttaagaatattctggcatcttcttgaagtcaggctcttccctccatcccatcctgccycctagggggaggcctgtatcttctccagagacctttgcttcactcctgtggtggctggaaaggagcctcccatagtctcagcagcccaaggcactactcc

SEQ ID NO: 15071 - DNA, 201 bp, Homo sapiens
agtggacatgagtaactagaaacagatttggtataattacaataaactccttttgtcaccatagctatagtgtaattgttattgttttggcagttgtgacaattactgattttgatgtcttgtacttggcagacaatagaatgaagaaatcgtgagcctaaataacatctatcaaggaaaagtcttgccaaattcttctgc

SEQ ID NO: 15072 - DNA, 201 bp, Homo sapiens
ttaagtggacatgagtaactagaaacagatttggtataattacaataaactccttttgtcaccatagctatagtgtaattgttattgttttggcagttgtgacaattactgattttgatgtcttgtacttggcagacaatagaatgaagaaatcgtgagcctaaataacatctatcaaggaaaagtcttgccaaattcttc

SEQ ID NO: 15073 - DNA, 201 bp, Homo sapiens
gttaagtggacatgagtaactagaaacagatttggtataattacaataaactccttttgtcaccatagctatagtgtaattgttattgttttggcagttgtgacaattactgattttgatgtcttgtacttggcagacaatagaatgaagaaatcgtgagcctaaataacatctatcaaggaaaagtcttgccaaattctt

SEQ ID NO: 15074 - DNA, 201 bp, Homo sapiens
tttctgtctttgatctggacactcagaaactgagagagataagcatggttaagcttttgtaattgcacacaactagtgggataaatttttgagccacctaygcatacaaatgcatacatacataccctctccctggcttcattcttctccactgaccccactttcccttcaatttgattttttctttctacactttaaatt

SEQ ID NO: 15075 - DNA, 201 bp, Homo sapiens
ctcaagaagagcagaaattttgcaacagattatgtttctgtctttgatctggacactcagaaactgagagagataagcatggttaagcttttgtaattgcwcacaactagtgggataaatttttgagccacctacgcatacaaatgcatacatacataccctctccctggcttcattcttctccactgaccccactttccc

SEQ ID NO: 15076 - DNA, 201 bp, Homo sapiens
gcagactcaaaatgagagtgacagccagtgctgcagcatctaggagcttgttcacacatttggctttgtgggccatgagcatctgatccctggccattctkcctaggtcatgatcagaccttggccgtggccccattccatgttcatctttgtctggctgtactaggttcatgcctcatctctgctgtatccttagccgta

SEQ ID NO: 15077 - DNA, 201 bp, Homo sapiens
tgagagtgacagccagtgctgcagcatctaggagcttgttcacacatttggctttgtgggccatgagcatctgatccctggccattcttcctaggtcatgmtcagaccttggccgtggccccattccatgttcatctttgtctggctgtactaggttcatgcctcatctctgctgtatccttagccgtaacctcagatccc

SEQ ID NO: 15078 - DNA, 201 bp, Homo sapiens
cttaacttctctcctttgctgaaccttttgaatacctaaggagggaaaattaattctaaagaaaaagtgtctgaagggggagaaattgaaatggaaagtcrtcatgtagctatccggcactgtctgtctcaatcatatgtctctgcgtggactctataccttttgggtcagagaagaagtgactgaaatagcagattggct

SEQ ID NO: 15079 - DNA, 201 bp, Homo sapiens
tctcatcatccactcagcaaacttgccaacaacataggaaagtcctgggggaaaaaagcctccctcaaggtatcattcttgatcttttcttttacccacaygaaggtgtgagagtgtggtacacagggaggccagagaaggttctcagctattgtgaggattgacttggttgctgtcattttctaccaaaagatctagcgt

SEQ ID NO: 15080 - DNA, 201 bp, Homo sapiens
caacaacataggaaagtcctgggggaaaaaagcctccctcaaggtatcattcttgatcttttcttttacccacatgaaggtgtgagagtgtggtacacagkgaggccagagaaggttctcagctattgtgaggattgacttggttgctgtcattttctaccaaaagatctagcgtaactggcaccactgttcaaagtagta

SEQ ID NO: 15081 - DNA, 201 bp, Homo sapiens
gagcagggccccagggctgtttaaaaagggaggacagaccccagctctctccccattgtgctcaaccctgaatcacttggaaccttctaggaatttttgcycagggctgagagttggggaaaggatggtttgctgaagtcaggatgggacaggccggtttccccagcagggctgtgtgtttactgttcccactgctcaggc

SEQ ID NO: 15082 - DNA, 201 bp, Homo sapiens
gcaatgaactaagttatggttctggaagaaaactggcttctgctgagtacgttctccatgtgctgcctgttttagaggcacagaacacttggagttcagtrtggcattattcccacttcacgagtgagggaacctaagctatgttaggtgcccaaggggatgccaagtcagaagcagagctgccatggacctagacctgtc

SEQ ID NO: 15083 - DNA, 201 bp, Homo sapiens
ggagttcagtgtggcattattcccacttcacgagtgagggaacctaagctatgttaggtgcccaaggggatgccaagtcagaagcagagctgccatggacstagacctgtccaacctcagaatctttggcttttctctttgccaggccagccctgcacatccacgactgggatctcctgaatgcctcagacagtggtgctc

SEQ ID NO: 15084 - DNA, 201 bp, Homo sapiens
tctagctactagatgcagataataggccgggtacggtggctcacacctgtaatcctagcaattttggaggtggaggcaggaggaacacttgagcccaagarttagagactagcctgggcagtaaaacaataccccactctacaaaaaaattttaacaattagctaggcatggtggtgcaaacctgtagttctaactacttg

SEQ ID NO: 15085 - DNA, 201 bp, Homo sapiens
cctccagcttgcaccaggcaagccaagctttccccaaagggacacggcccctgcacctagcatggtgctgagtaaggtgttgatttattgaatgcaccaayccatacttgccaccattatttcgtttctcctatgaggatctggaaaaacactgaatgtaataggatgggagtgcaacttcattcattcacagccagtcag

SEQ ID NO: 15086 - DNA, 201 bp, Homo sapiens
tcagcctgaaggacactaaatgtccctctagctgtgccatgccccgacttataaatactctccactgtcccagactgtcacgtacccccaacccagagccmtgtgtgtgtgttcttggatatctgccccttcctagacccctgcattaagctaggatttcctgaagttttcatacaagttcctggggagggactgctgagt

SEQ ID NO: 15087 - DNA, 201 bp, Homo sapiens
agggaggccaaacacactgagcatggcttagagagaatcctggacaggaaggggtgcttccagcaaatgggacatccagccagttgggcccagctgtgcckgttgcccacagcccacccacactgtgagaagaagccctcccagctctgatgaatggtgatgaggaagcagcacggagctggctacagagaactcctccgt

SEQ ID NO: 15088 - DNA, 201 bp, Homo sapiens
ctgtctatatcattcagctctgagaaaccagataggataaaacagcttaaaaaacaaagtggagtccaagtccagttaagattttgtatgctcacttggtmccaccaaactcctgaaagcaagtaaagccttgggcagaatgcacagagaagcactctggggactctgagataagtgatatcaggcagattggagaagaaa

SEQ ID NO: 15089 - DNA, 201 bp, Homo sapiens
acaatgtgaggagaaaataagttaataccacttcactgatggatgcctcttggtgcttctcatcatccactcagcaaacttgccaacaacataggaaagtyctgggggaaaaaagcctccctcaaggtatcattcttgatcttttcttttacccacatgaaggtgtgagagtgtggtacacagggaggccagagaaggttc

SEQ ID NO: 15090 - DNA, 201 bp, Homo sapiens
cctgtcctgcccacaggggtaagacctcccttgctgacatactctccccctttctccccaaggtgctcgcctattgccaagctcctgcttggccctgtttstggggccaagtggtttagggatctcccagctgccccctccaaccaggatctttcagtgcctcacccatgccttcaagggcttagccaggcatgcaacagt

SEQ ID NO: 15091 - DNA, 201 bp, Homo sapiens
tgttaagtggacatgagtaactagaaacagatttggtataattacaataaactccttttgtcaccatagctatagtgtaattgttattgttttggcagttgtgacaattactgattttgatgtcttgtacttggcagacaatagaatgaagaaatcgtgagcctaaataacatctatcaaggaaaagtcttgccaaattct

SEQ ID NO: 15092 - DNA, 201 bp, Homo sapiens
aggaaaaggggagaataccacagaagaatgagcaattagaaaggaaagagacaattggattagtaattttgtgccagtaaattagaaaacttagttcattygaacaatctcatcgaaaatgtaagttttcagagcgcactctaaaatgaataaaaaaccccaatgatcctagaatcatcaagtaaagtgagtcactggttt

SEQ ID NO: 15093 - DNA, 201 bp, Homo sapiens
aaatgttaagtggacatgagtaactagaaacagatttggtataattacaataaactccttttgtcaccatagctatagtgtaattgttattgttttggcagttgtgacaattactgattttgatgtcttgtacttggcagacaatagaatgaagaaatcgtgagcctaaataacatctatcaaggaaaagtcttgccaaat

SEQ ID NO: 15094 - DNA, 201 bp, Homo sapiens
caaatgttaagtggacatgagtaactagaaacagatttggtataattacaataaactccttttgtcaccatagctatagtgtaattgttattgttttggcagttgtgacaattactgattttgatgtcttgtacttggcagacaatagaatgaagaaatcgtgagcctaaataacatctatcaaggaaaagtcttgccaaa

SEQ ID NO: 15095 - DNA, 201 bp, Homo sapiens
agtgcaatggaaatgctaaatatctgagtaaatgtggagtatttttctcttctaaatacccttaaaatatgtatgtgatcgaaagaaaactaacactgtgygatggagttgtcaaagtatgtagatgtcatacataagacaactactacataacggggaagtgagcaagacctatatggtggtaagggttttacactgctt

SEQ ID NO: 15096 - DNA, 201 bp, Homo sapiens
taaatgtggagtatttttctcttctaaatacccttaaaatatgtatgtgatcgaaagaaaactaacactgtgtgatggagttgtcaaagtatgtagatgtyatacataagacaactactacataacggggaagtgagcaagacctatatggtggtaagggttttacactgcttttgaagtggtgaaaggttaattttaagc

SEQ ID NO: 15097 - DNA, 201 bp, Homo sapiens
taaaatatgtatgtgatcgaaagaaaactaacactgtgtgatggagttgtcaaagtatgtagatgtcatacataagacaactactacataacggggaagtkagcaagacctatatggtggtaagggttttacactgcttttgaagtggtgaaaggttaattttaagcagacagtaaagtatgtgtattttaatcctcagag

SEQ ID NO: 15098 - DNA, 201 bp, Homo sapiens
tggaataagagagctgacctatgaaggaggcacgggaagctgggtgcagagatgaccgagaaactggcaaacattttggtaaaccagagcaccatgctgcrtgagtgaggagtaaccaaggtggaagtgttaaggatgaggtggaacgaatattcataccatacagtaactaacactgaacacagtcacctggaagagaag

SEQ ID NO: 15099 - DNA, 201 bp, Homo sapiens
gtctgcactcgggctgggccagcctcctgtggctcctgcacatggcagcccccctcagctggaggagccacagtggagcaggcgtggagtccgtggcaccrtggcagggggtctctgtccagggcctgggtactcggtgacactgggagagaatgcagcctgcagcgtggcctcggaaactggaataagagagctgaccta

SEQ ID NO: 15100 - DNA, 201 bp, Homo sapiens
taaaaagatatagtaaatagtaaaaaactaaatatataaatgagaataaaacagtttaaaaattcaaataatacaaagaaggcaggaaaagggaacagaargagcaaacagacaacaactattaaaatgatagactgaaactcaaacatagcaatacttacattaagtgaaagtgacctacatgctccaattaaaagacac

SEQ ID NO: 15101 - DNA, 201 bp, Homo sapiens
cttgccgtgtcctcacatggtagaaagagagcaaaacaattgtctggagccccttttggtaatggcataaattccatttatgaagtctccaccctcaagawctaatttcctcatgatctaaatgcctcactttctgatacactcacactggagatcagagtttcaatacagatttttgggggacacaaacattcaatcaat

SEQ ID NO: 15102 - DNA, 201 bp, Homo sapiens
gatttttgggggacacaaacattcaatcaattgcaaagacatactagcaatttgatatgatctctttcaaaaaaaaatagaatagagagtgattctcaacktattttctgatgtcagcattaccctgatgctaaaatcacacaaagacatataagaaagagatcttcagaccaatattcttcatgaacatagttacaaaaa

SEQ ID NO: 15103 - DNA, 201 bp, Homo sapiens
catagttacaaaaatcctcaacatagtattagcaaattgaatccagtaacaagtaaaaagaatataaatgacagcccaaacttactcaatacttgggaatmagttaatgtaacataccatattaacagactaaaaagaaaaaaaaaagatcttataattgatgcagaaaagacatttgacaatgtaacatctgctagtgat

SEQ ID NO: 15104 - DNA, 201 bp, Homo sapiens
cttaaagtataatttaaaacaattgaaaaaaaagaaaaaaaaagctagagctagtatcatacttcgtgaaggacagaaggttcttctctgaagtttgggamtaagacaagagagcacactttcactatgtctgttcagtattactttggaaattctaaccagtgcaataatgcaaaaaataaaggcatacagacagaaaag

SEQ ID NO: 15105 - DNA, 201 bp, Homo sapiens
gcaagaatgaatcttctatctgtgaagttgagaacagtaaattgttgaaattgttctattttatgatgaattgttgttcatctcttacggtgcctaactcrtaaattaaactttatcataggcatgttttcctataggaaaaacatagtgtactatagtggtttcaggtattcaatgggggtcttagaacatatcacctgt

SEQ ID NO: 15106 - DNA, 201 bp, Homo sapiens
tctcttacggtgcctaactcgtaaattaaactttatcataggcatgttttcctataggaaaaacatagtgtactatagtggtttcaggtattcaatggggrtcttagaacatatcacctgtgggtaagcgaggactgtggtaatggaatactactaaacacaaagtctacggatacatgcgacaacttggatgaaccctaa

SEQ ID NO: 15107 - DNA, 201 bp, Homo sapiens
agtccagaaatgaatggctgggctgaccagctacctgatgctaagagctaagggcaaagcacatgtcttattcaggctgtattctcagggaattgacttgktaaaggcactgttcaataagttcattgatagactcactgattgaatacgtgaatgtgtgagtaactcactcagattttgtaatagctgcatcagacaggt

SEQ ID NO: 15108 - DNA, 201 bp, Homo sapiens
  misc_feature (1)...(201): n = A,T,C or G, or insertion/deletion polymorphism (see Tables 1-2)
ctgaggctcaggggtctggctcatccaacactctggagtgaaggcagagggcggcaatctgaaatactctgggctgttcagccttctgatggcaaagaaangacttagcacagtatctcccagccatctaagactttcagaacctcctgctcttccccccagcctgtcccaggtgcacaggtccctctggctgtggatgga

SEQ ID NO: 15109 - DNA, 201 bp, Homo sapiens
gtgatgactgtgtttatatgtgttgagagcttagaggagcacctgcacacgggacctgcttcgcatgtgtttactgtgattgtcattgctatttagaattsgtaaagtcagatgagacatggccactgcccttgagtaacttctcacatgtctgggaggcagccaggtgaggaattaggagggcagggccagggtcggagt

SEQ ID NO: 15110 - DNA, 201 bp, Homo sapiens
agttccctcatgtgtaaaatgggattatgagagcacctgttttgcagggttgtgatgactgtgtttatatgtgttgagagcttagaggagcacctgcacasgggacctgcttcgcatgtgtttactgtgattgtcattgctatttagaattggtaaagtcagatgagacatggccactgcccttgagtaacttctcacatg

SEQ ID NO: 15111 - DNA, 201 bp, Homo sapiens
gactgccagagtttaaatcctatctcttctaatttgctatttaaccttagatgagttacttatcctctgcctgtttccccacctgtaagatatggactgtratagggttgcagtgaggattagatgatttcacacaagtgaagaggttagaattatgtcaggcccagaatgagtgctaagtaaatgttagtcatttctact

SEQ ID NO: 15112 - DNA, 201 bp, Homo sapiens
gtcggccacaacaaaaatccttgattcatctcacacacacagaggcaaccctgggtgctcaggtgaggacagtggcaagaacggggcaggttaatgggaaktaaaagatgataggcattcctgctgagggatcctttacaacaggtgggaaagcaaacaggtttaaacatggttttgtctgctgctcaatgcagcaactga

SEQ ID NO: 15113 - DNA, 201 bp, Homo sapiens
gattttcatgccctaaaccttcagcttttgatgactcatgtggctcctttggacaccatcccacacatacaggaaaatcagagcttttggtaccagagtttgctgaggctttcagtgacaatggttgcctccataactatatatatgctaagaaggctctctgggcctgaattccaagtagaaaatacttgcaaagcctgc

SEQ ID NO: 15114 - DNA, 201 bp, Homo sapiens
gcagaggacagagaaatgtgtggaatggcaaggaatcaaaagcccttcaatcaacacaatcacacgccgagaaagtaaggaaaggagttttatgggcttgrctgaaagagctgctgcagccacaggggagcccttggtttcctgtggaggtagcccactgccctcttccctccctctctctttcccttctgcctcagggtc

SEQ ID NO: 15115 - DNA, 201 bp, Homo sapiens
ggtttcaggtattcaatgggggtcttagaacatatcacctgtgggtaagcgaggactgtggtaatggaatactactaaacacaaagtctacggatacatgygacaacttggatgaaccctaaagcattttgcctaataaaaaaatgtctcaaacgtctacatgaatggaatgattccatttatgtcaccttctgaaaaagc

SEQ ID NO: 15116 - DNA, 201 bp, Homo sapiens
aagggcatccaaataggtagcatctgggcaccactgtggtccaatgtgtatgtctccctggtgtatgcactggggggatgttgtgtaccacagggaacagrtgttcgcaagctggcatgtcagaaaaactgtctactgtgcttgagttgaaatcttcattaaaaagagatgaattgagatcaaggaagtctatgcactcat

SEQ ID NO: 15117 - DNA, 201 bp, Homo sapiens
cactggggggatgttgtgtaccacagggaacagatgttcgcaagctggcatgtcagaaaaactgtctactgtgcttgagttgaaatcttcattaaaaagasatgaattgagatcaaggaagtctatgcactcatctgatgtttatcaatggcttctccccatggtagatttgccagatttagcaaataaaattgcaaaatc

SEQ ID NO: 15118 - DNA, 201 bp, Homo sapiens
ctcctccgttaaggagcctctctccaaagggccctttggctccaagcctgcccattaatcacctcaaggtaaagtgagggctggctaggataatgtacttyacctccccagggagtctgggtccctaggcagccccggggccagatggggcacagtgaacttccaccctttctgcgcttctccctggggtcacccgacctt

SEQ ID NO: 15119 - DNA, 201 bp, Homo sapiens
taaagtgagggctggctaggataatgtacttcacctccccagggagtctgggtccctaggcagccccggggccagatggggcacagtgaacttccaccctytctgcgcttctccctggggtcacccgaccttggcagggacccttcctctcagttatagaaggcagagtgtgttgtgtggctcagggtccatcctgacccc

SEQ ID NO: 15120 - DNA, 201 bp, Homo sapiens
gaatagacagacgaatggatgtatttatgtatggttggatggataatagatttcatttcacatgaacagcttagcagctcaaatataagaggtttctaaakgtactgtgtctttttgttcttgtacaatttttttttatactttggaaaaagtggcccagttggtttgactttaatttctaattaattttttctctttagt

SEQ ID NO: 15121 - DNA, 201 bp, Homo sapiens
atggttggatggataatagatttcatttcacatgaacagcttagcagctcaaatataagaggtttctaaaggtactgtgtctttttgttcttgtacaattkttttttatactttggaaaaagtggcccagttggtttgactttaatttctaattaattttttctctttagtcattgtgaatcaaacagcatggtgggatac

SEQ ID NO: 15122 - DNA, 201 bp, Homo sapiens
gcaagctggtgtacaatctttctatacactgtgccacctctctctctcctccctctgttgcctgtgctcccccagtggcaaatgcctcatcctggggatayattgctggcccccactgcctcccgggagaggaagccatcctggaatcctatgactctcaggctgaaagacacacccacttctgcataggagtttaaggaa

SEQ ID NO: 15123 - DNA, 201 bp, Homo sapiens
gttctcatctgcaaaatgggtgtgatgatattttcccattgagaaaagtagaagagagcatagttgtaaagtccttagtacagttcctgccctgtgtatgsgtacatcagaggctggctccccacgcctgctcccttcccttctagctctgacagtctgtgttctgggtcgtggtatataaaattctgaaactattaagta

SEQ ID NO: 15124 - DNA, 201 bp, Homo sapiens
atgctgccaaatatatgccactgattagtttgtcaggtagctggcatttcatacatttggatgaagatttttgtttgtttgcatttgttttcttcagtgtyagggtcctggagcaagatctggtcctggcaggtgctctgaacagtcagcgtgtcggtgtttatgctggctgctctgtgccaggcctagggtagacaccaa

SEQ ID NO: 15125 - DNA, 201 bp, Homo sapiens
tcatcctggggatacattgctggcccccactgcctcccgggagaggaagccatcctggaatcctatgactctcaggctgaaagacacacccacttctgcayaggagtttaaggaaggccactagcccctccatggccccaggccccaggaagggtgttcctgttttgctggaatctctgacattggaaccaaggattgtca

SEQ ID NO: 15126 - DNA, 201 bp, Homo sapiens
attctgcaggtatttggggctcaggaaagttgtttggctttctaagattgtggtgatggtgaggggaagatctgaaacacctctggcccaagcttaagatrtgttggatctttgcagctctcacagactgcagggtcatgcattctgggcatggcacacctttccaggtacaacagccttattgtgagggcatctggcttc

SEQ ID NO: 15127 - DNA, 201 bp, Homo sapiens
ctctggttctcaccagagaggcagtgacctctttgccctggagagctgcaggctgctgtagtgcccctgtatcaggggcggctgtatgcagactgcctgargtttgatttttaccgtgtgagctcacttgaaagtctaacctctcgttaagtacttctgctgttgccaaacagcagccgtctctatgtgctggtcaaatga

SEQ ID NO: 15128 - DNA, 201 bp, Homo sapiens
gtttctctttttgttgctaagttgtatgaattctttatatattgtgggtactagactctcaaaagaaatatgatttgcaaatattttctctcattctgtasgttctcctttcattttcttaataatgtcctttgatgcacaaaaattttcagttttgatgaagtccagtttatccattttttcttctgttacttgtgcttt

SEQ ID NO: 15129 - DNA, 201 bp, Homo sapiens
gatcccactgcctcacatttcctcagcaccctcagcactgatcacagtgcaaatcaatgattaattgtgtaatcttccttggtttcttatttctttggttygtgtttgcacacttgagcatatctgaaaccaggatatgtattaaaatggatgccaaggacatcagccacttaagtcgtctcttccccatctgctaataaa

SEQ ID NO: 15130 - DNA, 201 bp, Homo sapiens
ttttgaatctagatctcccaaggttttagaaatatgatagggttgtcatagctaagcattacaagaggaagtaagcagcaaggggtgaagaaatgaaatgygctgtgtgctgtggttgacaatgtgaggagaaaataagttaataccacttcactgatggatgcctcttggtgcttctcatcatccactcagcaaacttgc

SEQ ID NO: 15131 - DNA, 201 bp, Homo sapiens
tgcctgcatcactgtcaggcacagcgacctgaagcacagcacgagggcgcatcacatgtgcccctgggggaaggactctctgcagtctaagtggtgacacwttaacctaagggcttgtttttcactgcctgtgcatggtgcatcgggggtgaggtgggggaaggacagggagagctgccctgaggaggtcaaggttaacaa

SEQ ID NO: 15132 - DNA, 201 bp, Homo sapiens
tcaatgtgcactttatggatcattaataatttgttatttattttgtcttacataaatgatctttttttcagttgtctattttgttctttttctaaaaacargttgtttgcttttttctcgtctatttttaggagtctggatactaatcctctgtcagtggcacgcattgtgaatattttctcccaatttgtggcttgcctt

SEQ ID NO: 15133 - DNA, 201 bp, Homo sapiens
ggcattctggaaacatggaaaagatgcagggaaaagtaagagtcccagtgagaagtcaggtcatagcacagaaaagtggccacagaagttgatgtgtattyttcttctgagaacatggaatgaaggatggtagcagcagagagcagaaggtttgcagactggactgggacaagtgggtgaaggggaaatctctaatgatgc

SEQ ID NO: 15134 - DNA, 201 bp, Homo sapiens
tagctgcttaggccacagtggtagacaagagagatctgggggcaagagtaggatggacatggacaggcccttcctgactcactgtgcctgtacttgtgagwgtgtgtgcagaggacagagaaatgtgtggaatggcaaggaatcaaaagcccttcaatcaacacaatcacacgccgagaaagtaaggaaaggagttttatg

SEQ ID NO: 15135 - DNA, 201 bp, Homo sapiens
gcggctgtatgcagactgcctgaggtttgatttttaccgtgtgagctcacttgaaagtctaacctctcgttaagtacttctgctgttgccaaacagcagcygtctctatgtgctggtcaaatgatgcctcccccgaaccctcccccctgcttccacacacatcctcagacccatgctaagaggtacatcatgcccgtgtct

SEQ ID NO: 15136 - DNA, 201 bp, Homo sapiens
gatgcattacttgttatgcttgcatttattatctatcccccattctcctcccccacctaccccaagacacatggcctgtctggttcacttgtccatttcasttcctagcacagagtaggcccttggtccatactagtttaatagatacagtctaagcgcttacaaggtcaatcctgattcccatgccctcagaaagggtct

SEQ ID NO: 15137 - DNA, 201 bp, Homo sapiens
gctgatgatgtgacagagaatgccaaagtcagaaagggcatatcggtggggacgttgctaactcagactgaggtgggtggggaggtcctttctgagaaagygacatctgagctgtaactagaatgctaagaagaagccacatggaaggattttggaaagaactgacaggaagagggtgtaagctggaggtcaaggagggga

SEQ ID NO: 15138 - DNA, 201 bp, Homo sapiens
agaagccacatggaaggattttggaaagaactgacaggaagagggtgtaagctggaggtcaaggaggggagggcgaagagctgagcaagggcagtgcaagstgggccatgtgctcatgggtaggggacaacataaggccttctataaggataacgctggccgtggggaggcagcagaggcagggaaggagagtgatggaga

SEQ ID NO: 15139 - DNA, 201 bp, Homo sapiens
tatacagccacatagggggcagagcatgggtgtcaattcttgttcctggaagatacacgtggctcccagcctggacaagttgacattcagcccagggttcycaaagaaaggaagagaccctaaaagaggcagttgtagagattcggggacaatgagaaagtaggtcttagtcactcaggtccaaaatcctctcccaagggg

SEQ ID NO: 15140 - DNA, 201 bp, Homo sapiens
tgggaaagaaaggagagagagacacagggatacagacacacagaaaggacaagctactcttgctgtaacttgagttcagtgacagagatgatggtgtctgrgcctcatctgggatctggactgagatgtgtagtgacaggggaggttgatggtgagatgacaagaacagatccctcatctcttttagcctgcacccctgcg

SEQ ID NO: 15141 - DNA, 201 bp, Homo sapiens
tctctgtacacacacacacacacacacacacacacatacgcctgtatcacaagactaagacctgtgcttgaacaaagacaggatgcctctgctaaaaactyagtcattagccagtgattcccagttgacattggctccaggattctggctcaccagccaaggcaggctgttcttcctcagttacacctgcacatctgccca

SEQ ID NO: 15142 - DNA, 201 bp, Homo sapiens
acatcagaagtgaaaggggggccatgtgttcatcctttccctgggggacccctaggcgtgaggaaatggactaggccactccaagcttgcagacaggatcrtcttccccgccgatgacatttgctcttttggggcaggtttggaagactgaggatgtgaagatgtctgttcctggacggccagcaggagaggagcccctgg

SEQ ID NO: 15143 - DNA, 201 bp, Homo sapiens
agattctgtctcagaaaaaagaaaagaaggagagatacacaggtacctcctcctataaagaaatgcaaaccccagcaattcttggctcctctgctaacatrcagaacctgaaaagaaaaagtttcccagagcacctggccctgaaactggtcctgttttctctgcagtatattccaagagagggaaggggcgctcacagca

SEQ ID NO: 15144 - DNA, 201 bp, Homo sapiens
aggccaggccgggtaaccgccacaatcctcactggcttcatttgagttcttctgttcttctctgctccaccccaagttgcccacaggccccagtcttgtcytgtagctcaatgcaggcacccagcaaaccctgaggagcttctcagaattgtgtccactgggctgactgagcaggtgcccaggttcccaggttgcacaatt

SEQ ID NO: 15145 - DNA, 201 bp, Homo sapiens
ctgtggaactggcacccagggcccactactgcatccaagaggcagggccagggtggagaaaaacaactgtagagaggcttttgtgctagttctaggcgcayttccttggactcaggtgagcctgctcatgcggttcttccatgctgctgctagattgccccctaaaattatattcaaggcctagtttagaccaaaccaaac

SEQ ID NO: 15146 - DNA, 201 bp, Homo sapiens
tccagggctgctgcagcacaagggaggctgggtggagaaccgggtgtacgatgtgatcccatgtatgattgaagttttttagaaacaaacaacaaaaaaawctatgtaggcatataggcaggcatatgggtaaaacattttctggaacatacactggaaactggtgactgtggacccttcttgggagacccttaggccata

SEQ ID NO: 15147 - DNA, 201 bp, Homo sapiens
agctgagatgagtgatgagaagggccaggccaggcagctcagtagccaagagagagcaggggagcttttattccagctgcttcttgcaggccctggggagktcaggcaagactgtagctcacatttatggagtagccatcatatgcctgacgtcattctaagcatgtaatgtgtattttctcctttaatcattatgccagc

SEQ ID NO: 15148 - DNA, 201 bp, Homo sapiens; identical to SEQ ID NO: 2227

SEQ ID NO: 15149 - DNA, 201 bp, Homo sapiens
gcatgtcccctggaattcttgaggcagcagcttgttctggcatcacagcggagggacactgactgcaagaacctaaccttcagcaggccagggtggggcargaagagctggatgacagtctccctgtgctgtccgctgagagttgctctgggatttgggaagtctgcagctttcctgaacaccctggtcccgtgaagccca

SEQ ID NO: 15150 - DNA, 201 bp, Homo sapiens
tttgtggaaattagacaataggcaaaaagtcttcacactttctaacaggttaaacaattaagtgttattattaggtctagaactgtatgcagattttccaygttagggaaatgaaaagcgataggtagttataacagagaggtttaatgagctgttcatccagcagggtgtctctggtttgaaagggtacgtctgtctcta

SEQ ID NO: 15151 - DNA, 201 bp, Homo sapiens
gcctgagtctgcaacctcaaagcccagctgttcaggggcctaagcaaggggctcaggctgtgtctcacttgggcaggcttccctgctgcccagcacaagtygaagctcttagtactgcacatgctggactgccactgaccatagactagagaattccctctgggtctgtgactgcttggcctctctcaacttccccaagaa

SEQ ID NO: 15152 - DNA, 201 bp, Homo sapiens
ccttcccctctagtcactctcattgatacagctcagctgcctccgagtcctggggacatgcattgagcaacagttcgtatgaaagaaggctgagtagaccrccatgtttagggccacataggtgtcccaagtggcttttaacagtttgctcttggctcacattgagagatctgggagaaagaatatccaaagccggctctg

SEQ ID NO: 15153 - DNA, 201 bp, Homo sapiens
agggagtgaaagggttgatgtgatgtcccctgtatgtccgcctgtgctaggcccaataaggccaggccgggtaaccgccacaatcctcactggcttcattygagttcttctgttcttctctgctccaccccaagttgcccacaggccccagtcttgtcctgtagctcaatgcaggcacccagcaaaccctgaggagcttct

SEQ ID NO: 15154 - DNA, 201 bp, Homo sapiens
aaagaactctttggagtcccacttctccaccgttcttgcctgaggagcctgtctgtgggcatcagcagagactgggcaggaggtagaggtggggtccccawcacaagatgggcaccgactctctctgactgtctaccaggggctgggcattgccacgttcgttattctctcatgtcattctcccagatccggtgtcagatg

SEQ ID NO: 15155 - DNA, 201 bp, Homo sapiens
ttgcactgcctcaccatgctccccagcacatatcctgctggagtcactctatgtggtggtctttaactaccatctccgttgactttctgataggaagcaamgtgtggaaactccttccccagctcctctggtctttccctcagtctgtctacacctgctgctctgggaaatcagcctggaagagggacaccaggacacaag

SEQ ID NO: 15156 - DNA, 201 bp, Homo sapiens
cgtgctcacggggacagactcggtaagtttcagaccatcagcctctgccctgggcactgctcatctaggtgcagagggaggtccagcacagggtggtggcmtatcccaagagggtcattcgtttcataaaacaggtttattatttctcctccctcctccccttctggtgtagaacatggacttcagagtctgaaattccca

SEQ ID NO: 15157 - DNA, 201 bp, Homo sapiens
aagagggggccctggatggaggggaagctgagtgggcaggtcgctgtatgccctgctggtgacactttcttccagagcaagctcggttggcagctggacarttgctgtggtggaagggggacgtggatcaggatggctacttgctcctgaagtcagtgtacgtgctcacggggacagactcggtaagtttcagaccatcag

SEQ ID NO: 15158 - DNA, 201 bp, Homo sapiens
gccgctgactcagcccttatttggttctgtggctgggggtgggtgagcctgggcttccgcttggctccctagagggtagtgtggctggcagggcatctgtytagacactctctgaggctctgcccagcctgttctttggaatagactctcctctgcttctcagggctgacagctctgagcccaggaaagcaagagggctga

SEQ ID NO: 15159 - DNA, 201 bp, Homo sapiens
gggaatgtcatcttggcccatgccttggggatctgtggacagttcctgctgctaatgttctcagaagggagcgctggaacagcacagagaacggggccaamctgagcctctggggagtgaccagggatagctggaagcagaaggaggcagcaggcgagcactcaactgcttgaagagagcagcaagggccaaaacccaagg

SEQ ID NO: 15160 - DNA, 201 bp, Homo sapiens
attgcttgagcccaggaagtcaaggctgcagtgagtcatatttgggccactgcgctccagcttgggtctctcaaaaataagaaaataaatacataaatgcrgataataatattttgggtctttttatggcacctcttgccaccaggaaatgtatcagttattaagtgcaagctctttttgctgctatatgagtgcacgctt

SEQ ID NO: 15161 - DNA, 201 bp, Homo sapiens
atttacatagcttggaatagaagggagttagagaggaaacaagggtgggagaaaaaaaaagaaaagatagttatgtgaatttaatttaggcattaaggaartacccctgacaaaaactttactatgccagtggggccacatcaaaatggcctcggcaggggaccctgtgctgcttaagtctgtagatcaacccatgatgct

SEQ ID NO: 15162 - DNA, 201 bp, Homo sapiens
ggacaagtgggtgaaggggaaatctctaatgatgcattcatgaggaaactgctttgtgttaaccttttcagataatggcgtttctcctgaggaagaaggcytctctcctgaaccatcgaatttttcagctgatcctctcagtggctggcactgtggagctgggcttcaggtcatctgctatcaccaacactggtgtcttcc

SEQ ID NO: 15163 - DNA, 201 bp, Homo sapiens
tagcaactgcagaatacaaactcttttcaagtacatatggaatatccactaacacagactatattttgggtcatgaaacaagccttaacgaatttaaaggrgttgaaattgtacaaaaaagtacaagctggttctttgaaaagattaatgaaacagatagccagactgacaatttaaaaaaaaaagaaagagaagccaaat

SEQ ID NO: 15164 - DNA, 201 bp, Homo sapiens
cactgccatttcacagccagtatttgggactagctttgtaggcagtttcatgtcatgtggatgagaaatatcttttacttgtcggtcatctcttaaaaggwaatgatgcaaacttccctcaacaactcactcattcaaaggtaactgcatttgttctctctcccgaccctcatatttactgggtgtgtaacaggccagctc

SEQ ID NO: 15165 - DNA, 201 bp, Homo sapiens
tggaatgcaagaggtggccactgagagtgggggaggagcaggcagcccaaggcagccgttcctgtttccctccagaggtactctatcagagccagcccacyctcagccagccacagagggccgtgctataaacaacacgtggcctgtcgtgagcgggtggcccgtattatggtgcaatatggggaggatatgtcaagcaaa

SEQ ID NO: 15166 - DNA, 201 bp, Homo sapiens
ccctctgtatggattctgtggaccacccactataggccaagtattttacagacattacaattgagtcacaactgcctgacatgtcgattttcatctccacyggggggatacagcaattgaggctcagggaggctgagaaacttgtgtggagtcacaaagactctaagtagagggcctgccttttcccattatacctgtcat

SEQ ID NO: 15167 - DNA, 201 bp, Homo sapiens
tctgtatggattctgtggaccacccactataggccaagtattttacagacattacaattgagtcacaactgcctgacatgtcgattttcatctccaccggrgggatacagcaattgaggctcagggaggctgagaaacttgtgtggagtcacaaagactctaagtagagggcctgccttttcccattatacctgtcataaa

SEQ ID NO: 15168 - DNA, 201 bp, Homo sapiens
gagacttaggacctggaggtcattagcacagtcttgacaccagcctgcaaagtgagaggacggaaggctgaaagggtctctaagacactctaatttcccgrcagcctggcttgcctgccacgaggagggaaccccagggctcaccccctgtgattcctgcagttgggcttttcctgctgttcacccagcagtcagtgggag

SEQ ID NO: 15169 - DNA, 201 bp, Homo sapiens
agcccctgtctatggcaacggccaagcggatgtggctacacagggaagaagccacacatttctcttaaaagagacccacatttcactttaatagcattcaygaaacatcactcccctttcttcgaatttgtgcaagtattttttttctgctctttggtttttgagagggctgtctttcatctatttatttgaatttaatta

SEQ ID NO: 15170 - DNA, 201 bp, Homo sapiens
tcagtggcattgagtatattcacgttgttgtacaaccatcagcactatccagctccattaccttttcatcttgcaaaactgaaactctgtgcccattaaaygctacctccccatgcacccctctccccagtctctgggaaccaccattctcctttctggctctatgaatttgactgctccagggacctcatatcaatggat

SEQ ID NO: 15171 - DNA, 201 bp, Homo sapiens
aggctagatccttcctacacctgggcttgtgggtgcaggaattggggctgtcaccactgcaggaaggtgcaccctgggctgcgggacagcgcttagtgggktgtgttgggggaatgtcatcttggcccatgccttggggatctgtggacagttcctgctgctaatgttctcagaagggagcgctggaacagcacagagaac

SEQ ID NO: 15172 - DNA, 201 bp, Homo sapiens
cttcttcataccccaggtggctggcttttctggacttctgatggacatgtgcccataggagttagaacacagaaacttcaaatggcatgcccacttagtartgaaaacatctatttgtagacacaggcaggagaaatgacttgtaagatcattcatgttttcctcctcaggggtgactgttaagaatcttcaggccttcca

SEQ ID NO: 15173 - DNA, 201 bp, Homo sapiens
aagaatttaaatatctagacccttcccacatatttttctgagctaccagttttctctttttcactaacttccacgtatcatactacagactgttgcttagrccatgcatttaagtcacagcatcacccctcccccagatagggagtgtctattttattttttctctgtgaaccttgtctcaggcctcctgaaactgactcc

SEQ ID NO: 15174 - DNA, 201 bp, Homo sapiens
ttttgcctgagcttcctgagggcctttgcagggtgaaggagcaggaagagcagagtggaagtagcagccctgccctgatggttctgggcagtgctgctggktctgggccaatctccacctcagctctgccacattagctcctgtgggcacctctctggtttccttgcccttcagtgagcgggaggccgtgtcctgcctttc

SEQ ID NO: 15175 - DNA, 201 bp, Homo sapiens
gccccccagggcaggtccttggcctcctaggagagcctttgtaggtggcctgactccctcaggcatccaaggctggcctgggagttttcaccctggctagrctgaagtttatggtcagggacccgagtgagtcccagccccgcctcttgcagcctgcaggtgcctttgacacttgtcctgtctctgagagtcttgtttttg

SEQ ID NO: 15176 - DNA, 201 bp, Homo sapiens
gattctcccgcctcggcctcccaaagtgctgggattacaggcatgagccactgtgcccggcctcagatctcttaaccccactgtggcctttggtatttggstgcctgggttcctgtcctggatccccctgtggaatgatcaacacaactaacatagttgctaacatgagccccagggggcttcctggcttactctccacag

SEQ ID NO: 15177 - DNA, 201 bp, Homo sapiens
tctcctgctcacttaggcagttttcattttcctaggatgacccaaatcttcttctgtgggtcatacccattaacttgccggcaccatctggttggcgtcaygttaggatccattaaggacaaacaggagcttgtggcagaacctttcattgctatgaccgggcaaagtgacagctttgaaaaatgacgcttagcctcattg

SEQ ID NO: 15178 - DNA, 201 bp, Homo sapiens
tgctaagtgcccaaatgaatgagcaacatgctctcttagctaatcttttccagaagcatacccatggcggcagcctccatctcctgaaactggtgctttaraaaacctgaattgccacctgatgaaggtggtgtctgagaggggaagctgagattcagagaggcaaagtggcactcaccagtttcctccaggctcactgag

SEQ ID NO: 15179 - DNA, 201 bp, Homo sapiens
tacagacttgaggagtattggaaaagcacgtgcaatagagacagacagtcccgggataatctcctggctctagaactttctaattggcattattgaacaayggagcctcagtttcttcatcctttaaaataacccctagctgggagggtggtgaggactaaaggagatacgacatgagccattttggctgaccttagtgtc

SEQ ID NO: 15180 - DNA, 201 bp, Homo sapiens
gcagaggagattagtccctgcaaaaccttgtgcaggggttttcagccctagacatgcagcccacatccctgaggagaaggccagacagtgagccaggcccygtgagtctgacctatggaacctggggaccttggtggtgttcaaatcgttagacacctcacatgcgtcaggggtgagaagtgaacaaattcaaaggatgga

SEQ ID NO: 15181 - DNA, 201 bp, Homo sapiens
aaccaaggaacagtgatgttaaggaatgtgtacatggcagcacccacacccactgtgctcgagagcacggtctcctgatcactgcacttagcctccgcctyctgacactctctggtcagaaccagctctccttgtttcatatgtcacatctcagcaagaccccaagactttattttcagccttgtctcttccatttagatg

SEQ ID NO: 15182 - DNA, 201 bp, Homo sapiens
gtagagctctggtcctatctgaataggtctaaagcttgcaccatgttgtcaccagtgtgagagcatctgccttctacctgccaggcctctggtgaaattgygaagtctcacctgggccttctactctgctggctctgtctcctgtcaagatagtcacttagcaatatgaggttgtgcattcccctgttgacatactgatga

SEQ ID NO: 15183 - DNA, 201 bp, Homo sapiens
ttcccctgcagtcagaactgagtcatcagacttagttcattctgggaagagattcagaaggttcctgtcaactcctctgctttctcctgctcacttaggcmgttttcattttcctaggatgacccaaatcttcttctgtgggtcatacccattaacttgccggcaccatctggttggcgtcacgttaggatccattaagga

SEQ ID NO: 15184 - DNA, 201 bp, Homo sapiens
ctcaaaagaggagggatgatataggagcttcctggttccaatttttgctgaaagtggtgctccaggtaggcttgaattcaaaactggattcaatgttagaygagtagatggagtgtgaatggatgggtggatggatgggtagatgagtggatgcatgggtggatgaatggatagatggatggacgggtggatagatgagtg

SEQ ID NO: 15185 - DNA, 201 bp, Homo sapiens
gcaacactgcaggcttcagctagtaccatggcatattccaccaccactgaccactgcctgaagccaaccttgagtgctggaagagggaacctgggtttgaycttgattctgatgcttgtcagctgtttgatttcagatacattacttgttttctgagtctcgctttacccatctgtacagtgggaatagtaatgcctacct

SEQ ID NO: 15186 - DNA, 201 bp, Homo sapiens
ggaggagacccttctcaggtccggagcacccctccccgggtgagaagcacttgtgtctgaccccagagccaaggatcacaccacctcccacaccatctgcmcacactattagcagacagcccatttgcaatcccctggttggtctgggactgcactgaaggaccataaatttaagagcagagagcaccactccccaggaag

SEQ ID NO: 15187 - DNA, 201 bp, Homo sapiens
aactaattgtatgagtttcaagtaactaaaatattgacagcactaatagccctggatagcattgcataagggcaggctatttgaaaagagccatttccacyaacaaggaaattggtaaagtaggactcttgctttgttaaattataacacattggacatcccaaatacattcaaaatctgtttcctatgctctttcccact

SEQ ID NO: 15188 - DNA, 201 bp, Homo sapiens
tttgataatatattttatttaactcaatatatcccaaatattaccatctcaatgtatggccaatacaaataattgtcaacaagatattttgcatcatttcytttgtattatctttttgaaatctaatgtgtatttgatgttcatggcacatgtcagttcagagtggccacagtttgagtgcatcttggaccatgctgcact

SEQ ID NO: 15189 - DNA, 201 bp, Homo sapiens
ccctgctcctacagtgcctttacctcttctttgtctttcctctggacaaagatgagcttcttgagagtgatcttcaagttcaaaagatgttcgtgcaggtragttcaaggagggcctccaattccctgggtcaaaacctcacttcggggacagactctccaatgcttcccgtagatgcttttgtctttctcagccctggtt

SEQ ID NO: 15190 - DNA, 201 bp, Homo sapiens
gtcttgactctgctgatggaattatcccttcccttttcatgtagcttctgctctttccaacccagcctgaaggggaaagccacctcggaggacaccctcartctaaggtaatggcgggtagccatgctgtctgggcatggcactgccctggctttgatgttcctcctctgcctcatcccactctaaagaagtcttgcagag

SEQ ID NO: 15191 - DNA, 201 bp, Homo sapiens
agcaaacatgtcctgagctcaggggaagatacagaggacggagagccatgggcaaagacctgcgccttgtagggtctgcaggggagagagaacagccagayctgcagctaaggtatggagaatattttctgtggttcccacaagcatgggatgatgggagcacagaggagtggccatgtcatccccaccagtaccttgacc

SEQ ID NO: 15192 - DNA, 201 bp, Homo sapiens
gtgcaggatcctgggtggaacgcagcactgagggcgtggatattgtaatgggtgagcacgtggctgtctccagggagtggggcaccacctagtcctgggawgtgaatgaggaccaagccaggccccttcttatttgagaccatcacagctctgtgcagcaggatcacctcgagccctgactccaaggcctacatccaaatg

SEQ ID NO: 15193 - DNA, 201 bp, Homo sapiens
ggcatgttgttcttacattgctcaaaactgctttgttggaaagggacctgtattgggcatggcacgtggatatttgcatgtgtgtcctcttggcgtgtatrttactatacccctcaaatgtcttaaggggcaagaaaggagatctttgaagatattaagcatactgcatttgtgggcagatgtaatccaatttctgcttgg

SEQ ID NO: 15194 - DNA, 201 bp, Homo sapiens
gcgaggtggtgggcgcctgtagtcccagctactcaggaggctgaggcaggagaatggcgtgaaccccggggggcggagcctgcagtgagccgagatcgcgycactgcactccagcctgggcgacagcgagactccgtctcaaaaaaaaaaaacctctcttgcaaatattatttgatttgttccttctaacaaggcattcat

SEQ ID NO: 15195 - DNA, 201 bp, Homo sapiens
gaaggaattactgtctgtccccaaatgcagtcattaaaatgagtgaagtaacaatcattgagttatattttttgaaaaaaacattctcagcatttaattaytgattgtggcgtgagaggattaagataagttgataatgccgactttatgtaatttatttttactaggcaattactggctgcattacaccctggcagcaag

SEQ ID NO: 15196 - DNA, 201 bp, Homo sapiens
ggaattactgtctgtccccaaatgcagtcattaaaatgagtgaagtaacaatcattgagttatattttttgaaaaaaacattctcagcatttaattactgrttgtggcgtgagaggattaagataagttgataatgccgactttatgtaatttatttttactaggcaattactggctgcattacaccctggcagcaaggta

SEQ ID NO: 15197 - DNA, 201 bp, Homo sapiens
tgcatcattacattcctttctatatttcccaaattaatatatatgtgtatatatgtaaaatataaaacaataaggagatgttctctctctctctctatatmtatatatatagatagataggtagatagatagataaatagatagatagcatctccttattgttttaacatacattcctttgattattagtatgacgaattc

SEQ ID NO: 15198 - DNA, 201 bp, Homo sapiens
gttttatgttaactctaccaatatggagttggatcttcaggccagctttgaaaattatgacagaattcgctcatttgtagttttccaatcctccctccttyctccaagtctcatgggatgtcaacagtggtattgatcatttcttctgcaggctccaggtgtcctgtgggtttatcttccatttgcaccagtactcacatc

SEQ ID NO: 15199 - DNA, 201 bp, Homo sapiens
caagccaggccttggccagattcccaggtcctgattttcttgcttgtcttgggaagaattccctctctgggttccctgttctctatatttcaggggcaatmcctgaggaggccttttgcctgggcaccctgataacatacaggttaacttaggatcttggtgtggaaacttgtttgacttattctgccagctctcaggggc

SEQ ID NO: 15200 - DNA, 201 bp, Homo sapiens
ctattgctttttggggccttcaatgcaatttcaacacgggaaaaaaaaggcaaaaatgtcatagtattttgaaggtagttttaatttcacatggcctctgraaaggtctcaggaatccctagaaatttattgaccacattttgagaatcattagtatgttcaatatataaatataagttatttagccagtctattattaaa

SEQ ID NO: 15201 - DNA, 201 bp, Homo sapiens
tgggattttctaatcagtttctcaaaacctgcaaaacaagtcttcctaaaactcattggcaccaacaatgtgtgtgtgtgtgtgtgtgtgtgtgtgtgtgwgagagagagagagagagagagagatcaggaacgttgttgtaaggtatatggagtacggtgggtggggggacaggttatctctgccccacagtgtctgggg

SEQ ID NO: 15202 - DNA, 201 bp, Homo sapiens
actgtgttgggtaggccctctttactgtgtggggcagacccgttgggattttctaatcagtttctcaaaacctgcaaaacaagtcttcctaaaactcattrgcaccaacaatgtgtgtgtgtgtgtgtgtgtgtgtgtgtgtgagagagagagagagagagagagagatcaggaacgttgttgtaaggtatatggagtacg

SEQ ID NO: 15203 - DNA, 201 bp, Homo sapiens
gtggacagaaacattcacttcattgccaggagacacagggttgggccactttgactgtgttgggtaggccctctttactgtgtggggcagacccgttgggrttttctaatcagtttctcaaaacctgcaaaacaagtcttcctaaaactcattggcaccaacaatgtgtgtgtgtgtgtgtgtgtgtgtgtgtgtgagaga

SEQ ID NO: 15204 - DNA, 201 bp, Homo sapiens
atccttcaagggcaaagggcaaaatccctcccctcccccctaaaattaaaatacattttaaggcaacttgagcggaacattgaataagcagcttggataaycatccttttttggctgagatacaccttgaggtcattttcagctctgagattcaataatttttttgagctgttaagaatctcagtaatgagaagtctaatg

SEQ ID NO: 15205 - DNA, 201 bp, Homo sapiens
ccggagtctccactctgttgggaggaactccagcactgacagcagcaggctggggtgaggatggaggcaggcgttgctgcccaccctgtggtctcgggacwgatggcctgtgaagggcttccccagcctctggggtcagaaacccccatatcccactcacttttcacgtctgagatcagctcctagacagcagccatgccc

SEQ ID NO: 15206 - DNA, 201 bp, Homo sapiens
tgatgtctttgaatttcatttcctgtggcaaatggcactggccagagcaatgggacgaggtcaggtctagagccaaagtcttaccaattctatattcatgrcacctttctctactagcacattgggtatcattgacttagagaccagtatgttaattcaaactggggtgtttgccgtggctgtgcagctcattgaaaatta

SEQ ID NO: 15207 - DNA, 201 bp, Homo sapiens
gcatttttgccacgtattgtcctctcaatagtgatttagctacataaaacaaattttgatattttctattttcaatttcattaaatttaatgtattttttwaaaaatttattttgagacttcttttttgacacagattaaagtctattgttagttcctaagagtttgaggatttcttgttatccttttgttactaatttct

SEQ ID NO: 15208 - DNA, 201 bp, Homo sapiens
tcaagtcaaaggggtcagctcccatctggaaagaatgataaatgaatctatgtcagcagcctgtatgtgctgaagggcgattgagtgctcttgagcatttstgtctccaggcccatgatgtctttgaatttcatttcctgtggcaaatggcactggccagagcaatgggacgaggtcaggtctagagccaaagtcttacca

SEQ ID NO: 15209 - DNA, 201 bp, Homo sapiens
gacaaaacatccacattttcattattgattgttgttattcaagcagggagcattgttctctgtgctctgtcaagtcaaaggggtcagctcccatctggaargaatgataaatgaatctatgtcagcagcctgtatgtgctgaagggcgattgagtgctcttgagcatttctgtctccaggcccatgatgtctttgaatttc

SEQ ID NO: 15210 - DNA, 201 bp, Homo sapiens
taaatagggtcttccacagattgaaggttttaaattttgatgaagtccaaatcatcatttgtttttacttttatgtattgcacttttatgtcatatctaasatctctttgcctgacggccatgaagattttctcctatgttttcttctaaaagttttacaggtctgtaatctgttttgagctactttttgtaccatgtgtg

SEQ ID NO: 15211 - DNA, 201 bp, Homo sapiens
gggttttaattcatgtgtagagtcacacgactaccaccacaatcaagaaacagaacagtctcatcacctcaaatagctcccagatattgccccacatagtraaaccttttctccaccctatcctcgcaaccgtggatctttccttatagttttgtctttccagaataccatatacatggaagcatacatgtgtaatctttt

SEQ ID NO: 15212 - DNA, 201 bp, Homo sapiens
cactgggtgtgagatggtgcttgtattcagggcctgattgtacctgggtgtttgcagttcctaaaatcattcttaactgtataaattcttcatatataatrtttagaatgaaatttattttgggggtgcaaagatttacagttgaacattttcagtttattgtctcctttagagattatctttgaaaaataatgaaagaca

SEQ ID NO: 15213 - DNA, 201 bp, Homo sapiens
ttcaattcacatgaagtaaaagtctctttttttggcctacagttctatgggttttaattcatgtgtagagtcacacgactaccaccacaatcaagaaacaraacagtctcatcacctcaaatagctcccagatattgccccacatagtaaaaccttttctccaccctatcctcgcaaccgtggatctttccttatagtttt

SEQ ID NO: 15214 - DNA, 201 bp, Homo sapiens
cacagctgccctcaggtgttcggacgttgataacagagaccctaagtcagcatgcagagcctctgctaggaggttccgtcacatgaacctgggtacctggrcctaaaggctgctgaagctcagatctcttttttttttttgagatggagtcttacttcatcgcccaggctggagtgcaaaggcgcaatctctgctcaccgc

SEQ ID NO: 15215 - DNA, 201 bp, Homo sapiens
gtttattattattatttcaattcacatgaagtaaaagtctctttttttggcctacagttctatgggttttaattcatgtgtagagtcacacgactaccacyacaatcaagaaacagaacagtctcatcacctcaaatagctcccagatattgccccacatagtaaaaccttttctccaccctatcctcgcaaccgtggatc

SEQ ID NO: 15216 - DNA, 201 bp, Homo sapiens
ttgtctcctgtgcgggagcacacttgtccctgtggaatgtcaatggacagcccctggccagcatcaccacagcctggggcccagaaggagccataacctgytgctgcctgatggagggcccagcatgggacacaagccagatcatcatcaccgggagtcaagacggcatggtccgggtaggtgtgtcttgggcagaatgag

SEQ ID NO: 15217 - DNA, 201 bp, Homo sapiens
ggctggccctttgaaagccaagctagctataaaaatagtgtgtgctctcacttcacctctgacattctttgcttcccttccctcagcatctgagaagaagycactggcaagtcgttcaaatgttgcacaccacagcaaagtcactttgtggagtggaagcctgtcctcagccatgaagctgatgcccgggcggcaggccaa

SEQ ID NO: 15218 - DNA, 201 bp, Homo sapiens
aggaattggtggtaagcaggtggaggtggagaaaggccagcttgcatgggtgttggtggcattgttgtcaggcctgtggctctcagtactgattgcttctsgctgaagcttgcaaagctggggtgatgttcaagaccttaagtgagaagggtgtgggtaaaaccactcatgatgcaccatctcccagccctctctgggagg

SEQ ID NO: 15219 - DNA, 201 bp, Homo sapiens
aaagccccagagcaaggctggagtgagtgtcaggccagccaagcagttggcagcaagtaagggtgttgaggaccaagcatggcaagaagtgtgctgcagcsgggaagggaggacgtggaccagcaaaccctgggcaccaggtgggctctgtaacctcgatgtttctcttaacttctctcctttgctgaaccttttgaatac

SEQ ID NO: 15220 - DNA, 201 bp, Homo sapiens; identical to SEQ ID NO: 3853

SEQ ID NO: 15221 - DNA, 201 bp, Homo sapiens
ctccccagcagtgagggtctctctcttcctcttgtgctcttgctggggctggtggtccaggggtcttactccttggaggccatgtgggccatgaggtccaycaccctgttgctgtagccaaattcgttgtcatacctagaagatgaaaagagttgtcagggccctttttctgagccagccaccagagggcgccagaccctg

SEQ ID NO: 15222 - DNA, 201 bp, Homo sapiens
aggggagattcagtgtggtgggggactgagtgtggcagggactccccagcagtgagggtctctctcttcctcttgtgctcttgctggggctggtggtccargggtcttactccttggaggccatgtgggccatgaggtccaccaccctgttgctgtagccaaattcgttgtcatacctagaagatgaaaagagttgtcagg

SEQ ID NO: 15223 - DNA, 201 bp, Homo sapiens
cagaggagaccacctggtgctcagtgtagcccaggatgcccttgagggggccctccgacgcctgcttcaccaccttcttgatgtcatcatatttggcaggkttttctagacggcaggtcaggtccaccactgacacgttggcagtggggacacggaaggccatgccagtgagcttcccgttcagctcagggatgaccttgc

SEQ ID NO: 15224 - DNA, 201 bp, Homo sapiens
cgaacatgggggcatcagcagagggggcagagatgatgacccttttggctcccccctgcaaatgagcctacagcagagaagcagacagttatgaacccggstcctgcctttgcagggctgagtcagcttcccctcccgcgggccctcctgcactcaccccagccttctccatggtggtgaagacgccagtggactccacga

SEQ ID NO: 15225 - DNA, 201 bp, Homo sapiens
aaaggcaggaaaacgtgatttaaaaaagaagaagaaacaaatcactgcaggaggggagggcccagtctggtctcgcccgcacaggctgccttacgtaccastggatggtttcttggctgatggcgctctctggctacctgcttggccaatctcaagctccttgattccatccaaacctctggtatgacaggcccgaagctt

SEQ ID NO: 15226 - DNA, 201 bp, Homo sapiens
aagtggtcgttgagggcaatgccagccccagcgtcaaaggtggaggagtgggtgtcgctgttgaagtcagaggagaccacctggtgctcagtgtagcccargatgcccttgagggggccctccgacgcctgcttcaccaccttcttgatgtcatcatatttggcaggtttttctagacggcaggtcaggtccaccactgac

SEQ ID NO: 15227 - DNA, 201 bp, Homo sapiens
ggtgacatttacagcctggcctttggggtcgggtcaacgctaggctggcaggggaagggcggggccgtgaggtgagccggcgctgcaggaaggggccaccrccagaggggccattttgcggtggaaatgtccttttccaactacccatgactcagcttctcccggcttggcaccatgccacagccaccacacctctgcggg

SEQ ID NO: 15228 - DNA, 201 bp, Homo sapiens
ccctgcactttttaagagccagtctctggccccagccacataccaggaaatgagcttgacaaagtggtcgttgagggcaatgccagccccagcgtcaaagrtggaggagtgggtgtcgctgttgaagtcagaggagaccacctggtgctcagtgtagcccaggatgcccttgagggggccctccgacgcctgcttcaccac

SEQ ID NO: 15229 - DNA, 201 bp, Homo sapiens
tgtggcagggactccccagcagtgagggtctctctcttcctcttgtgctcttgctggggctggtggtccaggggtcttactccttggaggccatgtgggcmatgaggtccaccaccctgttgctgtagccaaattcgttgtcatacctagaagatgaaaagagttgtcagggccctttttctgagccagccaccagagggc

SEQ ID NO: 15230 - DNA, 201 bp, Homo sapiens
caggctggccgcttctccacgggccctgccttcctcacctgatgatcttgaggctgttgtcatacttctcatggttcacacccatgacgaacatgggggcrtcagcagagggggcagagatgatgacccttttggctcccccctgcaaatgagcctacagcagagaagcagacagttatgaacccgggtcctgcctttgca

SEQ ID NO: 15231 - DNA, 201 bp, Homo sapiens
cagaccctgcactttttaagagccagtctctggccccagccacataccaggaaatgagcttgacaaagtggtcgttgagggcaatgccagccccagcgtcraaggtggaggagtgggtgtcgctgttgaagtcagaggagaccacctggtgctcagtgtagcccaggatgcccttgagggggccctccgacgcctgcttca

SEQ ID NO: 15232 - DNA, 201 bp, Homo sapiens
tggtcgttgagggcaatgccagccccagcgtcaaaggtggaggagtgggtgtcgctgttgaagtcagaggagaccacctggtgctcagtgtagcccaggaygcccttgagggggccctccgacgcctgcttcaccaccttcttgatgtcatcatatttggcaggtttttctagacggcaggtcaggtccaccactgacacg

SEQ ID NO: 15233 - DNA, 201 bp, Homo sapiens
agggcaatgccagccccagcgtcaaaggtggaggagtgggtgtcgctgttgaagtcagaggagaccacctggtgctcagtgtagcccaggatgcccttgarggggccctccgacgcctgcttcaccaccttcttgatgtcatcatatttggcaggtttttctagacggcaggtcaggtccaccactgacacgttggcagtg

SEQ ID NO: 15234 - DNA, 201 bp, Homo sapiens
gccccagccacataccaggaaatgagcttgacaaagtggtcgttgagggcaatgccagccccagcgtcaaaggtggaggagtgggtgtcgctgttgaagtmagaggagaccacctggtgctcagtgtagcccaggatgcccttgagggggccctccgacgcctgcttcaccaccttcttgatgtcatcatatttggcaggt

SEQ ID NO: 15235 - DNA, 201 bp, Homo sapiens
ctgccagttcactcactaccgttgctccaaccacgtctactatgccaaggtgaggcccaggacaaaggttggatttggtgccccagggccaagggagaggyggcagcagtggggagttgaggaagggttccaggagagtcatccttagctcctccttccctgccattttgccagtcatttacccagattatatatgaatac

SEQ ID NO: 15236 - DNA, 201 bp, Homo sapiens
ataagacatgctggaaaaggggttgaagaaccagctggagcagaagtctgccctttaggaaaggctttcccattttccttctcttcctgcagagagtcctrtgttcccagccagtctctattctctcacctaacactctcaaggagatagaagcttcagctgaagtctcacccaccacgatgacctcccccatctcacccc

SEQ ID NO: 15237 - DNA, 201 bp, Homo sapiens
aaaccgcaatcggaaggtgagcacccctgccctgcccctccttctcccagcaccccctcaatcagtcaccataactggtctattctgaggccccctctgcragcagctaggatgtggaaagcggttcctgcttgcatctctggggcagaggcctccaccagcaggctctcctccattcctccagtcctggcggaagcaagg

SEQ ID NO: 15238 - DNA, 201 bp, Homo sapiens
ccatgcctgcccacctctcgttcttttgggcttctgacacctcccctcctccccactcctggcacctggctctgtgatacagaccgtctgcactgaatctstgtgtaggtgtcccgcatgagatgtctgcagaatgagacttacagtgcgctgagccctggcaaaagtgaggacgttgtgcttcgatggagccaggagttc

SEQ ID NO: 15239 - DNA, 201 bp, Homo sapiens
tatccctgcctagaaactgagagataagacatgctggaaaaggggttgaagaaccagctggagcagaagtctgccctttaggaaaggctttcccattttcsttctcttcctgcagagagtcctgtgttcccagccagtctctattctctcacctaacactctcaaggagatagaagcttcagctgaagtctcacccaccac

SEQ ID NO: 15240 - DNA, 201 bp, Homo sapiens
acctggcccagccccaccctcagtgctgtcttcttgcagcctcctgcagctgccccacacagaggccttgctggtgctgtgctattcgatcgtggagaatrcctgcatcataacccccacagccaaggcctggaagtacatggaggaggagatccttggtttcgggaagtcggtatgccagccatactgtctaatggatac

SEQ ID NO: 15241 - DNA, 201 bp, Homo sapiens
tttattgtagagacactgttttagtaaacatgctgagcattcattttgcgtcctctgggttggatgcgatgtgagaggatggcatgccagaattaggacaygacatgaaaccagagtggtgcctctgtccgagaacttgtaagttctcaacttgggaaagacagaggtgctggagggtaggcctcagaccagggggtctcc

SEQ ID NO: 15242 - DNA, 201 bp, Homo sapiens
gtaaataaaagctatacatgttggcctgctgtgtttattgtagagacactgttttagtaaacatgctgagcattcattttgcgtcctctgggttggatgcratgtgagaggatggcatgccagaattaggacacgacatgaaaccagagtggtgcctctgtccgagaacttgtaagttctcaacttgggaaagacagaggt

SEQ ID NO: 15243 - DNA, 201 bp, Homo sapiens
cctaccctcaccccattccttccagttacttgctgtgagtagcgctagtttgtggaagggggcttgggcccctggcttctgagaacccgtcctcactgaayctcctgcctctctccaagagaccattgcaccccaccccaccctccaccaatagagcaggcaaaggagtggggacccagagggctgagaaaacaggagcta

SEQ ID NO: 15244 - DNA, 201 bp, Homo sapiens
tgaggcaggagaatggcgtgaacccgggaggtggggcttgcagtgagccgagatcgcgccactgcactccagcctgggtgacagagtgagactccgtctcaaaaaaaaaaaaaacaaaaaaaacaaacccaaaacccaaacaaaaagaagtagggaagagggatgggaagaggcaaagagataagcccttacgtttcttcg

SEQ ID NO: 15245 - DNA, 201 bp, Homo sapiens
gaggcaggagaatggcgtgaacccgggaggtggggcttgcagtgagccgagatcgcgccactgcactccagcctgggtgacagagtgagactccgtctcaaaaaaaaaaaaaacaaaaaaaacaaacccaaaacccaaacaaaaagaagtagggaagagggatgggaagaggcaaagagataagcccttacgtttcttcga

SEQ ID NO: 15246 - DNA, 201 bp, Homo sapiens
atataccttagattttcacaaataatacaatttagcaaacatttttcgagagctcagataccatccattcatctgtttgttcaacaaatactgattgggargacaagaataacataaaaatgaatgaggtagagcatacttgtcctatataaatccagactttctataaagctcaagtaactaggataatgtgaaattggg

SEQ ID NO: 15247 - DNA, 201 bp, Homo sapiens
atcccttctcctcccctctccccactcccggtgctgaggctgcatcagaccctggtagggaggggtgccgcagccactaacggtatgtgctctccttcagscctctcccttcggagggacgtggtcttgcccactgtccttttgcctccatgctgaggtcggtgctgtatttcagagggagggtccttttcattctccttg

SEQ ID NO: 15248 - DNA, 201 bp, Homo sapiens
gctgctcccaagaacggaagaagaaatagataagggccttggattccaacacagtttcttccacatcccctgacttgggctagtgggcagaggaatgcctrtgctggggccaggggttcagggaggagtggatggcacagtgctgtcatcccttctcctcccctctccccactcccggtgctgaggctgcatcagaccctg

SEQ ID NO: 15249 - DNA, 201 bp, Homo sapiens
gttttgagaccccattgctttcaggctgccccttctgggtctgttactcggcccctactcacatttccttgggttggagcaacagtcccagagagggccayggtgggagctgcgccctccttaaaagatgactttacataaaatgttgatcttcagcctgtgtggcctgttctggtgtgatccccatcctcagcactgcta

SEQ ID NO: 15250 - DNA, 201 bp, Homo sapiens
aaggggttgaagaaccagctggagcagaagtctgccctttaggaaaggctttcccattttccttctcttcctgcagagagtcctgtgttcccagccagtcwctattctctcacctaacactctcaaggagatagaagcttcagctgaagtctcacccaccacgatgacctcccccatctcaccccacttcacaggtgagac

SEQ ID NO: 15251 - DNA, 201 bp, Homo sapiens
gcagggataaccctcaccccgttcctaatttgccagtctgggtctgtctgtcctggtctcggagcgggttttggggttcggtccttccatcatccgttcgyccgctccgcagtgctgctcctgcctctggcacctgccgcagcccaggattcgactcaggcctccactccaggcagccctctctctcctaccgaatacgaa

SEQ ID NO: 15252 - DNA, 201 bp, Homo sapiens
cccgcggccggacctttgcctctgtctctagactccccccgccctggtcagcagggataaccctcaccccgttcctaatttgccagtctgggtctgtctgycctggtctcggagcgggttttggggttcggtccttccatcatccgttcgcccgctccgcagtgctgctcctgcctctggcacctgccgcagcccaggatt

SEQ ID NO: 15253 - DNA, 201 bp, Homo sapiens
gcctcctgcagctgccccacacagaggccttgctggtgctgtgctattcgatcgtggagaatacctgcatcataacccccacagccaaggcctggaagtayatggaggaggagatccttggtttcgggaagtcggtatgccagccatactgtctaatggatacatgccactgggcatcctcttggccaggcactgtgctag

SEQ ID NO: 15254 - DNA, 201 bp, Homo sapiens
cagaatggtagggccaagcctagctccagacaccccagagccctggagaagccaagactgagggagaaagcctgagggaggagcgccccagtccccagggrccggcctggtgcagagctgcagctgatgttcccctctgtgcagccccaccctctgcctcgctgagctccctgctgcgagggcctcgggtgcaagggggag

SEQ ID NO: 15255 - DNA, 201 bp, Homo sapiens
catggaggcctggtgggggaggggaggggaggcgtgtgtgtcggccggggccactaggcgctcactgttctctccctccgcgcagccgagccacatcgctsagacaccatggggaaggtgaaggtcggagtcaacgggtgagttcgcgggtggctggggggccctgggctgcgaccgcccccgaaccgcgtctacgagcct

SEQ ID NO: 15256 - DNA, 201 bp, Homo sapiens; identical to SEQ ID NO: 2301

SEQ ID NO: 15257 - DNA, 201 bp, Homo sapiens; identical to SEQ ID NO: 2303

SEQ ID NO: 15258 - DNA, 201 bp, Homo sapiens
cccgcagaggtgtggtggctgtggcatggtgccaagccgggagaagctgagtcatgggtagttggaaaaggacatttccaccgcaaaatggcccctctggyggtggccccttcctgcagcgccggctcacctcacggccccgcccttcccctgccagcctagcgttgacccgaccccaaaggccaggctgtaaatgtcacc

SEQ ID NO: 15259 - DNA, 201 bp, Homo sapiens
tgcaaaggcaggacccgggttcataactgtctgcttctctgctgtaggctcatttgcaggggggagccaaaagggtcatcatctctgccccctctgctgaygcccccatgttcgtcatgggtgtgaaccatgagaagtatgacaacagcctcaagatcatcaggtgaggaaggcagggcccgtggagaagcggccagcctg

SEQ ID NO: 15260 - DNA, 201 bp, Homo sapiens
tcgtggagtccactggcgtcttcaccaccatggagaaggctggggtgagtgcaggagggcccgcgggaggggaagctgactcagccctgcaaaggcaggasccgggttcataactgtctgcttctctgctgtaggctcatttgcaggggggagccaaaagggtcatcatctctgccccctctgctgatgcccccatgttcg

SEQ ID NO: 15261 - DNA, 201 bp, Homo sapiens
cagggtctggcgccctctggtggctggctcagaaaaagggccctgacaactcttttcatcttctaggtatgacaacgaatttggctacagcaacagggtgrtggacctcatggcccacatggcctccaaggagtaagacccctggaccaccagccccagcaagagcacaagaggaagagagagaccctcactgctggggag

SEQ ID NO: 15262 - DNA, 201 bp, Homo sapiens
cctgacaactcttttcatcttctaggtatgacaacgaatttggctacagcaacagggtggtggacctcatggcccacatggcctccaaggagtaagacccytggaccaccagccccagcaagagcacaagaggaagagagagaccctcactgctggggagtccctgccacactcagtcccccaccacactgaatctcccct

SEQ ID NO: 15263 - DNA, 201 bp, Homo sapiens
aggaagagagagaccctcactgctggggagtccctgccacactcagtcccccaccacactgaatctcccctcctcacagttgccatgtagaccccttgaaraggggaggggcctagggagccgcaccttgtcatgtaccatcaataaagtaccctgtgctcaaccagttacttgtcctgtcttattctagggtctggggca

SEQ ID NO: 15264 - DNA, 201 bp, Homo sapiens
gtggtgaagcaggcgtcggagggccccctcaagggcatcctgggctacactgagcaccaggtggtctcctctgacttcaacagcgacacccactcctccayctttgacgctggggctggcattgccctcaacgaccactttgtcaagctcatttcctggtatgtggctggggccagagactggctcttaaaaagtgcaggg

SEQ ID NO: 15265 - DNA, 201 bp, Homo sapiens
gccctctggtggctggctcagaaaaagggccctgacaactcttttcatcttctaggtatgacaacgaatttggctacagcaacagggtggtggacctcatkgcccacatggcctccaaggagtaagacccctggaccaccagccccagcaagagcacaagaggaagagagagaccctcactgctggggagtccctgccaca

SEQ ID NO: 15266 - DNA, 201 bp, Homo sapiens
ccacaaggtgagaggcagagaggcactgagggctggctgcagagggaatctgtaggtcacctcatctccttaacatggctctctctgtcttacagggcaaygcaatctataatctccttccagatatcatcagccgcctgtcagaccccgagctgggggtggaggaagagcctttccacaccatcatgaagtattgctccc

SEQ ID NO: 15267 - DNA, 201 bp, Homo sapiens
ctagcctccgggaccctgctcagcaagtgcggaaaacagcggggctggtgatgacccacctgatcctcaaggacatggtgaaggtgaaggggcaggtcagygagatggcggtgctgctcatcgaccccgagcctcagattgctgccctggccaagaacttcttcaatgagctctcccacaaggtgagaggcagagaggcac

SEQ ID NO: 15268 - DNA, 201 bp, Homo sapiens
tgcttgacaattttgactgttttggagacaaactgtcagatgagtccatcttcagtgcttttttgtcagttgtgggcaagctgcgacgtggggccaagcckgagggcaaggtgagcagcacaggacacttcaatgcctgttgggttctgggctggctaagacatctgccggccctgggcagcatacggctcttgcagtcac

SEQ ID NO: 15269 - DNA, 201 bp, Homo sapiens
agaggcagagaggcactgagggctggctgcagagggaatctgtaggtcacctcatctccttaacatggctctctctgtcttacagggcaatgcaatctatratctccttccagatatcatcagccgcctgtcagaccccgagctgggggtggaggaagagcctttccacaccatcatgaagtattgctccccgggccctgg

SEQ ID NO: 15270 - DNA, 201 bp, Homo sapiens
ctcatcttcccttcctgcagacagctcctctcctacatcaccaaggacaagcagacagagagcctggtggaaaagctgtgtcagcggttccgcacatccckgtatgctgccctccctgagggttctttgtgctgagcggggccctgcaggggagaaaggcccatccctcaccccttcaatgcccccactgtggcatccctg

SEQ ID NO: 15271 - DNA, 201 bp, Homo sapiens
ccctcacagagcgaggcctccgtaagatgcttgacaattttgactgttttggagacaaactgtcagatgagtccatcttcagtgcttttttgtcagttgtrggcaagctgcgacgtggggccaagcctgagggcaaggtgagcagcacaggacacttcaatgcctgttgggttctgggctggctaagacatctgccggccc

SEQ ID NO: 15272 - DNA, 201 bp, Homo sapiens
ccttcagttgcagccatgccttaagccaggccagcctggcagggaagctcaagggagataaaattcaacctcttgggccctcctgggggtaaggagatgcygcattcgccctcttaatggggaggtggcctagggctgctcacatattctggaggagcctcccctcctcatgccttcttgcctcttgtctcttagatttgg

SEQ ID NO: 15273 - DNA, 201 bp, Homo sapiens
aagcttcgggcctgtcataccagaggtttggatggaatcaaggagcttgagattggccaagcaggtagccagagagcgccatcagccaagaaaccatccastggtacgtaaggcagcctgtgcgggcgagaccagactgggccctcccctcctgcagtgatttgtttcttcttcttttttaaatcacgttttcctgccttt

SEQ ID NO: 15274 - DNA, 201 bp, Homo sapiens
atttctcctccgggtgatgcttttcctagattattctctggtaaatcaaagaagtgggtttatggaggtcctcttgtgtcccctccccgcagaggtgtggkggctgtggcatggtgccaagccgggagaagctgagtcatgggtagttggaaaaggacatttccaccgcaaaatggcccctctggtggtggccccttcctg

SEQ ID NO: 15275 - DNA, 201 bp, Homo sapiens
ggggagtccctgccacactcagtcccccaccacactgaatctcccctcctcacagttgccatgtagaccccttgaagaggggaggggcctagggagccgcmccttgtcatgtaccatcaataaagtaccctgtgctcaaccagttacttgtcctgtcttattctagggtctggggcagaggggagggaagctgggcttgtg

SEQ ID NO: 15276 - DNA, 201 bp, Homo sapiens
tagattattctctggtaaatcaaagaagtgggtttatggaggtcctcttgtgtcccctccccgcagaggtgtggtggctgtggcatggtgccaagccgggrgaagctgagtcatgggtagttggaaaaggacatttccaccgcaaaatggcccctctggtggtggccccttcctgcagcgccggctcacctcacggccccg

SEQ ID NO: 15277 - DNA, 201 bp, Homo sapiens
aggtcagcgctcggacctggcggagccccgcacccaggctgtggcgccctgtgcagctccgcccttgcggcgccatctgcccggagcctccttcccctagwccccagaaacaggaggtccctactcccgcccgagatcccgacccggacccctaggtgggggacgctttctttcctttcgcgctctgcggggtcacgtgtc

SEQ ID NO: 15278 - DNA, 201 bp, Homo sapiens
cagagcatgggataattgattcctgctgagggccttttctaccagtgttagggtgtagcccggaggtctcggtccccatgacccgcaattccattcctagyctccgggaccctgctcagcaagtgcggaaaacagcggggctggtgatgacccacctgatcctcaaggacatggtgaaggtgaaggggcaggtcagcgaga

SEQ ID NO: 15279 - DNA, 201 bp, Homo sapiens
acctgccaaatatgatgacatcaagaaggtggtgaagcaggcgtcggagggccccctcaagggcatcctgggctacactgagcaccaggtggtctcctctkacttcaacagcgacacccactcctccacctttgacgctggggctggcattgccctcaacgaccactttgtcaagctcatttcctggtatgtggctggggc

SEQ ID NO: 15280 - DNA, 201 bp, Homo sapiens
ggtgggcccgggcggcctccgcattgcaggggcgggcggaggacgtgatgcggcgcgggctgggcatggaggcctggtgggggaggggaggggaggcgtgkgtgtcggccggggccactaggcgctcactgttctctccctccgcgcagccgagccacatcgctcagacaccatggggaaggtgaaggtcggagtcaacgg

SEQ ID NO: 15281 - DNA, 201 bp, Homo sapiens
ggtggctggggggccctgggctgcgaccgcccccgaaccgcgtctacgagccttgcgggctccgggtctttgcagtcgtatgggggcagggtagctgttcyccgcaaggagagctcaaggtcagcgctcggacctggcggagccccgcacccaggctgtggcgccctgtgcagctccgcccttgcggcgccatctgcccgg

SEQ ID NO: 15282 - DNA, 201 bp, Homo sapiens
tgaagcaggcgtcggagggccccctcaagggcatcctgggctacactgagcaccaggtggtctcctctgacttcaacagcgacacccactcctccaccttygacgctggggctggcattgccctcaacgaccactttgtcaagctcatttcctggtatgtggctggggccagagactggctcttaaaaagtgcagggtctg

SEQ ID NO: 15283 - DNA, 201 bp, Homo sapiens
gccccagcaagagcacaagaggaagagagagaccctcactgctggggagtccctgccacactcagtcccccaccacactgaatctcccctcctcacagttkccatgtagaccccttgaagaggggaggggcctagggagccgcaccttgtcatgtaccatcaataaagtaccctgtgctcaaccagttacttgtcctgtct

SEQ ID NO: 15284 - DNA, 201 bp, Homo sapiens; identical to SEQ ID NO: 2311

SEQ ID NO: 15285 - DNA, 201 bp, Homo sapiens; identical to SEQ ID NO: 2312

SEQ ID NO: 15286 - DNA, 201 bp, Homo sapiens
ttgtggtctgggctgtaacagacctcagagctcccatgggctttcctgctgctgtgtgacttacatcatcatggattaccaataataggatttgccactcrgaagctggggcgatacttattcaaaactcacaacgtattttcttacagagaaatatggcttcagtttttcattacttcctgttagttctggtctttctgg

SEQ ID NO: 15287 - DNA, 201 bp, Homo sapiens; identical to SEQ ID NO: 2343

SEQ ID NO: 15288 - DNA, 201 bp, Homo sapiens
tcctgcaaatatttctggcttggatggaaagcctggagtgtaatcagcttagctggtgacccatttcccccctcactggttagctaagcggattttctttsctgaggccttttgtagggtacaatgtatatcatgagtcttaaaggaactcatggaatttcaatattcaactggaagtgccctagttaatagagatgtaga

SEQ ID NO: 15289 - DNA, 201 bp, Homo sapiens
gtctgcttactccgggcccctctccaggtccccgtcatggcttggactctggtgtgggtgtccggtgataacaggcagaactggaggcctcgcgaagggargtagcggtgggagatcccagacccggcaggatccttgctcaactatccctcatttctgccagcaggacagtagtgtgcaacgaccccgacatgaccctgc

SEQ ID NO: 15290 - DNA, 201 bp, Homo sapiens; identical to SEQ ID NO: 2349

SEQ ID NO: 15291 - DNA, 201 bp, Homo sapiens
ctggagtgtaatcagcttagctggtgacccatttcccccctcactggttagctaagcggattttctttgctgaggccttttgtagggtacaatgtatatcrtgagtcttaaaggaactcatggaatttcaatattcaactggaagtgccctagttaatagagatgtagacttttcggatcttaaagagtttgtcagtggga

SEQ ID NO: 15292 - DNA, 201 bp, Homo sapiens; identical to SEQ ID NO: 2351

SEQ ID NO: 15293 - DNA, 201 bp, Homo sapiens; identical to SEQ ID NO: 2352

SEQ ID NO: 15294 - DNA, 201 bp, Homo sapiens
cacccaatcctagcactttgggaggctgaggcaggaggattgctggagtctaggagttaccagcatgggcaccatagtgagaccttgtcgcaaaaaaaaaatatatatatatattcctaggcttggtggcatgtgcctgtggtcccagctactcaggagctgaggtgggaggatcacttgagcctgggagttccaggctgg

SEQ ID NO: 15295 - DNA, 201 bp, Homo sapiens
ttcttattttgcatataagtaagctgaggctctgagaggctaaatgctacattacacagctcatacatggaggagctggggttccagcacaatctagctggatcacctttgcaaaattccagggcccttaagaacatagtgggttggctgggggctcacacccaatcctagcactttgggaggctgaggcaggaggattgc

SEQ ID NO: 15296 - DNA, 201 bp, Homo sapiens
tcagaacccactgggcccccgctgcaccccaggttctgcctggctcaccttccaccagtagcaccatccccacagccagcacctcgagctccccgaagccrgtgggcagggcactggtctctgccatcctcactctccctcactgccagtggcccagctgtctctggcttcccacagccaggccctcccttttaaagggcc

SEQ ID NO: 15297 - DNA, 201 bp, Homo sapiens
agctgatgaggctcccgcaggagctcatcgtctcctgggctcacctggagaccggtatctttcctcccggccaccaccccaggcgggtcctaggtaagggkcggcaaccttcacctggggtcttaggcaagttaccacgcttccctgagtttcgattatttggaaaattgaaatcataccttccttccaggtttgagcaaa

SEQ ID NO: 15298 - DNA, 201 bp, Homo sapiens
acagggatgctgcactgagaacctagactggggagggcaaagcagctccccaaatggggatttggcagggccagagggaagttgtctaagcaaagctgggyttccacctgtctgagttgagtttgacaggggcttcccagaggtgagacaaatcactgtgacaacagattcaacaatgacagtggctcttgacctgtccta

SEQ ID NO: 15299 - DNA, 201 bp, Homo sapiens
ggccggagtggccttcagccagcttgaactgaggaagtgccagggcccagagctccatccaggagtggccagcatcaggtcccttttgggtggcacagcaytgctacgctgtggagctactggagtccctgggcccgagatgagctggaggagggccaatggcaggccccttaacggtacaggtatgtgagctacagggat

SEQ ID NO: 15300 - DNA, 201 bp, Homo sapiens
gctgactctgaatgaggacctgcctgtccttccagaggggaaggggtgctgggcctgaggacgttgagtatctatctgaatatcttgtcttcttttttacycctgcagggctacaggacaacccctgggcatgtgactgccgactctatgacctggttcatcttttggatggctgggccccaaacttggccttcattgaga

SEQ ID NO: 15301 - DNA, 201 bp, Homo sapiens
cttgaactcctgacctcaggtgatccacccgcctccacctcccaaagtgctgggattacaggcgtgagccactgtgcccggccaaacgaacacttctaacrcatatttgcaaagcaacagtgcacaacgcgatcatggggtttattaatgctgttcattcttagtgcactgtgggtgctgcgggctgttatgggtcgtaac

SEQ ID NO: 15302 - DNA, 201 bp, Homo sapiens
catgcattacctcatttaaaccccataaccaccttgtggggtctatttgatggcaaaactgaggaaaagagaggttacctaatgtactcaaggacacacarccagcaagcaaagagcccaggtgtgaatccagctgtggggctgccaagtcctggctcttaaacaacttgatcatcgatcgcatggctccgcagaggtggg

SEQ ID NO: 15303 - DNA, 201 bp, Homo sapiens
cactgggcccccgctgcaccccaggttctgcctggctcaccttccaccagtagcaccatccccacagccagcacctcgagctccccgaagccagtgggcarggcactggtctctgccatcctcactctccctcactgccagtggcccagctgtctctggcttcccacagccaggccctcccttttaaagggccatcccatg

SEQ ID NO: 15304 - DNA, 201 bp, Homo sapiens
caatcacctgtctttctctcacctacatccagaccttcctccttgcaatacccaaacctgtattactttttttgagacagggtcttgctctgtcacccagsctggagtgcagtggcacaatcatagctcactgtagcttccaactcctaggctcaagccaccttcccacctcagccttctgagtagctgggactacaagca

SEQ ID NO: 15305 - DNA, 201 bp, Homo sapiens
ctaacctgggcctctcagagagcccagcctttatgtctgagctgttgtatcgtgaagtgtgtgcctgtgggcactggggttgcctgggaggagctgggctrtgcatctgaatggatttgtgcccatgctgtttgtcccagtttgcctctggttttaccccacccggagttgtgctggaggtttgagctgtggtgtaggctt

SEQ ID NO: 15306 - DNA, 201 bp, Homo sapiens
agctccactgtagcccaagtgtccaaggcatcaactcatatgaagtgtaagggtcctgtccccagtagaagccaggctgagccctgaacagcctgctgttyccagcctgggcagtgtcactggagtgacaaaaagcctcccaccacccgtagaaggcatagggctgaaagccacacagcatcattgacaaaaccggtcctg

SEQ ID NO: 15307 - DNA, 201 bp, Homo sapiens; identical to SEQ ID NO: 2356

SEQ ID NO: 15308 - DNA, 201 bp, Homo sapiens
cctttgtgaagccagaatggagccctgtctcattcatttcagccccattgcacaggattaaggtcggggaatccaaatggtgtgtggctgagagcctaatkggaaaagagttgcataaccaggggaggggagcaggaggagggatttgagccgcagctgttcccaacaagcctggtgcctgtgtgtgtgtcctcaggctca

SEQ ID NO: 15309 - DNA, 201 bp, Homo sapiens
gtcggggaatccaaatggtgtgtggctgagagcctaattggaaaagagttgcataaccaggggaggggagcaggaggagggatttgagccgcagctgttcycaacaagcctggtgcctgtgtgtgtgtcctcaggctcacatgagtatactccaaagcgctggggaaaggatgaggcttgggaagtcgcctgctgtcagag

SEQ ID NO: 15310 - DNA, 201 bp, Homo sapiens
atgcaatgcctgttatgttcttagttcagaactggtatactgccacttctgtccatattctatctgccaaagcaagtctcatggccaaacccaagtttgayggggcaagtaaggacacttctcccctggaggtgatggtagagcaaggaatatgtgctgaacagtgatttaatctgcattgcccaggattacacagctagg

SEQ ID NO: 15311 - DNA, 201 bp, Homo sapiens
aacacttattttcacactcacaggcctgtgggttgattagggtggctctgctctgtgtgtttcatttggagcctgggctggagagtagcagtgggtacctrgggcaggtttctctcgtggtgaggttgaatgataatagaggaatgattgttcatgcaatgcctgttatgttcttagttcagaactggtatactgccactt

SEQ ID NO: 15312 - DNA, 201 bp, Homo sapiens; identical to SEQ ID NO: 2346

SEQ ID NO: 15313 - DNA, 201 bp, Homo sapiens; identical to SEQ ID NO: 2347

SEQ ID NO: 15314 - DNA, 201 bp, Homo sapiens
gggaggagttggagctggggccctgggtgaggtcttcatctcccttggcccttgaggaccagggatcctatggggtggactgtgctgcattgttttccagmaggcaagggggtgactctattcgagaggtaccaggtatctatacacatgggcccgagggtgaggcacaagtatgtcagttctaagaagtccttcctaagt

SEQ ID NO: 15315 - DNA, 201 bp, Homo sapiens; identical to SEQ ID NO: 2348

SEQ ID NO: 15316 - DNA, 201 bp, Homo sapiens; identical to SEQ ID NO: 2350

SEQ ID NO: 15317 - DNA, 201 bp, Homo sapiens
tttgggaggctgaggcaggaggattgctggagtctaggagttaccagcatgggcaccatagtgagaccttgtcgcaaaaaaaaaatatatatatatattcytaggcttggtggcatgtgcctgtggtcccagctactcaggagctgaggtgggaggatcacttgagcctgggagttccaggctggagtaagccatggtcac

SEQ ID NO: 15318 - DNA, 201 bp, Homo sapiens
ccccaaatggggatttggcagggccagagggaagttgtctaagcaaagctgggcttccacctgtctgagttgagtttgacaggggcttcccagaggtgagrcaaatcactgtgacaacagattcaacaatgacagtggctcttgacctgtcctatcatatcccaccagacactctatagagacttggggcccaccctgaga

SEQ ID NO: 15319 - DNA, 201 bp, Homo sapiens
ctggggagggcaaagcagctccccaaatggggatttggcagggccagagggaagttgtctaagcaaagctgggcttccacctgtctgagttgagtttgacrggggcttcccagaggtgagacaaatcactgtgacaacagattcaacaatgacagtggctcttgacctgtcctatcatatcccaccagacactctatagag

SEQ ID NO: 15320 - DNA, 201 bp, Homo sapiens
tcaggtcccttttgggtggcacagcactgctacgctgtggagctactggagtccctgggcccgagatgagctggaggagggccaatggcaggccccttaayggtacaggtatgtgagctacagggatgctgcactgagaacctagactggggagggcaaagcagctccccaaatggggatttggcagggccagagggaagt

SEQ ID NO: 15321 - DNA, 201 bp, Homo sapiens; identical to SEQ ID NO: 2357

SEQ ID NO: 15322 - DNA, 201 bp, Homo sapiens; identical to SEQ ID NO: 2353

SEQ ID NO: 15323 - DNA, 201 bp, Homo sapiens; identical to SEQ ID NO: 2354

SEQ ID NO: 15324 - DNA, 201 bp, Homo sapiens
cttagaattgaggacacatagtacccctcatttatatgcacatggtacccctccatctctataatgttctttgacagagtgggtacagtgatctgctttcrgctctgtaagaatgttcaattttagagtaaagacagtaggggatatagcctaggatttgattttctggccctgtcaccctgctgtttacgcccatttaag

SEQ ID NO: 15325 - DNA, 201 bp, Homo sapiens
ttactccgggcccctctccaggtccccgtcatggcttggactctggtgtgggtgtccggtgataacaggcagaactggaggcctcgcgaagggaggtagcrgtgggagatcccagacccggcaggatccttgctcaactatccctcatttctgccagcaggacagtagtgtgcaacgaccccgacatgaccctgcccccgg

SEQ ID NO: 15326 - DNA, 201 bp, Homo sapiens
agaaaagacacctcaaatgatctgagaaccagaatgagctccactgtagcccaagtgtccaaggcatcaactcatatgaagtgtaagggtcctgtccccartagaagccaggctgagccctgaacagcctgctgttcccagcctgggcagtgtcactggagtgacaaaaagcctcccaccacccgtagaaggcatagggct

SEQ ID NO: 15327 - DNA, 201 bp, Homo sapiens
cacaacgcgatcatggggtttattaatgctgttcattcttagtgcactgtgggtgctgcgggctgttatgggtcgtaacagtgtaagggtggggtcttgcmggaccgtgaagaccaaatcaccttcctgggaccattgtgaaaggctctgagagcaagacctctgcaaagggaaaagtaggtctgcttactccgggcccct

SEQ ID NO: 15328 - DNA, 201 bp, Homo sapiens; identical to SEQ ID NO: 2383

SEQ ID NO: 15329 - DNA, 201 bp, Homo sapiens
gaattgatatcttggcaatgttgagtctttctctccatgaacataaaatacttctccatttatttagttcttcattgatttccttcatcagtttgtagttktccacatatagattttgtatatattttgttagatttatacctaagtattttattttttgaatgataatgtatatggcactgtgttctcaattaaaagtcc

SEQ ID NO: 15330 - DNA, 201 bp, Homo sapiens
gaaagagtaaaagatttacctaataagtccctaaatttactaataataaagaaaattgtttatatatttaattgcgttaaaattcagaacttgtaatcatraaaaggacagtacacattgacaaggaaacacagcaaaggaaaccagcctatgctgctgctgttgtgaggataatttggtacacttacattagtttggtgt

SEQ ID NO: 15331 - DNA, 201 bp, Homo sapiens
atataaggacacaaagaagttgaaagtaaaaggactgaaaaagatattccatacaaacagtagtaaccaagatagtgccgagtggctatatttttgtcaarcaaaataaactaaagtaaaatttacaagagaaaaagaagggcattatgcattgacaaaaattttgacatagccaaataattatctgttataaaatatatg

SEQ ID NO: 15332 - DNA, 201 bp, Homo sapiens
agtttgaatctcagttttgccatttgctgtgtaatgtatgcaattatatttagcatcatatttctcacttgaaaaatgaaaataatacatttaatacttamcaggagtgtcagaaagtatattagcacttggtaatttatacaatacaatataaaagtaagaaatttttattttatttatttttattttattttcagcaat

SEQ ID NO: 15333 - DNA, 201 bp, Homo sapiens
caatggcactatctcggctcactgcaagctctgcctcctgggttcatgccattctcctgcctcagcctcccgaatagctgggaccacaggcgcctgccacygtgcccggctaattttttgtatttttagtagagacagggtttcactgtgttagccaggatgtatgtatttatttattttgagacagagtctcactctgtc

SEQ ID NO: 15334 - DNA, 201 bp, Homo sapiens
tctcaacactattgcattggggattaagtatctaacacatgaactttggagacacattcaaaccatagcagtctctaacatcaacattcttcaccagcagyacatttattacaattaataacctacattggcatattgtagcactcaaaattcataatctgatggacttccctttgtcagtgacctgacctttctccctgg

SEQ ID NO: 15335 - DNA, 201 bp, Homo sapiens
gagcatagtaagcagtaataacctggcatgttgtcatgccaggctagtaacagtaaaagtaatagtagtttcactggaaggtccaagattagtgtggaaawtccaagatgattagtgtggaaattccaagataagtgtggaaatttcaatttatcagggtttaccttttgtcccctttaagctaacaatgaaattataaaa

SEQ ID NO: 15336 - DNA, 201 bp, Homo sapiens
cagccagtttgctgcactgtgggaaatctggcccagtccaaacctctcaggctcctttgcactgtcaggggcaaaccgccaactaatggtggtcacccctccccccaggaacttagtcattccaggcacactccagactactctgctggcagcagggatctcaagccagtgggtcttagcttgcagggatccatgggagta

SEQ ID NO: 15337 - DNA, 201 bp, Homo sapiens
tattaaatttcacaggaaaggaggttaggaagaactatgtgaaaaacagacttgaacttttggcaatcacatgttgttcaggagacaaaaccaaattcaayttccaagaaagagaagcagctttgataaaaagcaggttctcagatggaattactagaaggctttatcataggtcctaggacaaactagaaatgatgaaat

SEQ ID NO: 15338 - DNA, 201 bp, Homo sapiens
tagtgctattcagacatgtgcatcaaccaggggtgaaattgggaactgtgcaatgctctactcattagttcaggtcttagcatctttagtgtgccaattaraaccatatctaggcatgcataagttgaggggcaggtgaatccaggagtttatgaataatgttcatgggtctctttctaaagtttcttcctcttcaccatc

SEQ ID NO: 15339 - DNA, 201 bp, Homo sapiens
atattgttaatgttttaatgtaacacttaagtaatatgtaatgatatctcattattttaacttgcaattctcaaaagacatatgatattaataatttgtcwtttcattattttgattatgtcttttgcaggttgaaagtttttagttttaatgaagtccagtttatcagttctttctttcatggattgtgcctttggtatt

SEQ ID NO: 15340 - DNA, 201 bp, Homo sapiens
ttatgttacattggatgcactggaaatatatatatatatagctttatatgatgctttagtaagtgaaaaaaatgacttttgccacagttagggaatatcarggttttataacttaggacttaaaagtttggagttttctcctcccaacttaaaaggtaatcaatttggagaaaaggtaattcagaggcagaaaaagatgaa

SEQ ID NO: 15341 - DNA, 201 bp, Homo sapiens
tttatttcttcattcattgggtattttgagcattttataccaaatgctttaaactgtttgtcggatagttccaacatctctgtcatgtcctccttggcttstgttttctttccccatggaagttgacattttcgtggttcttcatatactgtgtaattttggattgtaatttgaacattttgaacaaatatttagttagac

SEQ ID NO: 15342 - DNA, 201 bp, Homo sapiens
tgtttatgaaagatcagttgactatatttatctgggtctatttctttttagtctgctactctgctttctatcctttttcattaatttatttgtctattccttttttttttttttttttaagagacggagtctcactctcttgcccaggccggagtgcagtggcgcaatctcggctcactgcaagctccgcctcctgggttc

SEQ ID NO: 15343 - DNA, 201 bp, Homo sapiens
tgtagattaagctgggaagaattgatatcttggcaatgttgagtctttctctccatgaacataaaatacttctccatttatttagttcttcattgatttcmttcatcagtttgtagttttccacatatagattttgtatatattttgttagatttatacctaagtattttattttttgaatgataatgtatatggcactgt

SEQ ID NO: 15344 - DNA, 201 bp, Homo sapiens
tctgaaagcctttgtagtgctattcagacatgtgcatcaaccaggggtgaaattgggaactgtgcaatgctctactcattagttcaggtcttagcatcttyagtgtgccaattagaaccatatctaggcatgcataagttgaggggcaggtgaatccaggagtttatgaataatgttcatgggtctctttctaaagtttct

SEQ ID NO: 15345 - DNA, 201 bp, Homo sapiens
ctgttatttattttatttacatgtaagaatacataagcatataaatatatataaaagatgtatacataagcacacataattaaatatattgctactattgktattttgaacaaactgccatttgttagatcaattaagaataagaaaaatagttttattttaccttcacttattttttatattgttcctttttcatataat

SEQ ID NO: 15346 - DNA, 201 bp, Homo sapiens
caccaggcccggctacttttttgtatttttagtagagacggggtttcaccgtgttagccaggatagtctcgatctcctgactttgtgatccgcccgcctcsgcctcccaaagtgctgggattacaggcgtgagccaccgcgcccggccgaggattaacctttctcaaggttttggctattgcatgttgctgtagtttcccc

SEQ ID NO: 15347 - DNA, 201 bp, Homo sapiens
ttggcctgaaattttcttttttgttgtatctctgctaggttttggtatcaggatgatgctggtctcatataatgagttagggagaattccttctttttctrttgtttggaataatttcagaaggaatggtaccagctcctcttcgtacctctggtagaattcggcagtgcatttgtctggacatgggcttgttttggttgg

SEQ ID NO: 15348 - DNA, 201 bp, Homo sapiens
agagttctgtctgtaagcccctgaccagagctgctggaattcttgcagggatgacctgcctggtgaggagggatggctcagggtcccacctaaagaggcastctggccacaacctgccacagccagtttgctgcactgtgggaaatctggcccagtccaaacctctcaggctcctttgcactgtcaggggcaaaccgccaa

SEQ ID NO: 15349 - DNA, 201 bp, Homo sapiens
aggaggcatgggggtcagggacccacttgaaaaggcagtctttccctcagaagagctcgagcactgtgctgggagatccactgctcttttcagagctggcyggcaggaatgtttaagtctcctgaagccgtgaccacagccaccctttcccccaggtgctctgtcccagggagataagagttttatctataagcccctgac

SEQ ID NO: 15350 - DNA, 201 bp, Homo sapiens
tgctgggctctcctccttggcttcagccccctttccatgggactggatggttctcgtgcctcactggagttccaggcaccactggagtatgtaaaaactcytgcagctcagtgcctgcctaaacagccaccaatgggagtggctgtcattggtttgcccaggtttgtgcttgagacccagggccctggtggtgtaggctca

SEQ ID NO: 15351 - DNA, 201 bp, Homo sapiens
gctcgagcactgtgctgggagatccactgctcttttcagagctggctggcaggaatgtttaagtctcctgaagccgtgaccacagccaccctttcccccasgtgctctgtcccagggagataagagttttatctataagcccctgactggggctgctgcctttctttcagagatgccctgcccagagaggaggaatctaga

SEQ ID NO: 15352 - DNA, 201 bp, Homo sapiens
atgggactggatggttctcgtgcctcactggagttccaggcaccactggagtatgtaaaaactcctgcagctcagtgcctgcctaaacagccaccaatggsagtggctgtcattggtttgcccaggtttgtgcttgagacccagggccctggtggtgtaggctcatgagggaatcttctgatctgcagattgcaaaaatct

SEQ ID NO: 15353 - DNA, 201 bp, Homo sapiens
cttcctttcaataaattcttattttctatcataatattgctttgtaccgcacaaaatacaattataatttttaatagtcaaagaaattttaagttatcaarcattagtttctttcgtaaccaaaatactgttagagaagtagcttcaactttttaaaattcttacaaacaccagtttattctgttgtgatgagctgatttt

SEQ ID NO: 15354 - DNA, 201 bp, Homo sapiens
aaataccttgagacaaatgaagtaaaaatacaaatagcacgtttatggtatacactgaacatagttctaagagggaaatttatagctgtgagcagttaacwaaaaaagaagaaagatctcaaatccatagcctaactgtacactgtaaggaactaaaaaaagtaaaacaaaaatagaagtcatctttatgatttgaaagag

SEQ ID NO: 15355 - DNA, 201 bp, Homo sapiens; identical to SEQ ID NO: 2370

SEQ ID NO: 15356 - DNA, 201 bp, Homo sapiens
gcagtattcctatagttgatttataacatctcctgctaagcaaagcccactgactaattagtcaccactacacaaggaaaaacagcattatttttagaggstgaattaatgttagttttctcattttctcatcttcattctctctgctgttgaagaaatgttcagtggccaactgattctgcttcttctcttgcaggtttc

SEQ ID NO: 15357 - DNA, 201 bp, Homo sapiens
attcaaaagagcattctattaaagctaccttaatttggcgcttatttttcttaatcatgtttctgacaatcatagtgtgtggaatggttgctgctttaagyggtaagtgaactgtaatctttattcatctagagagaattatacttgtaaaaagaagaggaagaatctgaataattttgttattctttacagcttttaata

SEQ ID NO: 15358 - DNA, 201 bp, Homo sapiens; identical to SEQ ID NO: 2372

SEQ ID NO: 15359 - DNA, 201 bp, Homo sapiens; identical to SEQ ID NO: 2373

SEQ ID NO: 15360 - DNA, 201 bp, Homo sapiens
ttttattaccagtagacatgtgctacagaaaatgctaaaggaaaccttttaggctgaactgaaagtacactagacagcaattcagagcctccaaaataaasaatattcataaaagtaacaatagaggtaaatataaaacccagaattactacatgtgtcatatagtttataacttctcctatttatagctttctatattta

SEQ ID NO: 15361 - DNA, 201 bp, Homo sapiens
gaaaaaatcatgaccaaatgactctgagccacaacaaccaagatttgacaatccctgaagagcaaaataattaagttaccagagttaccacaacatggtaytcataatgtccagttctcaaaaaaaaattacaaaacatgcaaagaaaagtatggttcattcacaggaagaaaaagtaatctgacagaaactatccctgaa

SEQ ID NO: 15362 - DNA, 201 bp, Homo sapiens
ttgggaaaaaatcatgaccaaatgactctgagccacaacaaccaagatttgacaatccctgaagagcaaaataattaagttaccagagttaccacaacatrgtactcataatgtccagttctcaaaaaaaaattacaaaacatgcaaagaaaagtatggttcattcacaggaagaaaaagtaatctgacagaaactatccc

SEQ ID NO: 15363 - DNA, 201 bp, Homo sapiens
cttgaacctgggaggtggaggcctacagttagctgaaatcatgctactgtactccagcctaacagagtgagactctatctcaaaaaaataataaaataaaracaataagtcaagcaagaatgatgtcatagagattggtagactaaaaagctacagaaatctgttcctccactgagaaaactattgaactgtcaaaaactg

SEQ ID NO: 15364 - DNA, 201 bp, Homo sapiens
aaatcaaacaaggccaagagcagtggcacatgcctgtaatcccagcactttgggaggccaaggcgggtgtatcacttgaggtcaggagtttgagatcagcytggccaacatggtgaaaccccatctcaactaaaaaatacaaaaattagctgggcatggtggcatacgcctgtagttccagctactcaggaggctgaggca

SEQ ID NO: 15365 - DNA, 201 bp, Homo sapiens
gcagaattgcttgaacctgggaggtggaggcctacagttagctgaaatcatgctactgtactccagcctaacagagtgagactctatctcaaaaaaataataaaataaaaacaataagtcaagcaagaatgatgtcatagagattggtagactaaaaagctacagaaatctgttcctccactgagaaaactattgaactgt

SEQ ID NO: 15366 - DNA, 201 bp, Homo sapiens
gcagtggcgcgatctcggctcactgcaagccccgcctcctgggttcacgccattctgcctcagcctcctgagtagctgggactacaggcgcccgccaccasgcccggctacttttttgtatttttagtagagacggggtttcaccgtgttagccaggatagtctcgatctcctgactttgtgatccgcccgcctccgcctc

SEQ ID NO: 15367 - DNA, 201 bp, Homo sapiens
atagttctggccagaatcaaagattcagccctacaaggatatgttttcctgtgaaattatctaagaggtaggtttagacatctgcttttacattgattttttttttttttttttttgcataacgaaagagtaacctagcatgtattatattttacagtgaaccatctaaaattaccttaatattcgtggcaggaacaggcc

SEQ ID NO: 15368 - DNA, 201 bp, Homo sapiens
gatctcctgactttgtgatccgcccgcctccgcctcccaaagtgctgggattacaggcgtgagccaccgcgcccggccgaggattaacctttctcaaggtkttggctattgcatgttgctgtagtttcccctaccatcatcagattgcctgaggtttgaggcacatgagaatgtagacaagagggggagaaaaaataaacg

SEQ ID NO: 15369 - DNA, 201 bp, Homo sapiens
aatctcggctcactgcaagctccgcctcctgggttcacccaccattctcctgcctcagcctcctgagtagctgggactacagacacctgccaccacgcccrgctaatttttgtatttttagtagagacggggtttcaccgtgttagccaggatggtatagatctcctgacctcatgatccacctgccttggcctcccaaag

SEQ ID NO: 15370 - DNA, 201 bp, Homo sapiens
cagcagaattgcttgaacctgggaggtggaggcctacagttagctgaaatcatgctactgtactccagcctaacagagtgagactctatctcaaaaaaataataaaataaaaacaataagtcaagcaagaatgatgtcatagagattggtagactaaaaagctacagaaatctgttcctccactgagaaaactattgaact

SEQ ID NO: 15371 - DNA, 201 bp, Homo sapiens
attttgttagatttatacctaagtattttattttttgaatgataatgtatatggcactgtgttctcaattaaaagtccatttgtttatttctggcatataraaaagtgattgacttttgtgtattagccatgcattctgcaaccttacatatcagtaaccttgcatgtcagttcccaaaattgtcaattattttggatttt

SEQ ID NO: 15372 - DNA, 201 bp, Homo sapiens
acagattttaccacattgctcaggttggtcttgaactcctgagatcaaataatccagccttttgggcctcccaaagtgctgagattacagtcatgagccamtataccctgctggatctgtgcatttccaatagagtgttgttgaaatctccaactatgataatgaattcatcgatttctccttgcagttctgttaattttt

SEQ ID NO: 15373 - DNA, 201 bp, Homo sapiens
agcagaattgcttgaacctgggaggtggaggcctacagttagctgaaatcatgctactgtactccagcctaacagagtgagactctatctcaaaaaaataataaaataaaaacaataagtcaagcaagaatgatgtcatagagattggtagactaaaaagctacagaaatctgttcctccactgagaaaactattgaactg

SEQ ID NO: 15374 - DNA, 201 bp, Homo sapiens
agattttaccacattgctcaggttggtcttgaactcctgagatcaaataatccagccttttgggcctcccaaagtgctgagattacagtcatgagccaatrtaccctgctggatctgtgcatttccaatagagtgttgttgaaatctccaactatgataatgaattcatcgatttctccttgcagttctgttaatttttgc

SEQ ID NO: 15375 - DNA, 201 bp, Homo sapiens
ccaggaactggtaagaaaatagttctggccagaatcaaagattcagccctacaaggatatgttttcctgtgaaattatctaagaggtaggtttagacatcwgcttttacattgattttttttttttttttttttgcataacgaaagagtaacctagcatgtattatattttacagtgaaccatctaaaattaccttaatat

SEQ ID NO: 15376 - DNA, 201 bp, Homo sapiens
cagaattgcttgaacctgggaggtggaggcctacagttagctgaaatcatgctactgtactccagcctaacagagtgagactctatctcaaaaaaataataaaataaaaacaataagtcaagcaagaatgatgtcatagagattggtagactaaaaagctacagaaatctgttcctccactgagaaaactattgaactgtc

SEQ ID NO: 15377 - DNA, 201 bp, Homo sapiens
acttttaatttgtgtgtctttatatttaaagtgcatttcctgcagacatcatatagtttaatctctgatttttaattggtgcatttagatcattgatattaatgattattaatataggtggattaaatatctaccatatttctttctgttttctatttgttgcctttgttctttgtttctatttttgtttttcattctctt

SEQ ID NO: 15378 - DNA, 201 bp, Homo sapiens
agaattgcttgaacctgggaggtggaggcctacagttagctgaaatcatgctactgtactccagcctaacagagtgagactctatctcaaaaaaataataaaataaaaacaataagtcaagcaagaatgatgtcatagagattggtagactaaaaagctacagaaatctgttcctccactgagaaaactattgaactgtca

SEQ ID NO: 15379 - DNA, 201 bp, Homo sapiens
cttttttgttttttgatataagacaagtctactggcaacaagttatctcaatgtttctccaaaatagtggttgtttctcattcactttgaagaattttttyggctaaagaattctaagttgataaggttttttctcttaatactttaaatatttgtttccactgtcttcttgcttgcatggtttttgagaagaatgtaaat

SEQ ID NO: 15380 - DNA, 201 bp, Homo sapiens
tgaaatcatgctactgtactccagcctaacagagtgagactctatctcaaaaaaataataaaataaaaacaataagtcaagcaagaatgatgtcatagagrttggtagactaaaaagctacagaaatctgttcctccactgagaaaactattgaactgtcaaaaactgtctgaagtaactattttggaattctcgagtcta

SEQ ID NO: 15381 - DNA, 201 bp, Homo sapiens
aacatcaatgtaaagcttgctgatctctctagtgttggggggaatgttggagaaaaatatgcctatttagctaaggacaaacctagataaattaactagargtgtgaattgtatgcaagagattgtgtcagaacagggttccaataatgaacttcataagaggttttagataacctaagacattttgaaatataacacaac

SEQ ID NO: 15382 - DNA, 201 bp, Homo sapiens
gtgatagcgagtgagttttcatgatatctgatggttttataaggggcttttacccctttgttaggcacttctgtctcctgctgccatgtgaagaagaacaygtttgcttcctcttccaccattattgtaagtttcctgaggcctccccagccatgtagaattgtgagtcagttaaacttctttcctttttaaattatccag

SEQ ID NO: 15383 - DNA, 201 bp, Homo sapiens
ttaggcacttctgtctcctgctgccatgtgaagaagaacacgtttgcttcctcttccaccattattgtaagtttcctgaggcctccccagccatgtagaaytgtgagtcagttaaacttctttcctttttaaattatccagtcttgggcagttcttcatagcagtgaggatggactaatacaactgctaacattgtctaag

SEQ ID NO: 15384 - DNA, 201 bp, Homo sapiens; identical to SEQ ID NO: 2385

SEQ ID NO: 15385 - DNA, 201 bp, Homo sapiens
aattgtgagtcagttaaacttctttcctttttaaattatccagtcttgggcagttcttcatagcagtgaggatggactaatacaactgctaacattgtctragaaagatccttgttatgtggctcagaggccctccatgtattcttaactattcactctcctatccttccaagaataacactaatttgacctctacaataa

SEQ ID NO: 15386 - DNA, 201 bp, Homo sapiens
cgtagagactgtggtttagatcactcatagaaactggaggcaaaatgcatgacagtaacaatgtggagaaagacattacaccatctgaattgcctgcaaasccaggtaagaagctgggctctacagagtaagtgtgaggactggaatgggaaggtagtggtagtgatgggctcacacaggaaaggtgctgatctagtaaaa

SEQ ID NO: 15387 - DNA, 201 bp, Homo sapiens; identical to SEQ ID NO: 2397

SEQ ID NO: 15388 - DNA, 201 bp, Homo sapiens
atctcctgcaggaaggaattcaaggagagtcacagagtgtagagagaatagacagtttattgaaagctactcagttacagagtagggcatcctccaaaagyaggaggaggaatgtgctgtctttgttttaaactcttcttttataggggtttaatctatgtaaaacctaagctatgtctacatgtgggtaggctgtcagtg

SEQ ID NO: 15389 - DNA, 201 bp, Homo sapiens; identical to SEQ ID NO: 2399

SEQ ID NO: 15390 - DNA, 201 bp, Homo sapiens
tcagttttaaattatcttcttttgatatgtatgataatatagcacacctattctgtatgtattactaaacaatacaaaatcaaaaggaagaaaattatgastagttaagaatatagcatagcagcaacatttctgggagaggatgggttatgttagattaatgaatatcatctctgtgttttctgaaagaatttcctgttg

SEQ ID NO: 15391 - DNA, 201 bp, Homo sapiens
aatcaattcttttaactttggaaaatgattaaattctggagatagaatagtaagttcataagatgacaggtcatttgcatcctctagtgaaaagcgaaggrattaaataaaaataacattttgatgcttaatgtttctggcagtattatgtctgtatttaattgttaaaatgtttttcaataattttttccaggttgtctg

SEQ ID NO: 15392 - DNA, 201 bp, Homo sapiens
ttagttataaaaattcctaatagagctttgtagttatagctctggtccctaactttttttttaaattatactttaagttctgggataaatgtgcagaaccygcaggttcgttacataggtatacacgtgccatggtggtttgatgcacctatcaacccatcatctatattaggtatttctcctaatgctatccctcccgtt

SEQ ID NO: 15393 - DNA, 201 bp, Homo sapiens
cttacctcaaggttttgggaattagcttattaatgtctttagggggtcattattctgctttccacatacatttaaaattaactatcaggctacaaaagtcatatatgaattgagcttgttttgccccaaaggctgtgttctttttttattttttttatttttattttttgagatggactctcactgttgcccaggcaggag

SEQ ID NO: 15394 - DNA, 201 bp, Homo sapiens
ttacctcaaggttttgggaattagcttattaatgtctttagggggtcattattctgctttccacatacatttaaaattaactatcaggctacaaaagtcatatatgaattgagcttgttttgccccaaaggctgtgttctttttttattttttttatttttattttttgagatggactctcactgttgcccaggcaggagt

SEQ ID NO: 15395 - DNA, 201 bp, Homo sapiens; identical to SEQ ID NO: 2361

SEQ ID NO: 15396 - DNA, 201 bp, Homo sapiens; identical to SEQ ID NO: 2380

SEQ ID NO: 15397 - DNA, 201 bp, Homo sapiens
ctctctgggcctaactaaagaaactagaagactttcttcaactggaagacttcttcctccacctcaaatgcctcactttattttttttaattaattaattwatttatttatttattgttttgagacggagtctcgctgtttcgcccaggctggactgcaatggcactatctcggctcactgcaagctctgcctcctgggtt

SEQ ID NO: 15398 - DNA, 201 bp, Homo sapiens; identical to SEQ ID NO: 2362

SEQ ID NO: 15399 - DNA, 201 bp, Homo sapiens; identical to SEQ ID NO: 2364

SEQ ID NO: 15400 - DNA, 201 bp, Homo sapiens
ccataccccattattgcagggatccatgggaactgctgcccatgttcttgtaatgaattcctgcagccagggtgaacaataagcacctttttgtccaaatrtcagggttattgctgatttctgcctttgaatgctgaggggcagacacagaagtgggctatcattacatcagtcctcatcagctgaagtggcttcccaagg

SEQ ID NO: 15401 - DNA, 201 bp, Homo sapiens; identical to SEQ ID NO: 2365

SEQ ID NO: 15402 - DNA, 201 bp, Homo sapiens; identical to SEQ ID NO: 2366

SEQ ID NO: 15403 - DNA, 201 bp, Homo sapiens
agcttactgtgaacttagacatattagttagtccctcacccaaaatcatctgaaaaataaaggtaatatcagcctcattagttagttatgccaattaaataagaacacatatttaaatctcatattaatgtgtatggagcatagtaagcagtaataacctggcatgttgtcatgccaggctagtaacagtaaaagtaatag

SEQ ID NO: 15404 - DNA, 201 bp, Homo sapiens; identical to SEQ ID NO: 2367

SEQ ID NO: 15405 - DNA, 201 bp, Homo sapiens
gcttactgtgaacttagacatattagttagtccctcacccaaaatcatctgaaaaataaaggtaatatcagcctcattagttagttatgccaattaaataagaacacatatttaaatctcatattaatgtgtatggagcatagtaagcagtaataacctggcatgttgtcatgccaggctagtaacagtaaaagtaatagt

SEQ ID NO: 15406 - DNA, 201 bp, Homo sapiens; identical to SEQ ID NO: 2368

SEQ ID NO: 15407 - DNA, 201 bp, Homo sapiens
cttactgtgaacttagacatattagttagtccctcacccaaaatcatctgaaaaataaaggtaatatcagcctcattagttagttatgccaattaaataagaacacatatttaaatctcatattaatgtgtatggagcatagtaagcagtaataacctggcatgttgtcatgccaggctagtaacagtaaaagtaatagta

SEQ ID NO: 15408 - DNA, 201 bp, Homo sapiens; identical to SEQ ID NO: 2369

SEQ ID NO: 15409 - DNA, 201 bp, Homo sapiens
agtatgtaaaggacatttacaaatcaaaaaagtaacaaaggttgagtagaaacttagtagggcattctaatggaattatgttacattggatgcactggaawtatatatatatatagctttatatgatgctttagtaagtgaaaaaaatgacttttgccacagttagggaatatcaaggttttataacttaggacttaaaag

SEQ ID NO: 15410 - DNA, 201 bp, Homo sapiens
acaagaagctcttgctgctaaagagcctctgtgctcctggatcatgccagagggagcacagaagctgcacaccgttcaagcccatttttgaaaagttgttrtagcagccatagcagcaaattcccaaaatatcttgaagaaattgaaaacaagatattttttgaatgagcgtaaactcttgggaatgaattttaatttgag

SEQ ID NO: 15411 - DNA, 201 bp, Homo sapiens
tgctctactcattagttcaggtcttagcatctttagtgtgccaattagaaccatatctaggcatgcataagttgaggggcaggtgaatccaggagtttatraataatgttcatgggtctctttctaaagtttcttcctcttcaccatctgacccgtactttcaggttcccaggggcttctcctttccatcctccagctaga

SEQ ID NO: 15412 - DNA, 201 bp, Homo sapiens
gtccatttgtttatttctggcatatagaaaagtgattgacttttgtgtattagccatgcattctgcaaccttacatatcagtaaccttgcatgtcagttcmcaaaattgtcaattattttggattttctacatagatgattatgtcatctgcagagaaatacagttttatttcttactttctcatctgtataccttttatt

SEQ ID NO: 15413 - DNA, 201 bp, Homo sapiens; identical to SEQ ID NO: 2396

SEQ ID NO: 15414 - DNA, 201 bp, Homo sapiens
aagaggtttggccccactctcatggagctacagctcaactgaatggaaaggattgactttagatttcttttctttttttgaggtggagtctcactctgtcscccaggctagagtgcagtggcgcgatctcggctcactgcaagccccgcctcctgggttcacgccattctgcctcagcctcctgagtagctgggactacag

SEQ ID NO: 15415 - DNA, 201 bp, Homo sapiens; identical to SEQ ID NO: 2376

SEQ ID NO: 15416 - DNA, 201 bp, Homo sapiens; identical to SEQ ID NO: 2378

SEQ ID NO: 15417 - DNA, 201 bp, Homo sapiens
ggaattaaataaaaataacattttgatgcttaatgtttctggcagtattatgtctgtatttaattgttaaaatgtttttcaataattttttccaggttgtstgcattcaaaagagcattctattaaagctaccttaatttggcgcttatttttcttaatcatgtttctgacaatcatagtgtgtggaatggttgctgcttt

SEQ ID NO: 15418 - DNA, 201 bp, Homo sapiens
aggacatgagtagggcacatagcgtgttggtattgttttacgtggttttaagatatacttcatctaggcacttgttacatgttatatttttaatgaatgtstttagttgtatgcttatgatttgtgcacattactataaattatattttagtaaaaggtgcccttactggcatttatatacaagaaatcaacacatctgac

SEQ ID NO: 15419 - DNA, 201 bp, Homo sapiens
cttagcttgcagggatccatgggagtagaacctactgattgagactgctgggctctcctccttggcttcagccccctttccatgggactggatggttctcrtgcctcactggagttccaggcaccactggagtatgtaaaaactcctgcagctcagtgcctgcctaaacagccaccaatgggagtggctgtcattggtttg

SEQ ID NO: 15420 - DNA, 201 bp, Homo sapiens
agaaaaagatgaactctaaatgttgttaaatgacttcatttatttcttcattcattgggtattttgagcattttataccaaatgctttaaactgtttgtcrgatagttccaacatctctgtcatgtcctccttggcttgtgttttctttccccatggaagttgacattttcgtggttcttcatatactgtgtaattttgga

SEQ ID NO: 15421 - DNA, 201 bp, Homo sapiens
tattgaaatgacaaaatggtatagatagagaatgagggttatggatgggtgagtggagaagaaggggcagtatggagaaagggtggtgtggctctccgtcktgatggaagagtttcgtttcctcattgtatcaatggcattatcttagtcgtgatattatagtgtagttttttagatgttaccattgggagaaactgagta

SEQ ID NO: 15422 - DNA, 201 bp, Homo sapiens
ttggtataattttttccttaaatatttggttgaattcaccagtgagtccatcttgacatggtgctttctgttttggaaggtcaacttctgtaataaatgtwaacatatttaggtcatctatttctccatgtatgagtttagacaaattatgtctctcaagtgattgatcctctgtgtggacatagaactgtccattttagc

SEQ ID NO: 15423 - DNA, 201 bp, Homo sapiens
aagttaaagtagtctctggctttaagatagtttaagcaaacatatacaggatttaacataaatattttattttattttattttattttgagagggagtctygctctttcgcccaggccggagtgcagtggcgctatctcggctcactgcaagctctgcctcccaggtttatgccattcttctgcctcagcctcccaagtag

SEQ ID NO: 15424 - DNA, 201 bp, Homo sapiens
gcctaatttaagtgtagcacatttgtgagaaattttttttctaatgagaattaccttcagaactacattagtgatctaaggggcatgcattatagtatgtrggtctttgaacttttaaaagttaaagtagtctctggctttaagatagtttaagcaaacatatacaggatttaacataaatattttattttattttatttt

SEQ ID NO: 15425 - DNA, 201 bp, Homo sapiens
gaggcagaggttgcaatgagccgagattgtgccgctgcactctagcctgggcgacagagtgagactctgtctcaaaaaaaaaaaaaaaaaaaaaaagtacrccaaggaaaaccattataatgaatggcaagatgcacattttatcaaatttgaggctatgttcaaatacatagtctaggctgggtgcagtggctcaaggcc

SEQ ID NO: 15426 - DNA, 201 bp, Homo sapiens
gagtttgagatcagccgggccaacatggtgaaaccctgtctctattaaaaatacaaaaattagctgggcatggtggcatgtgcctgtaatcccaactgctygggaggctgaggcacgagaatcacttgaacctgggaggcagaggttgcaatgagccgagattgtgccgctgcactctagcctgggcgacagagtgagact

SEQ ID NO: 15427 - DNA, 201 bp, Homo sapiens
ctgaacactgtgtgctaggcactattttagatgattaggatatagcaatgaatgaaacaaaggtccttacctttgttttctttcacagtcgaaggaaaacrtttaaaaaaataaatgattagtatgttaaaaaggtgaaaagtgctatggaaaaaaagaaaaggtagatccggaatagtgaggctgaggccatatgacacc

SEQ ID NO: 15428 - DNA, 201 bp, Homo sapiens
tttatgaaagcaaaaatgtttttcataattagtatttgaaaagatgtgtttttcaagtaacttgcatgttaatagccttttttatgatgtggcctttgttmagtctggcagtaagaaaaagaaagtcaccaaagctgaacgattgaagctgctacaagaggaggaggagagacgactgaaagaggaaggtacaaaataaat

SEQ ID NO: 15429 - DNA, 201 bp, Homo sapiens
atataaactagcaagaaatacatagagcagcctaaatttttacagttttataatatttatttgccaaatttaaaatactaattttatttgttaaaaaactrattaaacattgataaaagtgtttattaattaaagtaccaaaaagtgatttttaaaatctgagtatttagatagaggtttttaaaagactgttctcaggtt

SEQ ID NO: 15430 - DNA, 201 bp, Homo sapiens
catttccacaagaagcaaagaagagacaatggctgggagtcatgtgtctttatagtagcatgatttataatcctttgggtatatacccagtaatgggatcrctgggtcaaatggtatttctagttctagatccttgaggaatcgccacactgtcttccacattggttgaactggttttcagtctcatcaacattagtgttc

SEQ ID NO: 15431 - DNA, 201 bp, Homo sapiens
cacatgagcctaatcaggaaagtataagtgatattattgtaactgtgagtcttttttgaaatcctgtgctttccaaaataatttccagaaaagaatagatstgccttaaaacacattgctgaatagaatcttcattttatcatagctttacctgctttatttatttatttatttgtttattttttgagtcttgctctgtca

SEQ ID NO: 15432 - DNA, 201 bp, Homo sapiens
tatcagaattgtctttaaaattgatcaattcttttgttttccaacttttagggtcccaaagcaaaaaaggtatgtagaatttttttcaaaatagatagttrtataatcacttacagtgtatgaacagaatatttacagaattataaaatatttttatagttttagtttgtagagtttactaagcttactttttagacatta

SEQ ID NO: 15433 - DNA, 201 bp, Homo sapiens
tggagaagtttagataggaaggaaaggaagttattctggtcagagggaaaagtatggagacatgaaatagccttagtaatttgggatgttttgtgatcatygtggataaattaaaaatccatgggaataagttatataaaaaacctagcatcagagctccttaacattcaacaacctttaacgtgccacaaatgtatgttt

SEQ ID NO: 15434 - DNA, 201 bp, Homo sapiens
acatatagaccaatggttcttcactttttgggagtcatagattcttccgaatgtcaagtaattacagatgcttgcacttgtggaagggcatttttagacckcttaaagtccattcagagatgcatcatactcctacccaaacctaggaaaaataaagctcatattacaaacctctgatagtatagatagtaattcaggcca

SEQ ID NO: 15435 - DNA, 201 bp, Homo sapiens
tcctccgtctcctcagattaaatcagatgtccctccactatgctcttgtcattctgtttaattattataattgttgccttaaacactaaattatgatcttsagggcaagaatttcttgagagacttcatatttaagcagagagcatagagctcatgataagggctcaatgaatgtttattgaatgaaggaaggaagaagtg

SEQ ID NO: 15436 - DNA, 201 bp, Homo sapiens
tcaaattctgaagtactggggatcagaatttcaacgtatgaattttttttcttttttttttttctttttgagactgtctcgctttgtcacctaggctgcartgcagtgtcaccatcatggcttatcgaagtctcagcctccctggttcaagcaatcttcccaactcagcctcctgaatagctgggagtacaaggcacgtgc

SEQ ID NO: 15437 - DNA, 201 bp, Homo sapiens
ttttctttttttttttgagacagagtttggctcttgttgcccaggctggagtgcaagggcgcaatctcggctcactgcaacctctgcctcctgtgttcaarcgattctcctgcctcagcctcctgagtagctgggattacaggcatgtgccaccatgcttggctaattttgtatttttagtagagacgtggtttctccatg

SEQ ID NO: 15438 - DNA, 201 bp, Homo sapiens
catagtagaaattcattcaatatttgttgaatgaatatgcgaaaccccatttaatctaccacccttaaaaacacttgggctctttccaggaaatgtttatrtacagtgtattcagtatttatacagttaaacatttcttcaagaaataccattgagtgccttctttgtttgcttctgtcagtcacttggacccatgaccaa

SEQ ID NO: 15439 - DNA, 201 bp, Homo sapiens
tctcatggagtttgcagtggcaagtgcttctttcagagtctgtgaattatttccgttttcctggtgtgttcctgcagtagttcttggagcaaaagttcatkatgtgagtctccatacactcactgttctgtctgtccaagtgggagcttcaagttagtcctgcctcatatctgccatttttcctaaatggcaatactttta

SEQ ID NO: 15440 - DNA, 201 bp, Homo sapiens
atcccccctcacactttggacactcacagtattttggctgtctcatggagtttgcagtggcaagtgcttctttcagagtctgtgaattatttccgttttcytggtgtgttcctgcagtagttcttggagcaaaagttcatgatgtgagtctccatacactcactgttctgtctgtccaagtgggagcttcaagttagtcct

SEQ ID NO: 15441 - DNA, 201 bp, Homo sapiens
tggtgtgatctcagctcactgcagcctctgcctcctgggttccagtgattctcctgcttcagcctcctggatagctggaattacgggcaaatgccaccatrcccagctattttttgtatttttagtagagacagagtttcaccatttggcccggctggtctccacctcctgatctaaggtgatccacccgtcttggcctcc

SEQ ID NO: 15442 - DNA, 201 bp, Homo sapiens
tttaataaactcttatatagtgcttaatctatgccaagctttggaaatattggctttctgagttctcataataacactaggagataggtactaaaaacccmatttttccaatgaggaaattgaggcaataacttgcccaagaccctactgctagttgagaggtggccaggattgaagccctgcattcttgtttgagtccat

SEQ ID NO: 15443 - DNA, 201 bp, Homo sapiens
agggttccttttaaagttgatttccaattttattccctgtggtctgagagaatactgaatataattttgattttcttaaatttatttattcatttgagacygagtcttactctgttgccaggctggagtgtagtggtgtgatctcagctcactgcagcctctgcctcctgggttccagtgattctcctgcttcagcctcct

SEQ ID NO: 15444 - DNA, 201 bp, Homo sapiens
acatatgatcagagtcaaaattggaacaaaattaaagtgaagagaaatactgcttaggtataaatttgacacagatctagagtttcctagggtctcatctktttttgttgtaattaattattaacaggcacagaagtgttagattctctgaaacacaaattggatttgagattccaaggatattagcaacaagtgacattg

SEQ ID NO: 15445 - DNA, 201 bp, Homo sapiens
atcagaaataatattttgatctttctgatttcattaatttgaggcttaagatttttgggactgccatttctgctaaaaacaataaatagtgctcactacartgtatacagatagatcaaagctatcatcttaaaaacatttaagaggcaataatacaggaagaaattatcaggaaaaaacctgagtgaagacataaaccaa

SEQ ID NO: 15446 - DNA, 201 bp, Homo sapiens
tttcagtcttgctgcttgccattgatctgttcagagcttctatttatttctgttttaatctgggagagttgtatatttccaggaatctattcatctccttyaagttttctggtttgtgtgcataaaggtgttcatagtagccttgaatgatcttttgtatttctgtgctatcagttgtagtatctctcattttgtttctaa

SEQ ID NO: 15447 - DNA, 201 bp, Homo sapiens
tttttttattggtaatttttttttaattaccatttcagtcttgctgcttgccattgatctgttcagagcttctatttatttctgttttaatctgggagagktgtatatttccaggaatctattcatctcctttaagttttctggtttgtgtgcataaaggtgttcatagtagccttgaatgatcttttgtatttctgtgct

SEQ ID NO: 15448 - DNA, 201 bp, Homo sapiens
cacgtgccatggtggtttgctgtacccatcaacctgtcatctacattaggtatttctcctaatgctatccttcccctatcaccccatcccccgacaggccmtagtgtgtgatgttcccctccctgtgtccatggcttctcattgttcaactcacacttatgagtgagaacatgcagtgtttggttttctgttcttgtgtta

SEQ ID NO: 15449 - DNA, 201 bp, Homo sapiens
cttttattaacttaaggcatttcccttctatgccgattttgctgagagttgtaatcataaagagatgctggattttgtcagatgctttgtttttaattctrtgtggtatatcacatttattgacttccacatgttaaaccattcctgcatccatggtatgaaacccacttgatcatggtgaattatcttttttaaaaaatg

SEQ ID NO: 15450 - DNA, 201 bp, Homo sapiens
gtcaggtaatgcaatgcctccagatttgttctttttgcttagcttggtttggctatgtgggctcttttttggtttcatatgaattttaggattttttttttctagttccatgaagaatgatgatggtattttgatgggaattgcattgaatttgtagattgcttttggcagtatggtcattttcacaatatgattctaccc

SEQ ID NO: 15451 - DNA, 201 bp, Homo sapiens
taaaaaatgtatttattattatatactttaagttctgggatacctgtgcagaacgtgcaggtttgttgcataggtatacacgtgccatggtggtttgctgyacccatcaacctgtcatctacattaggtatttctcctaatgctatccttcccctatcaccccatcccccgacaggccctagtgtgtgatgttcccctccc

SEQ ID NO: 15452 - DNA, 201 bp, Homo sapiens
gcccaggctggaatgcaatggcgcgatctcggcttactgaaacctctgcctcccgggttcaagcgattctccttcaagcgattctcctgcctcagcctccygagtagctgggattacaggtgcatgccaccacgcccagctaatttttgtatttttagtagaaacgaggtgtcaccatgttggccaggctggtcttgacct

SEQ ID NO: 15453 - DNA, 201 bp, Homo sapiens
aatctgctaccaaaatactgaatagaagaggaattattaacaacttgcttgaatttttttttttttttttttttttttttttttttttaggtgagggaacmccttactgaagaatgtactgagaatcctaattgggcccttttaatgtttagtggtgacagagcacaaagactgaagatcaaggaagagagtgaggcattt

SEQ ID NO: 15454 - DNA, 201 bp, Homo sapiens
tcaagtgattctcccactttgacctcccaaaatgctgggattacaggagtaagccagtgcacccagccaacatatgattttttttttttttttttttttttgaggcagagtttcgctctgttgcccaggctggaatgcaatggcgcgatctcggcttactgaaacctctgcctcccgggttcaagcgattctccttcaagc

SEQ ID NO: 15455 - DNA, 201 bp, Homo sapiens
aatattggctttctgagttctcataataacactaggagataggtactaaaaacccaatttttccaatgaggaaattgaggcaataacttgcccaagacccyactgctagttgagaggtggccaggattgaagccctgcattcttgtttgagtccatactaccctacgctacgatgctgcctgtcttaattcagaaaatttc

SEQ ID NO: 15456 - DNA, 201 bp, Homo sapiens
aacctgagtgaagacataaaccaaagaagtaatggaagcactacaactgtttttgttttttgtttattttattttattttagagacaggatcttgctgtgycacccaggctggagtacagtggtgtaattacagctaactgtagcctcaacctcccaggctcaagtgatcctcccacctcagcctcctgagactacaacca

SEQ ID NO: 15457 - DNA, 201 bp, Homo sapiens
ctgttacaagaatgaggagtcagaagtagaagtaatagcaaaaacgatgagaaaaggataagttcaataacacaggagacagaagaggggagtaatcacarcaataggaaaggaagaaagcagaaagctgcagaaaagtggagttggatagcagtaacagaaggaaatggccctgtagtaaacaccaatttccaaattttc

SEQ ID NO: 15458 - DNA, 201 bp, Homo sapiens
tacagatgcttgcacttgtggaagggcatttttagacctcttaaagtccattcagagatgcatcatactcctacccaaacctaggaaaaataaagctcatrttacaaacctctgatagtatagatagtaattcaggccacagaagtaaaaatatccagagagtgtatgttgagggagaggagaaaaagggcttagcatgga

SEQ ID NO: 15459 - DNA, 201 bp, Homo sapiens
gaaaactaagcaaaacaaaactacttataaataatgctttaaaaataaaaatgtgaaagtattttagtgcttctatgtatctgaatattaaggattagaarttacttggataaagaagaacttggttattttagagctctctcaagttactggttaaagccatcatgtttttatctaagttggttaaactaggttataaaa

SEQ ID NO: 15460 - DNA, 201 bp, Homo sapiens
tacttgccactgtcacccttgcctttgaataatttatattcttatttttcttgttcccagactttgtccttcagtgcactgagtcaaagctttacactaasaggcagtcttatttgttgaatgaatgcatgaaaggctggttttatgaaagcaaaaatgtttttcataattagtatttgaaaagatgtgtttttcaagtaa

SEQ ID NO: 15461 - DNA, 201 bp, Homo sapiens
ctaagcaaaacaaaactacttataaataatgctttaaaaataaaaatgtgaaagtattttagtgcttctatgtatctgaatattaaggattagaagttacytggataaagaagaacttggttattttagagctctctcaagttactggttaaagccatcatgtttttatctaagttggttaaactaggttataaaaattca

SEQ ID NO: 15462 - DNA, 201 bp, Homo sapiens
taaaagatcactttgattgccatgtggaaaattcactgtagggggacacaagggtaaaagtaggggtaccctttaggaatccatcacagcagtgtaggttmgaagtcttcaaactgagaagtaaatcatactctgacaggtgtacaaaggttttctaaggatacaaggacacagtcttatggaaatcaatcttcagatgat

SEQ ID NO: 15463 - DNA, 201 bp, Homo sapiens
ggttaatcaggagccggtttgtagttcatggccaagtaagccatggtaaagtatttgggttttattgtgagtgtgatgggcagcctgggaaagttgtaaayagaaaagtggcatgatctgatttacatttttaaaagatcactttgattgccatgtggaaaattcactgtagggggacacaagggtaaaagtaggggtacc

SEQ ID NO: 15464 - DNA, 201 bp, Homo sapiens
tgaatatgtttgggagatgttttggaggtaaaatatatcttactgagtttttattttgagaaatgaggcatatggtgatacagtttacagagatgaacaaraatagagtgaaacagttgagagtggctgtgaaacaaagagttctgtttgggtaagtttgggggatgcaagtggaaatgacaggtaggcaaatgtgaacct

SEQ ID NO: 15465 - DNA, 201 bp, Homo sapiens
tggggttatggatcccaataaactgttttgagaaggatagcatcagcaactgggtccaaatgctgcaaagaaagcacatatgatcagagtcaaaattggarcaaaattaaagtgaagagaaatactgcttaggtataaatttgacacagatctagagtttcctagggtctcatctttttttgttgtaattaattattaaca

SEQ ID NO: 15466 - DNA, 201 bp, Homo sapiens
gtatatctatgcattggaatattatttgggcataagaaggaagtactgatgcatgatatagcatggatgaacctcaaaagcatgctaaatggaagaagccagtcacaaaagaccacattttacatgattacagttatatgaagtgtccagaagaggcaaatctacagagacagaaagtagattcatagtttccatgagcta

SEQ ID NO: 15467 - DNA, 201 bp, Homo sapiens
ttgtggaatgtatgtaaagcaatacttagagggaaatatgtagacctaaatatttatattagaagaagaaaaaaggctaaaaattaatgatcctaggtatycttctcaagaattcagaaaaagaataaaacccaaaggagaaggaaggaaataataagaacaaatatagaaggaaggagaagaaaggaaataataagaaca

SEQ ID NO: 15468 - DNA, 201 bp, Homo sapiens
ccttggggtgggtcggccctcttctcagcaatggctttccttacctggaccaggcggacaggtaggagtcccaaaccagtttctgcaaacgggagatggtyaaagctgtcacacggtatcctgatctcgaatgttgctaagcttgaaaattggtcccaacctagtaactttcagtagtgatagacgttcccactaaatttt

SEQ ID NO: 15469 - DNA, 201 bp, Homo sapiens
actgctttttgaaaagttttagtagctggttgaatagaaacttcctttaccagtatgagaatttttaaatttctttcctaagaacatactaaactgtaatytatttgaaaactgttaatctgattaattttagcacagttgttgctggtagagaattcttctgaaaagccagatttctttgaagacaatgtggtggattta

SEQ ID NO: 15470 - DNA, 201 bp, Homo sapiens
ataccatgcattgcgagatttaatctaaacaacaagattataagagtcatttaacaaataaacatagattgtgatttgcttgcagtccactgtgagacctyagatggaccttactctgactttccgtaggcccaaggagtctcccgtgcagtctgagctatttaaatgcctgtggattaatcatacagtgttcttgctact

SEQ ID NO: 15471 - DNA, 201 bp, Homo sapiens
ttttcttttttcttttttacaagtcctaagaattccttgccatattagctaaggtcagcatatcataaaacattgattatttgtctgtctaatcaagaaamaaaaatcaagttgcatgcattcatgtagataactcgggtgggggtagtgggtaattttatcctcagttggaatatccactgttcagtaatttagtaccca

SEQ ID NO: 15472 - DNA, 201 bp, Homo sapiens
tgcaattgaaaaaaagtaatattttaatagcctttctgataattgtggatattcttctttgatactgtatcaaaacttttttttttttttttttttgagamggagtctctctctgtcgcccaggctggagtgcagtggcacaatctctgctcactgcaagctccgcctcccgggttcacgccattctcctgcctcagcctc

SEQ ID NO: 15473 - DNA, 201 bp, Homo sapiens
agtaaagggggcggggcgccggccggaagagcctccgcgcggctgcgctcttttcctggagctcaagtgggcggggcctgtcgtccgggcaacccgggagmgtttgtccacacaatttctgctccgactctgcggactactgcagtggagcttgactcttaatggtgagcaaggcaaatgaggcagacaggtggaggggcg

SEQ ID NO: 15474 - DNA, 201 bp, Homo sapiens
agatatgcaattgaaaaaaagtaatattttaatagcctttctgataattgtggatattcttctttgatactgtatcaaaacttttttttttttttttttttgagacggagtctctctctgtcgcccaggctggagtgcagtggcacaatctctgctcactgcaagctccgcctcccgggttcacgccattctcctgcctca

SEQ ID NO: 15475 - DNA, 201 bp, Homo sapiens
taggaaatcaccatttttcaatccccagtgtaataactgtttcaaataaggatcctcaatggctacctaaatgattaggtgaaaagctgttgaggaatacrtaattcttctagtgccaaagtatttgacctcagattggggaaaatgtactttgcagtggggagatttggtggtcagcaccttaagcaagcgatcaagttc

SEQ ID NO: 15476 - DNA, 201 bp, Homo sapiens
ccactacatcttgaaaatattaggagtaattttaagggcttaaaaatacagtgatctattcactgagaaaaaaattatttttggttctttagaggaagccmgtttgaaatatgagaaagaagaaatggaaaggcttgaaatacagcgaattgagaaagaaaaatggcatcgacttgaagcaaaagtaaataaacattaata

SEQ ID NO: 15477 - DNA, 201 bp, Homo sapiens
gaaaagaaggtaatgtggaatgggtaggctccgtattgattaagagggggacagacttactctccactgtgagagttacccagagcatctgtgatggtccsgtaggcttccgaggcaattgggcagtgtcagtcttcagccgctaagctgagaagatctgggaaggagtcagtcagagagccttgggccagagttccaggg

SEQ ID NO: 15478 - DNA, 201 bp, Homo sapiens
agcctggccgtcaatacctccaacggttatgggggcaagggaaacaggcccttgaaaagaaggtaatgtggaatgggtaggctccgtattgattaagaggsggacagacttactctccactgtgagagttacccagagcatctgtgatggtcccgtaggcttccgaggcaattgggcagtgtcagtcttcagccgctaagc

SEQ ID NO: 15479 - DNA, 201 bp, Homo sapiens
aatcccagcactttgggaggccgaggcagggggatcacctgagatcgggagtttgagaccagcctgaccaacatggagaaaccccatctctactaaaaatrcaaaattagccaggtatggtggcaggtacctgtaatcccagccactcaagaggctgaggcaggagaatcacttgaacctgggaggcagaggttgcggtga

SEQ ID NO: 15480 - DNA, 201 bp, Homo sapiens
ggctggtcttgaactcctgacctcaggtgattcacccccctcagcctcccaaaatgctgggattacaggtgtgagctactgggcctggctgggacaaggcstttaaccattatacactatccctctttgtctcttttaaccactgttgctttaaagtttattttgtctgatgtgagaatagctacccctgctcgcttttgg

SEQ ID NO: 15481 - DNA, 201 bp, Homo sapiens
tgtcttgtttcttagatctattagtaattgtttttataaatttgggagctccagtgttaggtgcatgtatgtttaggattgtgatattttcctgttggacraggcttttttttttttttgagacggagtctcgctctgttgcccaagctggagtgcagtggcgcaatctcggctcactgcaacctctgcctcctgggttca

SEQ ID NO: 15482 - DNA, 201 bp, Homo sapiens
acaaagataatttgactttctcttttcctatttggatgccttttattgctttctcttgactgattggtatggctaggatttccagtactattgaataggartgatgagagtggacacccttttcatgttccagttcttagggggaatgctttcagcttttgcctattcagtatgatgttggctgtgggtttgtcatacata

SEQ ID NO: 15483 - DNA, 201 bp, Homo sapiens
aaggatttagaagattggagcaacatgataaacaaacctaatgaattaaacatatttagaacaccacaccaaacaagtagaggattctaagcacgcaaacrttttcccccaaaattgctagtatactatgatacaaaactattctcaaagttcagtgcatgaaaacaattcagagaatgtatcataatgaatattatattg

SEQ ID NO: 15484 - DNA, 201 bp, Homo sapiens
tcccttgctttacttttatatccagtccctcctcaagttagattgcttttaattccttatcatctctcctataagctccttctagtggccctggttgcttytgccttgggtaggtcctgatcttgtctacactggacttctagcacttcactgagcagcccattcatcaggtggctgccagaatactctttccaaatgcaa

SEQ ID NO: 15485 - DNA, 201 bp, Homo sapiens
cagtatttattaaataaatgaacaagtcacagtagatttctttgaaaactgataaaattgacaattatctgatatgtcaagaagaacaaaaggcataaatrataaatattaagaatgaaaagggagacatgactttaacaataaatgacattatttgagcaactttttatgccaatatattagaaaacttagatgaattag

SEQ ID NO: 15486 - DNA, 201 bp, Homo sapiens
aggtatgagccacctcacccaacctaagagcaactttaattcttagacaccttaggagaaactgaatggaaaaaggagatgcatatttaagtaagtaaatrtgtttgcatttttagagaatttttttaaacaattctttgtcatgttgattgaaccttatttttacccaagttactctcttaggtgattaataaagggaat

SEQ ID NO: 15487 - DNA, 201 bp, Homo sapiens
atttctgctccgactctgcggactactgcagtggagcttgactcttaatggtgagcaaggcaaatgaggcagacaggtggaggggcgaccactgattctgyttcaccagtgttaaataatgtaatcaagagccagtcatattttacagcgaagcgggtcggtttgggaaataactcataccttggggtgggtcggccctct

SEQ ID NO: 15488 - DNA, 201 bp, Homo sapiens
tatatgtggagtcgggagtagggatgtcagagggccgtgcaagtcgtttgttaactatggactctattctcagagaaaggaaagccattgcccagtgttgmgagaggagtcatgtactctgacttacaattttaagtggatccgtctgtgttgaaaatagactgaaggaggccaaagatggaggaagacttgttgggaggc

SEQ ID NO: 15489 - DNA, 201 bp, Homo sapiens
tttttcttatttaaactaggaaaacctctgcatgttatcttcaatcaaactaaaagacaagaaacacatctctattttggaaggaacctggatgactcctrttcctttcattattgctttgaaagaagctggactgaatatctttcctactagacactctcatttttatgttattataaacaataaggcaagaatgaatct

SEQ ID NO: 15490 - DNA, 201 bp, Homo sapiens
caaaacttttttttttttttttttttgagacggagtctctctctgtcgcccaggctggagtgcagtggcacaatctctgctcactgcaagctccgcctccygggttcacgccattctcctgcctcagcctcccgagtagctgggactacaggcacccgccactgcgcctggctaatgttttttgtatttttagtagagacg

SEQ ID NO: 15491 - DNA, 201 bp, Homo sapiens
cacttgatgtaaataaagtacttttaactgtgactacagtatttactgagattcaaatacaaattaaggtgagttactcttgtagctgttatgtactatcrtatcagaggtaaaccattttgatggaatactagtttgtcaaaagcaatcagtggctgctgatttatatattgaaatataagtgtcttataatgaccttaa

SEQ ID NO: 15492 - DNA, 201 bp, Homo sapiens
taattgtggatattcttctttgatactgtatcaaaacttttttttttttttttttttgagacggagtctctctctgtcgcccaggctggagtgcagtggcrcaatctctgctcactgcaagctccgcctcccgggttcacgccattctcctgcctcagcctcccgagtagctgggactacaggcacccgccactgcgcctg

SEQ ID NO: 15493 - DNA, 201 bp, Homo sapiens
taccttgattcaagatgctcatattaacatgccgtaccagtcatgggaactaagaccacttgatgtaaataaagtacttttaactgtgactacagtatttrctgagattcaaatacaaattaaggtgagttactcttgtagctgttatgtactatcgtatcagaggtaaaccattttgatggaatactagtttgtcaaaag

SEQ ID NO: 15494 - DNA, 201 bp, Homo sapiens
gcatacatgaatctgttgtatagacaagataacaggaacaaaaaaaaaaaaaattcaaaatattcaaattctacctctccttttttagtttcacttctctktttcactagaatcttttagatcagtaattctgaaatattctggtctcaggacaaaactccattactattaaaaactgaagaccctccaaggagcttatgt

SEQ ID NO: 15495 - DNA, 201 bp, Homo sapiens
tcaaataataatctgctaccaaaatactgaatagaagaggaattattaacaacttgcttgaatttttttttttttttttttttttttttttttttttaggkgagggaacaccttactgaagaatgtactgagaatcctaattgggcccttttaatgtttagtggtgacagagcacaaagactgaagatcaaggaagagagt

SEQ ID NO: 15496 - DNA, 201 bp, Homo sapiens
acagtgtgatggtttttcaaaacccagtaatggaacacatagactgtttcttttaacctttgcaattttgggggataaattgagcccttcaaataataatytgctaccaaaatactgaatagaagaggaattattaacaacttgcttgaatttttttttttttttttttttttttttttttttttaggtgagggaacacct

SEQ ID NO: 15497 - DNA, 201 bp, Homo sapiens
tgttgcatgaattaatacatgtggataagctccataatcaccaaaatataaacagtgtgatggtttttcaaaacccagtaatggaacacatagactgtttyttttaacctttgcaattttgggggataaattgagcccttcaaataataatctgctaccaaaatactgaatagaagaggaattattaacaacttgcttgaa

SEQ ID NO: 15498 - DNA, 201 bp, Homo sapiens
gagatcacttctgctacctttacggattctgcaagctggttactggggattcttgggactctctcctctgcagttctgatcctccacccctttagtgatcmggcatagtatgtggtaataggaagactcttgctgtcactacttcagccttaggaaaggtgtgctcctcccattccagttggaactcagtgtgtgtgtgaa

SEQ ID NO: 15499 - DNA, 201 bp, Homo sapiens
tgggatgttttgtgatcatcgtggataaattaaaaatccatgggaataagttatataaaaaacctagcatcagagctccttaacattcaacaacctttaaygtgccacaaatgtatgttttcagtgcatttccaggtcataccctgggagttgttctcatttccttactcacttactgaatatttatcatacgcctacctc

SEQ ID NO: 15500 - DNA, 201 bp, Homo sapiens
cattgtagcactcttcacaatagcagagacatggaatcaacctaaatgcccatcagtgacagattggataaagaaaatgtacatacccaccatggaatacyatgcagccataagaaagaatgagatcgtgtcttttgcaggaacgggtggagctgaaggctattatccttagcaaactaatgcaggaacataaaaccaaat

SEQ ID NO: 15501 - DNA, 201 bp, Homo sapiens
atgcaaatttcttcacattagattcctactgaaggccttttatgagctctcctttacccataggagacattttaaagtcttcagagtggcattcagagctstccacaatctggcccctgcatctctccagcctcagatctttacaccctcctagcatgcctcactccagctatacctgaccacttggagtgcttggaatcc

SEQ ID NO: 15502 - DNA, 201 bp, Homo sapiens
tttggagttgatttccagttttattccactttggtgtgagagagtgctggataaaatttcaattttcttaaatgtattgaggctcattttatggcctatcrtatgatctatcttggagaaagttccatgtgctgttgaatagaatgtgtattctgcagttgttggatggaatgttctgtatatacctgttaagtccatttc

SEQ ID NO: 15503 - DNA, 201 bp, Homo sapiens
ggctagccatatgcagaagattgaaactgtacctctttcttatactgtttacaaaaatcaacccaatatggatgaaagacttaaatgtaaaacccaaaatyataaaaaccctgaaagacaacccaggcaatacaatcctggacataggatgggcaaagatttcatgaaaaaggcaccaaacgcaattgcaacaaaagcaaa

SEQ ID NO: 15504 - DNA, 201 bp, Homo sapiens
ctgatcttgtctacactggacttctagcacttcactgagcagcccattcatcaggtggctgccagaatactctttccaaatgcaaatttcttcacattagrttcctactgaaggccttttatgagctctcctttacccataggagacattttaaagtcttcagagtggcattcagagctctccacaatctggcccctgcat

SEQ ID NO: 15505 - DNA, 201 bp, Homo sapiens
atatatatatgatgtggtatatatatgatgtatatatatgatgtgtgtgtatatatatgatgtgtgtatatatatgatttgtgtgtgcatgtgtgtgtgtrtatatatatatcacagtttatctacttgttgattgatgggcatttgggttggttccacgattttgcaattgtgaattgtgctgctataaacatgtgtgtg

SEQ ID NO: 15506 - DNA, 201 bp, Homo sapiens
aactattaactcctaaagtatctgtatctgccattgtctatgaacaattactttatggttatatcattatgtttctaaaaaacgagtgaaacactgggcayggtggctcatgcctgtaaatcccagcactttgggaggctgaggtgggcagatcacctgagctcaggagtttaagaccagcctgggcaacatggtgaaacc

SEQ ID NO: 15507 - DNA, 201 bp, Homo sapiens
tgtggaagtaggttgattcttgaatcaaaacttataagtaaaataattgctcacgcttttactttatttcatattatctaacatctaataagctttaaccytattaaacacaaaggaaaaaatgtaattttaaactgtcttaaatgtattggtattgaaaatttgaatcagatgctaaaagaatctaaaataatatgacgt

SEQ ID NO: 15508 - DNA, 201 bp, Homo sapiens
tctgcagctttaagattttggtgaaagtgatatgataaaaaaattatcagaaataatattttgatctttctgatttcattaatttgaggcttaagattttygggactgccatttctgctaaaaacaataaatagtgctcactacaatgtatacagatagatcaaagctatcatcttaaaaacatttaagaggcaataatac

SEQ ID NO: 15509 - DNA, 201 bp, Homo sapiens
attttctaatctgcattttctactcaagttttattttaaaaacagtatttttttttcctttgaatacttggcctgttaagaatttcagctttcactctatsaagatttaaatgattctttatttcaataaactttaacaaacaatatataatatttcttccttaaaaagctcattcaaagatcataggcagacttcttccc

SEQ ID NO: 15510 - DNA, 201 bp, Homo sapiens
agaagtgaatgaatggatgtttaaatgatgaaaagcaggccctgacttgggtctgatttgttgtgagcagcctacataaattgggcaatccaaccactatsctcctcaaagttatcctgtcttttgagagatacttaagatcctcttcattacagttgggtgtgctggagatcacttctgctacctttacggattctgcaa

SEQ ID NO: 15511 - DNA, 201 bp, Homo sapiens
caagggacatcttcctgttacaagaatgaggagtcagaagtagaagtaatagcaaaaacgatgagaaaaggataagttcaataacacaggagacagaagakgggagtaatcacagcaataggaaaggaagaaagcagaaagctgcagaaaagtggagttggatagcagtaacagaaggaaatggccctgtagtaaacacca

SEQ ID NO: 15512 - DNA, 201 bp, Homo sapiens
aatgtaatcttttttgaggatcctgtggttgtaaggtgggatgctgaaggtacagcttttataattatgtaataaaaggagggataatcataaaaaccctyaagttgaaacagaaagtgtagtgtattaactgagcttactatcttacatatttctatgccaattcaagggtcttgttttgtttgttcttaatggaaatga

SEQ ID NO: 15513 - DNA, 201 bp, Homo sapiens
ctattaactcctaaagtatctgtatctgccattgtctatgaacaattactttatggttatatcattatgtttctaaaaaacgagtgaaacactgggcatgrtggctcatgcctgtaaatcccagcactttgggaggctgaggtgggcagatcacctgagctcaggagtttaagaccagcctgggcaacatggtgaaacccc

SEQ ID NO: 15514 - DNA, 201 bp, Homo sapiens
atgtatcttttaaattttgttgtgacattttgttaatctatatataaataggatcaaactgcagtgcttattaaaaataactatataacttattcagtackatttacatttttcactgctaccagtcaactaacttgatgttgttttggtcattttaaaaagatactcaaagaaggattacagaaatacacatatcctccg

SEQ ID NO: 15515 - DNA, 201 bp, Homo sapiens
gtggtgggtgactgcttagagcgaagaatcccccaacacaaaactacttgtcagatgggcctatacttgccacagattctgaacagtgtaaaccgcctttygtaggtgtgagtagactgcagggagcaaaaatcactagatttataaagacaatcagcagctcaaaagaggaagacagagataatttgatgggatttgtta

SEQ ID NO: 15516 - DNA, 201 bp, Homo sapiens
cagattgagcaggcaggcgtcttcacataccgttattagaagtgtaaatctgtacagtccttatttggtaccatgtaaacatgcctatgattagtgatttmacttatagtaatttattattagaaaataatagaacaaaataaataaaaatgattgtgccaagattttcattgaagttttttatagtagcaaaaacagtcc

SEQ ID NO: 15517 - DNA, 201 bp, Homo sapiens
tcatggtgaattatcttttttaaaaaatgtatttattattatatactttaagttctgggatacctgtgcagaacgtgcaggtttgttgcataggtatacaygtgccatggtggtttgctgtacccatcaacctgtcatctacattaggtatttctcctaatgctatccttcccctatcaccccatcccccgacaggcccta

SEQ ID NO: 15518 - DNA, 201 bp, Homo sapiens
tggttcagtaggtgaacttagtttttctatacttatttgtagttttgtctgaactctttttaaaaaagcattttattttgggataattttagatttgcaargaaagttacaaagatggtacagagagttcccttatgccctttaccaagcttcttctaattttaacatcttacataatcatgatacttttgtatcagaatt

SEQ ID NO: 15519 - DNA, 201 bp, Homo sapiens
tacaggaacccattctagactagttatcaaaattaaggagcttgtgctagaatgtaagttgactcactgcatccttctagaagtctaacttcaaaaaagagtcaattgagctaaagagtagtacaatttttttaaaaattgacttatgtaaaggcaatgtgttatatgcaagaatatcctctttatgatgtggtactatag

SEQ ID NO: 15520 - DNA, 201 bp, Homo sapiens
gatggagccaagaaagtgagtcaaagcttcattctgaaggtcttaccatgctgaggaggtgggacttgatcctgtagtcaggggaaatctctcagcgaagytggccttcttttgagtttctattctaaatatgaaagatcaatttatacacaaagcaatttttttggtgctttcatttatctttttttaatagggaaaaaa

SEQ ID NO: 15521 - DNA, 201 bp, Homo sapiens
agatctggacagtggaaatatggaaaaagtcattaaagatgaaaatgttactctgtatgtgtgggcaaacctcaagaagaatccaaggtacccttgtgggyaatactttccctgtaggtggaaagaaagacattgagccacatcatgattgccagatagatgcctattgcatagcagcatggtgtgtttggaaaagcccat

SEQ ID NO: 15522 - DNA, 201 bp, Homo sapiens
ctattcgaaaattataaaaataatgaaagtatttgaacagaatataggaaacttattttattatctttactaagaagacctttcgtacttaccagtgcatyaaaaccaaaagcatgaacgaaaaagagattggattcaaatatttgtgtagccccataaacctcattataaaacaaagctgaaaggcaaataacagactaa

SEQ ID NO: 15523 - DNA, 201 bp, Homo sapiens
ttacaggaacccattctagactagttatcaaaattaaggagcttgtgctagaatgtaagttgactcactgcatccttctagaagtctaacttcaaaaaagagtcaattgagctaaagagtagtacaatttttttaaaaattgacttatgtaaaggcaatgtgttatatgcaagaatatcctctttatgatgtggtactata

SEQ ID NO: 15524 - DNA, 201 bp, Homo sapiens
cacaatctggcccataggaagttctgtacattcatatttagtaactttttttctcaatcatgtatcttttaaattttgttgtgacattttgttaatctatrtataaataggatcaaactgcagtgcttattaaaaataactatataacttattcagtactatttacatttttcactgctaccagtcaactaacttgatgtt

SEQ ID NO: 15525 - DNA, 201 bp, Homo sapiens
atcacttgaacctgggaggcagaggttgcggtgagctgagatcatgccattacactccagcctgggcagtaagagtgaaactccatgtcaaaaaaaaaaaataaaaataaaataaaaataaacccaaaataaaaacaaatgaacagattggaagtcttctctcatgaggtaacatgagctgaatcttttggtgtagcatgg

SEQ ID NO: 15526 - DNA, 201 bp, Homo sapiens
gggatggatgattgtggaagtaggttgattcttgaatcaaaacttataagtaaaataattgctcacgcttttactttatttcatattatctaacatctaawaagctttaaccctattaaacacaaaggaaaaaatgtaattttaaactgtcttaaatgtattggtattgaaaatttgaatcagatgctaaaagaatctaaa

SEQ ID NO: 15527 - DNA, 201 bp, Homo sapiens
acgtgccatggtggtttgctgtacccatcaacctgtcatctacattaggtatttctcctaatgctatccttcccctatcaccccatcccccgacaggcccyagtgtgtgatgttcccctccctgtgtccatggcttctcattgttcaactcacacttatgagtgagaacatgcagtgtttggttttctgttcttgtgttag

SEQ ID NO: 15528 - DNA, 201 bp, Homo sapiens
gagaatcacttgaacctgggaggcagaggttgcggtgagctgagatcatgccattacactccagcctgggcagtaagagtgaaactccatgtcaaaaaaawaaaataaaaataaaataaaaataaacccaaaataaaaacaaatgaacagattggaagtcttctctcatgaggtaacatgagctgaatcttttggtgtagc

SEQ ID NO: 15529 - DNA, 201 bp, Homo sapiens
ttatattaccctgttacttcctcagtttttggttttgtaagaaataattttataaagtaaaaattaattttcttaaaatattacactcttctctgaaaatytgacatctttagagatagcttttgaccaatttaataatcatattcctttagttagcttcttctcttttttctgttggcaagattgtcaagctacttattt

SEQ ID NO: 15530 - DNA, 201 bp, Homo sapiens
ttcttgccttccattaatagtcaattaatagttgagccactagcttcaacatcctaaagttcagcacaggaattgcttatttttatattaggtgcacaacygggcagctttgatgccatttaatttttgtatatttattatatatttcaaattcaagggaacttgccattaaatggaaacttacagtaaataatcttatat

SEQ ID NO: 15531 - DNA, 201 bp, Homo sapiens
ttaaatgtaaatagtctaaacacacaaatttaaagacagttggcatattggatataaaaacataatccaactatgtgagtgatacattcaacaacttggcrttatgctgagtggaaaaaaaacaatctcataaggtcatattctgtgtgattctctgggtataacattctgcaaatgacaaaatgatggagatggagagca

SEQ ID NO: 15532 - DNA, 201 bp, Homo sapiens
attaatcttcctaaggcaacatctaaattgtgaagcatattgtgttggcaaaggtgtgagggaatatgcacttgtacgttgctggtgggatgggagtatamattggcataatctctaaggaaggtaattggcaaaatttatcaaaattacaaatatatatataccctttaagtcctcaacaccacttacaggaatgtatcc

SEQ ID NO: 15533 - DNA, 201 bp, Homo sapiens
aaggagagatgtgaaatgggaatacatgcagtttctgtctcttggttcttggcctagttatttctagtaaaaagaatcagcttcatctttatcccaagtcytctgactcgtccttctggttcctcctagtctggggaagcacaatgcttttaaattccaggcccacagactagatgtaggtggtggcctttcctgaaaatg

SEQ ID NO: 15534 - DNA, 201 bp, Homo sapiens
aggggtaggggataagaaatttggtcagataccaagcatagacagatactaagggtgaaagatgaggaatttgatcagaaatcaagggtgggaattttcaytaaaatgacctggctggattcttgttaaaactggactaaatgagccaatgtcaagggcctactcagaaagaggactcagaggagcctgacttatgtttcg

SEQ ID NO: 15535 - DNA, 201 bp, Homo sapiens
caggccttacatttcttttgttaaatctattctaagaatttaatattttggggggatgctgttgtacatagcattttttaaacaggaagaaatacatatamattttattattacatgcacatgtgcgcatgggagtcaagcaagatataaatattcagagaaagataagatggttcatgcttgtataccatcttttggggg

SEQ ID NO: 15536 - DNA, 201 bp, Homo sapiens
aaccaggtttatcctgtggttttctgcagagtattggaaagaagcggggtaccgtgaaagggtcaggtggagagggagaaaagctctcatcttctgtaggytggggccttgatactttgttttttgtaccttgaggaggattgaacctcacacaaaatggaaatgggctgcttccagccaggatcaaagtgagcaggtgaa

SEQ ID NO: 15537 - DNA, 201 bp, Homo sapiens
cagagataaaagaaattagaaccctttcaaaagctgataaatactacagccaacaaaaacaaccaaagtataagaacaggaaaaagataccacctcagagmcaacaaacagaattctctactgagtttaaggttgaaacttctgttttctccaggtatgctcagaaatatgatacactagatagaagaagaaaaaagaaat

SEQ ID NO: 15538 - DNA, 201 bp, Homo sapiens
tggaaggctgaggcatgtgcatagcttgagcacaggattttgagaccagcctgggcaacgtgacaaaaccctatctctacaaaaaatataaaaattagctgggtgtggtggtgcatgcctgcagtcccagctttttggaaggctgaggtgggaggatcacttgagcctgggagattgaggctgcagtgagccatgatcaca

SEQ ID NO: 15539 - DNA, 201 bp, Homo sapiens
ctctgcccttgatggatcagctggctctgcctagattgataaactggcttatctgatttttggcccttccccgggaactaacttagcacaagacacccacygttgtaaaatggcagagactaaaacaaagtattgccacgtggttacacgtcatgtttccaagtacatgaaacaagatggaggcctgtagccaagtttgtt

SEQ ID NO: 15540 - DNA, 201 bp, Homo sapiens
tgatggacttacaggtctgccctttccttgcccagtggcctcactcatcactcaaaagcaggggctgctcatcccagccctccagctcagccctcctccamggggaaggtcacctggggttcaagaactgggaaatcctggtgggatccctcacaggtttcccttgtttgggcagtggtggctgccaatgacctcaagtgg

SEQ ID NO: 15541 - DNA, 201 bp, Homo sapiens
agattgataaactggcttatctgatttttggcccttccccgggaactaacttagcacaagacacccaccgttgtaaaatggcagagactaaaacaaagtaytgccacgtggttacacgtcatgtttccaagtacatgaaacaagatggaggcctgtagccaagtttgttactgaccattttgttggactggcttgaacagc

SEQ ID NO: 15542 - DNA, 201 bp, Homo sapiens
cagtgaaggccaggctgaggagttttcagatggagatgaggaacttactgggaactggagcaaagtcagttttgttatgtgttagcaaagaggttggaggyattatgtctctgccctggggacctagggactgtttttattattattattatactttaagttctagggtacatgtgcacaacgtgcaggtttgttacatat

SEQ ID NO: 15543 - DNA, 201 bp, Homo sapiens
gaagatggagccactattttgaacatgattggcacacctgccagcatgtatgtctgcagcttgattttacaggctgctctttgttagaaaatgatttgggsctgcttcttattaaaaggaaaaccttaccaaggacttctgtacccttattatctgcctaagtgagttcttcttaactcctgtatcagtgtgccccctttc

SEQ ID NO: 15544 - DNA, 201 bp, Homo sapiens
gagacagagtctcgctctgtcacccagggtggagtgcagtggcgtgatctcagctcactgcaagctctgcctcccaggttcacgccattctcctgcctcakcctcctgagtagctgggacaacaggcgcctgccaacgtgcccggctaattttttgtatttttagtagagacgggttttcaccatgttagccaggatggtc

SEQ ID NO: 15545 - DNA, 201 bp, Homo sapiens
ctgagtagctgggactacaggtgtgcaccaccaccacgcttggctaattaaaaaaaaatatttttttctatgaactctgcagagaagaaattaatttttawttatttatttatttatttatttatttatttatttagtagagatggggatctccctgtgttacccaggctagtcacgaactcctgggcccaagtgatcctc

SEQ ID NO: 15546 - DNA, 201 bp, Homo sapiens
tcatagtagttttgatttgcattttgctgatgatcattgatgtttaacaccttttcatgtacttgtttgccatttgtgtgtctgtcttttaaatttttatytatttatttattttgagacgttatctcactctgtcacccaggctggagtgcggtggagcaaattcagctcactgcgaactctgcctcccgatctcaagtg

SEQ ID NO: 15547 - DNA, 201 bp, Homo sapiens
ctcaaatgattttcctgcctcagcctcctgagtaactgggactacagatgcatgccaccatgtctagctaattaaaaaaaatttttctgggagacactagrttttgccatgttgtccaggctggtctcaaactcctgggctccagtgatcttcccacctcagcctcccaacatactgagattacaggcatgagccattgca

SEQ ID NO: 15548 - DNA, 201 bp, Homo sapiens
actacctctgacttgcctgtcctcattcagtgcatgatgggaaaggtattagatttactgctaatgaggacattcgtccggaaaagggtatgttgtacacygtgcagatatggatctaacatgggctaacactgacccctgggagctagaatgagcaactcgtgctgggggtgggggaacaagctgtcaaggtttaggagc

SEQ ID NO: 15549 - DNA, 201 bp, Homo sapiens
atgcaaagttatgaccttgattatccagagcggcgggctatcaggtgggtattgagcacaaagtactttctcttcctaatatccaggtctcatgatgcaaytggcaagaagaatttggatgctttaacctgaagaggtagcgtaagtgtagcagtatcaccggccaaactacagtcattttgtgtagattattagtctttt

SEQ ID NO: 15550 - DNA, 201 bp, Homo sapiens
ttctggaagatttttagtgactaagtgtctgctttgatcttgcttctgtttcctaaatgaatgcttttggatgttatatctataaagaacacactgaactmataagctcctagcctttaggttctttctccatccctaccttggtacacagaagaaggcagtctttaatctaagtgaaagaaagttcaggctatcttcagt

SEQ ID NO: 15551 - DNA, 201 bp, Homo sapiens
atctgaaactaagactaactacaaaagtacatattctaatactgaaaattgtaccctttgccatactgaaaagaaacaaaatatggggtacccagttttgyacccctacaaaaatggatttgtggttaagagtggcatgcagcgcattaagttggaaagtcatgattatgatctgtccagttgtttaaggcactgtgaaaa

SEQ ID NO: 15552 - DNA, 201 bp, Homo sapiens
gtgggttcaggcacaaagcatctaacaaactctgtggaaaagttggtttccttagttccagaaaaaacagaaactcttaatcaaatagaggcaattaattygggatctaaacccagagccatggcagtattggggaaggatctttccatgcaatctccattatcctctcaaaaagatgataatgtgaatatagacagacat

SEQ ID NO: 15553 - DNA, 201 bp, Homo sapiens
aagctacagacacggaggcatcgttagaagcagagaactttgcgctgccagcacagttgcatccagatcctacctgcattgccgaagagcttcctcctccmattcagccacctcttcctcttgagccagagccagctattcaaactgcctccacaaaccaagacttactggagctgcatccagccagttcactagaaactg

SEQ ID NO: 15554 - DNA, 201 bp, Homo sapiens
taggtgctcctcaccacccagacggggcggcggggcagaggcgctcctcacctcccagacggggcagccaggcagaggcgctcctcacttcccggacgtgkcggtcaggcagaggcgctcctcacatcccagacgatgggcggccgagcagaggcactcctcacatcccagacgatgggcagccaggcagtgacactcctc

SEQ ID NO: 15555 - DNA, 201 bp, Homo sapiens
tgtctgagtgctctatagaagagataaccccttcctctattgaggagcccaaggaggaccgtattgatacaatggatgagcttcagtgtttggtagaaacrgtgtcagaatatttagcagagaaggaagaggagattaatagatttggttcactttcaaaaactaaaaaatcacataaacaaaatagtactcttgatgcag

SEQ ID NO: 15556 - DNA, 201 bp, Homo sapiens
ttggacaataaccacgctactctagccacatgccatggaaagaccatggctcctccccttcgctaactcctgttaacccctgttaatgatagataaaaggkgtagaaatttgaaaaatatttaatccacaggaaggcaggaaaaagaaaacggaaaatagaaaataaaatgtcagacttaagccctaacattttaataatt

SEQ ID NO: 15557 - DNA, 201 bp, Homo sapiens
tctatgaactctgcagagaagaaattaatttttatttatttatttatttatttatttatttatttatttagtagagatggggatctccctgtgttacccasgctagtcacgaactcctgggcccaagtgatcctcccacctaggccacccaaagtgctgggcttacaggtgtaagccactatgcctggcctcattggccat

SEQ ID NO: 15558 - DNA, 201 bp, Homo sapiens
tatttatttatttatttatttagtagagatggggatctccctgtgttacccaggctagtcacgaactcctgggcccaagtgatcctcccacctaggccacycaaagtgctgggcttacaggtgtaagccactatgcctggcctcattggccatttgtatatcttctttggggaaatatttattcagatcctttgcccattt

SEQ ID NO: 15559 - DNA, 201 bp, Homo sapiens
atccagtgaaaagtcccttcagaaatccattttcttcctataggctaccactattaatactttcttgtgtatctttccagagtcagtttctgaatataagcacacacacacacacacacacacacacacacacacaccaccatcttctttttaaaacgcaaatagtagcatattctaacacattccctgtgccttgctgtt

SEQ ID NO: 15560 - DNA, 201 bp, Homo sapiens
tctgtgggtgttcctgaacagcctattctcacagtcctcttcttgcttctctgaggacaatgttggggagctgctttctgtaaggggatgaagcagtcacrggtgctcttttatcttgcagcaatacttccatgcaggaggcaatgggctgaagaaaaccttcctggagaagagcccagatctgcagtctctacgctatgc

SEQ ID NO: 15561 - DNA, 201 bp, Homo sapiens
tccagtgaaaagtcccttcagaaatccattttcttcctataggctaccactattaatactttcttgtgtatctttccagagtcagtttctgaatataagcacacacacacacacacacacacacacacacacacaccaccatcttctttttaaaacgcaaatagtagcatattctaacacattccctgtgccttgctgttt

SEQ ID NO: 15562 - DNA, 201 bp, Homo sapiens
cacacacacacacacacacacacacaccaccatcttctttttaaaacgcaaatagtagcatattctaacacattccctgtgccttgctgttttgcacttastatatcttggtgaatcatcccacatcagagcatatagacctgcagcagcagcagctcctctgccaccttgcacttcccactctccttctttgtaacaggt

SEQ ID NO: 15563 - DNA, 201 bp, Homo sapiens
ccttagacatagaattctgagaaacaaaggagactgagaaagggcaaccttaaagagagagaataagataaccaggaaagattaatggaacaaagaaaaamagagattcaaggcagaaattcttgacagtatcacatgttaaatcaagtgaattatgaaatagagctattggatttggtgattgatgacgagtatacatcc

SEQ ID NO: 15564 - DNA, 201 bp, Homo sapiens
gttgttttttttttcttgtaaatttgtttgagttcattgtagattctggatattagccctttgtcagaggagtagattgcaaaaattttctcccattctgyaggttgcctgttgactctgatggtagtttcttttgctgtgcagaagctctttagtttaattagatcccatttgtcaattttggcttttgttgctattgct

SEQ ID NO: 15565 - DNA, 201 bp, Homo sapiens
ccattagccactcttgctggtcagagccttttcaaactctacaagcttgggaaaagatagcagctgtggatggtgaccctgtgtgtggtcttccttagttscagcagacatcagagcatgcactcttttcctgctctgtggtggatgtcttcacacaactcaatcagagctttgagatcatccggaagctggaatgcccag

SEQ ID NO: 15566 - DNA, 201 bp, Homo sapiens
aagacattattcctccttcaccagaatttcaggcacaggctgaaacattcctcactggcccagagaaccttgggatagctccccatgaagaagaggctttsaaccacaaagccttccccagtgactcactgtccaactctttttcacatgctaaacagttaattgaaaaattcaatgatttagacacttgtactaactgcc

SEQ ID NO: 15567 - DNA, 201 bp, Homo sapiens
gggtttgtcatagatagctcttattattttgagatacgtcccatcagtacctaatttattgagagtttttagcatgaagggctgttcaattttgtcaaagrccttttctgcatctattgagataatcatgtggtttttgtctttggttctgtttatatgctgaattagatttattgatttgtgtatgttgaaccagtcttg

SEQ ID NO: 15568 - DNA, 201 bp, Homo sapiens
aaaatccacagtggatttgctgaccagcattactttcttcagaatgaaggtaagaaatggactggggcttgggtggtgctgggctggagacctggctacargaacgtgaagaatgagaatcattgggcagagtctgaggctacaggattcatcacctctaagcttacatttctgtgtacctgttccctgggttacttctga

SEQ ID NO: 15569 - DNA, 201 bp, Homo sapiens
aagaagcatattgagaagctaggttatcttaagaggggagtgattagaataatgaaacatgtaggaaccgaaccatttgaagaatatgggaaatttagttstagaagatttaagaggaagaggatcacgatagtacatgaagactgtttaaaaaactgtcttgtagaagttatgtcaccttttttgttgtcattccagagg

SEQ ID NO: 15570 - DNA, 201 bp, Homo sapiens
acacattgctttgaatgtgtcccagagattctggttcgttgtgtctttgttctcgttggtttcaaagaacatctttatttctgccttcatttcattatgtrcccagtagtcattcaggagcaggttgttgagtttccatgtagttgagcggttttgaatgagtttattactcctgagttctagtttgattgcactgtggtc

SEQ ID NO: 15571 - DNA, 201 bp, Homo sapiens
gatccacagaggtacttagttttagagtatggtactccagacattctgtcctcgttagacctgcagagctgagcacagtgaaagctgctctccccaccaargagggaaaacagaagccacatgcagtggaggcaggtggtgatagtggtgtgtttgccttatcaggatgtgaatggccctcagaagctcaaacaaggaact

SEQ ID NO: 15572 - DNA, 201 bp, Homo sapiens
accagcattactttcttcagaatgaaggtaagaaatggactggggcttgggtggtgctgggctggagacctggctacaggaacgtgaagaatgagaatcaytgggcagagtctgaggctacaggattcatcacctctaagcttacatttctgtgtacctgttccctgggttacttctgagagagcacatagactatggatc

SEQ ID NO: 15573 - DNA, 201 bp, Homo sapiens
gtatataatatataatatacatatattaatataatatatattaatatatgtatataatataatatattatattatatattaatatatgtatatattatatwatattatatattaatatatgtatatataatataatatatattatatataatataatatatattatgtataatataatatatatattatatatatattata

SEQ ID NO: 15574 - DNA, 201 bp, Homo sapiens
tatattgtaaggtaatttataagcattagaatgctcaggggtatccctagtagaaatgacattgaagcagatgccagacagagaactgtcatacttttccwaatttttcctgtgaagctttgagacttcagcattacagaaaagaaatccagagccctgaagtacaaaggagcttatccattatagagcttttcattttct

SEQ ID NO: 15575 - DNA, 201 bp, Homo sapiens
atatataatatacatatattaatataatatatattaatatatgtatataatataatatattatattatatattaatatatgtatatattatattatattatatattaatatatgtatatataatataatatatattatatataatataatatatattatgtataatataatatatatattatatatatattatatatattt

SEQ ID NO: 15576 - DNA, 201 bp, Homo sapiens
ggagagatgtgaaatgggaatacatgcagtttctgtctcttggttcttggcctagttatttctagtaaaaagaatcagcttcatctttatcccaagtcctmtgactcgtccttctggttcctcctagtctggggaagcacaatgcttttaaattccaggcccacagactagatgtaggtggtggcctttcctgaaaatggg

SEQ ID NO: 15577 - DNA, 201 bp, Homo sapiens
catatattaatataatatatattaatatatgtatataatataatatattatattatatattaatatatgtatatattatattatattatatattaatatawgtatatataatataatatatattatatataatataatatatattatgtataatataatatatatattatatatatattatatatattttttcttagacag

SEQ ID NO: 15578 - DNA, 201 bp, Homo sapiens
aaaggcagcagtggatgccagagatatttaggaggtaaaaagtacagggctgagtgattggatagggacagagtgcagagagggagagatccattgtctgsctggggacaggaggagacgtttagagatggaagatagaagtttagtgtttggatatgttgaatttgaactaagcatgcgatatctaggtgatacacacta

SEQ ID NO: 15579 - DNA, 201 bp, Homo sapiens
aagctccttgttgatttgtctattatcttctcacagagcagtggttatactgtaatattttaatggaatgtggaaagataacataagaacatagggaaagkaagagcacattttgccagttacaacttttgggtgaaacaacagatcccagaaagcaactgttggagaggagagcttgagacaagacctgggaaaactcct

SEQ ID NO: 15580 - DNA, 201 bp, Homo sapiens
gatatgataggctaatatagaagttcaccaagcacatagttaggcagatgagagagttagatagaaagccaaacagttataaccctatgggcctaccatgracatgtctagcacctttactgacttcatgtcctgggctctgaggatggagctagcagttgcttcctggagctccgtggcatgtctagctattttcctctt

SEQ ID NO: 15581 - DNA, 201 bp, Homo sapiens
ttcttggctggtcctatagagttacttgatgtgcttaaaattcagatagctaccattttgatagatgaatcttgtttcctgtttccttatgggtatgcggrctatactaatagcctctcctcacacacagataaagaagagaaggtggttgggggtggtaccacctgggcttggccagaacccctctgggccaacaacttg

SEQ ID NO: 15582 - DNA, 201 bp, Homo sapiens
actggggccacaggaggaactgagcaatgactggaaggacagaatttctgtgggaccttgtgcacattcttctgggctttaccaccaagtttgtttttgtytttcatatgtgtttaacccattccctttctctgctctgtctcctgcagaatcttttccattacctcacagacattcagggcagtggaggagtccgcatcc

SEQ ID NO: 15583 - DNA, 201 bp, Homo sapiens
cttattttgccaaaatgactcaaaaggcaaaaaccttctattaacctttactattacatgaaaatcctattcaaagtcaaaatttacccttgcattagttwattaatgttagccccagtttgttgaaatgaaaccttatagatgattccatctaattttaaccaatttgaccatgaggtgcaatctttacaaaccttttat

SEQ ID NO: 15584 - DNA, 201 bp, Homo sapiens
cctgttctcctacccagctagttcaagggtacttgtggaatatgtggtcactggagtgattcaccctatttggtgagtccttgggttggccccttcttttycttgggttggccccttctcttccttgggttaagccagaatggaactatctatgctgtctagttgcattggtgtcaatctccagtcttctttccttcctag

SEQ ID NO: 15585 - DNA, 201 bp, Homo sapiens
tgtaatgactctatgcaaagttatgaccttgattatccagagcggcgggctatcaggtgggtattgagcacaaagtactttctcttcctaatatccaggtytcatgatgcaactggcaagaagaatttggatgctttaacctgaagaggtagcgtaagtgtagcagtatcaccggccaaactacagtcattttgtgtagat

SEQ ID NO: 15586 - DNA, 201 bp, Homo sapiens
cctgcttatttggttcaatccatatgtttaaaagtctgaaaacaccaagacaacgttaaataaaagttttggggtttttttccccaagatatgaaaaagckaacttttttaaacctctgctcctttcccctttctttaataacaggggaccagactgtatttgtgacatttaaaagcagtttttaattatggttatgatag

SEQ ID NO: 15587 - DNA, 201 bp, Homo sapiens
atgagttgttctaatgcagggtagtgtttctgtctcaaaggtattttgttatgtgtattgttcattttactgaggttgttctagaagcagctcaaggaacmagatcatggcagtaaaagggctgtgtgttttttttcttttctttcttggcacttttcatgtaaaaaggaatgggtaagccttctaaaatacttagtggag

SEQ ID NO: 15588 - DNA, 201 bp, Homo sapiens
atacccagtaatgggattgctgggttgaatgctagctctgttttaattaaagtggagcagtatgacatacttttaaagagatagagaaggatatttgtcartggctttaatgcctacccccaaaagtatatgcttcccatagggagtgtaccaatttatactcccactagtaatgtcttaagagtggttttctctttccta

SEQ ID NO: 15589 - DNA, 201 bp, Homo sapiens
catgattactggtatgagccatcacactcggcttcaggggtatatatatattttaagacttctgtcaaacttcttaatttattttcagaaaagcttttccrgtttgtactttcagtatttgagtgtgctgtaccaacattaagtattcttattttagaaaatttttgccaatttgacagaagaatggtataccattgttta

SEQ ID NO: 15590 - DNA, 201 bp, Homo sapiens
ttgtcacctgttagggcggttgctgtgagtgacaataaaaatagaaagtactgtagtaagctatagtcaagtggctttggtcactgaagctccctcccccrgactttgccagcccttggcagtggtcagggctaacagcagatcttccctgacagtcactggtccagtctcggaaggcaggaatcacttctgcaatggcta

SEQ ID NO: 15591 - DNA, 201 bp, Homo sapiens
gcttgctttagatatgggtttccctactttgttgactcagggacttgccacatcagtagcaataacaacaggacagtgctttacagtttagtaagtacagwtctctcattttagctttatataataacattcctgtaattatctcccccactttacagatgaggaaactaattcacatagaggtcaagtgtttaatccaag

SEQ ID NO: 15592 - DNA, 201 bp, Homo sapiens
attctgccaagttgttctctgggtgctgcacctcattgcatccaaagagaatccccctgatttatttagcaagaatgttcttccaaccccgagcttcactytgggctcttgctacagcttttctcaaatcccgctagtttgcagctgttaaaagaactctctataatccgaaaataaaattctaggctgggcatgctggct

SEQ ID NO: 15593 - DNA, 201 bp, Homo sapiens
aagagctgggttctattgtacaaaaagtacaggtcctggacctcagtttggtctgtagtgtggctccacttatattccaggatatacagttagattgtaaytttcgaagaactcactgttggtgtgtaagaatcttcatccaagaaaaaagcatgtgtgtaagtttgtgtgtgcctgtgtgttcctttgtacaagtgctta

SEQ ID NO: 15594 - DNA, 201 bp, Homo sapiens
taatctgtaaattgtaaattacatactctacaacagtgttttttaaaattgtagcagtgtttgtttttgtttttgcttttgttcattagttctgaaatcarttaagtgggtgaccagcgttaggggaaaaagatacagagttttggccaggcagagtggtttacgcctgtaatcccagcactctgggaagccaaggtggga

SEQ ID NO: 15595 - DNA, 201 bp, Homo sapiens
ggcaatttcatcacagggaaaagtctagggacccagacagggatgaaagaatctagagtaggtttggggtagtgctaggagaatatcccacccaggtgagmaggtccttgggcccatatttcttcttttaattggcaggtacaagaactgcaaagccctccaagagccagccaggtggtaaaggattgtgtgaaggcctgt

SEQ ID NO: 15596 - DNA, 201 bp, Homo sapiens
ctgttccacttcagctggagattttaagatagtgagagacaggggcaagttaaatctaggcatgatgaaatgttccatccgaagcttatataggccaggcrtgggggctcacgcctgtaatcccagcactttatgggcctgaggcgggtggatcacctgagttcaggagttcatgaccagcctggccaacatggtgaaacc

SEQ ID NO: 15597 - DNA, 201 bp, Homo sapiens
tgggaccaaatagctggtgccgctccagggacagtgtgtgtttggggagggaaaggctacactgcgggcacatgtgtagtttccaggtacggattgatgaktgtgttcgacaaatggccgacatcctgggccaggttcggggcacagggaatgcatctccagacgccagggcctcagcggctcaggatgcagatagcgtac

SEQ ID NO: 15598 - DNA, 201 bp, Homo sapiens
atatattaatataatatatattaatatatgtatataatataatatattatattatatattaatatatgtatatattatattatattatatattaatatatgtatatataatataatatatattatatataatataatatatattatgtataatataatatatatattatatatatattatatatattttttcttagacaga

SEQ ID NO: 15599 - DNA, 201 bp, Homo sapiens; identical to SEQ ID NO: 2535

SEQ ID NO: 15600 - DNA, 201 bp, Homo sapiens
tttatattttaaaaaattttatttattttttaatttttatgggtacatagtaggtatttatggaatacatgagtattttgatacgggcatacaatatgtartaatcacatcaaggtaaatggggtatccatcacctcaagcatttatcatttctttgtgttacaaatattccagttatactcttttagttatttaaaaatg

SEQ ID NO: 15601 - DNA, 201 bp, Homo sapiens; identical to SEQ ID NO: 2537

SEQ ID NO: 15602 - DNA, 201 bp, Homo sapiens
ttatatattcacattagaaagtggatatactttcttttaggatatgttcttcagatgtggcctcagctgggagttggtagcagatgccaggagacgcatgyggctttttgcatgcttgagcctcagtacatcatgtttacttttgcaggtcttattgctcctcaatttatagagctgttctgaggctgtgcaatctgattt

SEQ ID NO: 15603 - DNA, 201 bp, Homo sapiens
taaaaatgtgtaataaattattgttgaccatagtcaccctattgtgctagcaaatactagatcttactcattctagataactatttttgtacgcattaacygtccctaatctcctcttacccctaactccccttcccagcctctgttaatcatccttctattctctgtctccatgaattcaattgttttaatttttagctc

SEQ ID NO: 15604 - DNA, 201 bp, Homo sapiens
ataataggaacattttcatggaacttggtaaaaaaaaaaaaagtattacagttatccctcagtatacttgggggattgcttccaggacccctgcacgtacyaaaatccgtgcatactcaaattcctcacttggccctgaggaacccacctatatgaaaacttggccctctgtatatgcaggtttcacatcctgcattttct

SEQ ID NO: 15605 - DNA, 201 bp, Homo sapiens
tgaagcgggaggatcacttcagcccaggaagttgagactgcaatgagccaagattatgccactgcactccagcctgggtgacagagtgagagcctgtctcaaaaaaaaaaaaaaaaaaaggcatagggaatagatggtttattttattttccctgttgctttccatagcaaagatctgtttcccaaaatcctggccttgag

SEQ ID NO: 15606 - DNA, 201 bp, Homo sapiens
tcaatgtcctctatttctccttctcatttttaaaatcccagaaggcataggtccccaggtcatatacttcttttgccaccttcttctacctttttgccactttttttttttgtctgagccttctatattggctcttgcattaaagcatcctaatcattctggagttccataggtagctgattcttgtttatcttataagta

SEQ ID NO: 15607 - DNA, 201 bp, Homo sapiens
ctgaggcaggggaattgcttgaacctgggagacggaggttgcggtgagccgagatcacgccactgcactccagcctggtgacagagcaagactctatctcaaaaaaaaaaaaaaaaaattagctgggcatggtggcactttcctgtaatcgcagctactcgagaggcagaggtaggagaattgcttgaacgctaggggcag

SEQ ID NO: 15608 - DNA, 201 bp, Homo sapiens
taattaatagtggatttttgattttgaaaaatgaataaaaaatattttcaattttctcctgtccttcaaagcttctgtgttttagtggattttattaaaartttataggtaattcagaagaagtggctctctttaaggacccaataggctagagtggtttattacatattgttttaagcccctttctgatctaggtctctc

SEQ ID NO: 15609 - DNA, 201 bp, Homo sapiens
gcacccgccaccgtgcccggctaattttttgtatttttagtagagacggggtttcactgtgttagccaggatggtctcgatctcctgacctcgtgattcayccacctcggcctcccaaagtgctgggattacaggcgtgagccaccgcgcccggcccctactttgtcttattattggtgatgtttagtttgatctcatggt

SEQ ID NO: 15610 - DNA, 201 bp, Homo sapiens
tgatagataccctgaagaaagtgctgttctaacatagttagagcagccccctgagggccttgggttttgcatcttaacctgggacacttgtcacctgttarggcggttgctgtgagtgacaataaaaatagaaagtactgtagtaagctatagtcaagtggctttggtcactgaagctccctcccccagactttgccagcc

SEQ ID NO: 15611 - DNA, 201 bp, Homo sapiens
gtcactttctagggtggggagtattaacccctgcttttggcaagagcctgtttgcatcaatagaaaaaagagaaggagacctgtaactttacagtgttttyggccagctcaactagagaaaaacccagtaggtaacaattagggaagcttttgatatcatcacttttggcagggaaggttttcatagtcctctgttccttt

SEQ ID NO: 15612 - DNA, 201 bp, Homo sapiens
cccatgggcagggatgtgtctccaacccaatgcctcccgactctttctactcatccaggggtggttctgtttctgttatagtttaggggactcagacacargttctctttttcttcccctttatttgtttctcaccctcagaaagagagatttgtaaaactgctggaccagctacacaactcactgaggatcgacctctct

SEQ ID NO: 15613 - DNA, 201 bp, Homo sapiens
tacatacagggtgagtgaagacacggctgtgggcaggataatagatatcaagcacggtcccagagagactgtaggccaatcttggctataaagattgaggycagggaaaactggtctgtgtcatcacatccacccaaatggccaatgctactgacacctgtggttcttttaactccagggaccatgtggtgtataaatagc

SEQ ID NO: 15614 - DNA, 201 bp, Homo sapiens
agggcttccattctcgcgtcacacaactgagggtcaaccccttgctccctgcagtaagcctgattagtgggcggagcttccttcaggatcgcaagaaagaraggaggaaggggaccccgcctcctacgtgctcgcgggggggggcggggtcggtggactgggcgtgagttaattggctggggggcggggcaccacgggttg

SEQ ID NO: 15615 - DNA, 201 bp, Homo sapiens
actcagaaaatcatttagccagtttttgctcacttcccctgagacttgttcaaaggaaagtttgtcagaacctgtgaaaattcgccaggtggaggaagatrgtttagaaaggggctctaagaaagatggtcattccttttcctttagtggaaaactaaatcttccattttttagaagtcttggtcattctgaaaagcaaca

SEQ ID NO: 15616 - DNA, 201 bp, Homo sapiens
acttcccctgagacttgttcaaaggaaagtttgtcagaacctgtgaaaattcgccaggtggaggaagatggtttagaaaggggctctaagaaagatggtcrttccttttcctttagtggaaaactaaatcttccattttttagaagtcttggtcattctgaaaagcaacaggagttaaaagagaaaggaagcatttttcct

SEQ ID NO: 15617 - DNA, 201 bp, Homo sapiens
aaacagaaacatctgggttatgggcaccctattcactttcattacctggcagatgttgcaggataattgcccagaactagcatattgatccagctttttayattgcccattcctttttgtttcttccaggcttcaggagatcaccacttgattcacaggaataagcgggattagtctaaaatgtagtcaaaaaaacttaaa

SEQ ID NO: 15618 - DNA, 201 bp, Homo sapiens
attccttttcctttagtggaaaactaaatcttccattttttagaagtcttggtcattctgaaaagcaacaggagttaaaagagaaaggaagcatttttccyttgtttaaattttctttcactgacagcaaggttactgttaatgaccagagtttacgtggctcagcagtaaccactgatgaggagagcaaaaaaaattgcc

SEQ ID NO: 15619 - DNA, 201 bp, Homo sapiens
tttttaataaaagtatttagggaaagatggctgttatgcattgttggctgtgaatcagagtctcactatagctgtggtttctgtttgcttaggatatattygtggacagcattatagcaggtgtttcatagactggagagttcattatggctctagtttaatattttcataaaaaataaaaggagtttaataaaatccctt

SEQ ID NO: 15620 - DNA, 201 bp, Homo sapiens
atcttggagtggagaacaaatccaaacagtgtcatttggtgtgacttaccatatgaatcattcaatcagttagcatttaatgaagattacttattaagagrtgatgtgtgggcagctaactcattatatggaaactctggtcctcttccaattaatgaggctaataattcactagaagaattacccattgacttaagttct

SEQ ID NO: 15621 - DNA, 201 bp, Homo sapiens
tcacctgaatctcccaatttctaagaagagcttcttttgacttgaatgagaggagagaaatgcaagagaatgaggagagaaagaaagaaagtgaccagggkagatacattgggaccttgtgtctgctttctgtgttagggcactggtgaagcagcaggagtcaaagaggggatggctaggtgttgtgtcttaggcagatgg

SEQ ID NO: 15622 - DNA, 201 bp, Homo sapiens
ctaaaaatacaaaaattagctgggcctagtcgtgggtgcctgtagacccagctactcgggaggctgaggcaggagaattgcttgaacccaggaggcggacrttgcaatgagctgagaatgtgccattgcactccagcctgggcaacaagagcaaaactccgtctcaaaaaaaaattataaggccttaaataatttgttatt

SEQ ID NO: 15623 - DNA, 201 bp, Homo sapiens
ttcatcctgaaaatatgactaaaggctcacaacaagcagaagagacatcattagtgaacaaagtggcttcagtattttctgttttgggtgcctcagttggwagtactttgaagtttgataagagtgaatccttagaggctttggccatgcagaaagtgaatcagcagtcagatttagcagagctcacaaatgatggctttc

SEQ ID NO: 15624 - DNA, 201 bp, Homo sapiens
atttccctctcctctcctacttaaatatcgggagacaatgacctgtggtggaatgttatatcctttcaggctggtttcttgacgactttgtgtgtgtttaygtgtgttacaaatttcaaaccaaagtcccagtcataatcctgacaagatctcctaatttttattccccagaggcaagtagtagcatcagccccctagtgt

SEQ ID NO: 15625 - DNA, 201 bp, Homo sapiens
ggtcatagagatagcatagcccaagaagtagttcatgaacagcaaatggcaccttgtatttccattaacaacaccattgaggttacctcccttgcagatgrgctcagtgtagacaaggactgtcaggaaaaactgagttccaatattgtaccagggacatcagtggatttccagatgaatgaattgcaaaaagacattatt

SEQ ID NO: 15626 - DNA, 201 bp, Homo sapiens
aagggaactgatcgttttaagaagtgcagtgagaggggttgaaaggcttattccacccctctctgcatggtttctatactacgtattgactcagggctctygccattgcctctagagtcctgatcccagactgttccagggagctaccacattgggtaaatgacaaaaacgagtaggaaaagagggaacagatgaaaagct

SEQ ID NO: 15627 - DNA, 201 bp, Homo sapiens
gaggtgggaggattgcctgagcccaggagattaaggctgcagtgagccgtgatcatgccacagcacttcagccgaggcaacagggtgagaccctgtctcaaaataaataaataaataaataaataaataaataaataaataaataaataaataaaagagggaacagatgagaagctaaaaggagttatcgttttagagagg

SEQ ID NO: 15628 - DNA, 201 bp, Homo sapiens
cagctttgaactcctaggctcaagcaatcctcctacctgtgcctctttagtagcagggtctacaggcatgcaccaccatgcctggctaatttaaaaaaaawtttttttttttttttttgtagatgcagggtcttgctgtattgcccaggctggtcttgaactcctggcctgaagtgatcctcccactttggccttccaaag

SEQ ID NO: 15629 - DNA, 201 bp, Homo sapiens
aggtgggaggattgcctgagcccaggagattaaggctgcagtgagccgtgatcatgccacagcacttcagccgaggcaacagggtgagaccctgtctcaaaataaataaataaataaataaataaataaataaataaataaataaataaataaaagagggaacagatgagaagctaaaaggagttatcgttttagagagga

SEQ ID NO: 15630 - DNA, 201 bp, Homo sapiens
attttgattaacatgtttgtcagattcttccacttgatgtgtgtggcagttagttcattgattttcgttgctatgtagtatcttgttagatgcatatactrttgtttatttatttaatgtatttcttaatctcatgacagtgtagattagattatgtggggagaaattggaggcacttgaattatagcaggagtgatttag

SEQ ID NO: 15631 - DNA, 201 bp, Homo sapiens
ggtgggaggattgcctgagcccaggagattaaggctgcagtgagccgtgatcatgccacagcacttcagccgaggcaacagggtgagaccctgtctcaaaataaataaataaataaataaataaataaataaataaataaataaataaataaaagagggaacagatgagaagctaaaaggagttatcgttttagagaggaa

SEQ ID NO: 15632 - DNA, 201 bp, Homo sapiens
tgaggtcagtcattgcattttctgtttggaagtatggttcccagcccatgcttctccccatgctagctccactttagctaatattcatccatgcatcttgrattattcttccccctttctaattagagggcatgcaacctgcctgttcctaacttcacctgaaggttcagatgattttatttatgtctggcctaccctgtg

SEQ ID NO: 15633 - DNA, 201 bp, Homo sapiens
gtgggaggattgcctgagcccaggagattaaggctgcagtgagccgtgatcatgccacagcacttcagccgaggcaacagggtgagaccctgtctcaaaataaataaataaataaataaataaataaataaataaataaataaataaataaaagagggaacagatgagaagctaaaaggagttatcgttttagagaggaat

SEQ ID NO: 15634 - DNA, 201 bp, Homo sapiens
tgggaggattgcctgagcccaggagattaaggctgcagtgagccgtgatcatgccacagcacttcagccgaggcaacagggtgagaccctgtctcaaaatwaataaataaataaataaataaataaataaataaataaataaataaataaaagagggaacagatgagaagctaaaaggagttatcgttttagagaggaatt

SEQ ID NO: 15635 - DNA, 201 bp, Homo sapiens
ggttcaggccctgggactcttacagaaagagagtggaagacatttgaatccttgcttttgaagctgtcctcagaattgagggttggggtgacactcctgawgcctgattcccaccatggctttgcttcagatccatgccacaaaattacgagaacttgacagagttcctgtgagtctcatttggtacattatcctctgcta

SEQ ID NO: 15636 - DNA, 201 bp, Homo sapiens
tataggcgtgagccactgcatctggctaaagaagcttttttttttttttttttttttaagacagagcctcactctgttgcccaggctggaatgcagtggtrtgatctcggctgattgtaatctccgcctcccaggttcaagcagttctcatgtctcagcctccctagtagctgggactacaggcgtgggccaccatgcctg

SEQ ID NO: 15637 - DNA, 201 bp, Homo sapiens
aggttcaggccctgggactcttacagaaagagagtggaagacatttgaatccttgcttttgaagctgtcctcagaattgagggttggggtgacactcctgwtgcctgattcccaccatggctttgcttcagatccatgccacaaaattacgagaacttgacagagttcctgtgagtctcatttggtacattatcctctgct

SEQ ID NO: 15638 - DNA, 201 bp, Homo sapiens
tagagatggggttttaccatgttggccaggctggtctcaaactcctgacctcaagtgatccacctggctcagcctcccaaaatgctgggattacaggcatragccaccacgcctggcctaaacaagcatttaaaatgaacatttatggaatgaatgtcataatacttactgattttttatttctaagttttttaaaagtaa

SEQ ID NO: 15639 - DNA, 201 bp, Homo sapiens
atccatgtaaaaggaaagctctgaattagaaaaataagaatatattggagaagacacagtttaagttatggccttttctttttcagaagtataataattcrgtctctcaaaaagactagctgaaaacagttgccaaagcttggaatcatacagacagaggcatggtttacctaagagtaactaagaacttaattgaataag

SEQ ID NO: 15640 - DNA, 201 bp, Homo sapiens
ctctgggcttggcatatacatcgggccctgtgcaagagtgtggctagcaaggcagccccagctctcagacttaactctctgggcttggcagatacatggggcccctgtgcaagagtgtggctagcaaggcagccccagctctcagacttaactctctgggcttggcagatacatggggccccctatgcaagagtgtggcta

SEQ ID NO: 15641 - DNA, 201 bp, Homo sapiens
ttcctcccttccttccctttcttcccttccttctgttccttcctttccttcttttcttttcctttcttttccttccctttccctttcctttctttttgacrgagtctggctctgtcgcccaggctggagtgcagtagtgtgatctctgctcactgcaagctccgcctcctgggttcacgccattctcctgcctcagcctcc

SEQ ID NO: 15642 - DNA, 201 bp, Homo sapiens; identical to SEQ ID NO: 2545

SEQ ID NO: 15643 - DNA, 201 bp, Homo sapiens
cagcttcccagcccaacgcttctgtgcaccagttccctgtgccggtgcgatcgccacagcagctgctacttcaaggcagttcccgggactcttgtaatgamtctatgcaaagttatgaccttgattatccagagcggcgggctatcaggtgggtattgagcacaaagtactttctcttcctaatatccaggtctcatgatg

SEQ ID NO: 15644 - DNA, 201 bp, Homo sapiens
gatttgtaaaactgctggaccagctacacaactcactgaggatcgacctctctacatacagggtgagtgaagacacggctgtgggcaggataatagatatyaagcacggtcccagagagactgtaggccaatcttggctataaagattgaggccagggaaaactggtctgtgtcatcacatccacccaaatggccaatgct

SEQ ID NO: 15645 - DNA, 201 bp, Homo sapiens
gtttgtttgtttgtttgcttatttgagacagggtcttgctgtgtcacccagggtggagtacagtggcacaatcacggctcactgcagtctccgcctcacgrgttcaagcgattctcctgcttcagcctcctgagtagctgggattacaggcatataccaccgcaccggctaatttttgtatttttagtagagatggggttt

SEQ ID NO: 15646 - DNA, 201 bp, Homo sapiens
tgttgcccaggctggagtacagtggcgtggtctcggctcactgcaacttctacctcctgggttcaagcgattctcctttctcagcctcctgagtagctggrattacaggcacccgccaccacgcccggataatttttgtgcttttagtagagatgggggttttgccatgttggccaggctggtctggaactcctgacctca

SEQ ID NO: 15647 - DNA, 201 bp, Homo sapiens
ggccccttcttttccttgggttggccccttctcttccttgggttaagccagaatggaactatctatgctgtctagttgcattggtgtcaatctccagtctyctttccttcctagagaagaggacagacaaatcagccgtctcaggggctatccgactacaaatcagtgtggagatcaagggggaggagaaagtagccccat

SEQ ID NO: 15648 - DNA, 201 bp, Homo sapiens
acaataacaacactattatcaagaccctatccatattttgccaaccatcccaacaatgtctctttttcctttctaatccagaatccaatccagaatgacaygttgcatttagtcgtgatatctctttagcttcgttcggtgtttcccatccttagcagttttaaatggtataggcttttcattttgtagcatgttcttcag

SEQ ID NO: 15649 - DNA, 201 bp, Homo sapiens
catcccagacgatgggcggccgagcagaggcactcctcacatcccagacgatgggcagccaggcagtgacactcctcacttcgcagacagggtggcggccwggcagaggcgcccctcacttcccagacagggcggccgggcagaggcgctcctcacttcccagacggggcggctgggcagagggcctccccacatcccaga

SEQ ID NO: 15650 - DNA, 201 bp, Homo sapiens
atatgttacagaattgcccactatggaggctgtactatttatattcccacttacaaagtatgagagtgcttcatctttccttagcttttaggaatagtcamccttcctacaaaattatattgcagagatggcacactgaggatagccataggcaaacagttcctgtgccatgattcactgagtctcctttctgcttgcctg

SEQ ID NO: 15651 - DNA, 201 bp, Homo sapiens
ttaacttaaaatagattaaattactgagttgaagggtataagtttttaaatttaaattttattttttatttttaattttattttttaaaatagagaccagktctcactacattgcctaggctggtcttgaactcttagcctcaggtgatcgtcctgtctgggcctcctgcaatgccatgattactggtatgagccatcaca

SEQ ID NO: 15652 - DNA, 201 bp, Homo sapiens
gtttaatttgttaattttagagacaggatctcactctgtcctgcaggctggaatgcagtggttcactgcagccttgaatcctgggctcaagcagtccttcyacctcagcttcctgagtagcttggactataggcatgcaccaccacacctggctaagtttctattttttagttttttgtagagacaagagctgtgttgccc

SEQ ID NO: 15653 - DNA, 201 bp, Homo sapiens
cctaggttgatttgatgtctctgctattgtgaataatgctgcgatgaatatatgagggtatgtgtttttttggtagaacaatttgttttcttttcattatrtacccagtaatgggattgctgggttgaatgctagctctgttttaattaaagtggagcagtatgacatacttttaaagagatagagaaggatatttgtcaa

SEQ ID NO: 15654 - DNA, 201 bp, Homo sapiens
tagatttcaagaacttagtataggaaacaaatgcaagtatatgattaataattttttatattgattatatgttgaaataatactttggctattgggttagwtaaaatatattaaaattaattctacctgtttcttttttatgtggcgattagaaattttaaaatgacacatgtggttcacattatatttctgttagtcagt

SEQ ID NO: 15655 - DNA, 201 bp, Homo sapiens
tacttttagtttcttcagcttgtcctttttggatcaaaaaaaggagacctctggggaaaaacaaagcatttcaactgttgttccagtgacctcccagcccygtaagaagacaaatgtttttgtagagagtggtagcacaatgaccagagaaagttccagtggtcatagagatagcatagcccaagaagtagttcatgaaca

SEQ ID NO: 15656 - DNA, 201 bp, Homo sapiens
atgtacatcgagtcctggccttttcccagaggtcccctggttgtttcctctaagccagatttgggttagaagcagtttttacaaggaatagttacattccyaatcacatttatttgataagtcagagagaaggataaaagaatcagccatttcaaaaaactgaggtgttttcctttctctttttcgttggtaggctggtgg

SEQ ID NO: 15657 - DNA, 201 bp, Homo sapiens
tgtgatctctgctcactgcaagctccgcctcctgggttcacgccattctcctgcctcagcctcccgagtagctgggactacaggcgcctgccaccatgccyggctaattttttttttgtatttttagtagagatggggtttcactgtgttagctaagatggtctcgatctcctgaccttgtgatccgcccacctcggcctc

SEQ ID NO: 15658 - DNA, 201 bp, Homo sapiens
aaactgaaactctatacctattaaatagtaactcctcatcccatctcaccccagtccctggcaaccactactctactttctgtctctatgaatttgattgmtctaagtacctcatgtaagtggaatcaaataacatttgtccttttatgactggcttattccacttagcgtaatgtcctcaaggttcatctatgttgtaat

SEQ ID NO: 15659 - DNA, 201 bp, Homo sapiens
tggagttctggttatattgttttcttgatctagattctgtttacatggatgtaaaagtacacttttgacttgtttatgttataattataatgtatattatmattcaataaaaagtttaaataaaagctaaatgaaaaatagcattaaaatacagagtagagaaaatgtctgactttatatccctgatgcctggcacccact

SEQ ID NO: 15660 - DNA, 201 bp, Homo sapiens
gaggctgaggcgggtggatcacgaggtcaggagatcgagaccatcctgaccaacatggtgaaaccctgtctctactaaaaaatacaaaaaattagctgggygtggtggcgtgcgcctgtagtcccagctactcaggaggctgaggcaggggaattgcttgaacctgggagacggaggttgcggtgagccgagatcacgcca

SEQ ID NO: 15661 - DNA, 201 bp, Homo sapiens
tggaaattcagattttgtccttgtgggaagagagaaggaagaatttggcatcctctagactttggagcgtggtctacctaggcagctgggcaccaagcccragacccagaaattctggttgtgcaggtagtgcatcctcgcaggctagactgagttggccagattaggggcatggctgttcctggccccatgagaccttga

SEQ ID NO: 15662 - DNA, 201 bp, Homo sapiens
tgttggccaggctggtctcaaactcctgacctcaggtgacccacccgccttggcctcccaaagtgctgggattacaggtgtgagccaccatgcctggtctsaagtatagttttttaaagaaagaagtctcactctgttgcccagactggagtgcagtgatgtgatcatagctcactgtagcctcaaactcctgggctcaag

SEQ ID NO: 15663 - DNA, 201 bp, Homo sapiens
tcatgctaaatgccacctacgtctggacagtgtgtgcgtactgtgccactttattctagaattaggtaaagaaatatttttcctgctaagtttaaaatacktaaaccattgtcctttctccaagtgaacggttgccatcactcaacaaagggaaaatactttgtgctataagcacaggcaggggtaaacttttgagtaagt

SEQ ID NO: 15664 - DNA, 201 bp, Homo sapiens
atgctaaatgccacctacgtctggacagtgtgtgcgtactgtgccactttattctagaattaggtaaagaaatatttttcctgctaagtttaaaatacgtaaaccattgtcctttctccaagtgaacggttgccatcactcaacaaagggaaaatactttgtgctataagcacaggcaggggtaaacttttgagtaagtgg

SEQ ID NO: 15665 - DNA, 201 bp, Homo sapiens
gctctgtcacaagcaaccactgtcattcatatacgaaaagtcctctttctgggtggtaagaacatttagttgtccttttgcctctagtcttacaccttttycctcttctcctgctcactgcttcatagaagagactgcaaatgcaactttaggttgagacagtgctgcctgcagtgccagggaatgaaattcctgggactt

SEQ ID NO: 15666 - DNA, 201 bp, Homo sapiens
tgctaaatgccacctacgtctggacagtgtgtgcgtactgtgccactttattctagaattaggtaaagaaatatttttcctgctaagtttaaaatacgtaaaccattgtcctttctccaagtgaacggttgccatcactcaacaaagggaaaatactttgtgctataagcacaggcaggggtaaacttttgagtaagtgga

SEQ ID NO: 15667 - DNA, 201 bp, Homo sapiens
tactttaccactggattaatagatgagtcgcaaacctttctgaagatattaacttattttctctcttcttcccttttttggtttttggtcatctctggtarctcatctaatagatgggacatccaggaggtgagctgtggaccaggcttcttattgggttgatgactcactgaaaaactgactctggctctccatagacct

SEQ ID NO: 15668 - DNA, 201 bp, Homo sapiens
aagaaagaaagaaagaaacattccatgtcttgtctttcactgtgtatgtgatttgagccttggtggttaagcatttgtttgtttatttctgagccagactyctagtactgaattttgtgaaagttcaaataaggacttactcattgaccttacttcatctacctcccagcagcttgtctcaatatcgttgactttgggtac

SEQ ID NO: 15669 - DNA, 201 bp, Homo sapiens
cagcacttgtaacatttttcatttgccagtttctttttttctgttttttgagacagagtttcactcttgttgtccaggctggagtgcaaaggcgtgatccyggctcaccgcaacctccgcctcccaggttcaagcgattctcctgcctcagcctcctgagtagctgggattacaagcatgcaccaccacacccggataatt

SEQ ID NO: 15670 - DNA, 201 bp, Homo sapiens
cttgaggtcaggagtttgagacaagcctggccaacatggtgaaatcccatctctactaaaaatacaaaaattagccaggcgtggtggcatgcgactgtagsctgtagtccagctacttgggaggctgaggcaggagaattgcctgaacccgggaggcagaggttacagtgagctgagatcatgtcactgcactccagcctg

SEQ ID NO: 15671 - DNA, 201 bp, Homo sapiens
catgcaattttggaacatatattagtattcaccaaaatataacttaaagaatatcggacatcattttggcaatcttatgtgacaaaacatgccaaataatmctgtgtacctcttctctggatttttcaggggcctctgaaccatccagaaagccaggcatcaggaaagacaattttgaaacttgaagtttgattttgggac

SEQ ID NO: 15672 - DNA, 201 bp, Homo sapiens
attattgggtatactgaggggagtgctgatgaggaggtatgtcacttccttataaaatggactgtctggaacagtgagagagatcattcttagggggtcarggattttcctgcaaagcagttgttttgtagacatttataacttaacctgcaaactaaatctaagtggaaaaatcctaaggcattttagggagttgggaag

SEQ ID NO: 15673 - DNA, 201 bp, Homo sapiens
accctatttggtgagtccttgggttggccccttcttttccttgggttggccccttctcttccttgggttaagccagaatggaactatctatgctgtctagytgcattggtgtcaatctccagtcttctttccttcctagagaagaggacagacaaatcagccgtctcaggggctatccgactacaaatcagtgtggagatc

SEQ ID NO: 15674 - DNA, 201 bp, Homo sapiens
agcgagagtctgatgatttccttggccaaaccatcattgaggttcggaccctaagtggcgagatggacgtctggtacaacttgggtgaggaaactggaccygagaaagttgcttggaagggaaagcatgaaggggacctgggaatagtccttctaccaaaaccaccatctgtccccaaagcatacctctatacagagcctg

SEQ ID NO: 15675 - DNA, 201 bp, Homo sapiens
tctgcccctaacagagcctgcctaattctctcacagtgagtgccacaactcctctgaccgcattaaggtgcgtgtatgggatgaggatgatgacatcaagkcaagagtaaagcaacgcctaaagcgagagtctgatgatttccttggccaaaccatcattgaggttcggaccctaagtggcgagatggacgtctggtacaa

SEQ ID NO: 15676 - DNA, 201 bp, Homo sapiens
cagccaagatcaccattactggtgagcaggccacagtttgaggggacaggaaggcctgggctatggggaggagactggggaagaaacatcctgagcgtgasggagcaagggattagggagaaagaaaaaggaaatcactgggaaggaaaggcctctttattaatcacttctccttacctagaccctggtgccggagaggca

SEQ ID NO: 15677 - DNA, 201 bp, Homo sapiens
ttgactctcaataatggagttaagattgtattattgggtatactgaggggagtgctgatgaggaggtatgtcacttccttataaaatggactgtctggaasagtgagagagatcattcttagggggtcagggattttcctgcaaagcagttgttttgtagacatttataacttaacctgcaaactaaatctaagtggaaaa

SEQ ID NO: 15678 - DNA, 201 bp, Homo sapiens
agctcttagtgctgagggagaaacctatgtcatatgtgaagtccctgtggcttttgtgagagagggagggaacctaggctaatgggtcctatgctgaaagragccaagactcaacagctacatctgtccccaaagccctgcatcctgatgaacaacgtgcagcaactgagggtccagctggagaaaatgtttgaggccatg

SEQ ID NO: 15679 - DNA, 201 bp, Homo sapiens
aaagtcatggggaccaggcatgttggcttatgcctgtaatcccagcactttgggaggccaaggcaggtggatcacttgaggtcaggagttcgagacaagcytgaccaacatggtgaaaccctgtctctactaaaaatacaaaaattagctgggcatggtagcatgtgcatgtaatcccagctacttgggggccaaggcagg

SEQ ID NO: 15680 - DNA, 201 bp, Homo sapiens
cccggacgtggcggtcaggcagaggcgctcctcacatcccagacgatgggcggccgagcagaggcactcctcacatcccagacgatgggcagccaggcagwgacactcctcacttcgcagacagggtggcggccaggcagaggcgcccctcacttcccagacagggcggccgggcagaggcgctcctcacttcccagacgg

SEQ ID NO: 15681 - DNA, 201 bp, Homo sapiens
catgagagttggtggaggagcagttgttaatgacgtgttactcctagtggaatagcctcccaccccctaataaatagcccagctaatttatgccattacayacacctagattttagttccagaccttgagctgtgggaccttgggcaaggcctctttgaattccaggtttctcacctgcaaaatggggaaacaatagtacc

SEQ ID NO: 15682 - DNA, 201 bp, Homo sapiens
atttctcattcttgttttaaaggttattatctagatctggcctgttatgctcttcttttggtgtgaacagaatagaggggatttctatgctaggttttaawtaaggaacatttgtaacttaaactttcagaagatatctcacatgaaactggctgcctgccacaggagtaacttagatctctccaccttgttgtcaggagc

SEQ ID NO: 15683 - DNA, 201 bp, Homo sapiens
gtttcttgatctgtgtgctggttacctgagtgtgttcacagtattcattgagcagtacaggccgggcgtggtgtttcacgcctgtaatcccagaactttgrgaggctgaggccgggggatcacttgaggtcaggagtttgagacaagcctggccaacatggtgaaatcccatctctactaaaaatacaaaaattagccagg

SEQ ID NO: 15684 - DNA, 201 bp, Homo sapiens
ggaggctgaggcaggagaatggtgtgaacccaggaggtggagcttgcagtgagccgagatcgcaccactgcactctagcctgggcaatagagcgagactcygtctcaaaaaaaaaaaaaaaaaaaatctgcatctatttgctctggttctcatctgtacaatggtgggacttgtcaaggcattatgtgttaaataccaatg

SEQ ID NO: 15685 - DNA, 201 bp, Homo sapiens
aaaagcgaggagcccttcaggttgtgcctatgaccctttgggtcgtccttttttgtctatttccctcccctccttcccaagcactgtatgtgtgtgtgtakgtgtgtgtgtgtgtgtacatgcacatgtgcgtgcatgatctgtgcctctgagctttggctcatgcagtctatttttctgaaaagcagtttgtgtgcatgc

SEQ ID NO: 15686 - DNA, 201 bp, Homo sapiens
gagtttcagacctgtgtgattgtaccagagtcattttaagctgctcagtgtagcctgtaactgactgttcttaaagagagaagagagttcaagtaccttcycattccccactccttcccacaaataccaccaattagttatctagaccttccttttccctttttcctacaaaggcttctgacatcagaagtctcagtagtt

SEQ ID NO: 15687 - DNA, 201 bp, Homo sapiens
agatgatctactatatttttacatgctcctttcccttgcaatttgtcatctttaaaaaaaaattttttttaacttttgttttaggttcaggggtacatgtrcaggtttgttatatagttaaactcgtgtcacagggatttgttgtacagattatttcatcacccaagtactataacaatagttattttttctgctcctctc

SEQ ID NO: 15688 - DNA, 201 bp, Homo sapiens
ctgtgtttttcaggcactttgcatgtttatcatccaagtacatgtgtcctggtgtgccagcagtgatgagcaccttactggccaacatcaacgcctactaygcccacacaactgcctctaccaatgtctctgcatctgatcgctttgcagcctccaactttggggtaagtatcatgtaaacacatatgtctgcatttgtta

SEQ ID NO: 15689 - DNA, 201 bp, Homo sapiens
aaagttgtggcatcagttgcttcttcagtgatctttagtttttttcttctaataattgtaaaatacacacatgtcaatgggacatatccagactacttctraatgtagctatgtagtagttttctaaatgattccctattgtctttcttccttttctttcaccttcgtccttagaagctgtcctaagtatagaacttccct

SEQ ID NO: 15690 - DNA, 201 bp, Homo sapiens
ttcttgaaagtttttttttaaccttagaatataaactcacataagattacaaaaccaccagcacaccaaaaatttaacaaaattttataatgtcatcagtrtctatcctatattcaaatatccccagttttcccccaaactttcttgtcctttttgcaccattgtagaagttaatcaaggttcacacattgcatttgtatg

SEQ ID NO: 15691 - DNA, 201 bp, Homo sapiens
caaaaaaaaaaaaaaaaaagtaaagacattgttttctttaaattttcaaacttctaaaaaagaacagagaataatatattgcatacccatgtagttgccamcttaatttaacaaatgttaatgatttgttacattagtcaagattaaaaaaatggtgtacagtggataaagttgaaattttctttactgtctcaatctctc

SEQ ID NO: 15692 - DNA, 201 bp, Homo sapiens
tctgggcttggcatatacatcgggccctgtgcaagagtgtggctagcaaggcagccccagctctcagacttaactctctgggcttggcagatacatggggcccctgtgcaagagtgtggctagcaaggcagccccagctctcagacttaactctctgggcttggcagatacatggggccccctatgcaagagtgtggctag

SEQ ID NO: 15693 - DNA, 201 bp, Homo sapiens
aggcagaaaaaacttctgcatgagctagtacagaaggcaaaccgtctctcagtagaagacatacactcaggtattctgagtcactatttaacagggtcccwgctggctaaagtatgacctccatctggccagcatgagacctggtgtggtggccagtttaataaggtgttggttgacgtccatagcttgaatcaggctaaa

SEQ ID NO: 15694 - DNA, 201 bp, Homo sapiens
ttctgtctgttggcttgagatgctatttgggagttgatttgggaatattatatatgtatccccaagcaaatttctttttttctttattttgtgggacaggrtctcactctgttgcccaggctggagtgcagtggcagcatcttggctcactgcagccttgatctcctgggctcaaatgattttcctgcctcagcctcctga

SEQ ID NO: 15695 - DNA, 201 bp, Homo sapiens
tgaatttgattgatctaagtacctcatgtaagtggaatcaaataacatttgtccttttatgactggcttattccacttagcgtaatgtcctcaaggttcayctatgttgtaatgtgtcagaatttcactctgaaatttcactctggaatttttaaggctgcatcgtattccattgtacacatgtatcacattttatttatc

SEQ ID NO: 15696 - DNA, 201 bp, Homo sapiens
attagctttagggagacgtttttcggttttgtatggggggagtagggctcatctttttttctacatttgttagcttctacccctggaggaatgatttaacyccctctatccctgtttacctgttattattctttaaggctcagtttaaatatcatcacttctgggtaatctttgtgctgttttctccttctcccaagtcta

SEQ ID NO: 15697 - DNA, 201 bp, Homo sapiens
cccagctaatttttgtatttttagtagagatggggtttcccatgttggccaagctggtctcgaattccttaagtgatccacccactttggcctcccaaagygctgggattacaggtgtgagccaccatgcccggctgaatgtttcttttcttcttatattgatatttgtgtatgtgttataacaattccttcttttaatgt

SEQ ID NO: 15698 - DNA, 201 bp, Homo sapiens
tgcagtgcaccagcatggcacatgtatacatatgtaactaacctgcacattgtgcacatgtaccctaaaacttaaagtataataaaaaataaaataaaataaagaaaagggtgaaacattaaaaaaaagaaaagaaaagaaaatgctgtccgtcaccaaatattttgtaagtcaacattattaaggtatcatttatagaca

SEQ ID NO: 15699 - DNA, 201 bp, Homo sapiens
tttggctatgtaccccaaagtggattgatcaaattttatggtaattctaattttttgaagaatcaccataccattttccatggtggctgcaccgttttacrttcccaccatcagggcacaagggttccttccaatttctctacattttcttcaacacttgttattttctgttttgttttttttaagtaatagccattgtaa

SEQ ID NO: 15700 - DNA, 201 bp, Homo sapiens
atgcccagcctgataaatcttgtaaagtagacttacctttcctaaaagtttcctgtatacgatgtgtagtttaagttgaagcagtgttagttaacaataamacatataaaactgttgcctatgggtggaaattggcaggcaggcctggcaataatgtccttattacttggcctcatattgtgtgaaactgcattagtctaa

SEQ ID NO: 15701 - DNA, 201 bp, Homo sapiens
gcagtgcaccagcatggcacatgtatacatatgtaactaacctgcacattgtgcacatgtaccctaaaacttaaagtataataaaaaataaaataaaataaagaaaagggtgaaacattaaaaaaaagaaaagaaaagaaaatgctgtccgtcaccaaatattttgtaagtcaacattattaaggtatcatttatagacaa

SEQ ID NO: 15702 - DNA, 201 bp, Homo sapiens
gggattataggcatgagccaccatgaccagcccttagtataataggttcttaagaaatgaatccttgcaataaccctgggaggtagttgttcatatacctrtctttttatagttaaggaaatgtaggctcaaataagttgaacgtctcaagtcttttgactctcaataatggagttaagattgtattattgggtatactga

SEQ ID NO: 15703 - DNA, 201 bp, Homo sapiens
taaataccaatgagaaggatgaatgtaacttaggtgcactaggatggccttattaactcttgcttgggtgggcatcagagaaggcttcccagaactatgcyttggaggaagagttggattttcctctatggaaaggaggtgtgagatgctatttcaggctaatggaacagaatgagtaaataaaaatttggggttttgagt

SEQ ID NO: 15704 - DNA, 201 bp, Homo sapiens
ttcaccttcgtccttagaagctgtcctaagtatagaacttccctcagtctggtagtctcattaaaaacaaagcctactgcctatgttcagggagctgtttyattagaaatcagcatattgagtggcctgtttcaactcctggacttgacccaatttgtggttccattctttgcctagatagctacaagtacctactttttc

SEQ ID NO: 15705 - DNA, 201 bp, Homo sapiens
agctagaaatcgggtgtaaggattcagttaaatgtgaacccttttcccttattaccattttctgtttctgttttcttttttctctctattctatctattgkttttcctaaccacccctcttccctcttccccatttcctgctccactagtttctccctccttagttgaccgaatgaaagtatcatctgccattttctcttc

SEQ ID NO: 15706 - DNA, 201 bp, Homo sapiens
cagagggtgtaaagatcaatatagagataagtggtcagttagggcttgggtagggagatgggatgcttgggctttaagggaaaggctggtggcccaggacraagaataaatatggaggaatgggattacggtatctgtgcaaggagcatagactgctctaagatggaaagcatatgagtagtgttgtggggggcttctgaa

SEQ ID NO: 15707 - DNA, 201 bp, Homo sapiens
tcttcttcattgccagaggagacacgaaatcaaggtcctgattgtcccacagggtctcagttctggtatctccctgcagaacccaaaagtcatggggaccrggcatgttggcttatgcctgtaatcccagcactttgggaggccaaggcaggtggatcacttgaggtcaggagttcgagacaagcctgaccaacatggtga

SEQ ID NO: 15708 - DNA, 201 bp, Homo sapiens
gggtatgtgtctttcagaaatcccacgtgtataagaaaaccctgcaggccttaatctaccccatttcgtgcaccactcctcataactttgaggtctggacrgccactaccccaacctactgctatgagtgtgaaggcctgctctggggcattgcccggcagggcatgcgctgcagcgaatgtggagtcaagtgccatgaga

SEQ ID NO: 15709 - DNA, 201 bp, Homo sapiens; identical to SEQ ID NO: 2536

SEQ ID NO: 15710 - DNA, 201 bp, Homo sapiens
actgggaaagactctaagcaagtctagatcagagagtaagcccaagtctcatgttgaagggtgtgaccactgaactcaaggttttatgatggacctagtaycttctgttttcttagaaagcgtgaatgctggaacaaggctcggatccagcatcaggtccaacctgtgttggacaaccagaagcacactatattgtgggcc

SEQ ID NO: 15711 - DNA, 201 bp, Homo sapiens
gtgttagttttccacactgggaaagactctaagcaagtctagatcagagagtaagcccaagtctcatgttgaagggtgtgaccactgaactcaaggttttrtgatggacctagtaccttctgttttcttagaaagcgtgaatgctggaacaaggctcggatccagcatcaggtccaacctgtgttggacaaccagaagcac

SEQ ID NO: 15712 - DNA, 201 bp, Homo sapiens
gttatgggcaccctattcactttcattacctggcagatgttgcaggataattgcccagaactagcatattgatccagctttttatattgcccattcctttytgtttcttccaggcttcaggagatcaccacttgattcacaggaataagcgggattagtctaaaatgtagtcaaaaaaacttaaaaacaatcattgagact

SEQ ID NO: 15713 - DNA, 201 bp, Homo sapiens
gtaattattgtgatttattatgtccatctgttttttatcccccattttattaccatttctagcatttaggctgacttgtgcccatttcttgaaagaaaggwaaggcagagagcagaagaagtgatctttgtggttttaacttcccaaagcctaagattttaggagagtatgcaaagtgttctggacaaatattatgagagg

SEQ ID NO: 15714 - DNA, 201 bp, Homo sapiens
catgtatcaacttttgtctttgccttaaaatgtataaaaccagtctgtaacccaaaaaccttgggcacatgttctcaggacctcctgaggctgtgtcacargccatgggtccttaaccttggcaaaagtaacctctaaattgattgagatctgtctcagatacttttttgtttacatcctcatagctgttttgttaaatct

SEQ ID NO: 15715 - DNA, 201 bp, Homo sapiens
ggcctgggctatggggaggagactggggaagaaacatcctgagcgtgagggagcaagggattagggagaaagaaaaaggaaatcactgggaaggaaaggcytctttattaatcacttctccttacctagaccctggtgccggagaggcaagattgctatctgcaaacaacatgaaccataatacaaggatttgctaacaac

SEQ ID NO: 15716 - DNA, 201 bp, Homo sapiens
gcctctcccaggccccattcctcagctcaacccttggtctggtaggtgacctgttgtgttcctggccaccttcaggggctgcagaaaagagctgtaaacayggagctgaggaccggacccagaacattatcatggccatgaaggaccgcatgaagatccgagagcgaaataagccagagatctttgaagttatccgggacg

SEQ ID NO: 15717 - DNA, 201 bp, Homo sapiens
cttctgtttctagaaaatctcaaagacgccttcccttgagctatatcccctacaacgtttcctgatcttgccaaacaaaataactgaactgtaaaacttcrctcacatagcatacacagagagaataggagatatgacagtcgcagacaggaaaggaggaaattatgatagaaaagttggagatcctgttgccaacacccc

SEQ ID NO: 15718 - DNA, 201 bp, Homo sapiens
ttaatatgcttatctgtgtatccatagtacctttgcccaataaatattagttgaataaatgcatttctataagtggaatcattgggttaaagaatatatayatttataattttgttagacactatcaaattgtataaaaatattttacctatttatatttctgctgctggtacttattttcacatttagcctcactggccc

SEQ ID NO: 15719 - DNA, 201 bp, Homo sapiens
cagtgcaccagcatggcacatgtatacatatgtaactaacctgcacattgtgcacatgtaccctaaaacttaaagtataataaaaaataaaataaaataaagaaaagggtgaaacattaaaaaaaagaaaagaaaagaaaatgctgtccgtcaccaaatattttgtaagtcaacattattaaggtatcatttatagacaat

SEQ ID NO: 15720 - DNA, 201 bp, Homo sapiens
agtgcaccagcatggcacatgtatacatatgtaactaacctgcacattgtgcacatgtaccctaaaacttaaagtataataaaaaataaaataaaataaagaaaagggtgaaacattaaaaaaaagaaaagaaaagaaaatgctgtccgtcaccaaatattttgtaagtcaacattattaaggtatcatttatagacaata

SEQ ID NO: 15721 - DNA, 201 bp, Homo sapiens
gtgcaccagcatggcacatgtatacatatgtaactaacctgcacattgtgcacatgtaccctaaaacttaaagtataataaaaaataaaataaaataaagaaaagggtgaaacattaaaaaaaagaaaagaaaagaaaatgctgtccgtcaccaaatattttgtaagtcaacattattaaggtatcatttatagacaatac

SEQ ID NO: 15722 - DNA, 201 bp, Homo sapiens
tccttcagtaagtttgcagtctcataaacatatatataactctaatcaaaagagtctgtttgaagggccttgaaaaagggataagattaaaggaattccarggaggaagagtcttttcgcactcttgatcagataccaggaaaagctacataaaacaaggaacatttgagatagaccttaaaaggcagtgggatttggaca

SEQ ID NO: 15723 - DNA, 201 bp, Homo sapiens
ttttcttctaataattgtaaaatacacacatgtcaatgggacatatccagactacttctgaatgtagctatgtagtagttttctaaatgattccctattgkctttcttccttttctttcaccttcgtccttagaagctgtcctaagtatagaacttccctcagtctggtagtctcattaaaaacaaagcctactgcctatg

SEQ ID NO: 15724 - DNA, 201 bp, Homo sapiens
cagcagtgtgcctacatattttataatctttttaagggaattgcattggatgaaacaattagaagattttgtgtatttttgagatttataaaatgtactgrcactgttaaatactgttttgaaaactgtggagttatagaaataagtgaggttcatggtacatgaagcacaactgcagttttgttttctcatggattcgta

SEQ ID NO: 15725 - DNA, 201 bp, Homo sapiens
gtgctttcgtaagtccactggcctcaggactggtgatcatctctgtagccatgctattaataattgggaattctgggaattcaagagtgctggacacacaytgctgatgaaaaagatagatagcatcaggtgttagttttccacactgggaaagactctaagcaagtctagatcagagagtaagcccaagtctcatgttga

SEQ ID NO: 15726 - DNA, 201 bp, Homo sapiens
gtcactgtattttccctttattcctgagctccttggccatagaactccaccctctcttaactaggtgtaggccaggaatttagcttggggtctgggctggyttaatctgaggtaggcattcgggtaaggccctgcgagggaggaataggcactggggtaagccctgcaaggaagtagtaggggtgtggcagggtagaagag

SEQ ID NO: 15727 - DNA, 201 bp, Homo sapiens
tatataagcatacataatttaaacagttttatattgatgatattcaggatatttttcttttcactattacaaacagtgctacaatgaacatctttgtaggtttttttttttttttttttgagatggagtctcacactgttgctcaggctggagtgcagtggcgccctctctgctcactgcaacctctgcctcctgggttca

SEQ ID NO: 15728 - DNA, 201 bp, Homo sapiens
ggcaagtagtagcatcagccccctagtgtggccttctcctttggtccctttggctaaggagtgcagtgaccagaaggagaaggttcattctaggatgaacyagagtcaaggtgattggtgtgcattctgatttggctgattttcttgactaggaggatatgcagaacagactgctgtcttgggtttattggtctagcaaat

SEQ ID NO: 15729 - DNA, 201 bp, Homo sapiens
tacaggtgagcacctgttccctggccaaggtgtgtgagggtgaaaaggcccaggaaccccacgtggacagacccagtgaggaagccattctgtatttgtayggacttcctgaacaagatggagaaaatactatggaactggtggaaagctttctagccaagcacctttgtgttaatggcatgcagtgcaacaggtacatta

SEQ ID NO: 15730 - DNA, 201 bp, Homo sapiens
aaccccttgctccctgcagtaagcctgattagtgggcggagcttccttcaggatcgcaagaaagaaaggaggaaggggaccccgcctcctacgtgctcgcgggggggggcggggtcggtggactgggcgtgagttaattggctggggggcggggcaccacgggttggctccgcccaggcgctcgcgcggatcccgggtgga

SEQ ID NO: 15731 - DNA, 201 bp, Homo sapiens
tcaggcttggtgccaggaggtttactttttaggaaaactggaggtgattgcctctcactacttttttctgtttctctcctttgtctcactttattccttastatattctctctcttgccctctcctgcttttcatattctcttctactcccaacctcttctttccatggatgctttgtttcttaatatttgccctttattt

SEQ ID NO: 15732 - DNA, 201 bp, Homo sapiens
gtccagggttccgtggatgaagtctctagctgtgtagactcagtactgagtgaaatagaaggcttacaggtgagcacctgttccctggccaaggtgtgtgwgggtgaaaaggcccaggaaccccacgtggacagacccagtgaggaagccattctgtatttgtacggacttcctgaacaagatggagaaaatactatggaa

SEQ ID NO: 15733 - DNA, 201 bp, Homo sapiens
ttgaacattagcttctttctcatgttgatatttttcctcccggagttctaatccctctcctctccttttttatgttcacatgtaaccataaactcaaatargaaaagctcataagatcatcttacccctgtctcccatctgtacccacaaatgttattgagagtccaatgctcagattttcttccttacctataaaaccca

SEQ ID NO: 15734 - DNA, 201 bp, Homo sapiens
cccaaagcatcagccagcaataattgctagaaacaaactgaaaagagcaggacaggctgttgccttccaaggtaatctctattaagcatcctgaccagaartaagaggaagaagcagagaacccctcaaaccctgagggagaaaatgaagcgattgttgcaagagtcagaggaagaaatcatggttaccttgggaccctcc

SEQ ID NO: 15735 - DNA, 201 bp, Homo sapiens
gaaagaagcggggtaccgtgaaagggtcaggtggagagggagaaaagctctcatcttctgtaggctggggccttgatactttgttttttgtaccttgaggmggattgaacctcacacaaaatggaaatgggctgcttccagccaggatcaaagtgagcaggtgaaaagatgagtgaaagaacgtaacattcgactgcctct

SEQ ID NO: 15736 - DNA, 201 bp, Homo sapiens
ttgccttaagagatacatattgtagtttctagaattagctacaaagttgtggcatcagttgcttcttcagtgatctttagtttttttcttctaataattgkaaaatacacacatgtcaatgggacatatccagactacttctgaatgtagctatgtagtagttttctaaatgattccctattgtctttcttccttttcttt

SEQ ID NO: 15737 - DNA, 201 bp, Homo sapiens
gaggtgtgagatgctatttcaggctaatggaacagaatgagtaaataaaaatttggggttttgagtatgtgacgtctttgtgaaacaagacaattagattstaggaatgtatatggggtcaagaaagagggcagaggagaggaatttggggatttgggccagatcatggagagccgtgacggctctgtcaatggattgatt

SEQ ID NO: 15738 - DNA, 201 bp, Homo sapiens
tataacagctttattgagttataattcatgtgccataaaattcaccttaaagtcccttaaaaagtattgaatcgaatggtttttagtttattcatagttaygcagacatcatcaccatctaatttcagaacatttccatcaccccataagaaacctcttacccattggcagtcactccccacttctctttgcccccagcct

SEQ ID NO: 15739 - DNA, 201 bp, Homo sapiens
agcggcgctgctccggcggcgggggctgggcgtggcggtgatgctgggcgtggtggccgcgctgggcgtggtggccgcgctgccgccctcacccgggcagscgtgctggagaaggatgtcggcgcacagctggcttccagcctggcgggcgtagaacagcgccgtgcggccctgggcgtcacgggccgccacgtccgcgcc

SEQ ID NO: 15740 - DNA, 201 bp, Homo sapiens
tgggaatttcgggctttcccgcgccaggcgttttccgagatgaagcctcaaagaccccctttcctccccccagctcacgtacccacagcagcagttgcgtsatgacgacgtgggcgagctcggccgccaggtggagtggggagcgcagctgtgggtcctctacgctggtgtcgagcggcccgtgtcgcgcatgggccaaaa

SEQ ID NO: 15741 - DNA, 201 bp, Homo sapiens
gcttccagcctggcgggcgtagaacagcgccgtgcggccctgggcgtcacgggccgccacgtccgcgccgtactagagggcggaaacggccgcgtgaccgmgcgtccccagggcgcccacacccggcgccgcctcccccacatggccaagcctacttccggggtccctctgggaatttcgggctttcccgcgccaggcgtt

SEQ ID NO: 15742 - DNA, 201 bp, Homo sapiens
tactagagggcggaaacggccgcgtgaccgcgcgtccccagggcgcccacacccggcgccgcctcccccacatggccaagcctacttccggggtccctctkggaatttcgggctttcccgcgccaggcgttttccgagatgaagcctcaaagaccccctttcctccccccagctcacgtacccacagcagcagttgcgtga

SEQ ID NO: 15743 - DNA, 201 bp, Homo sapiens
gcgtggcggtgatgctgggcgtggtggccgcgctgggcgtggtggccgcgctgccgccctcacccgggcagccgtgctggagaaggatgtcggcgcacagmtggcttccagcctggcgggcgtagaacagcgccgtgcggccctgggcgtcacgggccgccacgtccgcgccgtactagagggcggaaacggccgcgtgac

SEQ ID NO: 15744 - DNA, 201 bp, Homo sapiens
gggccgccacgtccgcgccgtactagagggcggaaacggccgcgtgaccgcgcgtccccagggcgcccacacccggcgccgcctcccccacatggccaagsctacttccggggtccctctgggaatttcgggctttcccgcgccaggcgttttccgagatgaagcctcaaagaccccctttcctccccccagctcacgtac

SEQ ID NO: 15745 - DNA, 201 bp, Homo sapiens
ggtggccgcgctgccgccctcacccgggcagccgtgctggagaaggatgtcggcgcacagctggcttccagcctggcgggcgtagaacagcgccgtgcggmcctgggcgtcacgggccgccacgtccgcgccgtactagagggcggaaacggccgcgtgaccgcgcgtccccagggcgcccacacccggcgccgcctcccc

SEQ ID NO: 15746 - DNA, 201 bp, Homo sapiens
gtcacgggccgccacgtccgcgccgtactagagggcggaaacggccgcgtgaccgcgcgtccccagggcgcccacacccggcgccgcctcccccacatggscaagcctacttccggggtccctctgggaatttcgggctttcccgcgccaggcgttttccgagatgaagcctcaaagaccccctttcctccccccagctca

SEQ ID NO: 15747 - DNA, 201 bp, Homo sapiens
gtgcggccctgggcgtcacgggccgccacgtccgcgccgtactagagggcggaaacggccgcgtgaccgcgcgtccccagggcgcccacacccggcgccgsctcccccacatggccaagcctacttccggggtccctctgggaatttcgggctttcccgcgccaggcgttttccgagatgaagcctcaaagaccccctttc

SEQ ID NO: 15748 - DNA, 201 bp, Homo sapiens
gtgacttcatggagaatgtttgttcttgctgtcgtggcagtagatagtcgtggaggtagttttgctgggtgtagtctgtctgggaagttttctgcctgacrgggggaacccgcgtttcccttttggttgccccctctgctgtcagctgtttctggtgaggccctcttggtagggctggatggagctgaatgtgttaggaga

SEQ ID NO: 15749 - DNA, 201 bp, Homo sapiens
gttatactgagtcagacccaaatggtattgcatgcgtgtgtgagtgtgagagtttctttcagagtgcagtgggagtttgaaaggagtgaagtgggtgacarttgtccctcatgttgtcaacacctgaaatctaggccttaccgtgacatcatggatcagtctttcatatttatatttagacctttccagaattcttcacat

SEQ ID NO: 15750 - DNA, 201 bp, Homo sapiens
cctcccaagtaagtagctgggactacaggtgtgctccaccacacctggctaatttttttttttttactttactttttgtagagatagggtctccctgtatkgcccaggctggtcgtgaacgcctggcctcaagcaatcctcccgccttggcctcctgaagtgctgggattacagatgtgtacccctgcagctggtccctcc

SEQ ID NO: 15751 - DNA, 201 bp, Homo sapiens
gactgttagctgataagacaataagtcaaactcttaatcattaaaaaaaaaaaaaaaactgcacaaaaatgccgctattgtgtttcaccagattaacacaractgattttcaaaattaagggcctcctttatatgaatagatctgtattatattaagtatatcctcatacaattagaacccaactcaactctttgtgtgaa

SEQ ID NO: 15752 - DNA, 201 bp, Homo sapiens
aagtatatcctcatacaattagaacccaactcaactctttgtgtgaagcagccatttcataattaggggatttttagtatcctatctgaaaaatattatgygaattagcaggtatttggctactttttaaaaacgttttacatgtggcagccttcaggggaggcagtttattcatgatactcatagtttttttaaaaaagc

SEQ ID NO: 15753 - DNA, 201 bp, Homo sapiens
tctgtggcgctatccatggtgctgaccagtactgaccaagggaacaccagaagaaaaagaggcaaagcagggagcatgaaagatgagtttggtcttatgtrcactaaatttgaggttttgggagacccttaagtggagagatatctaattgagaatgtcttatgggcttggaattcaggaagcaagtttaggctggaggta

SEQ ID NO: 15754 - DNA, 201 bp, Homo sapiens
tcatgcctgtaatcccagtattttgggaagccgaggcaggtggatcacctgaggtcaggagttcaagaccagccttaccaacatggtgaaaccccttctcwactaaaaatacaaaaaattagccgggcgtggtggtgggcccctgtaatcccagctactggggaggctggagcaggagaatcacttgaacctgggaggtgg

SEQ ID NO: 15755 - DNA, 201 bp, Homo sapiens
cttgttccatgcatcagtagttgatatcttttcattgctgatttgtagtccattgtgtggatatacctcagtttgtttatccttttgcctgctggtggacrttaggcttatttccagttaggggctattagaaataaagctgctgtgagcttttgtgtaaaagtcttttgttgaacatgtgctattgtttctcttgggtaa

SEQ ID NO: 15756 - DNA, 201 bp, Homo sapiens
agaaccacagtatcacagcgcttctggtctctgagtcctaccaggtaccggagatgaacgcttctcccagcgggacttatggaccctgaagaagcatttcwatggggtcaaaggacttctgaataccctctaaggaaatgtacaaaaactatgaagtgccttttaatgaggagcaggtgtagccttggagaataagcttgc

SEQ ID NO: 15757 - DNA, 201 bp, Homo sapiens
tacaaaagagaaacagggactccacagcaattgtcagaaccacagtatcacagcgcttctggtctctgagtcctaccaggtaccggagatgaacgcttctsccagcgggacttatggaccctgaagaagcatttcaatggggtcaaaggacttctgaataccctctaaggaaatgtacaaaaactatgaagtgccttttaa

SEQ ID NO: 15758 - DNA, 201 bp, Homo sapiens
tgcatgctatacaaaagagaaacagggactccacagcaattgtcagaaccacagtatcacagcgcttctggtctctgagtcctaccaggtaccggagatgmacgcttctcccagcgggacttatggaccctgaagaagcatttcaatggggtcaaaggacttctgaataccctctaaggaaatgtacaaaaactatgaagt

SEQ ID NO: 15759 - DNA, 201 bp, Homo sapiens
gtgcttcaagaaacatttggcttttctccacacagaagaatcctgtcaagacagggcttctccatttgagcttaaattttctcacagatggaattaatttyctatattgctaagaaaaattctcccagtcaaattcccattgttaattaagtgttgaggagaaaattggtattttgtttctttctcctaaaatgtggaaat

SEQ ID NO: 15760 - DNA, 201 bp, Homo sapiens
tggactcagcccacttgccttatattttgttttgtttttgagtcagccaggcctcccatcccctaacagacacctctgtgtgtaggacctagatattggcygctgagagcctcaggatgcaggtgttgcttttgtgttccatcacgatggtgtgaaagagcctataaaaggtaaattggcaggctttgaactatagtaatt

SEQ ID NO: 15761 - DNA, 201 bp, Homo sapiens
tgtactccagcctgggcgacaagagtgagactctttcaaaataaataaataatgaaacagctgtaaatgcttaagtctttagggcgtgtcaaagatgcctrtgtaatttattatatgtttgtattctacaacgttgtgcactctttgttaggaggatgaaaataatagataatatgattgaaataccatgccatctatgca

SEQ ID NO: 15762 - DNA, 201 bp, Homo sapiens
tctcacactcataacatccctctttggttcacctaccgtcagcattttatagatgagaaagtagagagctatggaggttctataaagtccccagtgtcacwcaggcagtggtggaaacggagttcactttgtttttttttttttttttttttcttaaatggagtttcactcttgttgcccaggctagagtgcagtggcatg

SEQ ID NO: 15763 - DNA, 201 bp, Homo sapiens
tccctgctgtccctcagtctgttcagtttcctcttctcatgaggacaatagtcagattgggatagggtccaccttaaggacctcattttaacctgatcgcstctttaaaggccccatctccaaatatagtcacatgttgaggtatttgggattggggcttcagcatattagttttgggaagacatagttcattccataaca

SEQ ID NO: 15764 - DNA, 201 bp, Homo sapiens
caactccaccatattcagcttgtctatatctgctgtgcagtagcatagccaccaactataggtggctcctgagctgttgaactgtagcttgtctgacggacagtgtgctctaactctaaaatactcaccagagttcaaagacatagtactcaaaaaatcattaaatttatgtaataaatttactaaattattcatcatcaa

SEQ ID NO: 15765 - DNA, 201 bp, Homo sapiens
ctcactgcagcctcaaactcccaggctcaagcgatcctcccaatgcagcctcccaagtaagtagctgggactacaggtgtgctccaccacacctggctaatttttttttttttactttactttttgtagagatagggtctccctgtatggcccaggctggtcgtgaacgcctggcctcaagcaatcctcccgccttggcct

SEQ ID NO: 15766 - DNA, 201 bp, Homo sapiens
ggcattccagccattctgaacctgttgcccttcctggaccagagcctactcgttcagatcttggtgcctttacaaattctgttttccctctttctcagtcrtttgcacctgaaatccttttacttctaagagtcagcttagacatcaccacctgtgtaaaaccttatccgtctgcaccaggctaacatatcccttccctcc

SEQ ID NO: 15767 - DNA, 201 bp, Homo sapiens
tcttcaggctgacgtggctttggtttaaaccctctccgcacttctccaggttgtccattatcgacggtaatgctccaggtttcttggcgtgatgtacaagscctttctgaatctgaacacaaccttacccttccatgcagctggcattccagccattctgaacctgttgcccttcctggaccagagcctactcgttcagat

SEQ ID NO: 15768 - DNA, 201 bp, Homo sapiens
tagtcactttaattataaattgaaaattaattttgagtccttcttcctgtctcctaatacagtctttgtccatgaacaaatgacacagaaaagttccatgrttaataagcattcttgtgcctggagcgttttaagcatttcttgaatctttacattcttctgagtatttattctccgaacttggttcaggcttttgtcacc

SEQ ID NO: 15769 - DNA, 201 bp, Homo sapiens
ccctggccgggcgcagtggctcatacctgtaatcccagcgctttgggaggctgaggcgggtggatcacgaggtcgggagttcgagaccagcttggccgacrtaatgaaaccccgtctctattaaaaatacaaaaattagccagttgtggtggtgcgtgcctgtagtctcagctactcgggaggccgaggcaggagaatcat

SEQ ID NO: 15770 - DNA, 201 bp, Homo sapiens
aaaattctgctgggtatccatagagccccacagtagacgtatctgcttagcatagatgaatgcctatttttatatgactatcttgtgtgcatgatgggccrttttcttcgtagagctgtggctttaaagattttaatgacagggacccacgctcctttcccattcctaatgactcagttctttttgcttgccatttttctt

SEQ ID NO: 15771 - DNA, 201 bp, Homo sapiens
gctgggattacaggcgtgtgccaccacgcctggctaatctttgtatttttagtagagatggagtttcgctgtgttagccaggctggtctcgaactcctgastctcaagtgatctgcccacctcggcctcccacagtgctgggattacagcttctggccggctttacacttatattcagtttctaaatgaccttaggcttgc

SEQ ID NO: 15772 - DNA, 201 bp, Homo sapiens
tcaaaagatgctcctgcctcagcctcccgagtagctgggattacaggcgtgtgccaccacgcctggctaatctttgtatttttagtagagatggagtttcrctgtgttagccaggctggtctcgaactcctgagtctcaagtgatctgcccacctcggcctcccacagtgctgggattacagcttctggccggctttacac

SEQ ID NO: 15773 - DNA, 201 bp, Homo sapiens
tgcaacctccgcctcccaggttcaaaagatgctcctgcctcagcctcccgagtagctgggattacaggcgtgtgccaccacgcctggctaatctttgtatwtttagtagagatggagtttcgctgtgttagccaggctggtctcgaactcctgagtctcaagtgatctgcccacctcggcctcccacagtgctgggattac

SEQ ID NO: 15774 - DNA, 201 bp, Homo sapiens
catgcagaactgtgagtccattaagcctctttttcttcataagaagtttaatttataaactactcagtcgtgggtatttcttcatagcagtatgaaaatgsactaatacagggatcaacctgtgttattttgtagtcgggcttcagtctgttaatgcatattaaagggtatgacctttctctagaatacttactagtattt

SEQ ID NO: 15775 - DNA, 201 bp, Homo sapiens
ttgcctagcctcaggtatttatagcaacgcaagaatgaactaacacagtccttgttttttatttttcttcttcttactatttttttaaacttgagctcttkggaatgtcatgggaaaatggtattcagattgcctttcttatgtccaggcttcacgtgtacattctgtcctgagacacaggcctgtgtctgctgtattctc

SEQ ID NO: 15776 - DNA, 201 bp, Homo sapiens
agcagatgccagcactatgcttcttgtacagcctgaagaaccatgagcaaattaaacttcttttctgtataaattgcctagcctcaggtatttatagcaaygcaagaatgaactaacacagtccttgttttttatttttcttcttcttactatttttttaaacttgagctctttggaatgtcatgggaaaatggtattcag

SEQ ID NO: 15777 - DNA, 201 bp, Homo sapiens
gaggtgaggcctggtgggaggtgtttggatcagaagggagatccctcatgaatggcttttgccgtcctcttggtgatgagtgagctcttgctctgagttcrcacaagatctggttgtttaaaagtgtgtgccacctccctccctccccttccctttcctcttgctcctgcttttgccacgtgacatgcctgcacccccttc

SEQ ID NO: 15778 - DNA, 201 bp, Homo sapiens
gcctctgtgttttgctcctgggctccctgggaggctggacacagctcgtctcatctccacacagagctttgctgcctctacagttcttccaccttcattckccaggttctgtctttgggtagagagatggagtcttaatggcattttatctgtgtagctcacagtgaaagaaatctcacgtatgttacagtcaaccagagc

SEQ ID NO: 15779 - DNA, 201 bp, Homo sapiens
gtgagcagcaggggtcagtgttgagcctctgtgttttgctcctgggctccctgggaggctggacacagctcgtctcatctccacacagagctttgctgcckctacagttcttccaccttcattcgccaggttctgtctttgggtagagagatggagtcttaatggcattttatctgtgtagctcacagtgaaagaaatctc

SEQ ID NO: 15780 - DNA, 201 bp, Homo sapiens
ttcatgaagggagggttccacagagcaccaacccctattgtgtccttcactcataaggagggcatgtgcggtgtggagggtctgtgtcatgtgatgggacsccctccagtaggtgtggatcctgggacctgtgtggtcctgtgtaatggctcttggagttttgttacaggaaaggggtcccgatccagaccccaagagagg

SEQ ID NO: 15781 - DNA, 201 bp, Homo sapiens
tcataaattcacatgaacctagttgaaagaaaacacaatctagatacaggagatccattgttagagaaaagactagagatgactttttttttaattcagcrtaaagacctcttctttggatagcaagtttgtgcaggtgggttaatttttttattttttaaaccaaaggatgatgtaaaaatgtggccaaggagcatttgg

SEQ ID NO: 15782 - DNA, 201 bp, Homo sapiens
cctttggaccaaaccagtatatttctcaaatgtatttgattgatgtctcatgcctccctaaaatgcatgaaaccaagctgcgccccaaccaccttggacayatgttctcaggacctcctgggggctgtgtcacgaccgtggtcactcatatttagctcagaataaatctctccaaatattttacagagtttctcctctttt

SEQ ID NO: 15783 - DNA, 201 bp, Homo sapiens
aaactcctgacctcaggtgattcacctgcctcagcctcccaaagtgctgggatcacaggagtgagctaccacaccaggccaatcttttctcttctcgagayagagttgtactcttgtcacctaggctggagtgtaatggcatgatcttggcttactgcaacctctgcctcccaggttcaagcgattctcctgcctcagctt

SEQ ID NO: 15784 - DNA, 201 bp, Homo sapiens
acaggtagggttcatttgcattcctgcaggtatcccagagggagggttctggaggaactttgagctgtctagattacccgatgaaaacttgttcttttatmaacggccacttccggagctcgcgcaggggccgctcactagaccactgctccctgcccgtgtgccccagttcagagtaatctgtattcttcacagtccctt

SEQ ID NO: 15785 - DNA, 201 bp, Homo sapiens
ataacagtataaaaaataagttttgtctaatgttgcagctcaatcgttattcatcatacaggactgtctggtggcagacacagaaatttccccttagtgtyacctgtggatgcagcaggtcagtgagttcccccacttcctttagagacacgtgaaccactctaaatactgtcatttctcagggaaaatttacacagaggt

SEQ ID NO: 15786 - DNA, 201 bp, Homo sapiens
tgtgcctcaggtgcctcatctataaaatgggaataataagagcacctcatagggtcattgtgaattaatatctataagggcctagtgtaccacccggtacstgatggtcttaatacttgctattattagaacactcatgcattacttaatggtggggatacgttatgagaaatgcataataagattttgtcattgtgtggt

SEQ ID NO: 15787 - DNA, 201 bp, Homo sapiens
ggagtctggggcacaagggtggttacggaccacctggcaggctgaaagctggagttcagagggaggattgacagtcatgggcagaaatagttgggatggckagaactgggctctcaggaggagggatcatatttccaaaaggtgaggagtgatgggcagccacagaggtggaaggaaagaggttagggcagtgggaccaga

SEQ ID NO: 15788 - DNA, 201 bp, Homo sapiens
gggcgccgagacagggcgtgttcgctgttcagtgccggtgttgcagggagtgagggcagctggagtgcgttctgccgaagcttgtggttgcacgcccatcstcttaggggctaccttccgtggtgagtgtgtgcggtgttgcacttggggttgcttctcgctgcgtggccgcagcggggctgaacccttcccactccatcc

SEQ ID NO: 15789 - DNA, 201 bp, Homo sapiens
gcttggtgtgtgttggtctcttgcattccgtaagggtccttgctgtcagcaactgagcagatgcctctggaattggatatctgagtttgccccttgctgcscctgcccggctctgccatgaccatggtcattattgggggcactgttgatacagaggagaaagagaaggggatagggaagatgatgcatagcgggaacctt

SEQ ID NO: 15790 - DNA, 201 bp, Homo sapiens
ttctcagcagtgcacacacactgacacagtgcttaatatatacaagtattaaaatacttcacatggctacattaattataagtgtaagaatttttttttcttttttttttttttttttcctgaaaacagggtctcgctctgtcacccaggctggaatgcagtggtgcagtcacagctccctggggcctcaccctcccaggc

SEQ ID NO: 15791 - DNA, 201 bp, Homo sapiens
aaagcttccaagaacaccagtgtgggcaatagagtgagaccccatctctacaaaaaattaaaaaatgagctgagggtgatgtgcaagtcccagctttcagrgaggctgcggtgggaggattgctggaacccaggagtttgagtttgtagtgagctatgatcgtgttactaggtgacagaacaagaccttgtctcttaaaaa

SEQ ID NO: 15792 - DNA, 201 bp, Homo sapiens
taatttttttattttttaaaccaaaggatgatgtaaaaatgtggccaaggagcatttggtctagatcaagtgtgtgagcagcaggggtcagtgttgagccyctgtgttttgctcctgggctccctgggaggctggacacagctcgtctcatctccacacagagctttgctgcctctacagttcttccaccttcattcgcca

SEQ ID NO: 15793 - DNA, 201 bp, Homo sapiens
cccgagaggcggaggttacagtgagccgagattgccccgctccactccagtctgggcaacagagagagattccatctcaaaaaaaaaaaaaaaaaaaaaargaagaaatccccactttaacttctgtttcttgtaaagtattacgtattgtgtttatttgctcttatatgtctttgaatttagctttcatttctgaaataa

SEQ ID NO: 15794 - DNA, 201 bp, Homo sapiens
atctttttctttcaccaccctcccaatcctgaggagatgaactgagtgtctagcaccttgtataggtctgaatagggaacatttgtcatctgttgtctctraggacagccagtatgacacttcaagaatcttggtctccacaatcttttatcttaacctgagcatttcctttctattaatcccaggtcttagacaaactca

SEQ ID NO: 15795 - DNA, 201 bp, Homo sapiens
tcagcttcactgccttccctgcagacccgacctggagtcctttgttgccctaaatatttttctcaaagatcttttattaactttttcttttctgctcttgkttttcttcctcttacctactttaccatgtggtcctgtggcaagagtgagaaagaaaaatacattctagtggtgtgatcggctgaagcaacgactgaattt

SEQ ID NO: 15796 - DNA, 201 bp, Homo sapiens
tttaaaaacgctgtctccaaatatgaccattgaggactaagctctggtttttttatcttgccaaaattcgtatctagagagttggggagtcatgccctacwaaccataaattcttatcagatgggttttatttaaccctacatatcctgacttactttccaatctgactctggcataacattatgtgacaaagaagaaaat

SEQ ID NO: 15797 - DNA, 201 bp, Homo sapiens
tgccttggcctcccaaagggctgggattacaggcatgaaccgtggcgcctggcctgaagattctttcttatcatgtttataaaccaaagagaaaaaaaatkacattgttgctctggaagtggttccattcagagatagtaaatgctatgctgacctgaattgccagaccattggtgagcatttcatgagcaaaacttactt

SEQ ID NO: 15798 - DNA, 201 bp, Homo sapiens
atgaccttatgtccagtaaatgatggccatctcatctttacaatcatagagccaaggaatgatgggcttaaatacggcagtagtttttttttttttttttwaattttgtgacccatgtgtgttgaggattagacattcgtcattttgtgcaagaaataaccaaggatatctttttgctctgtgcaaacattgaggagccga

SEQ ID NO: 15799 - DNA, 201 bp, Homo sapiens
caatggtaactgagtaaaatgaggctgagacctgctgggctgcattcccagatggttaaagcattctaagtcacagggtgagataggaagtcagcacaaartacgggtcataaagaccttgctgataaaacaggttgcagtaaagaagctggccaaatccaacaaaaccaagatggcgatgagagtaacctctggtcgtcc

SEQ ID NO: 15800 - DNA, 201 bp, Homo sapiens
aatgtagtcaagaataaaatattattttccactttaatagttctctctgggacgcatgaaccagagcgactccatcttcaatggtaactgagtaaaatgargctgagacctgctgggctgcattcccagatggttaaagcattctaagtcacagggtgagataggaagtcagcacaaaatacgggtcataaagaccttgct

SEQ ID NO: 15801 - DNA, 201 bp, Homo sapiens
aatatcagctagactccatccatactccaaaaaacccataatgtgtcaggttacattctcttcaagaggagctattctgagctccttttttttggatgctrttcatttgatataatcatattgaactattggatattgacctcactgaagtgaaattggtcacctctacatattgattattaactcccaggagtcttaaaa

SEQ ID NO: 15802 - DNA, 201 bp, Homo sapiens
ggataactattagaggggcataggggaaaaaaactacagctgcaacatcaaagggagaagagagatttatcctgaaccttgcactacaaaaggcttttccrtaggactttaaagagtaaaactatctcagtctctctctgtgtgtgtctctctcctcctattccagtcccctctttcccctgttcccttctccatccccct

SEQ ID NO: 15803 - DNA, 201 bp, Homo sapiens
tacctttaaaagatgttttgaggagtttaggtaccaagaactttctgatggggaaaacttcttaggctggagacaggtatcagacaggttctacagttttstagtagtccagccagattctagaaatgctcacttcctaccatgagaggcagaggagtacagcacataggaggggaacctggatttggatagacgtggatt

SEQ ID NO: 15804 - DNA, 201 bp, Homo sapiens
cacttgagcccagggagttcaagaccagcctgggcaacatagtgagacttcgtctgtacagaaaatgaaaaaaaattagccgggcatggtggcacatgcckgtagtctcagctacttgggtggctgaggtgggaggatgccttgagcccagaaggtcaaggttgcaatgagccaagatcacaccactgaactccagcttca

SEQ ID NO: 15805 - DNA, 201 bp, Homo sapiens
gacagcaaattacctttaaaagatgttttgaggagtttaggtaccaagaactttctgatggggaaaacttcttaggctggagacaggtatcagacaggttstacagttttctagtagtccagccagattctagaaatgctcacttcctaccatgagaggcagaggagtacagcacataggaggggaacctggatttggata

SEQ ID NO: 15806 - DNA, 201 bp, Homo sapiens
ctcatgcctgtaattccagtactttgggaaggcgaggcaggaggatcacttgagcccagggagttcaagaccagcctgggcaacatagtgagacttcgtcygtacagaaaatgaaaaaaaattagccgggcatggtggcacatgcctgtagtctcagctacttgggtggctgaggtgggaggatgccttgagcccagaagg

SEQ ID NO: 15807 - DNA, 201 bp, Homo sapiens
tcttctaacgcagcccttccttagagacagcaaattacctttaaaagatgttttgaggagtttaggtaccaagaactttctgatggggaaaacttcttagkctggagacaggtatcagacaggttctacagttttctagtagtccagccagattctagaaatgctcacttcctaccatgagaggcagaggagtacagcaca

SEQ ID NO: 15808 - DNA, 201 bp, Homo sapiens
ttggcatctgtggacctatttgcaagaaaatatgttgcatttaaccagtattgctaaaaagtatcagagaaaagggaaacccatataatatatttggggtrtattgtgtcacatctcttatttcatgttaacttcaatgataaaattaggtagcatcacattttaaaacacaaaaaactccagaatgtttattctactgaa

SEQ ID NO: 15809 - DNA, 201 bp, Homo sapiens
cgtcggccaggctggtctcaaactcctgacctcaggtgattcacctgcctcagcctcccaaagtgctgggatcacaggagtgagctaccacaccaggccartcttttctcttctcgagatagagttgtactcttgtcacctaggctggagtgtaatggcatgatcttggcttactgcaacctctgcctcccaggttcaagc

SEQ ID NO: 15810 - DNA, 201 bp, Homo sapiens
cctatggaggggagacagtttgtgggctgctgaccagttgggggaagcctattcttgagctgattgattgttgattttgtgaatgtgcatcagtggtgcastaccggctggcacatgcctgttgcaggtattaccgatggccgtagatacatgtccttttaggagtaaagctgttgctcaggaaggggctgtgtcagtatt

SEQ ID NO: 15811 - DNA, 201 bp, Homo sapiens
gcccgtctttcttcctgggagagttgtatcttctaacgcagcccttccttagagacagcaaattacctttaaaagatgttttgaggagtttaggtaccaasaactttctgatggggaaaacttcttaggctggagacaggtatcagacaggttctacagttttctagtagtccagccagattctagaaatgctcacttcct

SEQ ID NO: 15812 - DNA, 201 bp, Homo sapiens
cctcccagctccccaattaaagctctttattgatgtatggctttgctggaggggtcgcacatcagaattgtagtgcaatttagaagtggtgttcctgcaaratttcagagttcatacgtcctcctgaagatgctttgggagttaacacaagattcaggcattaactaatttttatatcctcagaggagaagaaatccatac

SEQ ID NO: 15813 - DNA, 201 bp, Homo sapiens
atacatagtaaaggcatgtactcatataaaagagcctagatcagtccttttataacactgagactgcttttttccattgatggattgaagtttttttttcytgttttttttttttttttttttcatattctactcctctctctttccagtgttttggaattttctaggcatttttcctacccttccttttcttacccttcg

SEQ ID NO: 15814 - DNA, 201 bp, Homo sapiens
tgaagattctttcttatcatgtttataaaccaaagagaaaaaaaatgacattgttgctctggaagtggttccattcagagatagtaaatgctatgctgacytgaattgccagaccattggtgagcatttcatgagcaaaacttacttgaaagcattgaaaacttgaaattgttagaacaagttctttgttttcatttatat

SEQ ID NO: 15815 - DNA, 201 bp, Homo sapiens
ccaggcctctgggcctgtgatgggaggggtttcagcaaaggtttctgaaatgcctttggggacttttctccattatcttggatattagcagttggcttttrgttatgcaaatatctctagcaagtggatgcctcacagcctgcttgaattcctctcctgaaaaagctttttctttctctgccatatggccaggctgtaaat

SEQ ID NO: 15816 - DNA, 201 bp, Homo sapiens
ccctcatgacctaatcacctcccaaaggccccgcctcccaataccatacactggggattcgggcttccgtatatgaattttttggggaaaacgttcaaatrtgtagtccctagcaaggtgggagccatgcataggggatggcttggtaacgggaaaccaggggcctctggactgcctatgagagaaactcctgttttgtgt

SEQ ID NO: 15817 - DNA, 201 bp, Homo sapiens
catagtaaaggcatgtactcatataaaagagcctagatcagtccttttataacactgagactgcttttttccattgatggattgaagtttttttttcttgktttttttttttttttttttcatattctactcctctctctttccagtgttttggaattttctaggcatttttcctacccttccttttcttacccttcgctg

SEQ ID NO: 15818 - DNA, 201 bp, Homo sapiens
gtataaactcctaaaatgctttgagttgttggttgtggaattattaattttagatcatagaacagaatcttccttactctattcaacagaattgaaactgygattgttacaacaggtgattttgattcttcctatggaggggagacagtttgtgggctgctgaccagttgggggaagcctattcttgagctgattgattgt

SEQ ID NO: 15819 - DNA, 201 bp, Homo sapiens
agcttttaaaatgcttcttgctcatgcatcctgtagatatctagaaaattccagtagaatattttgactggtaaaatattgcagtggcctttttggaatasctaaaattgttcccgccacgtatgtataggatttagtcatagcacaattcatattgctaactggttatttttttcagagagtttggttgggagtagttta

SEQ ID NO: 15820 - DNA, 201 bp, Homo sapiens
atcatatatgacaaccataagtatatatgcttcataatactcatttttatagactgtttgtggtacagaaattctcttttgtgcatttttgctctgtttcyccccccccattagccatctgaaacaaactgtgccaagcacttagctaatcatatacgaagaagcatttcttcttctgacggcaatgcaagaaaaccaaaa

SEQ ID NO: 15821 - DNA, 201 bp, Homo sapiens
tatatgacaaccataagtatatatgcttcataatactcatttttatagactgtttgtggtacagaaattctcttttgtgcatttttgctctgtttctcccsccccattagccatctgaaacaaactgtgccaagcacttagctaatcatatacgaagaagcatttcttcttctgacggcaatgcaagaaaaccaaaaggaa

SEQ ID NO: 15822 - DNA, 201 bp, Homo sapiens
ttctatcctgatctttaatttgtatgtgagaaagaagctaaaactacatatagatgtatattcttactgttaatttgttcatttattaaatgaaatatatrtacacattatatctattttatatatatatatataaaatctcaatcactaggaacagtgcttggcacatactgagcagtacctagtattagttagctattg

SEQ ID NO: 15823 - DNA, 201 bp, Homo sapiens
aatttgtatgtgagaaagaagctaaaactacatatagatgtatattcttactgttaatttgttcatttattaaatgaaatatatgtacacattatatctattttatatatatatatataaaatctcaatcactaggaacagtgcttggcacatactgagcagtacctagtattagttagctattgttatcatcataattgt

SEQ ID NO: 15824 - DNA, 201 bp, Homo sapiens
aggggtctgttattgttaatcttttaagaatggaccctgttaaaacaaaagctgctttgaattcgaagatgcgttaggaatgaaaggtacctaacaaaccrcctctttgtcctatttggtagagaattcatgaagggagggttccacagagcaccaacccctattgtgtccttcactcataaggagggcatgtgcggtgtg

SEQ ID NO: 15825 - DNA, 201 bp, Homo sapiens
tttctttttttttttttttctttttttgagatggagtttctttcttgttgcccaggctccagtgcaatggcatgatctcggctcactgcaacctccacctsctgggttcaaacgattctcctgcctcagcctcccgagtagttgggattacaagtgcacacacccacacccagctacttttgtatttttagtagagatggc

SEQ ID NO: 15826 - DNA, 201 bp, Homo sapiens
gggctttattaaacaactactatatcctctagtgactgctgagtcagtggcctagaaattctttaaataacttcactgatacaaccagtccaccacaaggmtagggcatttcaaacctaataggtgagcccattcattttaaaacagcccttcactgtaggaaattatctctaagaaaaacttaataaacatctgatgaag

SEQ ID NO: 15827 - DNA, 201 bp, Homo sapiens
tccacctcctgggttcaaacgattctcctgcctcagcctcccgagtagttgggattacaagtgcacacacccacacccagctacttttgtatttttagtaragatggcgtttcaccatgttggtcaggctggtctggaactcctgacctcaggtgatccacctgcctcggcctcccaaaatgctgggattacaggcatgag

SEQ ID NO: 15828 - DNA, 201 bp, Homo sapiens
tagtagagatggcgtttcaccatgttggtcaggctggtctggaactcctgacctcaggtgatccacctgcctcggcctcccaaaatgctgggattacaggmatgagccactgcgcccggccctaaacttttccttttcaatgaatgcatgttagttgccttcttgttctctttggagttgtttgcatttttggctgtcggt

SEQ ID NO: 15829 - DNA, 201 bp, Homo sapiens
ctttttctgtttcatttcctcatggagccttggattaccttttatgcagttaagtcaacattaaaaagtttcagtaggctgggtgcggtggctcacgcctrtgatcccagcactttggggtgaattgtggggtgattcaccatgaggagggtgaatcacttgaggccaggagttcaagaccagcctttccaacatggtgaa

SEQ ID NO: 15830 - DNA, 201 bp, Homo sapiens
ctgatttgaatgtggttaggattctggataaatgagaggtatctataacataattggtatatctgtttttatgtctgttattagcatcctattttgggggrttggcgtagtctaagcaatgtgtctgctaactttttctgtttcatttcctcatggagccttggattaccttttatgcagttaagtcaacattaaaaagtt

SEQ ID NO: 15831 - DNA, 201 bp, Homo sapiens
aactgatttgaatgtggttaggattctggataaatgagaggtatctataacataattggtatatctgtttttatgtctgttattagcatcctattttgggsggttggcgtagtctaagcaatgtgtctgctaactttttctgtttcatttcctcatggagccttggattaccttttatgcagttaagtcaacattaaaaag

SEQ ID NO: 15832 - DNA, 201 bp, Homo sapiens
cattgcatatgaaagtgcttttaattttaaaagattaaattgtgagtttctggattttgtattacctcaaagtaattattaggcaattaatcaccattctrcactgttacagactattttaactgatttgaatgtggttaggattctggataaatgagaggtatctataacataattggtatatctgtttttatgtctgtt

SEQ ID NO: 15833 - DNA, 201 bp, Homo sapiens
aaagtaaggttttgtactactaagcatatgagatgcccgtctttcttcctgggagagttgtatcttctaacgcagcccttccttagagacagcaaattacytttaaaagatgttttgaggagtttaggtaccaagaactttctgatggggaaaacttcttaggctggagacaggtatcagacaggttctacagttttctag

SEQ ID NO: 15834 - DNA, 201 bp, Homo sapiens
tcgtgagttttagatggggctctaattttttcttagtaaacaggaagctatttagagcttggtttgtatggtatcttgaaaaaagtcattctgtatatgayagtatacagaaaaatgcatgaacaaactcctagccatctggaattagaggaaattctctgtttattattctggttaacaatttttagttttccatagatc

SEQ ID NO: 15835 - DNA, 201 bp, Homo sapiens
ttattattcttactttgtttaatttctcaagaggttagaattaagctttgaagataaaagtaaggttttgtactactaagcatatgagatgcccgtctttyttcctgggagagttgtatcttctaacgcagcccttccttagagacagcaaattacctttaaaagatgttttgaggagtttaggtaccaagaactttctga

SEQ ID NO: 15836 - DNA, 201 bp, Homo sapiens
aaatacgaatgtagctcacccttagaaattagttaattatgaaaatgtgtgaaaatatagtcacaaattagcagatgattgtttatcttcttctttgtaarttgttaatcattgctatcgtgagttttagatggggctctaattttttcttagtaaacaggaagctatttagagcttggtttgtatggtatcttgaaaaaa

SEQ ID NO: 15837 - DNA, 201 bp, Homo sapiens
aggataaaatgagataggtataggatgtgtattaattgtttcataagccatatagatatgtacagttattacagattcaattttttttaaaaaaatacgartgtagctcacccttagaaattagttaattatgaaaatgtgtgaaaatatagtcacaaattagcagatgattgtttatcttcttctttgtaaattgttaat

SEQ ID NO: 15838 - DNA, 201 bp, Homo sapiens
ccccagttcagagtaatctgtattcttcacagtcccttcttccagtgaaagcatctcttttacctttcaccaagccttacctctaaaaggccagtgatacmttagacatttcagaaagctcaaaatgatgactcaaaactataataagcaacgtgcctgtccctttacttttgttcccctgggagttatcaattggtcgtc

SEQ ID NO: 15839 - DNA, 201 bp, Homo sapiens
gcaacctatgcctcctgggctcaaatgatcctcccacatcagcctcctgagtagctgggaccacaggtacgcaccaccacgccatgctgatttttgtaggttttttttttggtatagacgggtttttgccatgttgctcaggctggtctcgagctcctgagcttaagcaatctgcctgtgctggccttccaaagtgctggg

SEQ ID NO: 15840 - DNA, 201 bp, Homo sapiens
atgtgacaccattgggctgaagtggacttagtaatgtcatattaacattctgagagagattatatacctaaatgagatcaagcctcacatttagctaagasacttgactttctttttaaatagcatgccaaaaaaaaaaaaaaaagtatcttcctatgttgctattaattctttgtaggatatttgcccaggatattccaa

SEQ ID NO: 15841 - DNA, 201 bp, Homo sapiens
tgcccttctattttttgtttgcagaatgatttatcatgaaatgttgaattgtgtcaaatgccttttctatgtctatgtggcttttattttttgtatcttcmtttttatatatttctggatttcatttgttagtattttacttaaaatttttccacgttcatgagggatattagtttgtagttttcttctggtattatagta

SEQ ID NO: 15842 - DNA, 201 bp, Homo sapiens
ggcgacagagcgagactctgtctcaaaaaaaaaaaaaaaaaaaaaaggaagaaaatgtacatttcttgcaaatcaaaaccacaatgagataccatctcacrccagttagaatggtgattattaaaaagtcaggaagcaacagatgctggagaggatgtagagaaataggaacacttttacactcttggtgggagtataaat

SEQ ID NO: 15843 - DNA, 201 bp, Homo sapiens
taggtgaccagtagaagaaaagtgcctggtgccaatttttattccatagtataaaatagtctctcaggacagggtttttggtgagagaagcacaggatgtygctgggtgactgagaccgggtcaggaaatagggaggcagagggcaacagtttctctagaatttaaaatttggttgcttttggaagagaaagcaagagatt

SEQ ID NO: 15844 - DNA, 201 bp, Homo sapiens
gtgaattttacatgcacacttaaaagttttatgtgccccatcagtgttccataaatgttaggttacattagttgatatgttataactcccagtaatattgtttttttttttccttaagttagttttcttaaataactttagagaggaggaaaaagtttttcacattgactgccgcttctctatttaccatttctgatgctc

SEQ ID NO: 15845 - DNA, 201 bp, Homo sapiens
caagaaaaaacagcatgtggtcattgtctctatttgtaaattgttttttattgatattttcaaggggatttttactgattttctttagagaatttttgagktattaaattagttgaatattcatggcactaaggaaattcaccattcagatcagaacatattttttttcttctgtgaatgcaaagaattacaagtgttctg

SEQ ID NO: 15846 - DNA, 201 bp, Homo sapiens
tgtgtgtatatatacatatatgtatatgtgtgtatatatacatatatgtatatgtgtgtatatatacatatatgtatatgtgtgtatatatacatatatgtatatatgtgtgtatatatacatatatgtggctgtatacatgtatatatgtgtatatatgtatatagacacacacatacacatatatacagatatacacat

SEQ ID NO: 15847 - DNA, 201 bp, Homo sapiens
gtgtgtatatatacatatatgtatatgtgtgtatatatacatatatgtatatgtgtgtatatatacatatatgtatatgtgtgtatatatacatatatgtatatatgtgtgtatatatacatatatgtggctgtatacatgtatatatgtgtatatatgtatatagacacacacatacacatatatacagatatacacata

SEQ ID NO: 15848 - DNA, 201 bp, Homo sapiens
gtatatatacatatatgtatatgtgtgtatatatacatatatgtatatgtgtgtatatatacatatatgtatatgtgtgtatatatacatatatgtatatrtgtgtgtatatatacatatatgtggctgtatacatgtatatatgtgtatatatgtatatagacacacacatacacatatatacagatatacacatatgta

SEQ ID NO: 15849 - DNA, 201 bp, Homo sapiens
gcctcagcctcccaagaggctgggactacaggtgcgcaccactgtgcctggctaatttttgtatttttagcagagactgggttttgccatgttggccaaaytgccttgtggtctggaactcctgacctcaagtgatccacccgccttggcctcccaaagtgctggcattataggcatcagccaccactcctggccaagaat

SEQ ID NO: 15850 - DNA, 201 bp, Homo sapiens
accaattttgcagaagaaggaaagatatttaggggaaaatactcactaactagaaaatccccttagcttaggaattcatttctgtgctattccataaataygtagtttatacttttcatggcttctgctgcttttttttcatctactttgcaatacacatattttttctttttctttttttttttttaagacagtcttgct

SEQ ID NO: 15851 - DNA, 201 bp, Homo sapiens
aagtgaagatgatcgtgaatagcctgtggtcctttctgttaactctgacttgtagacatcagcgtgtgactccttttcccttaagggagtatgtctagctygcatccagcgtctcctgtgtgctccagttagcagccatcattagcaatctgtgatgcctctgccgtctccactgacagcacctaaatagagacatcactt

SEQ ID NO: 15852 - DNA, 201 bp, Homo sapiens
atttaattttctggaaagcagtgctttcaagtagaatagtgaataattgaatttcccatttgattttagaaaaaaaatgaattcccattgtttactttagscatctgttcatctcccttcttcactgttgtccccttcctgccctttcaaacaagccatagacttggctaactgtagactacagcttctcctcctctctct

SEQ ID NO: 15853 - DNA, 201 bp, Homo sapiens
tcaagtagaatagtgaataattgaatttcccatttgattttagaaaaaaaatgaattcccattgtttactttagccatctgttcatctcccttcttcactrttgtccccttcctgccctttcaaacaagccatagacttggctaactgtagactacagcttctcctcctctctctcaaatgtggaggctcgtagcaaactt

SEQ ID NO: 15854 - DNA, 201 bp, Homo sapiens
cttcttcactgttgtccccttcctgccctttcaaacaagccatagacttggctaactgtagactacagcttctcctcctctctctcaaatgtggaggctcrtagcaaactttgacctatcttcgtaggcaatgtgaaggagaaaagcaataagctctctgcccagagtcagcacattagcatttgagaaatcaggttatct

SEQ ID NO: 15855 - DNA, 201 bp, Homo sapiens
ctctgcccagagtcagcacattagcatttgagaaatcaggttatctgactttggttgattgagctgcctttgaactgccttagtttccccaaaatgatcaktctttgtgagatggaagacaaaagtgattcaaagacacttcattcagaagaaagcacgtaacgctaggtgtggaggctagtgcctgtaatcccagcactt

SEQ ID NO: 15856 - DNA, 201 bp, Homo sapiens
ctatataatttgtaagtcattttcattggggagcatagtagtgagttgtagataggaattgcctcagcttatagttattgacagctttgcaggtgccaaayacagctctagggactatataatcactcttcagtaaccataggggattggttctaggacccccccccaccaccctctgcccaccttacaataccaaaatct

SEQ ID NO: 15857 - DNA, 201 bp, Homo sapiens
tcttcaagacgttggactttaagatgacttcttggctatgacaccaaaggcacagacaacaaaagaaaaaataggcaaattggacttcatgaaaatttaaraattttgtgcatcaaaagacaacatcaacacaatgaaaaggcaacccagagcaatatggccaatgagagttgcctagtgctcatccctcccccaaaaggg

SEQ ID NO: 15858 - DNA, 201 bp, Homo sapiens
gtgtatatatacatatatgtatatatgtgtgtatatatacatatatgtggctgtatacatgtatatatgtgtatatatgtatatagacacacacatacacrtatatacagatatacacatatgtagtttgagttatataaaaagtgtgctcttaagacagatagcttgcttttctctaacctctattgtctggaatattgt

SEQ ID NO: 15859 - DNA, 201 bp, Homo sapiens
cttgcctaaatggtcaagtgattttttgacaagtgtgcccaaaccactcaatggggaaaagacagtcttgttaagaaatgatgaagtgaaaaactacatargcatatgcaaaagaatgaagttggacccttgcctaataacatatagaagaattaactcaaaatgaataaaaaacctaaatgtaagaactacaactataaa

SEQ ID NO: 15860 - DNA, 201 bp, Homo sapiens
gttatttatcttcatgacacaaactgtactaatggaatgtttgtgaatgaaaatgtactttgatgaaccagaaccagatactctatttatttatttatttrtttgtttatttatttatttatgtgagatagggtcttgttcagttgtccaggctggagtgcagtggtgcagtctcagctcactgcagcctcaaactctcag

SEQ ID NO: 15861 - DNA, 201 bp, Homo sapiens
gtggtcttttggtgctcatatcatgtatggaaggaggtggcagggatcaggagggcatatcccctttgcctctcattccctacccgacttcccagagaaagcagcattttcaaacttgcagaaatatgtgagggctctcagaactgcttaggatcagccatgtacattgtgaaaagtgagtcatggctttttctctgcaat

SEQ ID NO: 15862 - DNA, 201 bp, Homo sapiens
acgcttatcagtgcctcctgaagaggcagtcccctggagtcttcttatctcacctgatgagtgtggtcttttggtgctcatatcatgtatggaaggaggtrgcagggatcaggagggcatatcccctttgcctctcattccctacccgacttcccagagaaagcagcattttcaaacttgcagaaatatgtgagggctctc

SEQ ID NO: 15863 - DNA, 201 bp, Homo sapiens
gaattgaacaatgagaacacatggacacgggaaggggaacatcacactctggggcctgttgtggggtgggggaaggggggagggatagcattaggagatayatctaatgctaaatgacgagttaatgggtgtaacacaccagcatggcacatgtatacatatgtaacctgcacattgtgcacatgtaccctaaaacttaaa

SEQ ID NO: 15864 - DNA, 201 bp, Homo sapiens
ttgacggagtgaagaggcacctaaagaatgagagtaaatatttacaaagtatgtatctggcaagaggttaatattcagaacataaaaggatcataacagcaaaaaaaaaaaaaacctgattaagaaaatgggcaaactaccttaatagacatgtgtccaaagcagacatacagatggccaacatgtatatgaaaaaatgct

SEQ ID NO: 15865 - DNA, 201 bp, Homo sapiens
gctgttctcctaatatgggtagggtcgggcgtggagctggcagcggcgctgtgtgcgcctgcgcggggcgccgagacagggcgtgttcgctgttcagtgcsggtgttgcagggagtgagggcagctggagtgcgttctgccgaagcttgtggttgcacgcccatcgtcttaggggctaccttccgtggtgagtgtgtgcgg

SEQ ID NO: 15866 - DNA, 201 bp, Homo sapiens
tggcaagaggttaatattcagaacataaaaggatcataacagcaaaaaaaaaaaaaacctgattaagaaaatgggcaaactaccttaatagacatgtgtcmaaagcagacatacagatggccaacatgtatatgaaaaaatgctcaacatcagtaatcatcaagaaagtgcaaatcagaaccacgataaaataccacctca

SEQ ID NO: 15867 - DNA, 201 bp, Homo sapiens
cacctcactccagttagcatggctattgttaaaaagagaaaataagggttggcaaggatgtggagaaagggaaacacattgttggtgggattgtaaattarccattatggaaaagagtatggagatccttcaaaaaattaaaaataggactaccatacaatccagccattccattactaggtatatatccaaaagaaatta

SEQ ID NO: 15868 - DNA, 201 bp, Homo sapiens
tcccctcattatcccaagcaagtcttcccagggaaaatttgaaatagctgagacttgtgtgtgtcatccttcccggatcctttccctgctccacgttgttytcatgcttgccaagggccctgaaaatacagtgtggtgagaaatgctgctctgtgcccaaatgtagctgacttccctcctcttctccctcttcccaaagta

SEQ ID NO: 15869 - DNA, 201 bp, Homo sapiens
atgacagtgtggccttgcattccccacagaataaatttgagagctgtcatgagacatcccagcttacattgcgttgatgatgtacagaaagaaaagcaacytcagacctagattctcattccacttaggtttttagaccgtcatctattacgcagacagaagagaatgggccacaagcgtgatgttcactgcaataggcta

SEQ ID NO: 15870 - DNA, 201 bp, Homo sapiens
catgcttgccaagggccctgaaaatacagtgtggtgagaaatgctgctctgtgcccaaatgtagctgacttccctcctcttctccctcttcccaaagtaaaaaaaaaaaaaaaaaaaaaaaaaaaaaaaaggtgtgttcctgcaatcacccctctgaaccagatgttaaaagcaaagcagttgtgtaaatgattgaaaatc

SEQ ID NO: 15871 - DNA, 201 bp, Homo sapiens
tggaagcaatgtaaaatgctatttttcttcattggcataaggacttctgggcctcttcacaccagcacacacttaaatcaggtgctgcttgtgttggaacyatttggtagggtggtggttttctctttttaaatctttttgtgtgtgtgtgtgtgtgtaagttgtactatcttccccgactagatccgaagagtagccgtt

SEQ ID NO: 15872 - DNA, 201 bp, Homo sapiens
aggcacttagggtttgatttagggtacttaggctgtgattactgagaaggacttcttagacctgatctgtattggatgaagtgaccttcactttttttttccccccccccaggaaacttggatttaactggccagaagcaggtattcaaagcagagaacaatccctgggtgacccccattgcagaccagttccagcttggc

SEQ ID NO: 15873 - DNA, 201 bp, Homo sapiens
gaattctgggccctgtgagggaggtgagtgacttgtttttgtgtataactccccagtgctcctaaatcatctcacattattgattataccaacaatattcmataccttttgaaaggagggagaaaatctgttaagtgtcatgtactggaaagaccaaggcctctgaaagagccagataaattggtttttaaatacctgcct

SEQ ID NO: 15874 - DNA, 201 bp, Homo sapiens
atgaaaatgataaattttatcctatgtgtattttaatgcaaataaaaagtgggggaaaaattaaccagtcaactaacaaaagcagagtattttattttttwaaaaataaccaatttaaagtagaaccaaaaaaactaatcaaaaagaaaagaaagtgtattcacctaatgcattaccccactagggtgttttaatttaaaa

SEQ ID NO: 15875 - DNA, 201 bp, Homo sapiens
tggtggaaatggaaaattgtatgacagtttctcgaaaaattaaaactaccatacgacccagcagtttcacttctgagtatattcccgaaataattgaaaayggtctcaaaaagatatgtgtacagccatatttatagcagcattgttcacagtagctaaaatgtgaatgcagcacacgtgtacatcaacagatgaatggat

SEQ ID NO: 15876 - DNA, 201 bp, Homo sapiens
ttttttctaaaaagaccacccacggaatgagagaaaatatttgtaaattgtatatctgataaaggattaaaatttagagtatatagagaactaaaactcarcagcagcaacaataaaaaacacaacccagttgaaaaatggcaagggacttgaataactttttcccaaggaaggtacataaatggccaataagcacatgaa

SEQ ID NO: 15877 - DNA, 201 bp, Homo sapiens
cagggctcacttctcagcagtgcacacacactgacacagtgcttaatatatacaagtattaaaatacttcacatggctacattaattataagtgtaagaatttttttttcttttttttttttttttttcctgaaaacagggtctcgctctgtcacccaggctggaatgcagtggtgcagtcacagctccctggggcctcac

SEQ ID NO: 15878 - DNA, 201 bp, Homo sapiens
tcccactcatatgagatctttttttcttaacaacaacaaaaacagagttggtatccttgaaacaggaagtagaatagtggttaccagagactgggaggggmgggaagagatggaagggtgcagagatgttggccagtgggtacatagttacatttagacagtaggaataaattttgatgttctgttacacagtagactgac

SEQ ID NO: 15879 - DNA, 201 bp, Homo sapiens
tcagggaggctgcggtgggaggattgctggaacccaggagtttgagtttgtagtgagctatgatcgtgttactaggtgacagaacaagaccttgtctcttaaaaaaaaaaaaaagcttcccagcataatcgtaatgctgctgattttattctttttattaaagagatttcactgcagaaactctttcccaagcagcagctg

SEQ ID NO: 15880 - DNA, 201 bp, Homo sapiens
atatatccaaaagaaattactatgttgaagagaaaacttcaactcccatgtttattgcagcactgtttacaataactaagatacgtaatcaacctaagtgyccattaatgcaagaatgaatacagaaaatgtatatatacataatggaatattattcagccatgaaagtatgaaatcttctcatttgccacaattggatga

SEQ ID NO: 15881 - DNA, 201 bp, Homo sapiens
gtcagcgctattttgaggaggaagaaaaatgttgttggaagtgtgcttaactatgctactgtataatcttcacttaaacttctgttataatagaaaggtgrttaatgagaccccatgaacctgcctcctcctgtcaaccttttgacgtgtctgcaaatatacagaattttaaaaataacctctcagtgagctagagatagt

SEQ ID NO: 15882 - DNA, 201 bp, Homo sapiens
attcttacagattgagcctgagggaaagagagaattattgtcaaaataaatgagataattacatgtgtgtaattttacaaagcgctctacaactgtgtttstcagtgatgagaaatgcctagttctaaaagttccttgggaaggagtggaatttgaagagttttagatggcaagatgtgtttacttttggttttaaacaaa

SEQ ID NO: 15883 - DNA, 201 bp, Homo sapiens
ttttcagcatggatttttaaaatgctaagtgaattgtatttctgcctggtgagttattgccttaaaggggttgggaagttgcaacacataaagcgtttccrttttgtagtataaatttcaggaagcccagtgtcaggttcagcgtgattgaacatgtgcatcaatctgtgttaacaccagctggaaaagcttgccactgtg

SEQ ID NO: 15884 - DNA, 201 bp, Homo sapiens
gtgggtttttctcatgttgttcttgtgatagtgaataagtctcatgagatctgatggttttataaagggcagttcccctgcacacagtctcttgcctgccrccatgtaagatgtgcctttgctcatccttcatctgctgccatgattgtgaagcctccccagccatgcagaactgtgagtccattaagcctctttttcttc

SEQ ID NO: 15885 - DNA, 201 bp, Homo sapiens
gagcagcacgttgtttttctacagcttctctggattatcctgtttggttttgcatacatttattaccatgtcccttgcctcttttcctcctccctacctgmctgccttagctcatctcactgtttttttcagtaacgttattacagagaaagtggatttcagtattcctctctatcaggtgatgcgtcaggtgacagagaa

SEQ ID NO: 15886 - DNA, 201 bp, Homo sapiens
ttagattgtcagcgctaaaaggaatcctgtgggacacttttcacacttggagcagccagcttgtcagagggtcctgggccaggttccaggccctgctgccygctctgctacatggatcaggtttctgatgccttaccctgctcagagccaaactgtacaacccagcccgtgccttcctgctctcctgcctggatgggaagt

SEQ ID NO: 15887 - DNA, 201 bp, Homo sapiens
gcagattccccgctgcacaggttggtagatggcaggcccctgcgtaaaccccattttggtccaacctcctgatccctcctgtctaactagtttacactcayagtggcatgttcatgaatgtttactgaattaacagataactgtggatatcataaaagtgctctttttatttcatgtgggggcaagattgaatttcttcat

SEQ ID NO: 15888 - DNA, 201 bp, Homo sapiens
cagattgaacgtcagtgtgagatcgtgcactgccgtaatctgtctttcaggttaatgagaattaggaattgggaggggaaaaccagttggagatagctccraaccaggtggtgatcagtggtggaggtagatgtccaatcggtctcggtcacccttcggggtccaggggttgtgagatcctgacccacccagggcaggaca

SEQ ID NO: 15889 - DNA, 201 bp, Homo sapiens
gagaattaggaattgggaggggaaaaccagttggagatagctccgaaccaggtggtgatcagtggtggaggtagatgtccaatcggtctcggtcacccttyggggtccaggggttgtgagatcctgacccacccagggcaggacaaatgccctctgcttgtcactgcctttttggaagggactctgaggagtgtgagcatt

SEQ ID NO: 15890 - DNA, 201 bp, Homo sapiens
aaaaactatagcagtattctaaatgaaaactaggtttaatttgctatcaataaaattacatacatagtcattgatatggtttggctgtgtccccacccaartctcatcttgaattgtagctcccataatccccatgtgtcgtgggagggacccagtgggaggtaactgaatcatgggtggcaggtttttcccatgctgttc

SEQ ID NO: 15891 - DNA, 201 bp, Homo sapiens
ttttttttttttttttttttggttggtaggctattaattactgcctcaatttcagaatttgttattggtctcttcagagatttggcttcttcctgctttaktcttgggagggggtgtgtgtccaggaatttatccgtttcttctagattttctagttttagtagaggtgtttatagtattctgatggtagtttgtatttct

SEQ ID NO: 15892 - DNA, 201 bp, Homo sapiens
tcaatttcagaatttgttattggtctcttcagagatttggcttcttcctgctttagtcttgggagggggtgtgtgtccaggaatttatccgtttcttctarattttctagttttagtagaggtgtttatagtattctgatggtagtttgtatttctgtgggatcaggggtgatatcccctttttattttgtctatttgatt

SEQ ID NO: 15893 - DNA, 201 bp, Homo sapiens
taattattgttcattctatttttttttttaaccattaaccattgctacttttcctcccagccccctactaccccttccagcctccggtcaccatccttctmctctctatctccatgagttcaattgctttgatttttagatcccacaagttagtaagaacatggactacctggttcttgatttaacatctacaacattttc

SEQ ID NO: 15894 - DNA, 201 bp, Homo sapiens
aaataacagagagagtagctggaggcttaacttatgatcagtgttcattacaacaaatgacattttcactgcagagttaccgtaagattattgactcttaygtaatatggttcccatctgaacagattcgagaacagcttagcctgtgaatgggagagctgcagaggactgaagatatactcagtccccttattcatgttt

SEQ ID NO: 15895 - DNA, 201 bp, Homo sapiens
cgtctctacaaaagaaaaagaaaaagaaattatccaggcatggtagtgcatgcttgtcattgtagctattctggaggctgagttgggaggatcacttgagyccaggacattgaggctgcacagagtcgtggtcatgccctgcactcgagcctggatgagagagcacgaccctttctcaaaagaaaaaaacaagaaaaaaca

SEQ ID NO: 15896 - DNA, 201 bp, Homo sapiens
aattatccaggcatggtagtgcatgcttgtcattgtagctattctggaggctgagttgggaggatcacttgagcccaggacattgaggctgcacagagtcrtggtcatgccctgcactcgagcctggatgagagagcacgaccctttctcaaaagaaaaaaacaagaaaaaacagcatgtggtcattgtctctatttgtaa

SEQ ID NO: 15897 - DNA, 201 bp, Homo sapiens
aatactgtcattgtcaaaatgcacatactttatattctctatccaattaggtagtgtctatttggaaattaaattattgaagttttggggtttttttgtgrcaggttaatgaataagtacagtggcttttgggtgtttctttttcttttcctggtgacagctgattttgtctttactatttgtattcgtttgctttggctg

SEQ ID NO: 15898 - DNA, 201 bp, Homo sapiens
ataatttactcagtctccatataaacaacatcaatcaaaagtatgtgcgtgtcaaaggtgatagaattgtctgtcttcccaatgagatgatttacaaattraccattatagtggaaaacagtatttcctgggctattttttaataccatgaaccttataaacacatatgaaataatatacaaacacaatagaatgaaatat

SEQ ID NO: 15899 - DNA, 201 bp, Homo sapiens
taagaaagtaaagtggtgaaagaacagctactccagagacagagtaggtgttcccgaaagtaagaggaggaacgcatgtccaccctaggtaacatgcatgyatgtgtgtgtgtgtgtgtgtgtgtgtgtgtgtgtgtgtatgaatgattttaaaagaccatggagagatgtgttctgctacaagggtttctgataaaggat

SEQ ID NO: 15900 - DNA, 201 bp, Homo sapiens
aagaaagtaaagtggtgaaagaacagctactccagagacagagtaggtgttcccgaaagtaagaggaggaacgcatgtccaccctaggtaacatgcatgcrtgtgtgtgtgtgtgtgtgtgtgtgtgtgtgtgtgtgtatgaatgattttaaaagaccatggagagatgtgttctgctacaagggtttctgataaaggatt

SEQ ID NO: 15901 - DNA, 201 bp, Homo sapiens
tgtgtaattttacaaagcgctctacaactgtgtttgtcagtgatgagaaatgcctagttctaaaagttccttgggaaggagtggaatttgaagagttttaratggcaagatgtgtttacttttggttttaaacaaaagtcctagtgtagtgttagggcctggtttttcacagtgataaattgggactttattgctgtatga

SEQ ID NO: 15902 - DNA, 201 bp, Homo sapiens
agaaagtaaagtggtgaaagaacagctactccagagacagagtaggtgttcccgaaagtaagaggaggaacgcatgtccaccctaggtaacatgcatgcakgtgtgtgtgtgtgtgtgtgtgtgtgtgtgtgtgtgtatgaatgattttaaaagaccatggagagatgtgttctgctacaagggtttctgataaaggatta

SEQ ID NO: 15903 - DNA, 201 bp, Homo sapiens
tagcagtggtgttttataacttaataatttatacataatgagttcagaagttccatttacatgatatccaagaaataatttaccccatacattaccactcrtcaacaggaaagaagtccttcaggatcacaacgaaataactgtccgagattgttttgcattaaaggatacttttaataatgagatcattttacactgcat

SEQ ID NO: 15904 - DNA, 201 bp, Homo sapiens
aacatacagtaaaaatatagtacattattgttatctcgtgggaccgctgtcatatttgtggtccattgtttgtttgtgtttttgagacaaggtctcactcttgttgcccaggctggactacagtggcatgatcttgcctcactgtagcctcggcttcctgggctcaagtgatcctcccacctcagcctcccaagtagcgta

SEQ ID NO: 15905 - DNA, 201 bp, Homo sapiens
gtatcctagccccgaagggctcaccagggccaggcttggatgccaaggagaggtgactcctagggcctgccttaccgtaaggcattcattttcagaattctttttttttttttttttgagacagagtcttgctgtgtcacccaggctggagtgcagtggcgtgatctcggctcgctgcaagctctgcctcccaggttcacg

SEQ ID NO: 15906 - DNA, 201 bp, Homo sapiens
acagggttattgaaacagtgtggcacgtggttgacttgccttttcttgccagtggttttggccttgacatgtctacccagggcagtaaaagtgaggcgacraggaagctgaaagtgggatctgtgattctgaaattcctcaagaatctgggagcagaaattcctgaacttttaaatactgcagttcataaaaatattaatg

SEQ ID NO: 15907 - DNA, 201 bp, Homo sapiens
cctaccttccctttacaatccattcttcaccccgtagtcaaggtgatcttagaaaattacagagtggattgtatgcctttgtcaattagagctctttaatkttccctaggaatatttaaggcccatctggcacccatggtttccatgctacttatcaccctcactcactcatgagccgctgtcaataacctcctctcactt

SEQ ID NO: 15908 - DNA, 201 bp, Homo sapiens
gctgcagaggactgaagatatactcagtccccttattcatgttttcagttagtccttgggagctgcctgttcaggaccatggacagagcaaaaagagtttrcaccttcctccaggcagaatcttggtgattgtctttggcaatgactggcatggtcatgtgtaatattcagtgaaaaccaggctcagaaagtgactaaact

SEQ ID NO: 15909 - DNA, 201 bp, Homo sapiens
  misc_feature (1)...(201): n = A,T,C or G, or insertion/deletion polymorphism (see Tables 1-2)
tttctttagggcctctactttcattagtagtaattttaataataacagtggctatcacttctttcccaggtgtcagacattgtatgccttgtatgtactgnatgtaagtttctcactcaatatttattggtgtgaatactacctgtattttagtagttaagtatgtgtttttttctcctgtaagagactgaagtctttttg

SEQ ID NO: 15910 - DNA, 201 bp, Homo sapiens
tttcccccatccccaggcaaccactgacctactttctgactgtatgtttgcattttgtagagtgttcgataaatatagacatataatgtgtactctatttaaaaaaaaacaactggctcctttcattcagcataagtattttgagagtcattcattcttgttccatgcatcagtagttgatatcttttcattgctgatttg

SEQ ID NO: 15911 - DNA, 201 bp, Homo sapiens
acagcacagatcccttcagtagacagctccaggtgggaagctgatggtagtcacctgatgagcgtggaattgaggacatcaggaagtgatgcttggctcakatgttcagtcactccatatttttggggtgacagttgtgtatgaggcaccaggcactggagaaacaaaagtgatgttggcctagtccctgtctcagaggca

SEQ ID NO: 15912 - DNA, 201 bp, Homo sapiens
cccagggcacacatcgttcagggctgagtagggtgtcgaaggcagaggtggctgtgagtcccagagactgttctccaggaatccctggtgcaggatgtggkgggctcctgtagggccagacaggtaccacatgagcagagagctgcagtggccctgagggcacatgctgtctaggaggggacagtggtgcccgggtttgag

SEQ ID NO: 15913 - DNA, 201 bp, Homo sapiens
gaatttttttcttctgcctttttgctatgaatgggcaggtactaactttgaatgcaacaaagtcattggcaaagtcagaatgcaaagccatcctggcccartgggaagagtttcagattgaagatcctttcggaaataatgctttctttgagcacctgcctgtgatgcagtacgcacctggcagaaggctggcttactctc

SEQ ID NO: 15914 - DNA, 201 bp, Homo sapiens
tatatctcttaatccttttcctgtggacattaagaagctaaagaaaaataactttcttttctgaggcagggaagaagaaaatccagtatttgtttggtcawttaagtccctgattataagtgtcttgtttatcttctcttctgttactgtcattctgtcaactggttcccatttattttatccagaggtttaaaacgtttt

SEQ ID NO: 15915 - DNA, 201 bp, Homo sapiens
acagtgggattggtcagtgtatcctgtggataaaagaaaggctgggaattatcctcctgtgtgaaaactgaggcacataggaagggtcagaagagaaaagygagggaaaagaaggggcaagagggaggagctcagatgaagggattctgcatggccagtactcagggtggacaaaagacatagcaagaagagtatgcccgc

SEQ ID NO: 15916 - DNA, 201 bp, Homo sapiens
caatgtgccagattattttcttaaaggaaccaagattctatatttttatgtgaaatttgctaatttttagatgttggctactaattctaatatttgaaaarcctgtgataagtgagctaaagcagttcttcaggctgacgtggctttggtttaaaccctctccgcacttctccaggttgtccattatcgacggtaatgctc

SEQ ID NO: 15917 - DNA, 201 bp, Homo sapiens
tggggtgggtaagtagccaaacacggtgaaagatcagcagctggtagaaattccaaaaggggaattaatgaaaaatggttaaaaagcagtatggtgctttggggggggaaaaaaaacagaaaatgttaatttcaagaagacaatacaacagaaatcacatgggccttttagagtgaggcaggcctgggtttgaatgacagt

SEQ ID NO: 15918 - DNA, 201 bp, Homo sapiens
tctggtaggaagagaagcagtccacttgtggcctcttgatggatttgatggattaattccttttctttttttttttctttttttttgagacagggtctcamgttgttgcccaggttggagtgcagtgatgcaatctcagctcactgcagccttaacctccaggctcaagtgatcttcccacctcagcctccggagtagcta

SEQ ID NO: 15919 - DNA, 201 bp, Homo sapiens
ctttgttctagtcacctgatttttttaaaaaaactgatgttcctacccctttctctgaatttggcttatccttcagaaagttgagatgaatgctcatcttyctctgtgaagccctccttttcatccaactgaaccagcactgtgtggaaagaaatacaaggcaccccacagcctgtgggaccatcaagaacaacacctata

SEQ ID NO: 15920 - DNA, 201 bp, Homo sapiens
gggagggagagattgcggtgagccaagattgtgccactgcactccagcctgggcaacagagtgagactctgtctcataaaaaaaaaaaaaaaaaaaaaaamaaaacttgagtctttattgtgccagatgaggggagtttttccatcaccgtatctttgccctgagtgttcctgcatcacagtatcctctagggcagaagga

SEQ ID NO: 15921 - DNA, 201 bp, Homo sapiens
ttctttagcttttttcccctgcctatctattctttgttctagtcacctgatttttttaaaaaaactgatgttcctacccctttctctgaatttggcttatycttcagaaagttgagatgaatgctcatctttctctgtgaagccctccttttcatccaactgaaccagcactgtgtggaaagaaatacaaggcaccccaca

SEQ ID NO: 15922 - DNA, 201 bp, Homo sapiens
ttgctagtacatctgggattctaatggcaatgtatggaaatggagaaggaataccagggcgtcgattttccattgcagttatcaagtgatttgccacccaygtctgtcccactcagaaaagcctattgcaatgcaagagaatgagcgtgataccattaaagggttgatcttggatctagtctaatttgtgaagaacatttt

SEQ ID NO: 15923 - DNA, 201 bp, Homo sapiens
agagttgtggataactattagaggggcataggggaaaaaaactacagctgcaacatcaaagggagaagagagatttatcctgaaccttgcactacaaaagscttttccgtaggactttaaagagtaaaactatctcagtctctctctgtgtgtgtctctctcctcctattccagtcccctctttcccctgttcccttctcc

SEQ ID NO: 15924 - DNA, 201 bp, Homo sapiens
gacataactacaaaaccttttgaagtctgttacctcctgattttcttgggcactaatgtttgtcttttaacactaacagctttacacttttttttctttctttttttttttttttttgagacagagtctcgctctgttacccaggctggagtgcaggggtgcaatctcaccgcaacctccgcctcctggattcaagcgatt

SEQ ID NO: 15925 - DNA, 201 bp, Homo sapiens
tggtttcaataatttatttatcaaagataatattctaagtacatagaatttaatacttttaaattttatgcagatgtatacattgattatctaccataagwcatattataaacaaattaagcagcatatttcacatgaaaatactgcattcttaaaatttgtagatccaattataatgaagaaaatttagcagtttttaaa

SEQ ID NO: 15926 - DNA, 201 bp, Homo sapiens
ggggaagtggcttaggcctcccagccacatgccaggaagcctgtgtttggcaatgactgttgctctgtacagaatggctcaagtgttctattggaagcagytggaccttgtggctttcatgctgtcacccttgtattatttcttggtgtgtccaggtaaagctggagctccttagcccagccagaaaggcagctcatggtg

SEQ ID NO: 15927 - DNA, 201 bp, Homo sapiens
ctctgttcatgttggagcaaatgtcctgcttttgagaataagtgtggctgcatgctatacaaaagagaaacagggactccacagcaattgtcagaaccacdgtatcacagcgcttctggtctctgagtcctaccaggtaccggagatgaacgcttctcccagcgggacttatggaccctgaagaagcatttcaatggggtc

SEQ ID NO: 15928 - DNA, 201 bp, Homo sapiens
gtaagtagccaaacacggtgaaagatcagcagctggtagaaattccaaaaggggaattaatgaaaaatggttaaaaagcagtatggtgctttggggggggraaaaaaacagaaaatgttaatttcaagaagacaatacaacagaaatcacatgggccttttagagtgaggcaggcctgggtttgaatgacagttctacatt

SEQ ID NO: 15929 - DNA, 201 bp, Homo sapiens
gagccgacatttatgtaaaacttttcaaaagtgtgggtctctgaatgtaattgtttagttttatacttttaactgccatgtaaaaccttttcctgaggtaytggcagttttgcctacaatttcaggtcttcactgtgaccatatctcatcatttaatgcatcggaaatggccaggcaggtagtaaacctaagttttatggc

SEQ ID NO: 15930 - DNA, 201 bp, Homo sapiens
atttggtagagataagcataaatctggagcaaagcattaacaaaatcgtgtcctaaggattcctacagattcaactgatatgaagtcatcataaatacttmcacacacacacacacacacacacacacacacacacacacacgcactctctacatatcacacatacactctcagggaagcaatgaaaaattaccaaacagg

SEQ ID NO: 15931 - DNA, 201 bp, Homo sapiens
tttggtagagataagcataaatctggagcaaagcattaacaaaatcgtgtcctaaggattcctacagattcaactgatatgaagtcatcataaatacttacacacacacacacacacacacacacacacacacacacacacgcactctctacatatcacacatacactctcagggaagcaatgaaaaattaccaaacaggg

SEQ ID NO: 15932 - DNA, 201 bp, Homo sapiens
tattgcaaatggaaattgacaaattgacatacaaaatgaaaaattaaaacacaaaatatgtagtgattggaataaaggaaaaggcacaaactgctaaaatkctccatgtttgagagagaaatcaagcaactgagccctgttatcccctagaagaatcccccggggcatcaagttgcatcttgtcatgaaccaatgagacag

SEQ ID NO: 15933 - DNA, 201 bp, Homo sapiens
atgtaaattttaggatcagtttgttgatatccataaacttgctggtattttgactggaattgatatgtagatcaacttgggaagaactgacatcataacartgttgagtcttcctgttcatgaacctgaagtatctcattgtttatttaggtctttgatttcttccatactagctttgaagcttttctcatatagagcttg

SEQ ID NO: 15934 - DNA, 201 bp, Homo sapiens
agtggtatatattacatttcatgacttgaatataaatttaaactgttgttaggctatggtctctgtccctttgtgtacttcccatgagcactcatcagaaytgcttttcattcagttaggtcttctgtgactagttgggtaatactgaggcatcagtttggtggaagctactgatactgtacttcctcatttagcccagtt

SEQ ID NO: 15935 - DNA, 201 bp, Homo sapiens
attgcaaatggaaattgacaaattgacatacaaaatgaaaaattaaaacacaaaatatgtagtgattggaataaaggaaaaggcacaaactgctaaaattmtccatgtttgagagagaaatcaagcaactgagccctgttatcccctagaagaatcccccggggcatcaagttgcatcttgtcatgaaccaatgagacagg

SEQ ID NO: 15936 - DNA, 201 bp, Homo sapiens
tcataacagtgttgagtcttcctgttcatgaacctgaagtatctcattgtttatttaggtctttgatttcttccatactagctttgaagcttttctcatayagagcttgtacatattttgttagctatatatctaaatatttcatttgtttggtgttaatgtaaatggtgtgtttttaatgtaaaattctatttttttata

SEQ ID NO: 15937 - DNA, 201 bp, Homo sapiens
tttctcatatagagcttgtacatattttgttagctatatatctaaatatttcatttgtttggtgttaatgtaaatggtgtgtttttaatgtaaaattctawttttttatatagaaaagcaattgcctttgtatattaccttgtatcctgcaaacttgctgtagttattagtttcagttcttctttgttgattctttgggat

SEQ ID NO: 15938 - DNA, 201 bp, Homo sapiens
tcgccatggtgcccaggctgtcatggcagccctaacagatgaatccagtggcatatgaaataactgctaagaaccatgtgatagctggatgggggtttgtstgtgcacatatgcacatacacacaagacatccacatgtgtgaaagagggtgttgcattccttaagagtagtatacttatttatgtattctgtgtaggata

SEQ ID NO: 15939 - DNA, 201 bp, Homo sapiens
aataaaaaataaaaataaagtataaagtgactctaggatcatggcactgtcttacactttcagcgtctgaaacagaggtgcccttgatagtctgtatgaaygtgtctttggtgtcatgacatagatttttgtccccctgcaacagcatgaacaggctgaacactttgccacgaggcttcggctccctgccagctcttgagg

SEQ ID NO: 15940 - DNA, 201 bp, Homo sapiens
taaagagctccacattcaggggaaccgcctcaccgttctgcccccagaactaggtaaggttgctgatgaatgaacttagttctgggtttcatgaataacarttatcctaatgtagcaattctgaacaacctctgtcctcttcttggcaactactctccacctaggcacacgatgctgatcatttgagaaccatttgtcatt

SEQ ID NO: 15941 - DNA, 201 bp, Homo sapiens
gaggcacttagggtttgatttagggtacttaggctgtgattactgagaaggacttcttagacctgatctgtattggatgaagtgaccttcacttttttttyccccccccccaggaaacttggatttaactggccagaagcaggtattcaaagcagagaacaatccctgggtgacccccattgcagaccagttccagcttgg

SEQ ID NO: 15942 - DNA, 201 bp, Homo sapiens
agaggcacttagggtttgatttagggtacttaggctgtgattactgagaaggacttcttagacctgatctgtattggatgaagtgaccttcactttttttytccccccccccaggaaacttggatttaactggccagaagcaggtattcaaagcagagaacaatccctgggtgacccccattgcagaccagttccagcttg

SEQ ID NO: 15943 - DNA, 201 bp, Homo sapiens
tttgaaaccacaagaggtgtgaaaaagccctggccgggcgcagtggctcatacctgtaatcccagcgctttgggaggctgaggcgggtggatcacgaggtygggagttcgagaccagcttggccgacgtaatgaaaccccgtctctattaaaaatacaaaaattagccagttgtggtggtgcgtgcctgtagtctcagcta

SEQ ID NO: 15944 - DNA, 201 bp, Homo sapiens
aagaggcacttagggtttgatttagggtacttaggctgtgattactgagaaggacttcttagacctgatctgtattggatgaagtgaccttcacttttttyttccccccccccaggaaacttggatttaactggccagaagcaggtattcaaagcagagaacaatccctgggtgacccccattgcagaccagttccagctt

SEQ ID NO: 15945 - DNA, 201 bp, Homo sapiens
caagaggcacttagggtttgatttagggtacttaggctgtgattactgagaaggacttcttagacctgatctgtattggatgaagtgaccttcactttttytttccccccccccaggaaacttggatttaactggccagaagcaggtattcaaagcagagaacaatccctgggtgacccccattgcagaccagttccagct

SEQ ID NO: 15946 - DNA, 201 bp, Homo sapiens
gaccagcttggccgacgtaatgaaaccccgtctctattaaaaatacaaaaattagccagttgtggtggtgcgtgcctgtagtctcagctactcgggaggcygaggcaggagaatcatttgaactcgggaggtggaggttgtagtgagccgagactgtgccactgcactccagcctgcgacagtgagactctgtttcaaaac

SEQ ID NO: 15947 - DNA, 201 bp, Homo sapiens
cataagtatgtataattccactgtgtcaattaaaattttttctaaaattttctaaaattattttttctaaaaagaccacccacggaatgagagaaaatatytgtaaattgtatatctgataaaggattaaaatttagagtatatagagaactaaaactcaacagcagcaacaataaaaaacacaacccagttgaaaaatgg

SEQ ID NO: 15948 - DNA, 201 bp, Homo sapiens
ctctattaaaaatacaaaaattagccagttgtggtggtgcgtgcctgtagtctcagctactcgggaggccgaggcaggagaatcatttgaactcgggaggyggaggttgtagtgagccgagactgtgccactgcactccagcctgcgacagtgagactctgtttcaaaacaaacaaaaaagtgatgaatcctttgcagata

SEQ ID NO: 15949 - DNA, 201 bp, Homo sapiens
atgctctaaagatacatgaccttcagcctgggcaacatagcaagaccccatctcttaaaaaaaacatgagccaggcatctcagctactgtggaggctgtartgtgaggatcacttcaacccaggagtttgaggctgcagtgagctgtgattgtactactgcactccagcctgggtgacagggcaagaccctatctcaaaaa

SEQ ID NO: 15950 - DNA, 201 bp, Homo sapiens
ggggcgggaagagatggaagggtgcagagatgttggccagtgggtacatagttacatttagacagtaggaataaattttgatgttctgttacacagtagastgactgtaattaacagtgaaatattgtatattaggaaacagctagaagagaggctttcaaatgttcccaccacaaagaaatacgtgcatgaggtgatgaa

SEQ ID NO: 15951 - DNA, 201 bp, Homo sapiens
tgtagtctcagctactcgggaggccgaggcaggagaatcatttgaactcgggaggtggaggttgtagtgagccgagactgtgccactgcactccagcctgygacagtgagactctgtttcaaaacaaacaaaaaagtgatgaatcctttgcagatagcaaaggcctttttagtggctttcattcggaatgcacagtctgtg

SEQ ID NO: 15952 - DNA, 201 bp, Homo sapiens
ttgggattaactggtatagggacttgagtagatgtggctgccacagacttctgtttcttactcgttgtgtgctcatttcaaacatggtagagcgtgatgcyctaaagatacatgaccttcagcctgggcaacatagcaagaccccatctcttaaaaaaaacatgagccaggcatctcagctactgtggaggctgtagtgtg

SEQ ID NO: 15953 - DNA, 201 bp, Homo sapiens
agaccattggtgagcatttcatgagcaaaacttacttgaaagcattgaaaacttgaaattgttagaacaagttctttgttttcatttatatttcctcctcraaagggaaagttttaactgtttaatacactttctgtccctgcttgatggaggaaaagatgcaaaattgtatacatgatatacctttacatctgcattttt

SEQ ID NO: 15954 - DNA, 201 bp, Homo sapiens
cctagatatgtatatatgcatgatgtgtttaaggagacgggaagaatagttgcaagtgaatttttttcttctgcctttttgctatgaatgggcaggtactractttgaatgcaacaaagtcattggcaaagtcagaatgcaaagccatcctggcccaatgggaagagtttcagattgaagatcctttcggaaataatgctt

SEQ ID NO: 15955 - DNA, 201 bp, Homo sapiens
tgtgcaacctaatttatttttttctaacaacatgtaaatttcaataatttattattttggctaaaaacatagaaatgttttaataaactttcataatgagaaatatattaagaaaaaaatcacatttcttgtatttttattatcacagtagtattcaatataattacaggcaggcctcaaagatatctcagctccagaaca

SEQ ID NO: 15956 - DNA, 201 bp, Homo sapiens
gcagttcataaaaatattaatgtattgtcaagctaattgctgttaatgctccaagactattatggtgcccctatttgaatttaaacctgggagcttggggyagcgttgatgggtttttgaagtcagcgggggacttaatctgtctgtagcaactttcctagatatgtatatatgcatgatgtgtttaaggagacgggaaga

SEQ ID NO: 15957 - DNA, 201 bp, Homo sapiens
gcaacctaatttatttttttctaacaacatgtaaatttcaataatttattattttggctaaaaacatagaaatgttttaataaactttcataatgagaaatatattaagaaaaaaatcacatttcttgtatttttattatcacagtagtattcaatataattacaggcaggcctcaaagatatctcagctccagaacacag

SEQ ID NO: 15958 - DNA, 201 bp, Homo sapiens
gcaaacaatctttgacataaacagtgatatcaatgccataaaaaagaaaaataaacccctaacccatctgaatcctagtgcagagccttctgagagtgatrgtatctttatgttttgactgcttcagaggtctccatatcttttcatgcctttgtggttacaaggagtagcgaagacgggggcgggcagatcagtgatcac

SEQ ID NO: 15959 - DNA, 201 bp, Homo sapiens
gtaatttacatacatttgtacagaccgtgtgtgtgtgtgtgtttgtgtgtatataatatagttccctgagttttgacaaacgtgtataaccagtataccastttaggtatggaacattccgatcatcctggaaagtttgggaaatgtttttttccacttaagaatggctcatttctccagattctcgggtttttttttttt

SEQ ID NO: 15960 - DNA, 201 bp, Homo sapiens
actcccttttcagcctgagtggccaggtacttgggcttatctgttaatttttctttctctttcactgaaacttcctgccacacccagaagaaaaccaatarcatggtactcacagggaggtgaatagaattataatcgaagagtgctcattttgtgggtctgaattggaagtgtatttttgtttttgcaatatcactaata

SEQ ID NO: 15961 - DNA, 201 bp, Homo sapiens
gtaatcccagcactttgggaggccaaggcaggcagatcacgaggtcaggagatcaagaccatcctggttaacacggtgaaacctcatctctgctaaaaataaaaaaaaaagtagccgggtgtggtggcgggcgcctgtagtcccagctactcaggaggctgaggcaggagaatggcgtgaacccaggaggcggagcttgca

SEQ ID NO: 15962 - DNA, 201 bp, Homo sapiens
gtgaaacctcatctctgctaaaaataaaaaaaaaagtagccgggtgtggtggcgggcgcctgtagtcccagctactcaggaggctgaggcaggagaatggygtgaacccaggaggcggagcttgcagtgagccgagattgtgccactgtattccagcctgggagacagagggagattctgtctcacaaaaaaaaaaaaaaa

SEQ ID NO: 15963 - DNA, 201 bp, Homo sapiens
atgaaatctcatttcaaacaagattacaggagtcatttctggtaaaatttggacattaacacacattagtgatttgtgaagatggttgaattttttgtacrgagaatttttatactaaattcagtaaatagttctgttgtgccgtgtgccccctagaaaaatcacgtgcctataaagaacttaatagggaaaattgaagat

SEQ ID NO: 15964 - DNA, 201 bp, Homo sapiens
gcactttaggaagtggaggcaggaggatggcttgagcccaggagttcaagaccagcctaggcaacatagtgagacctagtctcttaaaaaaaaaaaaaaattttttttttttttaaattagccaggcacaatggctcatgactgtagtctcagctacttgggaggctgaggtaggaggattgcttaaacccagcaggtcaa

SEQ ID NO: 15965 - DNA, 201 bp, Homo sapiens
taggttccatccactgactggtatagatgtcattcatgtataactaccagatttccccctgaatcacatgcagatgaagaagagtgtgtgagcacaggatkcatgaatgcctagtgcaggaagttataggtattgaaagggaaaagcaatacatcactcatttgatctgctctctttcagatcataggatgtagtggtaga

SEQ ID NO: 15966 - DNA, 201 bp, Homo sapiens
aacaaatgacatatcaaggatcccttttgctgtattagttaatatgttggcagaaatatgtgaaacattgttattcccctccagttctgtgcatagatttktttctacctttaaacccgcattaattgtaccaaaatattttgccagctataatttaatactaatcaataggattgccttagaacagagataaaaggttct

SEQ ID NO: 15967 - DNA, 201 bp, Homo sapiens
atatataaatctaaatcaaaatatatgaaaaagtacatcgctacaatcttctggccaccactcaaattttatcagggcagaaaagacaaggtatgttcagrtgatttacaagctggaaagtaccataaaaatgcaacagatgatgatttttttctcctttggtctttttggaaacagtgtggaagaaatgatgtgcccatg

SEQ ID NO: 15968 - DNA, 201 bp, Homo sapiens
ccaatagcatggtactcacagggaggtgaatagaattataatcgaagagtgctcattttgtgggtctgaattggaagtgtatttttgtttttgcaatatcrctaataatgtttcctagccttgtgtaagaattaaaatgtgttgcatttcattgcaaattttctgtgccaagacaaaagtagattattctactctcacttt

SEQ ID NO: 15969 - DNA, 201 bp, Homo sapiens
agcttttgacaccaaactattttgaaatatgagtcttttatgacgtattttgacagcagcaatggcatgcttttcgctgttgtaacaggagtaaatgacaggggccactcgctcattattttatacccaagtaatcaaccaaagatgtcatgtccagaaataacactaaaatgtcaaccacccaaatctcttgcaaatagt

SEQ ID NO: 15970 - DNA, 201 bp, Homo sapiens
tgtagtgtgaggatcacttcaacccaggagtttgaggctgcagtgagctgtgattgtactactgcactccagcctgggtgacagggcaagaccctatctcaaaaaaaaaaaaaaaaaaaaggtatatgaccttatgtccaataaatgatggccatctcatctttacaatcatagagccaaggaatgatgggctgtgatgtg

SEQ ID NO: 15971 - DNA, 201 bp, Homo sapiens
gaaaaaggggttctcttatgagacagatgggggttgggggattattctctttttcctgacatatgcagttaactcggccaggacaggacagtggaatgcayataattgaaatatcctccggagcctgcctgaatgcagaagtctctttttgcccagtattttcagccagcatccagactcctaaaaagcagccagccgtgt

SEQ ID NO: 15972 - DNA, 201 bp, Homo sapiens
ccagactcctaaaaagcagccagccgtgtggctaactgaactttcaccccttttttgttcttttatatattatttcttagaagaattaattagtagagagrataaaaatcctgcgttggtagtgaagaaaggaaactcaatgcataccctgaacaatcctcagaataggtcaacagccccaggaaaaaaaaaaaaaaaaaa

SEQ ID NO: 15973 - DNA, 201 bp, Homo sapiens
tgaccttccagattgctggagaatgaaatgaggaatgattttaaaaggtaattagtctttatcactgccatgttaatgagattcatttagggctgattccragatgtgcttatgctcttatacttgagtaacaacggtttggcttgggtaatattcctgtctttctccattcatacgctgtcttgattggtgaaaaaagtg

SEQ ID NO: 15974 - DNA, 201 bp, Homo sapiens
gagcaaaacttacttgaaagcattgaaaacttgaaattgttagaacaagttctttgttttcatttatatttcctcctcgaaagggaaagttttaactgttyaatacactttctgtccctgcttgatggaggaaaagatgcaaaattgtatacatgatatacctttacatctgcatttttcaaatttttgagtctggcttcc

SEQ ID NO: 15975 - DNA, 201 bp, Homo sapiens
tctctagttggtgaattttacatgcacacttaaaagttttatgtgccccatcagtgttccataaatgttaggttacattagttgatatgttataactcccrgtaatattgtttttttttttccttaagttagttttcttaaataactttagagaggaggaaaaagtttttcacattgactgccgcttctctatttaccatt

SEQ ID NO: 15976 - DNA, 201 bp, Homo sapiens
gagacaaggtcttgccgtgttacccaggttggtcttgaactcctgggctcaagcgatcgtcctgccttggcctcccaaagggctgggattacaggcatgamccgtggcgcctggcctgaagattctttcttatcatgtttataaaccaaagagaaaaaaaatgacattgttgctctggaagtggttccattcagagatagt

SEQ ID NO: 15977 - DNA, 201 bp, Homo sapiens
agcactgtcttctgtgcttggccagtcaccaagccaacccaggccctgtgtccaggtgtaaggcatcgatccgatccgcacctccctgaatgttcaagcargctggctctggggaccaccaggggcgtttttaactttaagctggcccactcctccttatcttgattaagaatcagtaccaaacttccaggtgtccttgca

SEQ ID NO: 15978 - DNA, 201 bp, Homo sapiens
agtttactttggtgacactaagatgagaatattgtcatcctgtattttgtccttttgtagttagctctactttgaagattcttttcttttttttgagacarggtcttgccgtgttacccaggttggtcttgaactcctgggctcaagcgatcgtcctgccttggcctcccaaagggctgggattacaggcatgaaccgtgg

SEQ ID NO: 15979 - DNA, 201 bp, Homo sapiens
agaaagaaaaatacattctagtggtgtgatcggctgaagcaacgactgaatttctcttctccattaaagaaaaagaaaagaaaacacaacttttaaacttytttagtttctctcctgctaagtgtttgttgaaaggacacaatgaaatgactgaaaagaaccagttttccctcattaaatctgtcctcgtgaacctgagct

SEQ ID NO: 15980 - DNA, 201 bp, Homo sapiens
ttttgttactgatttctaatttaaattatgtcctgatcaaaattcatagtctatataattctagtccttcacaatttgttgatttgttttatgggcctgcrtattctctagttggtgaattttacatgcacacttaaaagttttatgtgccccatcagtgttccataaatgttaggttacattagttgatatgttataact

SEQ ID NO: 15981 - DNA, 201 bp, Homo sapiens
tttttcttttctgctcttgtttttcttcctcttacctactttaccatgtggtcctgtggcaagagtgagaaagaaaaatacattctagtggtgtgatcggstgaagcaacgactgaatttctcttctccattaaagaaaaagaaaagaaaacacaacttttaaacttttttagtttctctcctgctaagtgtttgttgaaa

SEQ ID NO: 15982 - DNA, 201 bp, Homo sapiens
tttgtttgttttcaagtattcggagatatccgaaacattttgttactgatttctaatttaaattatgtcctgatcaaaattcatagtctatataattctartccttcacaatttgttgatttgttttatgggcctgcgtattctctagttggtgaattttacatgcacacttaaaagttttatgtgccccatcagtgttcc

SEQ ID NO: 15983 - DNA, 201 bp, Homo sapiens
gcgctatctcggctcactgcatgctccgcctcctgggttcacgtcattctcctgcctcagcctcctgagtagctgggactacaggtggctgccaccgggcycagctaattttttgtattttttttttagtagagacggagtttcactctgttagccaggatggtctcgatctgctgacatcatgatccgcctgttttggcc

SEQ ID NO: 15984 - DNA, 201 bp, Homo sapiens
gtgattgattttcagtttttcttctttttttttgagacagagtcttgctctttcacacaggccagagtccagtggcgctatctcggctcactgcatgctcygcctcctgggttcacgtcattctcctgcctcagcctcctgagtagctgggactacaggtggctgccaccgggcccagctaattttttgtatttttttttt

SEQ ID NO: 15985 - DNA, 201 bp, Homo sapiens
actttttcttttctgctcttgtttttcttcctcttacctactttaccatgtggtcctgtggcaagagtgagaaagaaaaatacattctagtggtgtgatcrgctgaagcaacgactgaatttctcttctccattaaagaaaaagaaaagaaaacacaacttttaaacttttttagtttctctcctgctaagtgtttgttga

SEQ ID NO: 15986 - DNA, 201 bp, Homo sapiens
gggcatatttgagtttttttttttaatctgtggaagaaagtttgaagtatttatgtaaccagattttaattcaaaaataactgtaaaaatcaggaaaatgygtattttgtgcatatttatgctgattcgtatactgctcaattccattgtgttggggagaatatgaaatgaatgtacaacaggaaatgaattgcattctgt

SEQ ID NO: 15987 - DNA, 201 bp, Homo sapiens
caaaggattataattcattctactatgaagatacatgtgcatgtatgtttattgcagcactatttacaatagcaaagacttagaaccaacccaaatgcccrtcaatgatagactggataaagaaaatgtggtccatatacaccatggaatactatgcagccataaaaaagaatgagttcatgtcctttgcagagacatgga

SEQ ID NO: 15988 - DNA, 201 bp, Homo sapiens
cattctggaagacagtgtggcaattcctcaaggatctagaaccagaaataccatttgatccagcaatcccattactgggtatatacccaaaggattataawtcattctactatgaagatacatgtgcatgtatgtttattgcagcactatttacaatagcaaagacttagaaccaacccaaatgcccatcaatgatagact

SEQ ID NO: 15989 - DNA, 201 bp, Homo sapiens
gttcattgctatccagaatattttatgtaataaactctatgttttctgtcataactatggttaggtactggtttagggataatcagccagttgccttgacyccaaagaacatcaagatttatttgccattgccactgtcatgtttctttaaagggaagagacggggaaaaaggaaagattggaaagagttgcgggaaggaa

SEQ ID NO: 15990 - DNA, 201 bp, Homo sapiens
ctgctagatacaccctctgattttgggattagggatactcaacctgtataactgcagcccacagtggatatataacacacatttatacaggttgagtatcyctaatccaaaaatcccaaatctgaaaggcaccatatctgaacctttttgagtgctgacgtgacactcaaaggaaatgctcattggaacattttggatttt

SEQ ID NO: 15991 - DNA, 201 bp, Homo sapiens; identical to SEQ ID NO: 2549

SEQ ID NO: 15992 - DNA, 201 bp, Homo sapiens; identical to SEQ ID NO: 2551

SEQ ID NO: 15993 - DNA, 201 bp, Homo sapiens
gggtttgagggatggttggcgtttcccaggtgaaggagatggagaagctttgttcaccaaggccctgggggaaaagtacaagttacaagaggtcaggacaraagttttttgccaatcctggcacttccccgcatggccctgcatggtatgccacactctttcctctcaggaactgcaaggaataggttgtctttcaatggc

SEQ ID NO: 15994 - DNA, 201 bp, Homo sapiens
tattaactttttcttttctgctcttgtttttcttcctcttacctactttaccatgtggtcctgtggcaagagtgagaaagaaaaatacattctagtggtgygatcggctgaagcaacgactgaatttctcttctccattaaagaaaaagaaaagaaaacacaacttttaaacttttttagtttctctcctgctaagtgttt

SEQ ID NO: 15995 - DNA, 201 bp, Homo sapiens
gctcagtttccatacaagactcacagtgaactcaccattcccgagtggaaaggagtgactggttgtataaatatgtctgtctccacttggtctttgcctgwccgggctttgtgggggtctgttgattctttcagcttcactgccttccctgcagacccgacctggagtcctttgttgccctaaatatttttctcaaagatc

SEQ ID NO: 15996 - DNA, 201 bp, Homo sapiens
agaccttttctcccttcttttctaacagctcagtttccatacaagactcacagtgaactcaccattcccgagtggaaaggagtgactggttgtataaataygtctgtctccacttggtctttgcctgaccgggctttgtgggggtctgttgattctttcagcttcactgccttccctgcagacccgacctggagtcctttg

SEQ ID NO: 15997 - DNA, 201 bp, Homo sapiens
acatgaaatttaggaggggacacagagccagaccctatcatatgccttccctgtttttcatctctgtgctcagataagcctgggattgactccatcacccrtgagttgtgtaggtcccctgggtgcatggtgtactctctaccctaaagcatttctcagtttgtcatcctacgataagtaacatctctttctgaactgcca

SEQ ID NO: 15998 - DNA, 201 bp, Homo sapiens
tatgaaatcttttctttctttcttttttttttttttgagacagagtcttgctctgtgtcacccagactggcttgcagtggcatgatcatggctcactacarccttgaccttctgggcccaggtgatccttgcacctcagccttccaagtagctgggaccacaggcatgcatcaccatgcctggctaattttttaacttttt

SEQ ID NO: 15999 - DNA, 201 bp, Homo sapiens
aggctgggaaagattttaggaagagtagattaggagagggattgaggagaggaggtcatcctgacctgagcctcagatatcttaaatttgagatgccttargggtgtctcattgagaaggcgatagggtataagaatctagagtccagaagagacgtctaggctgcatatatagtttggggcattatcagcatacatttaa

SEQ ID NO: 16000 - DNA, 201 bp, Homo sapiens
caaactgaacccaaaattgatagaaggaaaggtagaataaggctcagagaagaaataaagacaaattaacattcaaaagatcaagaaaacgaagagttggtttttttgaaaagataagcaaaatcaacaaactttaagctagactaaaaaaaacaagactcaagtaaaatcagagatggaaaaggagatgttacaactgat

SEQ ID NO: 16001 - DNA, 201 bp, Homo sapiens
ctgtttttcagaggagttctttggctgctgtgctgaaaataggctggagggcagagggcaagggtggaagtggagagtctgagagataggagactatcatwgcaatcctggtgggagtagatgctggcttcatccagatggtactggtagtggtagaagtaatggtcggatactggatctgtttccaaggcaaaactaaca

SEQ ID NO: 16002 - DNA, 201 bp, Homo sapiens
ctaaatgacgagttaatgggtgtaacacaccagcatggcacatgtatacatatgtaacctgcacattgtgcacatgtaccctaaaacttaaagtataattaaaaaaaaaaaaccaaaggactctactaaagaactggtagaactaataaatgaattcagtagttatgggatacaaaatcagcatacaagaatcagtagtct

SEQ ID NO: 16003 - DNA, 201 bp, Homo sapiens
agaagtcactgtcacaagcaaaactcaagatgaagacaaatggactatttatttttgaatggtgattttttttaaaaagtcaagattagtatactactaayacagtaacagctattataataataggtagtatctattaaggcctggaattgcaaggcactgtaaatgtttttcctgcaatatcacctataattatcgtaa

SEQ ID NO: 16004 - DNA, 201 bp, Homo sapiens
caccttgagttctgttggcagccatattagtctaaagggaaggcagtcacgtgatttcgtggaccagctgggaagtcccgcctcctctcttgccatttccsttagctctcttgctagtgttaaaaatccacctagaggattatttaatgattttttaagggctgaggagcaactcaacacttctctttactgagttgcaag

SEQ ID NO: 16005 - DNA, 201 bp, Homo sapiens
gaaaatgttttcagcatggatttttaaaatgctaagtgaattgtatttctgcctggtgagttattgccttaaaggggttgggaagttgcaacacataaagygtttccgttttgtagtataaatttcaggaagcccagtgtcaggttcagcgtgattgaacatgtgcatcaatctgtgttaacaccagctggaaaagcttgc

SEQ ID NO: 16006 - DNA, 201 bp, Homo sapiens
agaggatgagagtttctgtggagcaccttttaatgtgtaaatatgttgacaacttgttttcttctgtttagctcagccttagggataacgacctgatctcrctgcctaaggaaatcggggagcttacccagcttaaagagctccacattcaggggaaccgcctcaccgttctgcccccagaactaggtaaggttgctgatg

SEQ ID NO: 16007 - DNA, 201 bp, Homo sapiens
gtttttgagtatatccgttctgagacatacaaatagtaagtagactctgattttctgaaatagtagactgtgattttatagtatttataattacgcctttaaaaatattatgtgacagtatcctattgatggcagttagcacttagcattttaagatgttttattaaaaactgcatgtcggccaggtgtggtgtggctcac

SEQ ID NO: 16008 - DNA, 201 bp, Homo sapiens
gtattctgtgtaggatacttatttatatgagaaactctagcgcatgagaaaatgttgaacaagaatttaagaggattttctgtttaccctgagtttaactrtaaaattagagttcttccctaaatattattgttaatattatacatgttgttttttgctgtaaaatattcagagattatctaagtaattctgccactatct

SEQ ID NO: 16009 - DNA, 201 bp, Homo sapiens
ttaactctttatttgatggtggttgtctcttcgacctcttttatttctttgaagcagaattatgatggaatactcatcacttaagtttccagaaggtagatttttttcccccaggagaggcagtcaagttgaagtcagcacccttgacaagattctttgtgaaagggggtaactcacactttgcacatttccatcaaggaa

SEQ ID NO: 16010 - DNA, 201 bp, Homo sapiens
gccaccatgcccagctaatatttgtatttttagtagagatggggtttcaccatgttggccaggatggtctcaatctcttgacctcatgtccgtctgcctcygcctcccaaagtgctgggattactgcgtctggccgtatttgccaatataatagggagcagtcatgaaaaaaaatctcattcatggagtgatttttagttt

SEQ ID NO: 16011 - DNA, 201 bp, Homo sapiens
cctccctcagcgtcccgagtagctgggactacaggcgtgcgccaccatgcccagctaatatttgtatttttagtagagatggggtttcaccatgttggccrggatggtctcaatctcttgacctcatgtccgtctgcctccgcctcccaaagtgctgggattactgcgtctggccgtatttgccaatataatagggagcag

SEQ ID NO: 16012 - DNA, 201 bp, Homo sapiens
gtgtcctcacccaaatctcatctggtagctcccataattcccacgcgttgtgggagggacctggtgggagatgactgaatcatgggggcgggtctttcctgtgccgttcttgtgatactgaatgggtctcacaagatctcatggttttaaaaatgggggtctcatacacaagccctctcttgtggctcctgccattcatgt

SEQ ID NO: 16013 - DNA, 201 bp, Homo sapiens
gtgggagatgactgaatcatgggggcgggtctttcctgtgccgttcttgtgatactgaatgggtctcacaagatctcatggttttaaaaatgggggtctcmtacacaagccctctcttgtggctcctgccattcatgtaagatgtgacttgcttctccttgccttccaccatgattgtgaggcctccccagcctcgtggaa

SEQ ID NO: 16014 - DNA, 201 bp, Homo sapiens
catgacatagatttttgtccccctgcaacagcatgaacaggctgaacactttgccacgaggcttcggctccctgccagctcttgaggttctggacttgacktacaacaacttgagcgaaaattctcttcctggaaacttcttctacctgagtaagaaactttcaattctataaatctcctcaaccttgtactttgcgttct

SEQ ID NO: 16015 - DNA, 201 bp, Homo sapiens
agcagcgtttaaagacagaagcacctagtgtggtcttctctgctgtccttcctttgacttgcaattcttctcagaatccttgtatcagagcccaagggtcyggagcagctttggcctccgtgcggtatggggtgtttccagacacatgtcgccttcatcagtcacttctgaagtcttggctcctcaccctctcttaggctg

SEQ ID NO: 16016 - DNA, 201 bp, Homo sapiens
tccagttaattctttgtggtctagaactctgggatgatttgcattaacgtggctgtctctgtgcacaactgccgagggttctgtctacagtgcaacttgtrgaatcttgcagaattggaatagtgcagcctgcagtgctaaaacaaggcagactcctttgaatattctagaaggtatggtggttcttccagcatgttacat

SEQ ID NO: 16017 - DNA, 201 bp, Homo sapiens
gccatggtgggaacaatgatactacaagccttcttccctaataataatgctgtgggaggacccattgttcaattccattctttcagtcgcagcattgcctyagaacctgtttcatgtttatgacaggcccttggctaagggattcagtggtgcctgaagacagggagcttcataaatagatgtaagctcaaagcatggtga

SEQ ID NO: 16018 - DNA, 201 bp, Homo sapiens
gtgttggaggtggggcctggtgggaggtgattggatcctgggggcggagctctcctgaatggtttagcactatcccctcttggtactgtccttgtgatagygagtgagttactgtgagacctggttgtttaaaagtgcgtagcacctccccccttgtgctgtcttgctcctgccatgtaataagcatactcctgcattgcc

SEQ ID NO: 16019 - DNA, 201 bp, Homo sapiens
ctgttggattgtaaattagcgtgttaattctagacccatttttggagtatatgccaggcaccgtaaaagcttccaaccttttgttgcagtaagctcccttsgaattctatcatcaagaaataatcaggaactcagaaaaggttagtataaatatgtttcttgccacagtatttttttttttttttttgagacggagtgtcg

SEQ ID NO: 16020 - DNA, 201 bp, Homo sapiens
ggtcacccctgaggttagcggccaagctgggaagatggttctgggtctgaaggctccttcagaccccattgttatggtctgggtctgtgtccccagcaaayctcatgtggaattgtaatccccagtgttggaggtggggcctggtgggaggtgattggatcctgggggcggagctctcctgaatggtttagcactatcccc

SEQ ID NO: 16021 - DNA, 201 bp, Homo sapiens
gtattttctgtccagtaaaattttatctcagttctgctgaccgagaagggacttatttgcatagcatgaactggcggacaagtggtaatatggctgatttytttttcctctctgtgttaaattggaatagtttacaaagcaccttcgtgccgtggagggaagaatattttccctaatgatgcttcattcatttatgcaatt

SEQ ID NO: 16022 - DNA, 201 bp, Homo sapiens
agaccggtaggtgaattcgatggcccttttgaagttatgtctttctttgctttgaaagaaaaacaaaatgtgccgctgccatcccttgctaggagttccaktcccagattcacactcagcatttttgtttccatagtggtgccaccgaacatcgcagaactgaagaatttggaggtgctcaacttttttaataaccaaatc

SEQ ID NO: 16023 - DNA, 201 bp, Homo sapiens
agaaagaaagaaagaaaatgtgtagtcccagctactcaggaggctgaggcaggagaatggcgtgaacctgggagccggagcttgcagtgagccgagattgygccactgcactccagcctgggcgacagagcgagactctgtctcaaaaaaaaaaaaaaaaaaaaaaggaagaaaatgtacatttcttgcaaatcaaaacca

SEQ ID NO: 16024 - DNA, 201 bp, Homo sapiens
ctgcaaggctgcccaaccccatttcacactggcatccagcccaagagctgggccagtggtggacctgctcctctagacagactcctacagggccacctgamacagctgcacctatgtgcagctggcacagcatcagaccagtagactcttcatccatcctcttgaagagacagccacgtagctgctcagctagccacaccc

SEQ ID NO: 16025 - DNA, 201 bp, Homo sapiens
ccacataccaggcattgtgctaagccctctgtatggattaatctttcaaacctcacaatgtattgtcattatatagttaataggtaaggaaacagatttarggagcatcattaacttgctcaaagtcacccaggcaataagtggtagagcccagatttgaagccacacctgcagacgtcggaagcagtgttctcagcttct

SEQ ID NO: 16026 - DNA, 201 bp, Homo sapiens
tgagccaccgtacctcgtctcagaattctttaaaacactgtgttaagcaaataaaatagtgttattgggctagccctgccagcttggaaacttgggtttayaggatggttgcagagctttaactgttgaagaaaacataagaagcaacttaatctccatcaatattagcagaaccctccccactttctttatggtttcctg

SEQ ID NO: 16027 - DNA, 201 bp, Homo sapiens
taataacagttctcctcaaactattccagaaaattgataagtggggagtatttgtaaaattttatgaggccagcattaccctgatcctgaaaccagacaaygatacaacaacaacagcaaaactacaggtaagtatctgtaatgtgaacatagatgcagaaattcttaataagatattaacaaactgaatccagcagcaca

SEQ ID NO: 16028 - DNA, 201 bp, Homo sapiens
accattaaagggttgatcttggatctagtctaatttgtgaagaacattttataagtcactcaaccatcatgagtaacaaatcgctggggaagtggcttagrcctcccagccacatgccaggaagcctgtgtttggcaatgactgttgctctgtacagaatggctcaagtgttctattggaagcagttggaccttgtggctt

SEQ ID NO: 16029 - DNA, 201 bp, Homo sapiens
gtagcaatagtcacggtagtaattaataataaaaatttctcttgtacttgctatgtagccggctttgttctaacagctttacattgatgttttaatccctyagtaaggtaagcacttataatccttatttttagatgaggcaactgagatgcagagagggtaaatatgaacttgtccaagttcatattgctagtacatctg

SEQ ID NO: 16030 - DNA, 201 bp, Homo sapiens
agaagcatttcttcttctgacggcaatgcaagaaaaccaaaaggaaaaaaaaagttgcacttagaagatcgtatatgacaaccataagtatatatgcttcktaatattcatttttataggctgtttatggtacagaaattctctgttgtgcatttttgctctgtttcccccctcattgtccatctgaaacaaactatgcca

SEQ ID NO: 16031 - DNA, 201 bp, Homo sapiens
ccatgagtgactaaaaccaggaaagtgaaaccacggataagagagaactactatgatagtacagtggcagtagcaatagtcacggtagtaattaataatamaaatttctcttgtacttgctatgtagccggctttgttctaacagctttacattgatgttttaatcccttagtaaggtaagcacttataatccttattttt

SEQ ID NO: 16032 - DNA, 201 bp, Homo sapiens
ctctgtttctccccccccattagccatctgaaacaaactgtgccaagcacttagctaatcatatacgaagaagcatttcttcttctgacggcaatgcaagraaaccaaaaggaaaaaaaaagttgcacttagaagatcgtatatgacaaccataagtatatatgcttcttaatattcatttttataggctgtttatggtac

SEQ ID NO: 16033 - DNA, 201 bp, Homo sapiens
ttcatacatccaccagctagaagcctgggtgtcagctcccatgcttcatcaaatccttttcctggatcagaggttcttacttttcatctgttttcttaaayaatattcccacctcattagtgtgggatatgttccaagacccccagtggatgcctgaacctgcagatagtactgaaccctagaaaaacagtactctgtttt

SEQ ID NO: 16034 - DNA, 201 bp, Homo sapiens
aacctagctagacctctcacctgataccccagatgataaatcttattgcttggtggatattttcactttcatgttccagaggcacctcacattgtaacagrcctgaggttgggctcctccactcctcttgaattctgtgcttaggtcgatgacaccaccattcatacatccaccagctagaagcctgggtgtcagctccca

SEQ ID NO: 16035 - DNA, 201 bp, Homo sapiens
caacaatagcattcatcattttatttaattttgattaatctagatttaaattcaaacagctgcatataactagtggctgtccaacagaaagcccagcccaraacataccctgctaattattattgtataaactcctaaaatgctttgagttgttggttgtggaattattaattttagatcatagaacagaatcttccttac

SEQ ID NO: 16036 - DNA, 201 bp, Homo sapiens
gcctcgtggaactataagtccagttaaacctttcttttgtaaattgcccagtctcgggtatgtctctatgagtagcgtgaaaacggactagaacagataaygttattttacctcccttctacacctcatgtaaaatgagggtaataacagctcccacctcctggtgtctttgtgaggattaaaaggataatctgcttaaag

SEQ ID NO: 16037 - DNA, 201 bp, Homo sapiens
tagcagtctttgatataggagtcccctaaacttcacaggcccccaatccagtttggagagtagccgggagctcacacagatgcaatgcctcagtgtccacrttgaggacccgcaacctaagcagcttcaactctgtcccatcttgaacctttcccactgctagagtgcatcctgccctgcgcaccagtagcaattgactct

SEQ ID NO: 16038 - DNA, 201 bp, Homo sapiens
accagctttactcataacataccttcagtttcggatgatcgagcaaggcttgggactcggcggaagggagcttgtgatgcaggctagaaaagaggagtctyttcccctcattatcccaagcaagtcttcccagggaaaatttgaaatagctgagacttgtgtgtgtcatccttcccggatcctttccctgctccacgttgt

SEQ ID NO: 16039 - DNA, 201 bp, Homo sapiens
tcttaataggttagagaaagtggcatgtaaaggatcatttaagatggtgctttttgtcagttgtgcgttatatttacaaccaatatctaagaacttactcwtaatttcatgcaaatagtcagcagggtgatagttgctgtcttaggtcaaccttttctctttgtttttctccagcagaatgttgtgtttggtgtaactata

SEQ ID NO: 16040 - DNA, 201 bp, Homo sapiens
ccttttccatctgtcttctttcttccttcctttgttcttaatttctggggccaaggtactgtcatgactgtgtacctgtgatgacttgggttaagaaattkaaaagacatcaaatgatccaagaggcacttagggtttgatttagggtacttaggctgtgattactgagaaggacttcttagacctgatctgtattggatg

SEQ ID NO: 16041 - DNA, 201 bp, Homo sapiens
ttgcctaataacatatagaagaattaactcaaaatgaataaaaaacctaaatgtaagaactacaactataaaaattttaggggaaattgtaggataaaatyttcaagacgttggactttaagatgacttcttggctatgacaccaaaggcacagacaacaaaagaaaaaataggcaaattggacttcatgaaaatttaaga

SEQ ID NO: 16042 - DNA, 201 bp, Homo sapiens
catgttggattctgtgacattaatctgattagctctaacttgctgagctaattgcaccgttagttgcatgccttttcttcctttggtttaacattgaataratcgtgttacatgaatcctagcttctattttggtgagcgatagtgcttcaacctgtgaaaataactttgccgtttgctttgtaggagtacaggtagaatc

SEQ ID NO: 16043 - DNA, 201 bp, Homo sapiens
ttcagaaactcaaacacctgaaccttgggtgagtatcagtggagcggaaaggatggagaggaagagagtggaaggggcatgccgggtaaggccaggggagkgattccttttatattattgcacagaaatggatttctaatttctttttatgttttgggtcttaaaaaaattttattgttttaatatattctttcagtggcc

SEQ ID NO: 16044 - DNA, 201 bp, Homo sapiens
gggtaaggccaggggagggattccttttatattattgcacagaaatggatttctaatttctttttatgttttgggtcttaaaaaaattttattgttttaayatattctttcagtggcctacattagtgcatatttgagagctaattgagaggctaattgttggcgcaataaggaagttaaatttttattgtattttctgtc

SEQ ID NO: 16045 - DNA, 201 bp, Homo sapiens
gtacagcatgtgattgtatggaatcccatagggaattgtaacatgatggtgagtgtgtgtgtctttatacaaaaacatacagtaaaaatatagtacattaytgttatctcgtgggaccgctgtcatatttgtggtccattgtttgtttgtgtttttgagacaaggtctcactcttgttgcccaggctggactacagtggca

SEQ ID NO: 16046 - DNA, 201 bp, Homo sapiens
cccttttcttttagtatgttctcactcagatcttagccctttagccaatggctcatttcagtggtcttttaggacggagaaaaatctgtgtcatgcttgcrttccaaggagccatgtgttcattgctaatgccctccctcattttggtccagtttccctgtattcagctaatgttcattatagtttgtggtgttggagtaa

SEQ ID NO: 16047 - DNA, 201 bp, Homo sapiens
acactcatgcattacttaatggtggggatacgttatgagaaatgcataataagattttgtcattgtgtggtcattcccagaatgtccctacacacacccaratggtgtagcctactacacacctgggctagatggtgtgcttgtgactcaggcttttgctcttaggctacaaaactgtacagcatgtgattgtatggaatc

SEQ ID NO: 16048 - DNA, 201 bp, Homo sapiens
acttagaagatcgtatatgacaaccataagtatatatgcttcttaatattcatttttataggctgtttatggtacagaaattctctgttgtgcatttttgytctgtttcccccctcattgtccatctgaaacaaactatgccaagcacttagctaaccatatatgaagaagcatttaagcagccactcagaagtgagtgac

SEQ ID NO: 16049 - DNA, 201 bp, Homo sapiens
caaaagagaaccttaaggaatagccctcttagatatattctgcttttatttctattgcaaatggaaattgacaaattgacatacaaaatgaaaaattaaarcacaaaatatgtagtgattggaataaaggaaaaggcacaaactgctaaaattctccatgtttgagagagaaatcaagcaactgagccctgttatccccta

SEQ ID NO: 16050 - DNA, 201 bp, Homo sapiens
cctgaggaagaaccaaagtagtagagatgggctgtcttgccttagagacattaaggtctgttataaagctataataacgaagacagcctggtattagggtrccagtgtagttacagacaaagagaccaatggaacaggataaaaagcccataaataatctcatgcatatatgcacacttgacttacaatggaaggagtatt

SEQ ID NO: 16051 - DNA, 201 bp, Homo sapiens
cttctcttttaggtgtgtagtgtgtatctcaaagaaacacatgttagttcacaaggatttatgattttttgattaatcagaaatccattcaaaaaatttaycagtatttctcaaagagaagtgctgtctgtagacaccatgggcacatgaagtaaaataatctgtgaaaattctttgtcttgtaaaaataggagtgccaat

SEQ ID NO: 16052 - DNA, 201 bp, Homo sapiens
gtgtcctagtgacttttaagcctccagaaatatctttccacatacctaagagtcacacagaaagtgattgactgtcgcagagctagagccatcatcagtgygtgtgagcagctctccctgaattcctcattgggacgatagtggtcgttttggtatgggtacagaaaatggaatatccgtggagtgatctgtaatttccct

SEQ ID NO: 16053 - DNA, 201 bp, Homo sapiens
gaggcaaagcagggagcatgaaagatgagtttggtcttatgtgcactaaatttgaggttttgggagacccttaagtggagagatatctaattgagaatgtyttatgggcttggaattcaggaagcaagtttaggctggaggtagaacttaccttcctgtggccaagtcctcccagaaaccctgctttgattagtcaccagc

SEQ ID NO: 16054 - DNA, 201 bp, Homo sapiens
gacttaactattcacatgactccatttcctgtgacctcctcaaggaggcccctcgagaatactcagttctgacccaccatcccatccagcctagctgaagygtctctctacttggcatagtacttgggaaaaatttattgaagaaggaatgttactgcttttagttaagagattcaggttggctaagggagaaagcatagc

SEQ ID NO: 16055 - DNA, 201 bp, Homo sapiens
cagataaatctcgaaaacaacctgctttcaagggagtggtctttctaaaggaccaggcaaaataataaacaaatatgatcatgggttatctggaagagctrtctcaaaagtcttgttaaacctggaacacatgctatccatgtcgaccttctttgggggatagattaaagagctggggaggacctgtaattttagatataa

SEQ ID NO: 16056 - DNA, 201 bp, Homo sapiens
cgagatcattcttaaattttcctaaagaagtagctaacaacggataatagtactttttgggaagttgggtggaagtgaatttggagatttgcagattccayctcctctggcttctgtagcattgagccaaggctgctctctgcaaactccctgacctcaggacttctcggagcctagggggttccaggatgctcttcgaag

SEQ ID NO: 16057 - DNA, 201 bp, Homo sapiens
caggaaggggctgtgtcagtatttcacgcagatggactttggtttctccagcctgtccagcaaagtggaggtgcttctggccaaagagaagttaatgaacycttcaggcactttgggctgcttgtggaaccttccagaaactgctgggggagatgggagtgctgaattgccaagtctgggctggcacgtcagatggacaaa

SEQ ID NO: 16058 - DNA, 201 bp, Homo sapiens
ggattgtactgatttttttcttttttaatctagaagtctctcttctctgctgggacattgggaagacaaaagctgtgcaatattcatgcttgcattttttwaataatagtgcctggagcacagtagatgctcaaaaatagttgaggaatgaagaaaatgaaagaatgatggattaggcctgtgagtttgggatatcaactc

SEQ ID NO: 16059 - DNA, 201 bp, Homo sapiens
tgacctcaggtgattcacctgcctcagcctcccaaagtgctgggatcacaggagtgagctaccacaccaggccaatcttttctcttctcgagatagagttktactcttgtcacctaggctggagtgtaatggcatgatcttggcttactgcaacctctgcctcccaggttcaagcgattctcctgcctcagcttcccgagt

SEQ ID NO: 16060 - DNA, 201 bp, Homo sapiens
ttgggtgagtcttaataacaggactgtcagctgcttctcttccctgagagcactcaggccactccaggcaatgaggtccaagagatttccatgcagccccmcaggctctcagccatgggcctctgtcagcccagtgctcctcgctgcccttcctgctcagctgcggtctctctgagcctcggctcgcactgctgactccac

SEQ ID NO: 16061 - DNA, 201 bp, Homo sapiens
ttgtgacatttcgtgaaaaggatccagagtctatgaacgactcctggtggttttcatatattgtcatgcatgtgtaaatattgtaaaggcattgtcctacrtctgtgtagctctttacagtttaaaatgtttcctacccatgaactcatttagctctcttgggcttttggaaggctgggagggcaagtagctgtatcacct

SEQ ID NO: 16062 - DNA, 201 bp, Homo sapiens
cttcccatgccctcttttgttgatctgtatctttagcattccgtttgtacctttagggtcatcctgcttgcctgggtagtgggtggcagatggcctttgayagtttggttttctggaagtcttggtaagtctgacaggagcagaatctatccctatcattttctcctaacatctagctcagggcagaagagcgcagtgtca

SEQ ID NO: 16063 - DNA, 201 bp, Homo sapiens
tgctttttgtttgttttacctctaaagacagaacatacattttcattgtcttttaagatgaagactgtagcgcagggttctttacacaaggagcacggacrtcagcacgggggtgtgaatgatcccgctgcgcaagtggcaccttccagccgaaaggaccagcagccagccctgtctcagagacgagccctctggaggggt

SEQ ID NO: 16064 - DNA, 201 bp, Homo sapiens
atgaaaaataaaaatattactaggtgacagatacctcagtgctcttaaacaggcggccaccttcccactgtgctttccttctctttttggtttttaagcayggcagagcttaggcggcactggtttaatgggccacatccccttcttaacttggaaaagggttaaatctgtggtccaggcagccgagggcagctggatgaa

SEQ ID NO: 16065 - DNA, 201 bp, Homo sapiens
accttccgaggcaggaacagcacccggacggactacgagtaccagcactccaatttgtatgccatatcaggtatgtggagccaccgctgcaggccagctayagagtctgtgtcccgggcgccacctccttccacacgttctctgtcttctcatgggatctgtctgccttacctctcttttcttccctgcaggggacctgtt

SEQ ID NO: 16066 - DNA, 201 bp, Homo sapiens
atgcaagaatggcctaatacaagccatcactcccccaaccccacttctaggaaaccgttggtctacttactttctgtcactgtagtctaggttgcattttstagaactttatgtaaattctttattttgtctggcttttttcctctcagaataatgatcttgagattcattcatattgttgagtgtgtccttgtttgtttg

SEQ ID NO: 16067 - DNA, 201 bp, Homo sapiens
atgctctgtgtcaagatcatgtggttaagaaggactctgtgatcattcccttcctacacactcaaaaatcccgttttgcaacacggtttacactaattatktaaacaggactacaggagtaggaaatagttagaataaacatacttcaggcacctcagaagcacccatttacatacaaatggcagaaaccagcaatttagt

SEQ ID NO: 16068 - DNA, 201 bp, Homo sapiens
agcctgcatttacattctttgcctgtaaccttaaagtctgtggtgacctgataactgcactggggttttcagacacacatatgttcctttttcctcaatcsagaacttcactggcttcctgttatccgaccgccccccacacatcctcttacattaattaggtgagtctcctcttggctccggggcacaccattcttattc

SEQ ID NO: 16069 - DNA, 201 bp, Homo sapiens
caatgccagtggcctagtgcagctcctgatctcttgcttcctccctcctccaggtacagggtcgtgatcggggccttccttcagtctctccttggacaatycaacctgtttattctcatgaaccagaggcctttgtatgggaaagaagccaaagagtattgggttaactgaccacgattccaagcatgaaaataaggactt

SEQ ID NO: 16070 - DNA, 201 bp, Homo sapiens
tggcatccgtggaagacctcaccatcccggtcaggaggcagcagccttgggtgtaggtttcatgctgtgtgcttaactacccgcaagccttgtgagaacargagtgaaccattcctgtaatgacagggcaccgggcagtggagaagtccggagcgacttccagccccatgcggagccgtttctatcagctgccaacctcag

SEQ ID NO: 16071 - DNA, 201 bp, Homo sapiens
cctgtgctcagaagggccccaccatgggtttaatgctctgctgttgccatcttgaaattcttgatagcatttgaataaggaccccatgttttcaacacgcrctgggccgcgcatattgtgtagctgctcccatacctgcctcgaggggcgttgtgaggagccataggaggatgtgtgacacctgcattcccagggctggca

SEQ ID NO: 16072 - DNA, 201 bp, Homo sapiens
acccacccactgttcactcattcctgcattcattctaggctgtgatctctactgggctctggagctacagctgaggctccacagctgccctgagcatgagragggtatagaaagtgttgttgtggtccgttctccccggggaaggaacacgcttcccagagcaagtgcccctttagtggtccttaaggacacgtaggactt

SEQ ID NO: 16073 - DNA, 201 bp, Homo sapiens
atctggccctgcctgcatttctagctctgcttccgacgtgtgccctaaccctatggggaagtgctggctctctctgactccctggtgggtgcctttcactsccataacaccttgaggggtcctgaagccccgttccctttaacagaatatattgttccttcttttcatgcttaccagcactcagtttttcttgttctccga

SEQ ID NO: 16074 - DNA, 201 bp, Homo sapiens
ctgacagaactggctgggagaggagagagaaccatgcaggggaaagacctctccccaggatgtggggctcagggctctgcatcagggtggggagctgggartcacttgccctgctcctggacacaggccagatcctgggtggaaggtgttttgtgagatagggtgccctgaaggtgagggcgctctccaggcccctgtccc

SEQ ID NO: 16075 - DNA, 201 bp, Homo sapiens
agttgagtgagatgtttcttaagaaatgttcttgtggtgggtgtcaggcaccttatgggactggagacctcggggaatgtcaggaaagacagatcttcccygaccccctgcccaaacctgctgctcacagctgccccagaggcttcctataaggagaggggccaccaaggagagcacagtgcggcttttctaacctaggag

SEQ ID NO: 16076 - DNA, 201 bp, Homo sapiens; identical to SEQ ID NO: 2568

SEQ ID NO: 16077 - DNA, 201 bp, Homo sapiens
gcccaagattactgagccattgcagcccgtgagcattccttgtgagtattccctgtgagtgctccagaataaccctcacctgtgacccagtcattcccagycccagcttccactcctgcctgcttccagccccctgagtcctccagctgccagcattgccgagctcaagcatctctgagttaagacagtagtggcagggca

SEQ ID NO: 16078 - DNA, 201 bp, Homo sapiens; identical to SEQ ID NO: 2569

SEQ ID NO: 16079 - DNA, 201 bp, Homo sapiens
acactgctggtgccaggcctggcctcacagggagcaggcaggcactgtggagggtaccagtcatcaccacaggagcctgtcacccccgcaggcgtgtccaygcacacacgccacatgcacagttcaggggcccacgagggcaggctctggctggcaccggcctggccagctgcgccatgtcaagatgccccacgaggcggc

SEQ ID NO: 16080 - DNA, 201 bp, Homo sapiens
ggcctcagagagatgaggcttctgcttgggacccgggctccaagccccatgggaagcagttgacgtggcgattactggttcatttaaacctaaacttaccytctgtaatccatatttttcattccttccttctaggctttaggtcacactcctaatttaggttcaaggcatttttcttgccctgtctccatcctgctaggg

SEQ ID NO: 16081 - DNA, 201 bp, Homo sapiens
agggtgtggatggtgccagggacagcagtggaggcccctcccatgaccctgggcaccacctggtattggtccttgcttcagcggagccagcatatcagggktccctagagcctggcagctgagaccagcctcagccaggtttggggttgagaatctaccctcaccagcaggggcatgaaaactgtcccgctgggtgggagg

SEQ ID NO: 16082 - DNA, 201 bp, Homo sapiens
tccaagcatgaaaataaggactttctgtctatggatgccagtccatagacactggatgctgtggtcataggcataggcactgaccaataaagagtcttctraaatattttaaaagacagccaaatatttcatgaaacagtggtaccacaattttttaaccagtcctccattgtttgattgttcatctgattctagtttttg

SEQ ID NO: 16083 - DNA, 201 bp, Homo sapiens
gccagggtcggttaggtgagctggggtctctggcgtgaggcttaactcctgcccccagacaggggagcagcagggctgagccgtggaggaaggtccccccmccgggcagctgccctggccccgctgtggcctgtcaggagtcctcagcaggggtgcctctgaggactctgtgaggaatgcatggggagggtgtggatggtg

SEQ ID NO: 16084 - DNA, 201 bp, Homo sapiens
taacgttcctaaacacatgaacacagaaaaaccaactttctgatacctttctccctgtatgtttatcttctttgtctagtttttcagcagaaatatgcccrtttccccctgataattcccttccttagagacagcataattgtagacctggccagagaaatgctgaaaacaaagggaacccccttgagcccagcccttcac

SEQ ID NO: 16085 - DNA, 201 bp, Homo sapiens
aatggggcttattgcttatttagcttggggccgattccactagcatttacgtcacgacactgaggtggaattaatgaaaatgcatttggcagcatgaggtraaaaggatttttgaattcaacttttagacgtccgcattgcgtgggcttctgcgggtctcttcaaatatacgaggttagcgtagatttgggacctatgtcc

SEQ ID NO: 16086 - DNA, 201 bp, Homo sapiens
gaagccccaggaagcttccagtcatggtggaaggtgaagggggaacaggcgtatcacatggccagagcaggagtgagagagagggccaggggaggtgccaygcacttaaccagatcttgtgagaatcactcactaccgtgagaacagcaccaagccatgagggatccacctccatgacccaaacacctcccaccaggtctc

SEQ ID NO: 16087 - DNA, 201 bp, Homo sapiens
ccagatcttcagctctcaccagagtttcttccacagtcagaagcccttgcactaggctcgcaaaccctttctcatttccacatcgcatgtgtggcaggctyattcctcccagagtagagctgagctgcgccctcagcccaccctcccctttttaatcgatgtcagctccttcccttacccacactgcggccaagtctctcc

SEQ ID NO: 16088 - DNA, 201 bp, Homo sapiens
cctgtcacccccgcaggcgtgtccacgcacacacgccacatgcacagttcaggggcccacgagggcaggctctggctggcaccggcctggccagctgcgcyatgtcaagatgccccacgaggcggcccaggcctctgcctgatcttgatctgaggctgtggaggggtttccctagtgtcccatggactgactgtgtctctc

SEQ ID NO: 16089 - DNA, 201 bp, Homo sapiens
ggcaggctctggctggcaccggcctggccagctgcgccatgtcaagatgccccacgaggcggcccaggcctctgcctgatcttgatctgaggctgtggagrggtttccctagtgtcccatggactgactgtgtctctctgtccccacccgcccctgcagtacgagtacagcttccgcacagagcagagcgcagccgccagg

SEQ ID NO: 16090 - DNA, 201 bp, Homo sapiens
tttccctagtgtcccatggactgactgtgtctctctgtccccacccgcccctgcagtacgagtacagcttccgcacagagcagagcgcagccgccaggctyccgcccagccccaccaggtgtcagcagatcccgcagtcctgaggagccagcggccacctgcggggagaccaccgccgcccagactactgacggcaggggc

SEQ ID NO: 16091 - DNA, 201 bp, Homo sapiens
aatcgaagccgaagcacagttgccaccattcggcttcagggacggtcaccctccaacaaaccgtgtgaccctgtgtattctgagcatggaggttagggacrtgggcagccacagggagctccccagagctagccaagcagagctgcctccacccccacaaggacacagatggcctggcctaggagctgcccagcactgatt

SEQ ID NO: 16092 - DNA, 201 bp, Homo sapiens; identical to SEQ ID NO: 2570

SEQ ID NO: 16093 - DNA, 201 bp, Homo sapiens
gcttcagcctcccgagtagctgggaccacaggcatgtgccaccatgcccggctaatttttggatttttttttttagtagagacagggtttcaccatgttgmccaagctggtctcgaactcctgagctcaggtgatctgcccacctcggcctgccaaagtgctggaattacagatgagagccactgcgcccagccggaaatc

SEQ ID NO: 16094 - DNA, 201 bp, Homo sapiens
tggggtccttgtcaaaacgcccacacccactgaagtactgcctggggaggggccctggaatatggctcagaaagcagcgggcggcccaccctcgtctcgcrgaagaggcctgcaggatggggccgtggggccctgaaggcctctcccgggactgcagcgcttcaggcctcgccatatgacgtgggcactgtgctgggccct

SEQ ID NO: 16095 - DNA, 201 bp, Homo sapiens
gaagaagacgtgcagggtttccaaaccgaacagttgctcagagtcacctggggtccttgtcaaaacgcccacacccactgaagtactgcctggggaggggmcctggaatatggctcagaaagcagcgggcggcccaccctcgtctcgcagaagaggcctgcaggatggggccgtggggccctgaaggcctctcccgggact

SEQ ID NO: 16096 - DNA, 201 bp, Homo sapiens
gcctggagtttggatggaatatatttatcacctatcccagagaataaggttcttgattccccagatttgtcttacaattgtctgtaagacaatgaatgatrcagaactctcctccaaggttgagatcctttgttagagagcagtttcttacgcctgacttgttttatagcatgaacgatcgcatgatccactggcgaggca

SEQ ID NO: 16097 - DNA, 201 bp, Homo sapiens
gtgacacacttagaagtccttaatcgcttgctacctagaggcaataaacacacctatctttatgttccattgcctgtgtgtttacctgaaatatgccctgygtagcaaaatgccagtttcactcctgtgagaaggtccttggctcatgaattgcacggccttcactcacccctattttgccaaaggtggtagtgccttttg

SEQ ID NO: 16098 - DNA, 201 bp, Homo sapiens
tagaagtccttaatcgcttgctacctagaggcaataaacacacctatctttatgttccattgcctgtgtgtttacctgaaatatgccctgcgtagcaaaaygccagtttcactcctgtgagaaggtccttggctcatgaattgcacggccttcactcacccctattttgccaaaggtggtagtgccttttgtaggcccaag

SEQ ID NO: 16099 - DNA, 201 bp, Homo sapiens
tttttgtaattttgaattatattttctcttctgaatttgaggattaaagataatgtacatgaaatacccagtgcctagtaccaagagggcactccagaagyggagctgctataactgccgtaaatattgttattccagggaattgctgcctattataccagaaggcactggtctcattcaccctgcagtgtgacctcacct

SEQ ID NO: 16100 - DNA, 201 bp, Homo sapiens
ataatgtacatgaaatacccagtgcctagtaccaagagggcactccagaagcggagctgctataactgccgtaaatattgttattccagggaattgctgcytattataccagaaggcactggtctcattcaccctgcagtgtgacctcacctaaaagtccagccggggatggagagggtgcagctgacagagggagctcat

SEQ ID NO: 16101 - DNA, 201 bp, Homo sapiens
gctcatgaatggtgggacctggcatggctcagggaaacttttggcataatagaaggcaaaccctcccttctagttcagaaatgtgtaattgctggagatgytagcttgctactgggtaaaatgattttaaagagagaacttctcaacatttaaatcagcctcaattttccatgttccttttcatcaagtcagctctggttt

SEQ ID NO: 16102 - DNA, 201 bp, Homo sapiens
tttgcaaatgagttttgagaaatggccttgagatcttgagttgttggcgttttccccattacaaattgtaaaggacttttgaaacgccacaggaaaggggmgaagaaaggcttagggttgctgattatttacagctccaagccccgggcaggtacacagaattaaaggcctcccaccactccaattgcatttaattttatt

SEQ ID NO: 16103 - DNA, 201 bp, Homo sapiens
acgcagcccaggtgactgtggcatgcctgcgggtttgagagttttggagcagaaggatgcctcttctggatgtggggcagcttggagtgcgcagttgttayagcgctcacaggggccgcgctcacctgcacccatccttgcctgccccgctcacttggacctgccactctcccacaggggccgcttgtctcacagtcagaa

SEQ ID NO: 16104 - DNA, 201 bp, Homo sapiens
tcagtgacatgtttatgtcatgaccttcaagacttccaccaatcctagccaccatgaatgttatttttttaaattattttattatattttagatttggggrtacctgtatgttgtgtacgggtagagattgggcttctagtgtacccatcggatgttggagtctcaggtcccagagagtcagatttcaggtgtgaggatgc

SEQ ID NO: 16105 - DNA, 201 bp, Homo sapiens
ttctcccgatgcagccctcattagtcacgatgggaggtgccagtttgtattccgtttggagcacagaaaacttaataatccaagcaaatgtggctatcccyttttcctctgtatttactcacaaaaccctctcactcattcccattgtggctgaaccattaagacacagctatttccagattcctctgcgaggcttgaagg

SEQ ID NO: 16106 - DNA, 201 bp, Homo sapiens
aaagacaagccacagaaagtggcagacctgggagctctgagagctctgggcagggagctcacagggtccgctgggggtgggggcgctaggcagggagctcrcagggtctgctgggggtgggggcgctgggcgcagggtgagagttgctctgtgggagtctggggtctccacagggacctgaaacacagattctgttagaaa

SEQ ID NO: 16107 - DNA, 201 bp, Homo sapiens
tgtcctgccgcaccctggccccaagggagcagagctgtggtctgagagaatgcacgtggcacacttagcacagtgctggcatccacgaggtgtgcaggagrcaaacatcagctatcgttaggtgatcctcttagaaatagtggcttaaagcacctggttgcagaggagctggtcttgttttcttctaggcttcccttccct

SEQ ID NO: 16108 - DNA, 201 bp, Homo sapiens
gtgttctggtacttccttctgtttgctaaaacttcctaattccctatttaaaaagccttctaataatgaaacgtcaattaattggatggttgaaaaaagaygaggcgcttgctttaatttttctttcttttttttcagttaaactttttattttgagacaatggtagactcacatgcagttgtaggaagtactacagagag

SEQ ID NO: 16109 - DNA, 201 bp, Homo sapiens
ccccccagggttgtttgcagacaccaaaatagcatttaggccaggcccggtggctcacacctgtaatcccagccctttgccaaaccaaggtgggtggatcrctggagcccatgagtttgagatcagtctggacaacatggtaaaaccccatctctacaaaaaatacacaaattagccaggtgtggtggtgcatgcctgtag

SEQ ID NO: 16110 - DNA, 201 bp, Homo sapiens
aggtggtattcaggtgaattctaaaatgctgactcagtgaccagggagcaccccacccccccccagggttgtttgcagacaccaaaatagcatttaggccrggcccggtggctcacacctgtaatcccagccctttgccaaaccaaggtgggtggatcactggagcccatgagtttgagatcagtctggacaacatggtaa

SEQ ID NO: 16111 - DNA, 201 bp, Homo sapiens
acacacgctccttgtgggagcagggagaaactgcttcatgggtgaggggtttggctttggagcgatggaaatattttggaactagatggaggtgatgatcrcacaccattgtgaatgttctaaatgccactgaattgttcactttaaaatggttaattttatatgaattttttaaaacatttccctccctgcttagatctt

SEQ ID NO: 16112 - DNA, 201 bp, Homo sapiens
tgaagcactttctcacgctttctggagctggggcttcccgctgggtatgcagcctctccaatgtctctagaaccatggcccaagtaggaagcaaggacttyagctggccctgcagctgctggaagaagacgtgcagggtttccaaaccgaacagttgctcagagtcacctggggtccttgtcaaaacgcccacacccactg

SEQ ID NO: 16113 - DNA, 201 bp, Homo sapiens
gttgtggtccgttctccccggggaaggaacacgcttcccagagcaagtgcccctttagtggtccttaaggacacgtaggactttgccacttgagggaggargagtgttcctgacagaactggctgggagaggagagagaaccatgcaggggaaagacctctccccaggatgtggggctcagggctctgcatcagggtgggg

SEQ ID NO: 16114 - DNA, 201 bp, Homo sapiens
tgggtaacagagtgagatcctgtctcaaaaaaaaaaaaaaatgagagagagagaaagaagagaagggaaatagcatttattcagtggccagggcatctgayggtgcacagccctgcccagagcctccacccagagcagcacagctggacacccaggtgccacagggagggaagggttggggagagcgaggcgagagcaagt

SEQ ID NO: 16115 - DNA, 201 bp, Homo sapiens
gatgtgttctgctatacaaaagtttcaaaatgttcatgggcaattttctctgtttatttgggctttgtgtcatagttagattatgaaaacattcacccctrttttcccttattattttatatattaaaatattaaatacttttcaactacttaatccatctgaaatttattagaaggtaagaactacagacagctttattt

SEQ ID NO: 16116 - DNA, 201 bp, Homo sapiens
gagcaaacttttctctatgagttcaaatacacacactttaatcagtgtcttttcagcttgtaaatgatgtgttctgctatacaaaagtttcaaaatgttcrtgggcaattttctctgtttatttgggctttgtgtcatagttagattatgaaaacattcacccctgttttcccttattattttatatattaaaatattaaa

SEQ ID NO: 16117 - DNA, 201 bp, Homo sapiens
ttacaggaacatgtaaaaggtgaacctccccctccgtccactcctgcggcacgtgcacacacacacacacacacgctcagcaggctcatgcagtactgccrgctgcgacctgcctctgtactatctagtatgtcttacacgtcttcgcatgttcctttacagatcagccttaccctttttaatgactatatgttgttccct

SEQ ID NO: 16118 - DNA, 201 bp, Homo sapiens
gggaggcagttcatttaaccacttaattgccacaggtttttatgggctgctgtttgcagacatatttaatgaagaagttataaatctaagggagcttacarttttaattttatacctaaatattttccttgttctcatgtttgtagtcagtcctcaagagtgtagtcacgtggaatgttctttaaatgaacatatttgcta

SEQ ID NO: 16119 - DNA, 201 bp, Homo sapiens
tcagcagaaaccacagtgctccccgttcccttccaggagtgccaccatcaaaaccgcggcggaggaagcacacattagcctgccgcactcctggcggagcracagcctccattttcattcgactttaaagccgaaagatgagggagggtctaattagtaaagggatgctctaatattaatcacccgcttaaaattgacaag

SEQ ID NO: 16120 - DNA, 201 bp, Homo sapiens
aggctcgcccacgattcccagacagggtggagagcctggcatccagggagaggctgctctgtgctgggcaggtgcttcccttcaggatccctctgcaccaygtgggaggaaggggggtccacccatttacggaagtctggactcaagaagttaagtgactggccagattcccacagcagcaacccagagctgaacaggggt

SEQ ID NO: 16121 - DNA, 201 bp, Homo sapiens
caggctcgcccacgattcccagacagggtggagagcctggcatccagggagaggctgctctgtgctgggcaggtgcttcccttcaggatccctctgcaccmcgtgggaggaaggggggtccacccatttacggaagtctggactcaagaagttaagtgactggccagattcccacagcagcaacccagagctgaacagggg

SEQ ID NO: 16122 - DNA, 201 bp, Homo sapiens
ttgctgtcagttaccccccgtggctgcagatcacactgcctgttttagagcatgccttcttccagaggatgtggtcgctactagtggtaacgtatctgcaytggaccttgggtctgctttttgttctgcatctacaaagctcctttggtctcgagctcactgaggagtttctgcgtttgtcgctgtgggcagcaggtgtgt

SEQ ID NO: 16123 - DNA, 201 bp, Homo sapiens
gtttaaatgagataaaaacataaggccctaggtacaaactagctgctcagtaactgttagccactggtattagtattagtgagtattagtgttattactgycgtacagaggaaaataccctttcgcggtagacccctttctgcctgctttcccataaaaacaggagtgcagccatattaaattacataacccaggggctgt

SEQ ID NO: 16124 - DNA, 201 bp, Homo sapiens
actcatttcctgcagaaacagctgctttcgacataaaaccgcagccttgccccattttctcagtggctgctgtggtcaggctgttctttcctgttgctgtytgatccctcagcggtgctgcggagtgggcacaattatcctcatatgacagatgaaaatctgactctgaggctaagtgacttgcccaaagccatacggcca

SEQ ID NO: 16125 - DNA, 201 bp, Homo sapiens; identical to SEQ ID NO: 2563

SEQ ID NO: 16126 - DNA, 201 bp, Homo sapiens
ccaggcctggcctcacagggagcaggcaggcactgtggagggtaccagtcatcaccacaggagcctgtcacccccgcaggcgtgtccacgcacacacgccrcatgcacagttcaggggcccacgagggcaggctctggctggcaccggcctggccagctgcgccatgtcaagatgccccacgaggcggcccaggcctctgc

SEQ ID NO: 16127 - DNA, 201 bp, Homo sapiens
ggcagggtgagaagacaggtgaagcaggccagccacggtcagtcctccaggagacctggatccccctgggtgccacagaccacaactaggcaaaggtcccrcagcacaggggccagcaccttgagggccacattcctgcagcaggctctatcatcacttctcctgccacccccacgcgtgaccgagagtcccactgactgt

SEQ ID NO: 16128 - DNA, 201 bp, Homo sapiens
gtttgactaccctaggtagtcaaactgtgtgatcctagtggatcatacagtatttgtctttttgtgactggcttgtttagtttagcatactgtcctcaagrttcatcatgttgtagcatatttcagaatttccttcctttttaaggctgaataatactccattgaatatgtggaccatattttgttcattcatccatagat

SEQ ID NO: 16129 - DNA, 201 bp, Homo sapiens
ttcagggattaagggagtcccttgaaccagggaggctgcttacatttaacctcagcggtctctttacagtgaacatgccttacaggccagcctcaggtagycagtcccactgtccagtgggctgttcagggcttcctgaacgcacatcatcctctgtgactgctgcacagtggcccagaatgtgacctctgaactcaagct

SEQ ID NO: 16130 - DNA, 201 bp, Homo sapiens
cttggacaattcaacctgtttattctcatgaaccagaggcctttgtatgggaaagaagccaaagagtattgggttaactgaccacgattccaagcatgaawataaggactttctgtctatggatgccagtccatagacactggatgctgtggtcataggcataggcactgaccaataaagagtcttctaaaatattttaaa

SEQ ID NO: 16131 - DNA, 201 bp, Homo sapiens
ttatctgcttagcagagtcttgctggtcctggtggcacttgcttctctttggagcctccctgtgctggtgagaagggcactgtgagagccccgctcctctygattcagctcccactgtgagcttcagcccatgggatcctatcacctcctctttctttcctctgagtttgttaaaatctgttttctaggccatgtgtggtg

SEQ ID NO: 16132 - DNA, 201 bp, Homo sapiens; identical to SEQ ID NO: 2561

SEQ ID NO: 16133 - DNA, 201 bp, Homo sapiens
gctttgctcactgtaaacctttgtgttttataccattaaaccaaaaaaaaaaaaaaatagagtaaatacaagtgggagactgctttcaggttcaggggcayagacctttgaccgtgcctcccgctcgtccagaacatctccccaggctcgcccacgattcccagacagggtggagagcctggcatccagggagaggctgct

SEQ ID NO: 16134 - DNA, 201 bp, Homo sapiens
aggtttggccctggagtgggctgtgttccctgggtcgggatgagtttgattttgtgccttccatttataacaggtctggctgcccttagtgaggggcttgkgggtggagaagtctctgctcagaaatttgctttgctcactgtaaacctttgtgttttataccattaaaccaaaaaaaaaaaaaaatagagtaaatacaag

SEQ ID NO: 16135 - DNA, 201 bp, Homo sapiens
taataatagtgcttagtccagagtctatgtgggtttaactgcaaaggtccagtgaatggcctgaaccagtgcctgcctcagtgctgctggctgccactgtyatcacagccaccaccgtcaccatcgttaccgttctccttgtccacagagaagggcgtgagtcggcacaggcccacccattccactgtcccgctgctctgt

SEQ ID NO: 16136 - DNA, 201 bp, Homo sapiens
ctggtgatggcgcttcctggatgggtcgactgcagcccgcgcggcccggagccatttgtccatatttcacaaaggccgcctccgtccggggcacagcagckggggggaaggagggagaacggctggcgttggagatgctctgcgcgcagctctgcagggccctctggcaggccaggcccggctcctttgtctgcctcagcc

SEQ ID NO: 16137 - DNA, 201 bp, Homo sapiens
ttttgcttccccctcctcctgattggccctgcaacttccagttggtaatggagcccctctgagctgtcgatcctgctcgcaccgtgccatagatcaacctrttccctcctgtgcggtgcttggatctccctcattaggcctaaatttacctccatcctacacaaacatggccttagctcatttttattgttgtaaattatt

SEQ ID NO: 16138 - DNA, 201 bp, Homo sapiens
cgaacagttgctcagagtcacctggggtccttgtcaaaacgcccacacccactgaagtactgcctggggaggggccctggaatatggctcagaaagcagcrggcggcccaccctcgtctcgcagaagaggcctgcaggatggggccgtggggccctgaaggcctctcccgggactgcagcgcttcaggcctcgccatatga

SEQ ID NO: 16139 - DNA, 201 bp, Homo sapiens
ccttgattccgccttgcccctctgcagccagtggccaggtctcttgattcttccatctaaatgtcccttggccttccccagccactccattcttactgccrctgccctcatccgggccaccagcgtccctcgcctggttcagtgtcagaacttcctccctggtgttcctgctccagcctcactccctgtaattcattctcc

SEQ ID NO: 16140 - DNA, 201 bp, Homo sapiens
ccatgttccagaatatttcatcttctctcatggtctcaattatcaccatgctggttacttccaaactcaccctcacatccccgcccgccaggcctcatttytggatctccacccggcagccctcacacacccatctcacattctcggtcataatgttctaaccagtgttgaccagttgcctccccttggctgtggcccaag

SEQ ID NO: 16141 - DNA, 201 bp, Homo sapiens
atcgccaggaggcgctgagactggttttgagtctgggtcctcagactccagagctggcctcacaggaaacccctgctggcttcgcggaggctccagctccmctcccatccctgagctgccgcccttcaggaccatgcgggccctggggttctgtcgaaggccctcaggtttagccttggccccaggaggctgggccaggga

SEQ ID NO: 16142 - DNA, 201 bp, Homo sapiens
gatttaacccgcagctgcatcgccaggaggcgctgagactggttttgagtctgggtcctcagactccagagctggcctcacaggaaacccctgctggcttygcggaggctccagctcccctcccatccctgagctgccgcccttcaggaccatgcgggccctggggttctgtcgaaggccctcaggtttagccttggcccc

SEQ ID NO: 16143 - DNA, 201 bp, Homo sapiens
gaagggatttaacccgcagctgcatcgccaggaggcgctgagactggttttgagtctgggtcctcagactccagagctggcctcacaggaaacccctgctrgcttcgcggaggctccagctcccctcccatccctgagctgccgcccttcaggaccatgcgggccctggggttctgtcgaaggccctcaggtttagccttg

SEQ ID NO: 16144 - DNA, 201 bp, Homo sapiens
tgggagaggcagctctgtcctgctcaccagctccagttgggagaatttagtggggtggttagagcctaatgacacagcagctgcacctctgctgggtcgcrggcaggcggccccgctctcgcacccctcgttttggcagcacagagagcaccacactgttccgtggctaccggcagagcagccgcgagcggaacgtgtgac

SEQ ID NO: 16145 - DNA, 201 bp, Homo sapiens
tccaatggcgccagcccccaaggtggcagtggccccctcccagctgcgcaggcttgccccacgctggctcagcaaacccgtttctggttttgatcctttcygcagaagttggccttgactagctaataaacatgaaggccccagcttgggcacagctaaagaatcctttagtgtttttcttggatccagcttaaaaccacc

SEQ ID NO: 16146 - DNA, 201 bp, Homo sapiens
aaggccaacttcagactgtgaggggcggccaccctgcatggcagtggggtctctgcctctcactgctagggtcagccctccaatggcgccagcccccaagrtggcagtggccccctcccagctgcgcaggcttgccccacgctggctcagcaaacccgtttctggttttgatcctttctgcagaagttggccttgactagc

SEQ ID NO: 16147 - DNA, 201 bp, Homo sapiens
cagctgtgtcaccttcatcctgctgccagcccctggtgactctcccgttacagatcagagaccagactccaggggtggagagtaggggttctggaccagcygctctctgctcctagagctcttgtctacacaactgcctggtgctcaggggatgacgaggcgcctgcctctctcagtaggttgtgtgtcctggcagcaggg

SEQ ID NO: 16148 - DNA, 201 bp, Homo sapiens
aatgtggcaggatttccagtcctggtgtggcaccagagtcctcctctctgaggttataattcatagagaagtgctcacttacggaggcacaccctgggtcrtttctgtccgtgtgcttttgaaagcgatcccctgggacagggcggagggaggggtggccacagaaaaggaaccaggcccctggtttctccatcgttgcgt

SEQ ID NO: 16149 - DNA, 201 bp, Homo sapiens
tcattccaggagacactgggggaagcaaagattgttggtcccaggagcgcactgcccgacgctgcccccatgctctaccttgcttccattgtgctcactcygtttctccctgaaaccacaatttactgcatagccaccacctcagggtgcggccacccctgacttcggggctccgcgtccctgcactcatgaccaggcccc

SEQ ID NO: 16150 - DNA, 201 bp, Homo sapiens
ggccttgtgggactgttccttgagctttgctgcccccacctccaccattctgctgagcccctggccacaacggcatcgtgacttccattgtggggggggamtcagtaatgcattttgaacccaagagttaaattttagaatgctgattgaagaggcctgggttttggttttcctttgatttagccacacggtgcagatgat

SEQ ID NO: 16151 - DNA, 201 bp, Homo sapiens
tgctgggtttctcttttccctgagggtctgctcttttggattcacgtgatattcttcttcccctggggctttagggaaagtatttttaagaacaggcgccrggtctcctgttgggccttgcgtttcatggtggttccccctcattccagcctgcagtttgtcccgcctggttgcgacagcagccctggcttattggtatct

SEQ ID NO: 16152 - DNA, 201 bp, Homo sapiens
tatagtctgacctgtttacaaaagagcccatcacatattaagtcttatcaggacttgtgtagacttgggacttatctttctattttaagtagagttgaatmccgtgtatgatactcgatcgctgcaaggtccatctgcttgctcctgatagttctggtccgcctcatcagccattccacaggcttgagaacacgtccttgt

SEQ ID NO: 16153 - DNA, 201 bp, Homo sapiens
tacttcccttaggactggagggccatcttgttggacctgtggcaggagtcaacacgagtttgttctttctttctttacacacacacacacacacacacatmcacacacacttaaaaaaaacagattctaatcagcagagcagaatattcaaaagaatatcccctgatcctttagaagagagaaataaatgagtttgtaatg

SEQ ID NO: 16154 - DNA, 201 bp, Homo sapiens
cttgcatgatgtcaggattctgagtggtggcacctgtctgactgggaaattggagaaagtttgaggggaatggaagatgtgaccctggtgttttgttttgkttttttttgagacagactctcactctgtcacccaggctagagtgcagtggtgcaatcttggctcactgcaacctccgccacccaggttcaagtgattctt

SEQ ID NO: 16155 - DNA, 201 bp, Homo sapiens
accaaatatatgaaaaaaaattctcaagacccatgtgaaagtcagagaggggtgtggtggcctggctggcctgaagacaggtgttctgatgattctggcaggggcccccatttgcctggcactgaaattatattagtatctttactgtatgagcaccgtgcccatcagggcaagctgtgactcctgtcaccaaacactcag

SEQ ID NO: 16156 - DNA, 201 bp, Homo sapiens
aagatactgcttattcatgcttacccccacttctctctctcctcctttttctttgtcactttcttttctctctctctgatagtagaggccatactatcttaaaaaaaaaaaaaaaacttacctcacatgttctttattaaattcacagcgtgatattttagcactggcagaattcgtacattctgttaatgagttgttaat

SEQ ID NO: 16157 - DNA, 201 bp, Homo sapiens
tctgtttccggagctttttgtgggttccactgacttcatgggagacttgcatacagcattttgattgttcctatttagaaggctgcagtcatttttaatgrcctctgccttttctgattctaggctagaagcaagaatattcctcctgcctgcttagtgaggtagggtgtttggtttgtattagaagcagtaaccagcctt

SEQ ID NO: 16158 - DNA, 201 bp, Homo sapiens
tttttgtgggttccactgacttcatgggagacttgcatacagcattttgattgttcctatttagaaggctgcagtcatttttaatggcctctgccttttcygattctaggctagaagcaagaatattcctcctgcctgcttagtgaggtagggtgtttggtttgtattagaagcagtaaccagccttgagagatctggcag

SEQ ID NO: 16159 - DNA, 201 bp, Homo sapiens
aagtgtgagcagagttctatgatgttttatccctgtatgaacgtagcatgagccattcggcttttcttgctgattgggaggatccgttccaggttttttcytctcttatgtcctttcctcttgctttgctgctttctgcttctgctactcttctgtgttaggactgagaaaaaaaaaatatgaccactgaaggttccagag

SEQ ID NO: 16160 - DNA, 201 bp, Homo sapiens
taagagaaggaaaaagaatctcaatggtgatacaagttcaaacaagcttgcatttttatatagtgctcaaggaatttttaaaaatcacgttatgaaaaacatgtgaagatggcaactatatcttgttaaaaacatatggcagatatcaagtggaaatgtgggacattggcatatcccgtctgagcacagctgtcacatgga

SEQ ID NO: 16161 - DNA, 201 bp, Homo sapiens
aagagaaggaaaaagaatctcaatggtgatacaagttcaaacaagcttgcatttttatatagtgctcaaggaatttttaaaaatcacgttatgaaaaacatgtgaagatggcaactatatcttgttaaaaacatatggcagatatcaagtggaaatgtgggacattggcatatcccgtctgagcacagctgtcacatggat

SEQ ID NO: 16162 - DNA, 201 bp, Homo sapiens
attgcaaaggatagaacatctagcactatgttacctgtgagagagtagaccttcttgccttattgctgatcataggtggaaaacattcagtctttcactctttttttttttttttttttttttttgagactgagtcttgctttgctgcctaaactggagtgcagtggtgcgatctcagctcactgcaacctgcactttctg

SEQ ID NO: 16163 - DNA, 201 bp, Homo sapiens
ttgcaaaggatagaacatctagcactatgttacctgtgagagagtagaccttcttgccttattgctgatcataggtggaaaacattcagtctttcactctttttttttttttttttttttttttgagactgagtcttgctttgctgcctaaactggagtgcagtggtgcgatctcagctcactgcaacctgcactttctgg

SEQ ID NO: 16164 - DNA, 201 bp, Homo sapiens
gtgggtgtgtgtatgcatatgcatacgtatgcacttataatggaaatatataatttataccttacatattatatatacaaaatgtagaatctgccggtcgyggtggctcacgcctgtaatcccaagactttgggaggctgaggcgggcggatcacaaggtcaggagatcgagaccatcctggctaacacggtgaaaccctg

SEQ ID NO: 16165 - DNA, 201 bp, Homo sapiens
cctcggcttcccatcaggcgtgcattagatgagcataccctgtgtgtcttcatttgagtcattgatcatgccctgggcacccttcacaggggtcacttaargttagcattggtctcttaatcagcttcttgaatgtgtggttcaaccagttatggattctgctaacctccacagtagccagctgtatttatccatcttgtg

SEQ ID NO: 16166 - DNA, 201 bp, Homo sapiens
gactcagaaatagactaaatgctagaacatcacagtctctctgctctaaaataataacaaagacaaaatgctagttgcagctagggaaaaagaaaggaagraagtaaacgtggctccccaggagaagccaggacggagatgattcatgaacattcttttggaatgcatgaagaatgcatgccgttgattttaagaattatg

SEQ ID NO: 16167 - DNA, 201 bp, Homo sapiens
atgggtggtcctaagtccggagccttgggagttggtcagtggtgggtttgtgttgagcctgcagaagtctgaggtgtgtgtttggaggggagaatcaaggratggctctggaggactgccttggcaggtaaaattatagttcccatatgaagggaggatgcaggagctataatcccatctcgttgccaggcaaagttccta

SEQ ID NO: 16168 - DNA, 201 bp, Homo sapiens
ccacatgactttatgactctctttatcaagcgtgttgaaattaatccatgtgttgattggagtatttcctcacccctgctgtgtattgagacgttggggasggataagggttggcggctctgagcagctaggtattccggggcaatgggtggtcctaagtccggagccttgggagttggtcagtggtgggtttgtgttgag

SEQ ID NO: 16169 - DNA, 201 bp, Homo sapiens
agcagtgcccccacactgacagattgagactaccccacccccaccgacgccctcacaacccagttcttccccgtctgcctttaatcaccgcgaggggggcgacagggaatggctacggcatgtcctcctggaattcattagcgttattaccaaagaccgtgttgtaaattgagattttttttaactgctaggaaaaaattt

SEQ ID NO: 16170 - DNA, 201 bp, Homo sapiens
tagggatccactccaagagagggacaggtggaggtgttccgttctcttctgagaaaaacactttcgttgcacccaaatgtgtttcttagataaagtaactmaattctaatgtatttcctacttccagtcaaatatgacccacatcttgtcttctctaagtcagaatgttttacatgacagacagagcctcagttctccttt

SEQ ID NO: 16171 - DNA, 201 bp, Homo sapiens
tgcaaaggatagaacatctagcactatgttacctgtgagagagtagaccttcttgccttattgctgatcataggtggaaaacattcagtctttcactctttttttttttttttttttttttttgagactgagtcttgctttgctgcctaaactggagtgcagtggtgcgatctcagctcactgcaacctgcactttctggg

SEQ ID NO: 16172 - DNA, 201 bp, Homo sapiens
ccagctcctcccaccagatctctgtggtcgtatggtctgctctctctctctcatccgcgtggccagtggtccagccaaccccacgcttcccacatgtgccrgggaggacccacaccctggccttttctgtcctttcttctaggggtgcgcctgcccctctgcccctacttcgtttctgcctgccagcactttatgatgcat

SEQ ID NO: 16173 - DNA, 201 bp, Homo sapiens
agaaggagggtaagcgcgggtggcagggaggggcctgccattgccattcagtgtgtacgcttggttactcaattaccctcgtttccactctgaagttgcacctcctcccccacctcctcctgacctccagcctccttccccacctgccgggcttgtagagtcctgagctgtgctgggttcctttctgcagaagatacacct

SEQ ID NO: 16174 - DNA, 201 bp, Homo sapiens
aactgccgtaaatattgttattccagggaattgctgcctattataccagaaggcactggtctcattcaccctgcagtgtgacctcacctaaaagtccagcyggggatggagagggtgcagctgacagagggagctcatgaatggtgggacctggcatggctcagggaaacttttggcataatagaaggcaaaccctccctt

SEQ ID NO: 16175 - DNA, 201 bp, Homo sapiens
gggtcctggctcccgcctccgccctgagcctgtgacaggcagaggccatccatgtgctgtggggcctgccatgctctgtgcagagcctgcagtcagtgtgygggatggggctgaatcagggcacttttgtgtgaagaatggaggcacttccagccatttgtcaggatgggcgggagcttgtcaggtcaaggactggatccc

SEQ ID NO: 16176 - DNA, 201 bp, Homo sapiens
tattgactcatgtagatttctctatgcttttaaaaaaaaaaacaaatacttgcacctgtaaattaggaaactttaaagatacctactaaggtttttttttwaaaaacatctaataagatattttaatagatggcttagaaagaaaggaaatagctttggtgagtatctgctctgtacaaggcctgccctgggcacctcatt

SEQ ID NO: 16177 - DNA, 201 bp, Homo sapiens
ccatatgttattgtctctttgtcatgtaaatttttattttgggaaatatttttatttatttatataaattatattataaaagtaatatttatttgcagttaaaaaaaaaaaaactgaacccagacaacaaatatcctcattcaacagcatgaaagggggagagcattagtcatcctctctgccacctggccccgcaggccc

SEQ ID NO: 16178 - DNA, 201 bp, Homo sapiens
tgtatatatatatatgaaacgaagtcttcctctgtcgcccaggctggagtgcagtggcacaatctcagctcactgcagcctccacctcctgggttcaagcrattctcctgcctcagcctcccaagtagctgggactacaagcgtccaccaccacacccagctaatttttgtattttttttaagtagagacagggtttcacc

SEQ ID NO: 16179 - DNA, 201 bp, Homo sapiens
tgccaaataaaacaaatgtcaaaatagtcaatataaaatgtattctaatttggctgagttaagtcagccaatatgcaacaggataattgaatgttcattartgcttccaagtaaaagccatttgtctgtcccaagttctcctgtgcggtaatttacaggtaggatgcacacctatgtaagcctcatccatcagggtttttt

SEQ ID NO: 16180 - DNA, 201 bp, Homo sapiens
gttgcccaggctggtatcaatctcctgacctcaagtgatccacctgcctcggcctcccaaagtgcttggattacaggcatgagccaccatgcctggcagatttttttttttttttttttgagacagagtctcactctattgcccaggctgaagtacagaggcatgatcttggcttactgcagcctcaacctcccaggctcc

SEQ ID NO: 16181 - DNA, 201 bp, Homo sapiens
tcacaagtcttgacgcgggtagtttcttctaagcagtctctggtgcctcccatctcgactccaggtttctcctataagcgccactctgagaatttctcctycctgcccggggctctccagccacgctccccctcttgctccctaggatggggcaggtcctaagacagcacctgccctgcagcctcccaggttccagctcct

SEQ ID NO: 16182 - DNA, 201 bp, Homo sapiens
cccgtcagtacctggcatttcattctcccagctctttaggccaggatcctggggtcacccttgattccgccttgcccctctgcagccagtggccaggtctsttgattcttccatctaaatgtcccttggccttccccagccactccattcttactgccactgccctcatccgggccaccagcgtccctcgcctggttcagt

SEQ ID NO: 16183 - DNA, 201 bp, Homo sapiens
taggcctacgtgaataacttgttcctcatcagattttcacctgccacttttagcatccattgatttttataactctgccatttctccagtatataaggaaraggtttcccttatcctcagccagtttatttctttatattggtatggactagggtattcttactcatagttgtcattttttattttgatgctcaaatggat

SEQ ID NO: 16184 - DNA, 201 bp, Homo sapiens
tgtaattagtaggtaatttgtggggaatactgtaggcctacgtgaataacttgttcctcatcagattttcacctgccacttttagcatccattgatttttwtaactctgccatttctccagtatataaggaagaggtttcccttatcctcagccagtttatttctttatattggtatggactagggtattcttactcatag

SEQ ID NO: 16185 - DNA, 201 bp, Homo sapiens
aataagatctgttatgcattttggcaggaatcctcctgaggccatcgatagagtctcactctcagtgcatcctgttgggaggcccacggtgctggtgtgayccagtactggtgaagttagcttcgatcacctggcgaaggtgctgtgtagcaggtttcttcactgtaaacttactgcttttacctttgtaattagtaggta

SEQ ID NO: 16186 - DNA, 201 bp, Homo sapiens
agacaccttctctcttcttgccctttggtttcaggggaggaaagggaaggcccaggacctacttttacctttgcagaccatttttgataagactttatgartagaatctgggtgagggctatagaaatcagctgtcatgtaggatggaccaacttagtgagatttatacattgcatcctcgggtttaaatccaggttctca

SEQ ID NO: 16187 - DNA, 201 bp, Homo sapiens
aagcaggtatataggaaaggactctccaggctgatcccacagcaaggagaaaggcctatcacagatggaaggcttgactcagtagaaagtggttagcaggycagaatagctaaatcctaaagtgtagggagcagagtggcagggaggagagagcagctagggaacaaagctaggttgggatcaacctggaagggcctggac

SEQ ID NO: 16188 - DNA, 201 bp, Homo sapiens
ggaaatggttcttgacagtcctgctggttggaaacacacctctgcgtaggttggtgtgtgttctcctgcctcccgtctccaagaggcgtgagttctaaggrctcccatcctctcacatgcaccatgaggactgtcagccgcatccagctcagctagatgatacgagtagctatgtgaggggtaggaaaaccaggtattcag

SEQ ID NO: 16189 - DNA, 201 bp, Homo sapiens
gacacagcaaccagacagaaggcagctcagcacatccctgctatttccagatcaaagcgcatgtcagttcggcatcagctccgtctcacactgcaccttcygcctcatctccccactgtcctgcgggctggtccattggagctgagtcctgggccagtgggtgtggtgtgtgctgctttcaagagaagccctttcccaggg

SEQ ID NO: 16190 - DNA, 201 bp, Homo sapiens
gcctcatagacacagcaaccagacagaaggcagctcagcacatccctgctatttccagatcaaagcgcatgtcagttcggcatcagctccgtctcacactrcaccttccgcctcatctccccactgtcctgcgggctggtccattggagctgagtcctgggccagtgggtgtggtgtgtgctgctttcaagagaagccctt

SEQ ID NO: 16191 - DNA, 201 bp, Homo sapiens
ctcataaggaagagaagtccacccattcttcattttccgtggaggccaggagtgatgccttgatccagttccattgtccccacctgggcctgtgcatggcygtcagcacccccacaaccgccgaaggctggccctggtggcttctacggggattgctctctgttgtctttgaatcacgctgctggagaggagcttgcgtag

SEQ ID NO: 16192 - DNA, 201 bp, Homo sapiens
aatagatgcagaaaccaaggcatagagagctcagtcaacttgcccaatcacacagctaatgagagctgggattccggctcaggctggtgcagcggaggctraaagggcacttgctgcctgctcagggctgggttttgggaggcagatcaagcaggaggaatgacaccctgtatcccagggatgtccttcagccctgcaggt

SEQ ID NO: 16193 - DNA, 201 bp, Homo sapiens
tcgtgtgaaggggtgttccccaaatgactgcatcctagaattgaggaaatacagtaaaattgcattgggagacaaaaatctttcaaaacatgtaatccatkggagaaaacaagcatagggggtgctttgtgtggaggagctgagaccactgccttaaatctcatgtttccctagaaactctatgtgtgaccattatgggga

SEQ ID NO: 16194 - DNA, 201 bp, Homo sapiens
catcgcccttccatccgtccatccatccagcagagacttatcatgcatttattaggtgtgaggtactgttcaaaggctttacaaataactcctttaaatctttttttttttttttttttttttgagacagagtctcactgtcgcccaggctggagtgcagtgctgctatctcggctcactgcaacctctgcctcctgggtt

SEQ ID NO: 16195 - DNA, 201 bp, Homo sapiens
tttcgtgtgaaggggtgttccccaaatgactgcatcctagaattgaggaaatacagtaaaattgcattgggagacaaaaatctttcaaaacatgtaatccwtgggagaaaacaagcatagggggtgctttgtgtggaggagctgagaccactgccttaaatctcatgtttccctagaaactctatgtgtgaccattatggg

SEQ ID NO: 16196 - DNA, 201 bp, Homo sapiens
cggccttgtgggactgttccttgagctttgctgcccccacctccaccattctgctgagcccctggccacaacggcatcgtgacttccattgtggggggggratcagtaatgcattttgaacccaagagttaaattttagaatgctgattgaagaggcctgggttttggttttcctttgatttagccacacggtgcagatga

SEQ ID NO: 16197 - DNA, 201 bp, Homo sapiens
ttttcgtgtgaaggggtgttccccaaatgactgcatcctagaattgaggaaatacagtaaaattgcattgggagacaaaaatctttcaaaacatgtaatcyatgggagaaaacaagcatagggggtgctttgtgtggaggagctgagaccactgccttaaatctcatgtttccctagaaactctatgtgtgaccattatgg

SEQ ID NO: 16198 - DNA, 201 bp, Homo sapiens
tgatttagccacacggtgcagatgatccaaaatacagccttgaaaacatttttgtgggcctttgcgtgttctctttgtcatcacttttggtgagtaactckgtgtgtgtgtgtgtgtgtgtgtgtgtgtgtgtgtgtgtgtgtgtgtcccttgggccttctttacaccactcacaggcggtgttactttgagtgagtttta

SEQ ID NO: 16199 - DNA, 201 bp, Homo sapiens
tttttcgtgtgaaggggtgttccccaaatgactgcatcctagaattgaggaaatacagtaaaattgcattgggagacaaaaatctttcaaaacatgtaatscatgggagaaaacaagcatagggggtgctttgtgtggaggagctgagaccactgccttaaatctcatgtttccctagaaactctatgtgtgaccattatg

SEQ ID NO: 16200 - DNA, 201 bp, Homo sapiens
gatcatattccatacacagatcccgagcatctcactccaaccctctccacaaagcctgtaaacatcattttatgtctgcataatattctgagtcagacatwgtaacattatttccagtttttgagtagaccgtcataattaagagcatgaattgtgtaattggccccatcagcattcaaatccaagcttctgcatactctg

SEQ ID NO: 16201 - DNA, 201 bp, Homo sapiens
ctaatttttggatttttttttttagtagagacagggtttcaccatgttgcccaagctggtctcgaactcctgagctcaggtgatctgcccacctcggcctsccaaagtgctggaattacagatgagagccactgcgcccagccggaaatcagatttgattgaagtaatttaaactgaacatcaccttttctggggctgtaa

SEQ ID NO: 16202 - DNA, 201 bp, Homo sapiens
tatttgccaggatgtatcctcttttcattgcattttctggaatcctgtgaaccccattggttgtgtgtgtgtgtgtgtgtgtgtgtgtgtgtgtgtgtgtgcgtgtataagggttgggagatcaaagtggcaggtgcctctgactatgagtgcgcctctgccttgctagtcaccactctctcgacgctgccctttgacagt

SEQ ID NO: 16203 - DNA, 201 bp, Homo sapiens
atttgccaggatgtatcctcttttcattgcattttctggaatcctgtgaaccccattggttgtgtgtgtgtgtgtgtgtgtgtgtgtgtgtgtgtgtgtgcgtgtataagggttgggagatcaaagtggcaggtgcctctgactatgagtgcgcctctgccttgctagtcaccactctctcgacgctgccctttgacagtc

SEQ ID NO: 16204 - DNA, 201 bp, Homo sapiens
ccactatgttgagtattccaattcatgaacatagtatgtctcttcatttattagttcttctttcatttctttcgccagcgttttgtagttttcagcaaacragctctataatgttttggtagatttgagcctaaatatttatttttagattttgagcaattataaatggaattgtacttttaattttgatgttcacatgtt

SEQ ID NO: 16205 - DNA, 201 bp, Homo sapiens
gacatggccctgccttggagcctggtaggctttccctcctcagctcggaccagcactggggactcagctccagacgtgtgcagaccctgcgggcccacggrgttgcctgggagctggggaaatgtgttccctgttagagcgctgtccatttggtgatttgggggcagccggtgcaacacattcagcagggcctcaggtcgt

SEQ ID NO: 16206 - DNA, 201 bp, Homo sapiens
ctgtggctagcagacccaataccttcacagcccttggtgctcatcttgcccctggaaggctccttccggttccagctcaatcctggacctgtgggaacatcccctccctggagagcctttcctcccaggagtctttttttttttttttttgaggcagagttttgctctgttgcccatgctagagtgcaatgtgcaatggca

SEQ ID NO: 16207 - DNA, 201 bp, Homo sapiens
ccccggccctgctccatccccatgtgaggattatttacaggaaactgcatttgatagggctggtggggagggcatagagatggaggggtgccagaacagaygttggtcattttctcacgtttgggaaattaataacactcacttacctagcatttatagagtgcttcacccaaactctcttcaagtctcatagcaacccaa

SEQ ID NO: 16208 - DNA, 201 bp, Homo sapiens
ttggtgctcatcttgcccctggaaggctccttccggttccagctcaatcctggacctgtgggaacatcccctccctggagagcctttcctcccaggagtctttttttttttttttttgaggcagagttttgctctgttgcccatgctagagtgcaatgtgcaatggcatgaactcagctcactgcaacctccgcctcccag

SEQ ID NO: 16209 - DNA, 201 bp, Homo sapiens
cccagttccttgcacctgtctctcaaggggcattcgttcactgggcagttactgaggaaactcccatgtgcccagccctggggcctggactggcagagagycccgggcagtgagtgggagctcagagcacacggggcccccacacaccaactggatgcgacctgccaccggtacaaatacaacctgcagaagtcggatgtg

SEQ ID NO: 16210 - DNA, 201 bp, Homo sapiens
tggtgctcatcttgcccctggaaggctccttccggttccagctcaatcctggacctgtgggaacatcccctccctggagagcctttcctcccaggagtctttttttttttttttttgaggcagagttttgctctgttgcccatgctagagtgcaatgtgcaatggcatgaactcagctcactgcaacctccgcctcccagg

SEQ ID NO: 16211 - DNA, 201 bp, Homo sapiens
ggtgctcatcttgcccctggaaggctccttccggttccagctcaatcctggacctgtgggaacatcccctccctggagagcctttcctcccaggagtctttttttttttttttttgaggcagagttttgctctgttgcccatgctagagtgcaatgtgcaatggcatgaactcagctcactgcaacctccgcctcccaggt

SEQ ID NO: 16212 - DNA, 201 bp, Homo sapiens
aatgctatgtttgaattttgtgttttctttttcctttgctgaaccaggaccagtccaccatgcctgaagtcaaagacctctcagaagccttgccagaaacrtcaatggatcccatcacgggagtcggggtggtggcttctcggaaccgagccccgacaggctatgacgtagtaagtcaagatactagtttgtacattttgc

SEQ ID NO: 16213 - DNA, 201 bp, Homo sapiens
aaagtccaaagccgtctccaagacgcagctgcatcactgcctgcccctagcatggttagtccttccgggtaatggagagtcctgttgcttcagaaaggctkcacagaactgtgcctgtgagaccacgagaccctcaccccagcagcacgcgggcacgcagcccacagcagcatttctcatggtgccattgtgtctgaggtc

SEQ ID NO: 16214 - DNA, 201 bp, Homo sapiens
tgctcatgccctcaccccacgagtttaaccagatcttcagctctcaccagagtttcttccacagtcagaagcccttgcactaggctcgcaaaccctttctmatttccacatcgcatgtgtggcaggctcattcctcccagagtagagctgagctgcgccctcagcccaccctcccctttttaatcgatgtcagctccttcc

SEQ ID NO: 16215 - DNA, 201 bp, Homo sapiens
gtctgggatattggatgccaacatccagctaagttatgtttgtgttaaacatgaattgaaatgcaattacagctggcaatgtgctttgagagctgagtaayagagtacataagaagagtgacttaggcacgaggaccagtttatctcctttcctttcttgcctcctgtcatcgggcatgactcatgaacggcgcgagttca

SEQ ID NO: 16216 - DNA, 201 bp, Homo sapiens
aaatggttattggtgtggtttacatgttttgcataaaggaaaattaatttttggccaggcgtggtggctcacacttgtaatcccagcactttgggaagccraggcgggggtatcacctgaggtcaggagttcgagaccagcctggtcaacatggtgaaaccccgtctctactaaaaatacaaacattagctgggtgtagtg

SEQ ID NO: 16217 - DNA, 201 bp, Homo sapiens
cagcctgggttttctcttttaatcatttaatataatgaaatacactgattgatttttgagtgttaaaccaaacttccatttctggaataaatcccccatgracataataaattgtccttttaatatattgttagattcaattttctaaaattttgttaagaaattttatgtgtatgttcgtaaggaatatggattggtctg

SEQ ID NO: 16218 - DNA, 201 bp, Homo sapiens
catgagtgccaccacacccagccaatttttttaatttgtagagatggggtttcgccatgtttcccaggctggtctcaaactcctgaactcaagctacccaygcactttggcctcccaaagtgttgggattacaggcatgagcaacagcgcccggcctccagttcgatttgtgactctgagtggcccggttgaaaaatgtgc

SEQ ID NO: 16219 - DNA, 201 bp, Homo sapiens
tttaatgtctgctagaactatttccttccttctcctctttttcaaaattgttttggttactaccacatgttattttttctaaaagaactttagattcaacycgtcaaattgcacaaaatactatgttttgatcctcagtgcaattgcagtgggtaataagttgatttgaagggattcgacatatttgcaatactgagtttt

SEQ ID NO: 16220 - DNA, 201 bp, Homo sapiens
taatttgtagagatggggtttcgccatgtttcccaggctggtctcaaactcctgaactcaagctacccacgcactttggcctcccaaagtgttgggattayaggcatgagcaacagcgcccggcctccagttcgatttgtgactctgagtggcccggttgaaaaatgtgcacccgaaattaatttattcagcaagtagtta

SEQ ID NO: 16221 - DNA, 201 bp, Homo sapiens
atacaacagcagctacactgcagcaggcccagggccaggggcataaacaatactcaggttaggtcaagtcataccactaacagcaaatcatgcccttaacrttcaacgctacttttctgcttaaatttaaagtactgcattatgagggcgttgcaacatcttgcttataacttaaggcctgctggcttcaaatgatttagg

SEQ ID NO: 16222 - DNA, 201 bp, Homo sapiens
atcctggaagccccatcctaggggtctgcggaaatgctgggtgggctttgcccttcaggctgggatgtgaggcccacgtgcatagaggttgtagtagatayaacagcagctacactgcagcaggcccagggccaggggcataaacaatactcaggttaggtcaagtcataccactaacagcaaatcatgcccttaacgttc

SEQ ID NO: 16223 - DNA, 201 bp, Homo sapiens
ttctccctgtggttttgatgagctgcatttgtcatatgctagaggtctttgcatatgcacagatttatgctgattagaacgctcgtttcctatcccacagrtgaaacccacggcagcttctttttccttaatatagggcccttatgcagggaatacaggacataggggaaaaagaaataaactttattaccacctccttct

SEQ ID NO: 16224 - DNA, 201 bp, Homo sapiens
attgtacctttaaaccctctttcttcatgtttctgaaatgcctatacccagtcccccaacttttaagtaaaacttttctcatccttaaaatccaggttacrtagccccttagtgaaactttttctgaccattactcattcatttatttatttgctcattggtttcacaaatgtttattggccacttagctattgtccaagg

SEQ ID NO: 16225 - DNA, 201 bp, Homo sapiens
aaagagccctggcagagaaagtgcgtcttccaagcctgaggttccctgctccacaaccgaggggtgtatgtgatgctcagcctgggggacaggcgtgctcygtagtcacaggccatgcctgtcaggcccttgctgtcagttaccccccgtggctgcagatcacactgcctgttttagagcatgccttcttccagaggatgt

SEQ ID NO: 16226 - DNA, 201 bp, Homo sapiens
cctagtatgtaaatggcagagctgggacttgaactcgaatctacccaacttcagaaatccaagttcttgcctgctgggatcatcacagaggctgtagagtrggggattctttcagccaggccctaaataatgagatcatttcaacaagacagatgcgagagggagcaacacgagcaaaggcagggaggcaggaaatggcgg

SEQ ID NO: 16227 - DNA, 201 bp, Homo sapiens
tcctggtttaccccacactactctgttggagagttttcacctgtgagcaccttgagtgagagggcagagaccatatttagagagaatggaggctcccctctttttttttttttaattgaggaggatgtaggtaaacaaaggcaaagacaagagcaagattgttcactccattcactcaacagtcaccgagagctgccctgt

SEQ ID NO: 16228 - DNA, 201 bp, Homo sapiens
caagatacagaatatagccaggagtcccataagttcacttgcctccatttccggcccttccctccccatcgccagtccctggcagtcacttgcctgcccaktgctatcatatacatggactcatacaatatgtagctttgtgtgtctctcagcataatatttttgagagtcttccatgttattgcatgtatcaggaatttg

SEQ ID NO: 16229 - DNA, 201 bp, Homo sapiens
taagccccattttgaccatttccaaacatgggaccgtcattcctttctctggaactcagtttgcctagctgcaaaatgaagctgttggacagggtggacckcctgtccctctatccttccaccaatcattgagggccaggcaccctgcaggggctagaacaggtgccttgagaggttttgcctcagggtaggagggactga

SEQ ID NO: 16230 - DNA, 201 bp, Homo sapiens
caactactgtcacacagttggtgtttgtgccctgaatactgaatggctttttccctctttttattaatggccagtgatagtcctaaatgcatttatgtttaaaaaaaaaaatcttcaatcctgcagcctggagtttggatggaatatatttatcacctatcccagagaataaggttcttgattccccagatttgtcttaca

SEQ ID NO: 16231 - DNA, 201 bp, Homo sapiens
gggagagctcagggattttgatgggtgttcagcacagtggaagtagcactactttctggggtttaagccccattttgaccatttccaaacatgggaccgtsattcctttctctggaactcagtttgcctagctgcaaaatgaagctgttggacagggtggacctcctgtccctctatccttccaccaatcattgagggcca

SEQ ID NO: 16232 - DNA, 201 bp, Homo sapiens
tctgagaggacctgggtcttagaactggttcacccttttgtatccaccctttccagctacattactttagacagtttatataacattgcagtctgttttctttttttttttgtaattttgaattatattttctcttctgaatttgaggattaaagataatgtacatgaaatacccagtgcctagtaccaagagggcactcc

SEQ ID NO: 16233 - DNA, 201 bp, Homo sapiens
ttatttaatcccaacaaatccttaaccaagaaaatcttttacagatggggaaactgaggtcttgagagcttgtgatcagctcacagttacacctgtggtasgtggcagggctgagattcagacccaggtctctttgactgcagacattgagctcgaaaccacggtactgaggatgcttctttagcacaggttgcgtgtgac

SEQ ID NO: 16234 - DNA, 201 bp, Homo sapiens
cctttaaatgattttccttctttgcctttctttttctttctctttggccttggctccttcctttccaaccactcccctcccagaacctcttattttagccaaaaaaaaaaaaaaaaagtttctttccttgctccagaatcacaccacccaccgagcacatcatctggaagtcccctgtccctgagctcacttgctgccagg

SEQ ID NO: 16235 - DNA, 201 bp, Homo sapiens
attagccttttgtttctttctctacctctgtctctctcaaaataataaactctcagctgagaggggaaaatgatgaaggcaacttctttcattgaaacacrtttagttgtttttgcattattaaaatggattaaattaattaaatgaatttactgaataatacccagccttcctcttacttaccctgtgtaaggtatggca

SEQ ID NO: 16236 - DNA, 201 bp, Homo sapiens
gtaaacacagggtaatattttacggggagatagccgaagtgtcacatttccgtgcccgcatgaggttcagtgttaaaagttccctggcagcggccattccragacaccatttgatcagagatgatttcagagaacaattatacagattttcataatcaccattaatctctgcatatttttcaagataattacagcaattat

SEQ ID NO: 16237 - DNA, 201 bp, Homo sapiens
cctgggtcgctccctgcgtcctccttgcctttgtcttgcgctatgcttgcaccgccactccagcagctcagatttcaccaccttctcttctctctgtcccyggctgtggctctgaaggccactcccaagctgcctctccatcaggcttttctgattcctctcccgctgctgatgctctctcctggtttaccccacactact

SEQ ID NO: 16238 - DNA, 201 bp, Homo sapiens
ctagaggtgaatttattttattttattttattttttattttattttattttattttattttagatggagtcttgttctgtcgcccaggctggagtgcagtsgcgtgatctcagctccctgccacctccgcctcccgggttcaagtgattctcctgcctcagcctcccgagtagatgggacaacaggcacgtgccaccacgc

SEQ ID NO: 16239 - DNA, 201 bp, Homo sapiens
tccctgtgctcgggtgagtgtgtgggctgagtgagtgtgttcctgataaccaccaaggagggaaagagccactgtcttctggtgcaagcccctgagtagtrttagcctctgctttcacaggggtccctgtggcccttgtcttcagtggatatgttctcgtggctcggggtggcattgcatttctgaccctggcttccctga

SEQ ID NO: 16240 - DNA, 201 bp, Homo sapiens
gaagtgggtatttgagcctctaatgctccctgttacagttttgctgtcgtggtggttctaagacaataaactttgataggtcgttttctttctttctttctttttttttttttttttttgagacggagtcttgctcttttgcccaggctggaatgcaatggtgtgatatcggctcactgcaaactccacctcccagattca

SEQ ID NO: 16241 - DNA, 201 bp, Homo sapiens
ccaggtctctgctcaaacggtttttccactgacccaataaatgattatgtaacagtcaggagacccctattcagacaacacctggttctgttactcgcccrccaggtcacactgagcaagcgggtaaacgtctctgtgcccaggctcagcctcaccaggcccaggatagagaccaggacaaatgagataatgggtgtgaaa

SEQ ID NO: 16242 - DNA, 201 bp, Homo sapiens
tattaaattacataacccaggggctgtgagtcccaacccaaagacgtttggagggacaaaagcaatgtttgctgaggagtaactcattgggtcccccagaycatggctctccgtggtgtctgctatctctggtgttgcaagtcaagctcgacttggaagcaagatccaagcttctgaggctcagtgagaatgttcttgttg

SEQ ID NO: 16243 - DNA, 201 bp, Homo sapiens
ttgaacggctcactttctcacatccagaataagcaggaactttgtaccattgtacctttaaaccctctttcttcatgtttctgaaatgcctatacccagtsccccaacttttaagtaaaacttttctcatccttaaaatccaggttacatagccccttagtgaaactttttctgaccattactcattcatttatttatttg

SEQ ID NO: 16244 - DNA, 201 bp, Homo sapiens
gctgaccacaccaccacagtttagtggagaactttccttgcttttcagcagacatctgtgctggtgttcagtagtcctgatgattggaactggttatgttrttgtttcagtaggtaaattctgattcgggtggagcttgcaaagtacagaggaacgttaggagggtttaattaacagtggatattatcatgtgttctgaga

SEQ ID NO: 16245 - DNA, 201 bp, Homo sapiens
gtcacaggagagcttatgcggcgtctgggaggccccttggtgtccactcctagttgtgtggttcatggggcctcgagttttgtagtttgaagatgactccsaaactgaccctgagaatgagtccaacggcaggtgacacccagctgcaagaggctgtatcctgagattggagtgtgttatagagtagggggctaattcttc

SEQ ID NO: 16246 - DNA, 201 bp, Homo sapiens
actctttctcctgaactttccgtgttagtgtgtgtatgtgtacaaagttgtttcaaatggctgttgagtcttctattgtgaggatgtcctctaatcattaraaatttatcatctcccactcttacctttataaactgagccccaataaacatgtcaataacgctcatcccatcttaccaggctccagttacagagccccac

SEQ ID NO: 16247 - DNA, 201 bp, Homo sapiens
accttaaagtctgtggtgacctgataactgcactggggttttcagacacacatatgttcctttttcctcaatcgagaacttcactggcttcctgttatccraccgccccccacacatcctcttacattaattaggtgagtctcctcttggctccggggcacaccattcttattccaaaagcatctctgctctggccttcac

SEQ ID NO: 16248 - DNA, 201 bp, Homo sapiens
aaatttcatttgaaaaacttcccgttaccttacttgggtagctgacagggtatgtggcttttcacactgccctgattgcagagttgactcgttcatttatyctttcaacaaggtttgatggagcccatccgtgtcaggcattgtgcttggcacagggggtaaaatggcaagcagaacaggcactgccgttgtccttgtgaa

SEQ ID NO: 16249 - DNA, 201 bp, Homo sapiens
ttaaaatagatgcatgtgtttggatatggtgctgtgcctttttcgtgtgaaggggtgttccccaaatgactgcatcctagaattgaggaaatacagtaaarttgcattgggagacaaaaatctttcaaaacatgtaatccatgggagaaaacaagcatagggggtgctttgtgtggaggagctgagaccactgccttaaat

SEQ ID NO: 16250 - DNA, 201 bp, Homo sapiens
tcgagtaccagcagttggcaggggcccacttgccagcccaggagtggaggaggaatcagaatattttaatctgttacagccagtctatgctggccctgtartccaaaccaagactttgcagaccatcattttttacaactgtaaaggagggatgtggggtctcaagactggacagattcttaattagctgacttgagactc

SEQ ID NO: 16251 - DNA, 201 bp, Homo sapiens
gataactcccactccagaatgtggactttccgtctcattactgtagcctcagtgcttagcccaagtggctccgtagtcatctgtggactcactgttcacgygccaggccctcttagagaccgggaatgtaggaggatgcttcagggggaagatggcaaggtcagctgaatttgaggtattcctgagccatgtgggcaaaga

SEQ ID NO: 16252 - DNA, 201 bp, Homo sapiens
cggcagggtggacaaggctccgtcaccatgcaggtgaccagcactcactgcacaatgaggcaactttgctgccgccttgctggacacattcctgggaaggycacaggcactcgggcctcagtgtctccatctgaaaaaggaaagcattccacaacataagtcgccaaactaaacttctggctcagatcttcccacattctt

SEQ ID NO: 16253 - DNA, 201 bp, Homo sapiens
cacctacaggccctgggccaacagggaccatggttccctcatggagctcataatcaggggaagacatccaggcagatgatcggagcacagtcatccactaygatgggtggtagctcaggaggcagcccagggggtaacgtttctgccctttgaggagttcacaagcaggtatataggaaaggactctccaggctgatccca

SEQ ID NO: 16254 - DNA, 201 bp, Homo sapiens
ccttcactttcacaccttctcgattatattttctccacttccatcttcagatgacttcttcaggtcacatggcaaggtgttaccctctcttccttcacatrgcggaaggcagtggatttaggagatcaccgtgtccacccagctctgcccttgaccagctttgcggccctgacaagttccttcccttctgggcttcagact

SEQ ID NO: 16255 - DNA, 201 bp, Homo sapiens
gggtaggggacaaatttgctgtataggcttggccctggggcatgttcccaggccccctcaccccaaagtggaacacaggcctgctcatcccagcccagcgygccacacagcgcggcagtcagggcacctggcagctggtggagcgtggttagatgtagctgccctgctcttcaccagggtctccccaagagtcgtggtacc

SEQ ID NO: 16256 - DNA, 201 bp, Homo sapiens
atttatctaaccaatccactattgactgacttttgaggtgcttccaattattcacaattacaccgctgcaatagatttccttgtacatgttgcctggctcscctgggtctttccctggaagaggatgtatgttaccatttgccttttgaacagggcggggctattggaagtcccaccagtggtgcctgaggggacctttcc

SEQ ID NO: 16257 - DNA, 201 bp, Homo sapiens
tgcagggaccaggccttccctttcctttgtgtcgccacagcacttagagaagggccaaatactcagcatgttttgaaactaatgatgaaaaacaatgtgtrgatttcacagggttgaagggaggtttccagagaatactcgccacattgttcacctgccagacccgggcaggcttcccacggggcctcgggagcagcgccg

SEQ ID NO: 16258 - DNA, 201 bp, Homo sapiens
aatttgtatgccatatcaggtatgtggagccaccgctgcaggccagctacagagtctgtgtcccgggcgccacctccttccacacgttctctgtcttctcrtgggatctgtctgccttacctctcttttcttccctgcaggggacctgttccctgcagggaccaggccttccctttcctttgtgtcgccacagcacttaga

SEQ ID NO: 16259 - DNA, 201 bp, Homo sapiens
gattgagaaggaggcgctggccagaagcacctgctctgcccgctgatctgtgctgcatttcagctgttgatggcgtcagtgcttcctgagtcttggggaaygctccttgtaatctcctttctctcgtccttctcttcctcaggcacatctccctaacacttcctgccaccttccgaggcaggaacagcacccggacggact

SEQ ID NO: 16260 - DNA, 201 bp, Homo sapiens
gagaatgacgtgaacccaggaggaggagcttgcagtgagccaagattgcgccactgcactccagcctgggagacagagcgagactccatctcaaaaaaaaraaaaaaaaaaaatgtaaatctataatctatgtaaaggtatatttttacataatatatgtgatatatatatatttgtgtgttaggctgttcttatgttgct

SEQ ID NO: 16261 - DNA, 201 bp, Homo sapiens
tcctgccacccccacgcgtgaccgagagtcccactgactgtcttcctgtggaaagtgggtagagaaacgctagatcacaccgtggcttgaggtgttaccaytgtcatgcataaaagtaagtgtgggaggagcattttccagctatttaaaagggcaacttcatctgtgttttcagatgcagccctttgatctcctgggaat

SEQ ID NO: 16262 - DNA, 201 bp, Homo sapiens
gcaatggcatgaactcagctcactgcaacctccgcctcccaggttcaagcaattctcccgcctcagcttcccaagtagctgggattagtagagacagggtwtcaccatgttggccagactggtgtcaaacccccaacctcaggtgatctacccacctcggcctcccagagtgctgggattataagcgtgagccaccgcgcc

SEQ ID NO: 16263 - DNA, 201 bp, Homo sapiens
gattgggaggatccgttccaggttttttcttctcttatgtcctttcctcttgctttgctgctttctgcttctgctactcttctgtgttaggactgagaaaraaaaaatatgaccactgaaggttccagagaagtcatcattccaggagacactgggggaagcaaagattgttggtcccaggagcgcactgcccgacgctgc

SEQ ID NO: 16264 - DNA, 201 bp, Homo sapiens
tttctgcttaaaaatcattccagagaaaggcagaacccatgctgggctccacgtggcctggccccaccgtcttcctggccttctaggcatggccaccctgrcttcctcctaagtctggaggaggtcagactccccacggagcctcgagtgctcacccctcctccctgctgcatctctctgatttctgcctatcttcagttc

SEQ ID NO: 16265 - DNA, 201 bp, Homo sapiens
gaaatggcagcgtcccaattttataaaagcaaaatgttcctattcccgcacaattgttcattctttctacttttggaaagctttcctggtgcttattagatgttgaagaattttgtggcgcgaactggtgcagcctgaaaaatgtgcggtccctttgcaccatctagtggtaggatcttaaactgcagcaggaaataaggt

SEQ ID NO: 16266 - DNA, 201 bp, Homo sapiens
tgggttctgctgtggtgctgcatggaggccctcatgagccagactctaaaataatgccggggtggcaagaatggggagagtgggagtaggattgaagctcrcgtacttgcatgtgctcacgcatgcctggttccgtgctgtcaaccctgcctgcatggtggccctctgtgccctgggaggcaacacacccctgccaaaggc

SEQ ID NO: 16267 - DNA, 201 bp, Homo sapiens
aaatggcagcgtcccaattttataaaagcaaaatgttcctattcccgcacaattgttcattctttctacttttggaaagctttcctggtgcttattagatgttgaagaattttgtggcgcgaactggtgcagcctgaaaaatgtgcggtccctttgcaccatctagtggtaggatcttaaactgcagcaggaaataaggtg

SEQ ID NO: 16268 - DNA, 201 bp, Homo sapiens
gtgcctcctcagaagggtggcctgactggggagggaagccagccgctgagatctggggacagtggcaagtgcaaaggccctaaggcaggaacaagagcagrggctggaggaacaaaagcggctactgaggttggcagacgtgaatgcagggagggtggacaagatgtggtcagagaggagggatgggccagagctggcagc

SEQ ID NO: 16269 - DNA, 201 bp, Homo sapiens
aatggcagcgtcccaattttataaaagcaaaatgttcctattcccgcacaattgttcattctttctacttttggaaagctttcctggtgcttattagatgttgaagaattttgtggcgcgaactggtgcagcctgaaaaatgtgcggtccctttgcaccatctagtggtaggatcttaaactgcagcaggaaataaggtgc

SEQ ID NO: 16270 - DNA, 201 bp, Homo sapiens
gtttcctgagtaccaaggttgtccatgtttataaaaatgcaaacattacaggaacatgtaaaaggtgaacctccccctccgtccactcctgcggcacgtgmacacacacacacacacacgctcagcaggctcatgcagtactgccggctgcgacctgcctctgtactatctagtatgtcttacacgtcttcgcatgttcct

SEQ ID NO: 16271 - DNA, 201 bp, Homo sapiens
tgatttccttcatcttccagtggcagcttttttttccccttgtccaatgcacagtgatttggttttgtgtgtgtgtgtgtgtgtgtgtgtgtgtgcacgcrtgcacgcgcatgcatgcatgtgtgtatgtgttgcccatgaggaaaacccattctacagtcagcctggtaggttggagttgcattggtcgtggcaaatggg

SEQ ID NO: 16272 - DNA, 201 bp, Homo sapiens
agggttagttctctcttttttcccccagaactttactaattttactcacaggactattcttccagttgaactttagaatcttgggggcgaaggaagttccraaaagcccactctcgatttttattggaactgcattgagcacatggttgaacagaatagtaatcggaatcttagatcaagcgtctctccatccagaaacaa

SEQ ID NO: 16273 - DNA, 201 bp, Homo sapiens
gcagcgggcggcccaccctcgtctcgcagaagaggcctgcaggatggggccgtggggccctgaaggcctctcccgggactgcagcgcttcaggcctcgccwtatgacgtgggcactgtgctgggccctgcctctctcctcccgcagcgtttcagaagccagggctgcattcctcatcttcaggaaacagatgaggacgtgg

SEQ ID NO: 16274 - DNA, 201 bp, Homo sapiens
cgggcggcccaccctcgtctcgcagaagaggcctgcaggatggggccgtggggccctgaaggcctctcccgggactgcagcgcttcaggcctcgccatatgacgtgggcactgtgctgggccctgcctctctcctcccgcagcgtttcagaagccagggctgcattcctcatcttcaggaaacagatgaggacgtggagcc

SEQ ID NO: 16275 - DNA, 201 bp, Homo sapiens; identical to SEQ ID NO: 2564

SEQ ID NO: 16276 - DNA, 201 bp, Homo sapiens
gggtgtcttgcattgtcctgtggtcttaggtccctgcacaacattttagaacaccaccacttagtgtctgctgaaatactgcaaagtacagctgaataatygtagaagcaatatatctttagaggagatttttaaaaatccacttggaaatctttgcattacatgaatgcaaaggccattctatagtctattttgtgcgtg

SEQ ID NO: 16277 - DNA, 201 bp, Homo sapiens
acaggcaacctcccctgcggagctgggactagaatggctgtgttcacaggtgagcagctgggaaggggttaagatagtaattgtgtaagtcttccaggctwtctcccagttctgcgataatttgatgaagaacttcaccctaattaaatattcaaattaggaataagtgtcaatatggcttcccattgcctggaatgatga

SEQ ID NO: 16278 - DNA, 201 bp, Homo sapiens
ttgcattagtgaatgggactgattattatatagttaattagcatctggaaatgaggattatcttaattacaaagcacaatttccctaatagctacaaaackaagtttgatccatgtggaaattggtaacattattatgtaattagtgataacattaatagtgtagaatatttagatgtaatttgcatatgcaaatgtgatt

SEQ ID NO: 16279 - DNA, 201 bp, Homo sapiens
gcggcccaccctcgtctcgcagaagaggcctgcaggatggggccgtggggccctgaaggcctctcccgggactgcagcgcttcaggcctcgccatatgacktgggcactgtgctgggccctgcctctctcctcccgcagcgtttcagaagccagggctgcattcctcatcttcaggaaacagatgaggacgtggagcccct

SEQ ID NO: 16280 - DNA, 201 bp, Homo sapiens
ctgccaggccggcggcacccagaggctcgaaggccacaggggcacaccgtcttttctcagggttggagagagtagattagacaacatcctcagatgtcccrtctcatggcaggtcactgccactgtgaagggtacggctgtagatgcggggggactgcttgtttcttcaggctacattttttaaaaagagatcataccttt

SEQ ID NO: 16281 - DNA, 201 bp, Homo sapiens
actgcaaatggagccttttccacaagagggtaagtgaacccgtcacaggcttttaaggagagatggctaacctgaaactatcaggatgtccctccttttcrgcttctcggtggaggctggaagcagaaaggtctctggacctaccgtggtccagtcccatgtgtgcactcagcccttggccgtgtcctgagtccttcgggg

SEQ ID NO: 16282 - DNA, 201 bp, Homo sapiens
tatgtagttttaatctttataaccatgttgtgaggtgaataattgtgtcctcattttattttgttttggttttgtggggggtttttttttttgagacgaastcttgctctgtcacccaggctggcgtgttgagaagactgaagcttggagagatcatgattcatccaagggcagagagttaggatttagaggggctgtgag

SEQ ID NO: 16283 - DNA, 201 bp, Homo sapiens
agccgtggcggtggcggggaatgcggttctgagccggagctagtggcaggctctttcgccgcagagccctggcccaggccagccaggaggacctaggaagsggtgggtcacagatcttgctgccttcttgagtctgtattcctctccaaagccaaaaccatgtgctccgcctccatttcttgtgtcatcgctcagatttca

SEQ ID NO: 16284 - DNA, 201 bp, Homo sapiens
cacgtgctgtatagccatggggttgggatcactggccttaaggtcaaattccttctctgtcttggccagcaactcatttgaaacccaggagggtaggtgarttcttatattcttcattttcatataatttctttttccaatgagctataaagtaagaaatgggtagtttgggtatgagagaatagtgaggagtttttcagg

SEQ ID NO: 16285 - DNA, 201 bp, Homo sapiens
aaatcatgactcatctcaacccacaacgccttcccagtcatcagctgcctccaccccagcccccaaccttcccaggtgaggccttgtcggggtgtcttgcrttgtcctgtggtcttaggtccctgcacaacattttagaacaccaccacttagtgtctgctgaaatactgcaaagtacagctgaataattgtagaagcaat

SEQ ID NO: 16286 - DNA, 201 bp, Homo sapiens
gaggtcctgggccgacgccagcagagctcagcaagaatggcccagccagactctgggcctcactatatgacagcctagacttacgtgtaccccggacggcrtgcatgcctaaaaaacctaacctgagtctaatcgaggctttagctctgccagcctacaggaggcacaggggagtgacccgatttctccaacctgttagtg

SEQ ID NO: 16287 - DNA, 201 bp, Homo sapiens
ttttcaattcaggcttttgagtgtattttaaataccaggaaggtggcagggctaaagagtggacaagggcactgagatcttataatgagtccctgcaggtsccccagctcactgagcagcctgaggtacccaggagtgggctgaaggctgagtagaggcttcagttaaaaatgagtagaggccgaagaggcttcagttaaa

SEQ ID NO: 16288 - DNA, 201 bp, Homo sapiens
tcttgatgctttctacacattataaccctgtagaaacaatattatttgctattccggttttatagggatggaaactcaggcccagtttagtttaacttgcytaaggttgtacagtaagtgtcagagctggaattcaagctcgggtcccttggactccaaagggggcacccatcccattcctctgctctgcctgactttccc

SEQ ID NO: 16289 - DNA, 201 bp, Homo sapiens
atataaatggaatcatacagcgtgtggtcttttgtgaccagcttctctcacttagcatactgttttcaaggttggcccacgttgtaggatagatcattatktcattccttcttatcaccaaataatataacattatatggatataccacattttggttatccattcaactgatggatatctgagttgtttgtactttttgg

SEQ ID NO: 16290 - DNA, 201 bp, Homo sapiens
gtatgtgtgcacgagtgcatgtgtgcacatacgtgtgctaagactacgtgcttgcatgatgtcaggattctgagtggtggcacctgtctgactgggaaatwggagaaagtttgaggggaatggaagatgtgaccctggtgttttgttttgtttttttttgagacagactctcactctgtcacccaggctagagtgcagtgg

SEQ ID NO: 16291 - DNA, 201 bp, Homo sapiens
catataaatggaatcatacagcgtgtggtcttttgtgaccagcttctctcacttagcatactgttttcaaggttggcccacgttgtaggatagatcattaygtcattccttcttatcaccaaataatataacattatatggatataccacattttggttatccattcaactgatggatatctgagttgtttgtactttttg

SEQ ID NO: 16292 - DNA, 201 bp, Homo sapiens
ggctgggtttgtgtgtgtggtgtgcattggtgaggcctggccacaggttccctccttggggacaggcagtcccttgcctgtccttctgtcccttgcttgcratttgccagcagaaaggtgtcagtaatcccggggcaccagaggtgggcatgtattcctacagaccatcgctgccaatgggaaacaggcaaagaccctttc

SEQ ID NO: 16293 - DNA, 201 bp, Homo sapiens
tgtccagggcagagtgatggctgaccaactagatgcttgtccaaggatgctgaacaagtaaacagagagcatgttcacactgggcttcggggatgaggcasttctgcaaaatgggcacgtggagtgcactgctagtatcctaacaggagagatttgggatttgagcccatcattctttccttaactggctctgacgagaga

SEQ ID NO: 16294 - DNA, 201 bp, Homo sapiens
tttgatatttttaatcatatagtttagatttgacatctcagcaaactcaacttgatatatgtgtgtgtgtatatatatatatgaaacgaagtcttcctctrtcgcccaggctggagtgcagtggcacaatctcagctcactgcagcctccacctcctgggttcaagcgattctcctgcctcagcctcccaagtagctggga

SEQ ID NO: 16295 - DNA, 201 bp, Homo sapiens
acccaacttgtcaagcagaagacatttgagaaggatattgatgaatgcccatccatctgcggggcaggaaaacatgcctagttgttaatttctcaatgcakaaagcagtgatgacatggaaaagcaactgccatgaaaaaaaattatgatagattagaccaggcgactctgaaagcagctgatgtttgcaagttaggttaa

SEQ ID NO: 16296 - DNA, 201 bp, Homo sapiens
ttgttaaagtatattaacttttaaatgttttctcagtggcatacctgctagtagattccttttcctgtatctttcactaagacagttggctcccatcatgsctgctaagggtgagacgtggcacagagttgcaagagacaccagtggagacgatatgtagtcccatccctggcacaaagcagtgctcatgatgtggtcatg

SEQ ID NO: 16297 - DNA, 201 bp, Homo sapiens
cggtgtaggttgcacagacagcagatggtgtggatgctgacctctggaaagacggcttatttaaatccaaggttaccagatacctgtgtttcacaagatcrttttccaaagaaaatgtaagtctagtcgtagtttccatttgctgagtgagcacaagtaatttacattcctgtttggaatttcctcattttgttgttgttg

SEQ ID NO: 16298 - DNA, 201 bp, Homo sapiens
gaatcccgttgactgaagcacccagctggtcctggggccctagagcaggaggctgtgtcaccctcgccgcaggcagcgccccctcaggtggctcatcacasccagtggactcctttcttcaccccgcaccatccccccgagtaagtggtaatagccgcttaatgtactgacttacccaatcccttcttggtccattacgac

SEQ ID NO: 16299 - DNA, 201 bp, Homo sapiens
tacacgctgtaaacaagtcaactgatgatatttttaaattttcttaaataggtcatttcccacatttcaggttctttcctcaaatctcaaaaagggaagartaaatgctggtccttttgtcgcattacttcccctttcttaagtattaaatttgaatcatctggaatgtattattaagtgtttctcctagagaaggtgaca

SEQ ID NO: 16300 - DNA, 201 bp, Homo sapiens
attgaccagccttggagagcgggcgctctagaaggtgcttattaaaatgccagcaggtgcagcaaaggtccccttctctgtgactcccgcaccctgcttgygccaggtgttttataagagcctttttcttcattaaatggcattcattaagcacgtccttacacctggcacagaagctgtgcgtcacagatgacttcttcc

SEQ ID NO: 16301 - DNA, 201 bp, Homo sapiens
cctctttctgacaccattgaccagccttggagagcgggcgctctagaaggtgcttattaaaatgccagcaggtgcagcaaaggtccccttctctgtgactyccgcaccctgcttgtgccaggtgttttataagagcctttttcttcattaaatggcattcattaagcacgtccttacacctggcacagaagctgtgcgtca

SEQ ID NO: 16302 - DNA, 201 bp, Homo sapiens
aggcctgacatgctgatttctatgtactggcacttcagtttgggattacagcattaataacagagttccatgcatcatgccatttttaagcatgatcgttrtgataaagggcatatacttaattacaggcctgcttaattacagctctgttgaagctcgtttgtttaggagaatgctaattgcgccacagagccagcggca

SEQ ID NO: 16303 - DNA, 201 bp, Homo sapiens
catggaatttacagacccagactgaaggattaaaatgaaaacaggggtagcagagattggagcaccctccagtggccctcttccttcccaagattaatccyagtaggtgagttctcatttccacatcttcctgcctggcttttgcttggaattccctccctcattgtgctgtcaatctcttcccctcctctgtgtcttcct

SEQ ID NO: 16304 - DNA, 201 bp, Homo sapiens
gttgttagagaattatttacaacaaaagcactaggcccaaattgctttaaagtaacattctctcaaattaccaaggaacagttaatttttacatcgtacaractatcctaaagctttgaaaaaagattggacgcttcttcatttgttttacagagctaatttaccaaggtcagttttacaattgaccttgctaatgtaaat

SEQ ID NO: 16305 - DNA, 201 bp, Homo sapiens
tctgaacaaagtctttattttgtctttgtatttgaaggatgttttccttgggtatagaaatctaagttggcattttctttcagtactttaaagatgttgckacaaatacaaaaaattagctgggtgtgatggtgcacacctgtaatcccagcagctcaggaggttcaggtgggagaatcacccgagcccgggaagtcaagg

SEQ ID NO: 16306 - DNA, 201 bp, Homo sapiens
gtggtcaggctgttctttcctgttgctgtctgatccctcagcggtgctgcggagtgggcacaattatcctcatatgacagatgaaaatctgactctgaggytaagtgacttgcccaaagccatacggccaacaagcactgggcccagctcggcgttcacacgtgtctgactccggcgcctgtgctccgtcctcccgtgctg

SEQ ID NO: 16307 - DNA, 201 bp, Homo sapiens
cctcccgtgctgcctctcacgcgggggactcgggaggctccggcagtggctgataaatcactccttttggcttatgaataacatggcaaaacaaattactytggggatctagaaggaagttgttggccctgtgtaaactcaattggaatgtcactgagcagacagctctggaggcatctacaaatatcttccaaggaatat

SEQ ID NO: 16308 - DNA, 201 bp, Homo sapiens
gcatctctgcaagtactttgaggtactattacccgagttcacttaacaccgcttgacaactttaagcagataacaattgaggtgctggtaatagagtctgktttttttttttaatttttacatttttaccacatgactttatgactctctttatcaagcgtgttgaaattaatccatgtgttgattggagtatttcctcac

SEQ ID NO: 16309 - DNA, 201 bp, Homo sapiens
ggccctgcatcagagttcctgcctgaagggtgctttgcaccttcgggcatatctagaagagcaaaggcctgatgataataagcataggtttcagtggcagrcaaggagccactccccaggaggtctctctgataaccacctataggataaaaatccaaattctttgatttggctttcatgatttcagtgtatcttacagtc

SEQ ID NO: 16310 - DNA, 201 bp, Homo sapiens
tgcccctgcacgctgggaagccagccttgggctcggcctgtgcgggcagcacatgggccagctgccctgggagtctccacttccccttttttgctgctccygcctccccccatgtctctttctctcaacactatttatttctgaaactaattagacaaaagaaccttttttaaaaaaacaactggacctgtataatttata

SEQ ID NO: 16311 - DNA, 201 bp, Homo sapiens
ctttaagcagataacaattgaggtgctggtaatagagtctggtttttttttttaatttttacatttttaccacatgactttatgactctctttatcaagcrtgttgaaattaatccatgtgttgattggagtatttcctcacccctgctgtgtattgagacgttggggagggataagggttggcggctctgagcagctagg

SEQ ID NO: 16312 - DNA, 201 bp, Homo sapiens
cctttcctgtatcaattaatatgatcatgtgattttttttttcctttaaagcttgttaacatggtggattaaatagattggtttttgaatattaaaccagscttgcatccctggaataaatttcacttggtcatggtatataattctttttatttattgctgaattctctttgataacagattgttaagaattttttttgg

SEQ ID NO: 16313 - DNA, 201 bp, Homo sapiens
actttgggaagtcgggctgggaaagtcacttgaggccagaagttcaagaccagcctggacagcctggacagtgagacccccatctctacaaaaaataaaartctattttctagaagaacatagggagcatctgactatgcccctccttctgtcgtgaactctcagacggtggtggtctgtcctgaggctcccgtctctgtc

SEQ ID NO: 16314 - DNA, 201 bp, Homo sapiens
ttgtggttccacagccttggagcgtcctgcagacagtttctgtttttgaaagtttttcagaaattatgcatttattatagagagaccatgtaggttccctyattccctttgtttagagcatcttttatttttacattttagtgattctgaaattgggatgcatcttaaaatagatgcatgtgtttggatatggtgctgtgc

SEQ ID NO: 16315 - DNA, 201 bp, Homo sapiens
cctttcccagaggtaattatcgttaacagtttggtctgtatccctccaatccttttcccacaaatctgcaaatacctatttatagagagaggccctatagyttgatggtgaccttggttaagttactttacctcttagtgcctcagttgtcttgtctcaaaagtgaggattaatagcaggactttcctcatagaattgtgt

SEQ ID NO: 16316 - DNA, 201 bp, Homo sapiens
ggatggttggataggctccttgcctctgctgtgcccacgctgctcttattgagtttaagtggctcacagttgcccgctgtctggcctgggccaagtgtgtrtgtttccactgctgatgatctaacatacccagaggcctatgaacttcattcttgttcatcgtgtcagccagatatttcctttggaatgtctgcaggattt

SEQ ID NO: 16317 - DNA, 201 bp, Homo sapiens
tttgtctcagggaacaggtttatgtttttcatttcttttgctaaaaaaaagagacatttcagctaaaggtataagaaaatgatgcaaataaaatcagaacygaaaaactgagagttcctgacctcttcactggattagtcaaatgcctcttcctttcactttatatttgtagaaagcatcttgagcacaccacctgttagg

SEQ ID NO: 16318 - DNA, 201 bp, Homo sapiens
tagaattgctgggtcatatgctaactctatgtctaacattttgaggaacttccagactgttttccaaagtggctgcaccctgttacaatcccaccagaagygcagagggctcgcattcgtccacatccttgccaacatttggattgcctgtccttttaattgtcctgtccttttaactaccatagtggttctgaagtggta

SEQ ID NO: 16319 - DNA, 201 bp, Homo sapiens
aattatgttgtgtgtgaataaaaacaattttacttcttcctttccagtctgtatgcctcttatttctttttgttgcctccctgaactggctagagcatccrgtacactattgagtagaagtagtgaaatcaagcattcttgccttttcccacatcttagggggaaagcattcggtgtttcaccatttaaatatggcatttg

SEQ ID NO: 16320 - DNA, 201 bp, Homo sapiens
ttctggaataaatcccccatggacataataaattgtccttttaatatattgttagattcaattttctaaaattttgttaagaaattttatgtgtatgttcrtaaggaatatggattggtctgtggttttcttataatatctggttttagtattagggtaatactggtctcatatactgagttgagaagtgttcctttcttg

SEQ ID NO: 16321 - DNA, 201 bp, Homo sapiens
atatcattttttatatatagctgtccaattgttctagtaccctttctttaaaaatcatctgttcttcattgaattactttggcacttatgtcaaaaatcarctgatcgtagatgtataggcacattgctagactctgttttattccattgatctataagtctgcctgtatgccaaacccatactctttgattactgtagct

SEQ ID NO: 16322 - DNA, 201 bp, Homo sapiens
accttcctccatgagtaaaagctccctaaggccccccagaagccaagcagatgccggtgccatgcttgtataggctgtagaaccatgagccaattaaaccycttgtctttataaattacctagtttcaggtattccctgagactagcaatgcaagaatggcctaatacaagccatcactcccccaaccccacttctaggaa

SEQ ID NO: 16323 - DNA, 201 bp, Homo sapiens
agttgattcatttggaaagtggtagggaacaggcagtgttctggtacttccttctgtttgctaaaacttcctaattccctatttaaaaagccttctaatamtgaaacgtcaattaattggatggttgaaaaaagacgaggcgcttgctttaatttttctttcttttttttcagttaaactttttattttgagacaatggta

SEQ ID NO: 16324 - DNA, 201 bp, Homo sapiens
ggtgactcatcttttggaatcacctggtggctctaaggaggaagaagtctggggccctctcaatagcctttcccaggtggctgtcccctgaggggtcaccycccagcctgagctccaaagcttccatccccaattctctgggctctcttgagggtgctcaggtcctggggatcttggtcccactaatgaaggtcagaagat

SEQ ID NO: 16325 - DNA, 201 bp, Homo sapiens
cctattctggatattccatataaatggaatcatataagatgtgaccttttttgtttggcttctttcacttagagtcatgttttcaaggtttttagaatatrttttaatgtctgctagaactatttccttccttctcctctttttcaaaattgttttggttactaccacatgttattttttctaaaagaactttagattcaa

SEQ ID NO: 16326 - DNA, 201 bp, Homo sapiens
attaaaaggctgtttgcaggagggattatgcaaatcaggaagaggagatgtggctggagatgaggattgtggctggtgagcagtattgaaaggtggagacyactgaagaagagaagagtccatgagatgtctccaggaaggggagatgagactggaaggaaggatctgttctggttcttgaagtaggcagacatccaggga

SEQ ID NO: 16327 - DNA, 201 bp, Homo sapiens
agcttgttaacatggtggattaaatagattggtttttgaatattaaaccagccttgcatccctggaataaatttcacttggtcatggtatataattctttytatttattgctgaattctctttgataacagattgttaagaattttttttggctgttacagatgtctgaaaaagaaagaaaaaaatgttgtgtttgtattt

SEQ ID NO: 16328 - DNA, 201 bp, Homo sapiens
tggcaagaatgggttgaatgttgggaggtgggggagtagggaggaaggggaaggatgagagtgccacaggatgtcttgctggccatgggtagatgctgggsttctctgctgggacaggagcagagacagccaggtcgggtggaggcgggagggagactcttgggtcagttttgaacaccttgagtttgagctgcttgtatg

SEQ ID NO: 16329 - DNA, 201 bp, Homo sapiens
ggacatgtcttcttttccttgaaaatatacttttcttggtaaaaaaaaaaaaaaaaaatagcaacacagagaaagtgagacgaatcaaacactccagaacwttttaattttaaattgtttatctatccaccccattttttgagtacctactatgtgccagctaggagctggggagacagcgatgagcaaaacacacacagc

SEQ ID NO: 16330 - DNA, 201 bp, Homo sapiens
gatgactagtgtttgccaaaggtagtgcatgctgttttatcctgggtggatggtcagttttcgaagaattgtaatgctataagaagcacttccggctacartgcctgtgtgcagaatgtaacctttgatttacaagccactctgggatgttgcagtgtctaaagggcatcaagctggacattactgagaatcattgttggg

SEQ ID NO: 16331 - DNA, 201 bp, Homo sapiens
actttactggggaggtcaagtagcctgtactatccagagctttggggccactgctgcctacctttgtgaccccagcaagcaccgacttctcagagcctctrcttcccaatctctaaaatgatcggaagtgttacgagtgcccggcccatctcagcagcactaggaagggcatggaagtcaggtcaggcagatggtggtggg

SEQ ID NO: 16332 - DNA, 201 bp, Homo sapiens; identical to SEQ ID NO: 2559

SEQ ID NO: 16333 - DNA, 201 bp, Homo sapiens
ctgtgaagcagcatacacgcataggtacttagagttcacacacaggtctgcacgcgggatgtactgaacgagattgaggcccaaatgcgggacgtactgartgagattgtttggggccttcccctcaccccactttctggggaagtgttgcctgttcgggacttttgtcccatctcttccgtcagctcacagcaggttgcc

SEQ ID NO: 16334 - DNA, 201 bp, Homo sapiens; identical to SEQ ID NO: 2560

SEQ ID NO: 16335 - DNA, 201 bp, Homo sapiens
tcaccccactttctggggaagtgttgcctgttcgggacttttgtcccatctcttccgtcagctcacagcaggttgccagcaccacctgaaatgggagaagscctctgaccaggagtctctgtctaagtccagcagccacactgggcagcggcccttccaagagaggagggcgcggggaatgcagcgactgccgccacctgt

SEQ ID NO: 16336 - DNA, 201 bp, Homo sapiens
tgtttcaccatttaaatatggcatttgctgtggattttgaaatagatactatttaacagaaagtacccttccagagggtttttaaatcatacatggatatygaatttcatcacatgctttatctgcttttattgaaattatcatatggattttctctttttaattttaattttttttttttttatggagacagggtctcac

SEQ ID NO: 16337 - DNA, 201 bp, Homo sapiens
ttttcttataatatctggttttagtattagggtaatactggtctcatatactgagttgagaagtgttcctttcttgcctgttttctgaaatatttaatgtwtatttggtattatttattctgtaaatatttgcagattttaccagtgaggctctctgggcctggatgtgggaaggtttttaaacaacagttcaatttttta

SEQ ID NO: 16338 - DNA, 201 bp, Homo sapiens
cagaacacttatttctgtgtttgcaacattccttgcttctttgcaaagctctgcgtgctgaaggcctaaccttggctgtgggtttggaagtctaggcctcygtaggagagattgcaagggagagagaggaaaggtgttgttaagcttagccgtgtctgacatgtcttcagagcagctactggtatctgttcagaaatcaag

SEQ ID NO: 16339 - DNA, 201 bp, Homo sapiens
agtacttaggttcatttacatatggtgttgcctcttttatttgctttctggtgcactgccactccagctgcccagacccagtgctctctatattctacctktctcctctggtcacatcaagaggcagtcagcagcagaataataattccattttccctccctttctctcaaagtgcccagcaagaattatgatcattgtta

SEQ ID NO: 16340 - DNA, 201 bp, Homo sapiens
agcttattttcagaagaattaggtaaagcataactttgttaagctttgttgtaaacagaagaggagactgcagctgtgccaggcacttcctagccttgatsgaggactcagctccattgcattgacaagtctgtttccggagctttttgtgggttccactgacttcatgggagacttgcatacagcattttgattgttcct

SEQ ID NO: 16341 - DNA, 201 bp, Homo sapiens
gggcccactgcccagggcacctgctttgaaggcagcgccccctgccccctgcagttgttgctccctgaaagcactttaaactcctcggcccacaccccgcygctggaagagccttggtggagagaggtctgagctttgttagttgggttttgatttcagtacaggagttgataaaacgagataaaccccaggctcaggagg

SEQ ID NO: 16342 - DNA, 201 bp, Homo sapiens
ataatactccattgaatatgtggaccatattttgttcattcatccatagatggatgcttgggttgcttctgtcttttggctattgtgaataatgttgctcygaacatgggtctacaattctctttgagaccccgatttaaattcttttgtgtagatacccagaagtggaattgctggatcatatggtaattctatttataa

SEQ ID NO: 16343 - DNA, 201 bp, Homo sapiens
tgtgggcctggagcccaggggttgcacatagtagctttgtggctcatacttcccttaggactggagggccatcttgttggacctgtggcaggagtcaacaygagtttgttctttctttctttacacacacacacacacacacacatacacacacacttaaaaaaaacagattctaatcagcagagcagaatattcaaaaga

SEQ ID NO: 16344 - DNA, 201 bp, Homo sapiens
cagcgagacgggaggagcaggggctgggacaagagctgaggcatggcaccaggggacatcacatcctcagaggcaggcaccagggaacggggtagacccargagcatcttttgtcctctttgttaccaacacacaactgttctaaatcagcagcccttctcaccatgaaagatgagactcttctgttccctgcccctcaac

SEQ ID NO: 16345 - DNA, 201 bp, Homo sapiens
cacgtgggtgcagaccaacgtgcacctgccccaggggcatcactgcctctgtgacctgggcacagcagagaggacacctaaaccctcaggcacctgtctgsaaggtgacatgcccagcctgggtacccgagacccagagcacccatccaggaacatggtgggcacgtcgagcaccctacagtgactccaacaccagcgaga

SEQ ID NO: 16346 - DNA, 201 bp, Homo sapiens
ctgggcacagactgggaacagtcaatcgtttgaccggcctggcctggggtcctgctctctctggtcacgtgggtgcagaccaacgtgcacctgccccaggrgcatcactgcctctgtgacctgggcacagcagagaggacacctaaaccctcaggcacctgtctgcaaggtgacatgcccagcctgggtacccgagaccca

SEQ ID NO: 16347 - DNA, 201 bp, Homo sapiens
ggagggcgcggggaatgcagcgactgccgccacctgtgctgtgtctttttcttcatgctgatccaagaaggtttcgtttctttccttccctaaaataaagygtgagcagagttctatgatgttttatccctgtatgaacgtagcatgagccattcggcttttcttgctgattgggaggatccgttccaggttttttcttct

SEQ ID NO: 16348 - DNA, 201 bp, Homo sapiens
tccctgctgacatcatgtggtctagaagggcccagaaatgggcaccacctcaggcaggttttgactttctgtggttaaagaaagaacaccagttctctcakataaagcagagagagctctcagaagcctgctggtgactgtgagagcaaagtcacttgcacctgaagcaagacagccgagaacaccgagccaccggcagcc

SEQ ID NO: 16349 - DNA, 201 bp, Homo sapiens
ctcttcaccagggtctccccaagagtcgtggtacctgatgcacttgggtgaaatttcatgaaaaatgcccaaggacggtcatgttttaaagttagaatcartggatgcgccattgagcaaattttgaaggaaaggatctgtggaaagacagaaaacctctcacgattcagacatgctccatgatggcgcgggtggctgaaa

SEQ ID NO: 16350 - DNA, 201 bp, Homo sapiens
ggtacctgatgcacttgggtgaaatttcatgaaaaatgcccaaggacggtcatgttttaaagttagaatcagtggatgcgccattgagcaaattttgaagraaaggatctgtggaaagacagaaaacctctcacgattcagacatgctccatgatggcgcgggtggctgaaaatgaaggaagccgtgattcatagagaaat

SEQ ID NO: 16351 - DNA, 201 bp, Homo sapiens
gtgcttaaaggaaggtgtgcaaggttgattcatgctctcagagggaggctgagtcagaaaacagaccaagccctgaccagcgattcacagagcagtctggraagaaataggaagaaagcaccgccctctcctagccttcttctcctcctcctctcccatctcctttgcactctctcccacaaagcctggtctttcatggga

SEQ ID NO: 16352 - DNA, 201 bp, Homo sapiens
caccatccccccgagtaagtggtaatagccgcttaatgtactgacttacccaatcccttcttggtccattacgacaaaagttgctcttttctcattagaaycatttttgtcagggtgtctttaatcaatggcttccccagggacagtatttttagaagttgtgtttttcacaccctcccttttggaaaatctcatcccagt

SEQ ID NO: 16353 - DNA, 201 bp, Homo sapiens
tcttcccttctaatatttatatttcttatttatttttcttatcttattgcattggctttattctatagccattatagcaggcatccttttgactgacttamatgagaatacctttagtgtttcaccattaaatatgtttgttgatggcttctgataaactttgtcatgttaaaagtttaaactttcttcctataatagttt

SEQ ID NO: 16354 - DNA, 201 bp, Homo sapiens
tgtggatgctgacctctggaaagacggcttatttaaatccaaggttaccagatacctgtgtttcacaagatcattttccaaagaaaatgtaagtctagtcrtagtttccatttgctgagtgagcacaagtaatttacattcctgtttggaatttcctcattttgttgttgttgtggtttattttcattgccatattaattt

SEQ ID NO: 16355 - DNA, 201 bp, Homo sapiens
tggatgcgccattgagcaaattttgaaggaaaggatctgtggaaagacagaaaacctctcacgattcagacatgctccatgatggcgcgggtggctgaaartgaaggaagccgtgattcatagagaaattccaactcaaacgccgtcaccctgctggctccccatgacagagcagtggccttctgcctggccatcttccag

SEQ ID NO: 16356 - DNA, 201 bp, Homo sapiens
cagaaaacctctcacgattcagacatgctccatgatggcgcgggtggctgaaaatgaaggaagccgtgattcatagagaaattccaactcaaacgccgtcmccctgctggctccccatgacagagcagtggccttctgcctggccatcttccagcagccatgtgctcctgccacctccgtcacctcgcacccagagcaggg

SEQ ID NO: 16357 - DNA, 201 bp, Homo sapiens
cctccgtcacctcgcacccagagcaggggctttgctgtcctcccagggcccgcatacatgagtcccaggcatgaggaagtgaatttttacctcatcgtccstcagccagggaggtgaccaggggctggtcagtggcagcctcgtggccaccgtgggcagttttcttgtcccggccccacctgtccgtgccttgtcccctcc

SEQ ID NO: 16358 - DNA, 201 bp, Homo sapiens
ggacagtatttttagaagttgtgtttttcacaccctcccttttggaaaatctcatcccagtgcctagtgaaatgagctaatgagatgccgggagatcccargctggtgttaattggaacaggcgtggaagaagtggcccacgcgcaccttcagttccttcctgccttacctgcgatccttttctctgtctctccggtgtag

SEQ ID NO: 16359 - DNA, 201 bp, Homo sapiens
gagctaatgagatgccgggagatcccaggctggtgttaattggaacaggcgtggaagaagtggcccacgcgcaccttcagttccttcctgccttacctgcratccttttctctgtctctccggtgtaggttgcacagacagcagatggtgtggatgctgacctctggaaagacggcttatttaaatccaaggttaccagat

SEQ ID NO: 16360 - DNA, 201 bp, Homo sapiens
gattctggtatctctggaaaactcataccttttctattgtcctttccttcagaggaagtggcttttaggaagaagaggctgtgcattaaatttattccackggattcaacggaagctgcgatttgtgacattcggatcatgggccggaccaagcaggccccgcctcagtacacgtttattgggtgagtcttaataacagga

SEQ ID NO: 16361 - DNA, 201 bp, Homo sapiens
accacgctggatgctttcatacgtgtgtctcttctactctcccaaccacattgagaagtgttcccctagtttttgccatctttttttctgattaaaagaawtaatttctcatccaaaaaaattaacacttaaaacatatggaagagcagtggggagaatccacactcccatcttagaggcttctgtcgtcaataccgtgag

SEQ ID NO: 16362 - DNA, 201 bp, Homo sapiens; identical to SEQ ID NO: 2583

SEQ ID NO: 16363 - DNA, 201 bp, Homo sapiens
atgctgcctgcccgtgtgcctttcactttgtgccatcttggcggtgaatgggtttaagcatttttacccttggaaggctttgcccgagtgagatggcaggygaagccctgatactgcccggacggacagtgtgtcaggcctgggcggggctgcggggtctgagccccgcacatagctgggccacaagaccctcgcgggccc

SEQ ID NO: 16364 - DNA, 201 bp, Homo sapiens; identical to SEQ ID NO: 2587

SEQ ID NO: 16365 - DNA, 201 bp, Homo sapiens
gtgtcactgctgcggggaggccgtttgctgtggggatggcaccatgtggccctgtgcttgtggctgtgtgcttgcgggcccagccccttggtgccagtccrctgccctccaggacaccttgggtcatagtcagcagagctgaccttcagactggggctgacaaatgaacgcttgtgaagtaacctgagaaaggggttcgct

SEQ ID NO: 16366 - DNA, 201 bp, Homo sapiens
ttgcgggcccagccccttggtgccagtccgctgccctccaggacaccttgggtcatagtcagcagagctgaccttcagactggggctgacaaatgaacgcytgtgaagtaacctgagaaaggggttcgctggtggcctttgagttggaagaaagaattctgtgagcatcctagaggccaaagatagcgcaggtgggactcg

SEQ ID NO: 16367 - DNA, 201 bp, Homo sapiens
tgatgtggccgaccttgcaccaccagtctgttagttctgacctccctgcttgggtggtggacttgtccttgctgtgacagagccagccctgtggggtgctytggggcttagcattggggggaggcggtgggagtgggcggctcagggtccgaggagaagagggacattgtcgataaaggactgaggactgtgaggggtctg

SEQ ID NO: 16368 - DNA, 201 bp, Homo sapiens
tccgctgccctccaggacaccttgggtcatagtcagcagagctgaccttcagactggggctgacaaatgaacgcttgtgaagtaacctgagaaaggggttygctggtggcctttgagttggaagaaagaattctgtgagcatcctagaggccaaagatagcgcaggtgggactcgcggttgataggtaggattttaaaagt

SEQ ID NO: 16369 - DNA, 201 bp, Homo sapiens
gctggtgtgcgtggctaggccacccttcggggcggcgaggggtggtggtgctggcactgatggtggtggccgacctcactcagatgtcgcacgtgggggayggggagcgggtcccacctcctgtccctgcctggctgtcagcgcccgccgtgtgtcacctgtccgtttttattgcagatgacgacaacccccccgtgtctt

SEQ ID NO: 16370 - DNA, 201 bp, Homo sapiens
ttaaaagtctttttttcttacgaaagtcacgtttgctcataaaaaaacacaaaaacaggttgggtgccatgtctcccacctgtaattccagcactttgggyggctgaggcaggaggatcccatgagactaggagtttgagaccatcctggacaacatagtgagatcctgtctctatacaaaaagcaaaaattagccaggcg

SEQ ID NO: 16371 - DNA, 201 bp, Homo sapiens; identical to SEQ ID NO: 2589

SEQ ID NO: 16372 - DNA, 201 bp, Homo sapiens; identical to SEQ ID NO: 2591

SEQ ID NO: 16373 - DNA, 201 bp, Homo sapiens; identical to SEQ ID NO: 2592

SEQ ID NO: 16374 - DNA, 201 bp, Homo sapiens
tttaaaatatagtttgtttcttggctccctgttctgcatctcgctcaacagactgcctctgtcaccgggtccctccacccttgtctcctgtgcggccagcrtcagagccatggcgacggaggagaagaagcccgagaccgaggccgccagagcacagccaaccccttcgtcatccgccactcagagcaaggtgcgtgccca

SEQ ID NO: 16375 - DNA, 201 bp, Homo sapiens; identical to SEQ ID NO: 2597

SEQ ID NO: 16376 - DNA, 201 bp, Homo sapiens; identical to SEQ ID NO: 2596

SEQ ID NO: 16377 - DNA, 201 bp, Homo sapiens; identical to SEQ ID NO: 2598

SEQ ID NO: 16378 - DNA, 201 bp, Homo sapiens; identical to SEQ ID NO: 2599

SEQ ID NO: 16379 - DNA, 201 bp, Homo sapiens; identical to SEQ ID NO: 2600

SEQ ID NO: 16380 - DNA, 201 bp, Homo sapiens
gttgggcattcgccagcctcatccatcccctgtgaggcaggtgattcctgagagtgcccatggcctggtgccccaggaggcctgtattcgtaaagtcctgktgtcaaggggcccccgggcctatgggcttgaggtgtcaagaacctgctcacggctggtgtgcgtggctaggccacccttcggggcggcgaggggtggtgg

SEQ ID NO: 16381 - DNA, 201 bp, Homo sapiens; identical to SEQ ID NO: 2601

SEQ ID NO: 16382 - DNA, 201 bp, Homo sapiens
aggcagagctgcctctggcttgctctcatctctgtgttttgtggctcctcactgagtgcgcgagccctgtgagctgttagcatgctggaaggcagcctcgkgccagcagcctgtgcatggaggcactggagcccccccatgaggcgtagaccactgggtgcccgtgcttgtgttttcaaacgtggctgtgaacgtgattgc

SEQ ID NO: 16383 - DNA, 201 bp, Homo sapiens
gtgactttgtatctgaatccagttcaatagtgaactttgaagcttatcccaacgattcgagaccacaggcgggagggagctccctggttcatgtctttggktttagcatgagcttgctacctaagccttgattgctggtcccagaggaagaccacagagggcaactcactggtgaatgttgatgccaggattccagaggaa

SEQ ID NO: 16384 - DNA, 201 bp, Homo sapiens
tctgcttacgcttttttgttctctttgcttcgaagtcgcatctgggacaccgcctcaggccagtgcctgaagacgctcatcggtgagtgtggctctgtgtrggggctgggtctgtggggagggcctcccctgctgggttcactgcccctgttcttcaccagctcctcctccctcctctgccctgggtccgcccctgcagga
